United States Patent Application Publication US 2006/0134663 A1 - sequence listing, part 95

SEQ ID NO: 274864 - DNA, 1703 bp, Homo Sapiens; identical to SEQ ID NO: 250221
  misc_feature (1082)..(1082): n is a, c, g, or t
  misc_feature (1084)..(1084): n is a, c, g, or t
  misc_feature (1160)..(1160): n is a, c, g, or t
  misc_feature (1162)..(1162): n is a, c, g, or t
  misc_feature (1167)..(1167): n is a, c, g, or t
  misc_feature (1178)..(1178): n is a, c, g, or t
  misc_feature (1187)..(1187): n is a, c, g, or t
  misc_feature (1189)..(1189): n is a, c, g, or t
  misc_feature (1194)..(1196): n is a, c, g, or t
  misc_feature (1198)..(1198): n is a, c, g, or t
  misc_feature (1200)..(1202): n is a, c, g, or t
  misc_feature (1207)..(1211): n is a, c, g, or t
  misc_feature (1216)..(1216): n is a, c, g, or t
  misc_feature (1219)..(1220): n is a, c, g, or t
  misc_feature (1222)..(1222): n is a, c, g, or t
  misc_feature (1230)..(1230): n is a, c, g, or t
  misc_feature (1274)..(1274): n is a, c, g, or t
  misc_feature (1279)..(1279): n is a, c, g, or t
  misc_feature (1295)..(1295): n is a, c, g, or t
  misc_feature (1298)..(1298): n is a, c, g, or t
  misc_feature (1303)..(1305): n is a, c, g, or t
  misc_feature (1307)..(1307): n is a, c, g, or t
  misc_feature (1315)..(1316): n is a, c, g, or t
  misc_feature (1320)..(1321): n is a, c, g, or t
  misc_feature (1328)..(1328): n is a, c, g, or t
  misc_feature (1353)..(1353): n is a, c, g, or t
  misc_feature (1493)..(1493): n is a, c, g, or t
  misc_feature (1585)..(1585): n is a, c, g, or t
  misc_feature (1602)..(1602): n is a, c, g, or t
  misc_feature (1676)..(1676): n is a, c, g, or t

SEQ ID NO: 274865 - DNA, 1448 bp, Homo Sapiens; identical to SEQ ID NO: 250222
  misc_feature (246)..(306): n is a, c, g, or t
  misc_feature (464)..(464): n is a, c, g, or t
  misc_feature (572)..(572): n is a, c, g, or t
  misc_feature (591)..(591): n is a, c, g, or t
  misc_feature (597)..(597): n is a, c, g, or t
  misc_feature (599)..(599): n is a, c, g, or t
  misc_feature (604)..(605): n is a, c, g, or t
  misc_feature (607)..(607): n is a, c, g, or t
  misc_feature (613)..(613): n is a, c, g, or t
  misc_feature (621)..(621): n is a, c, g, or t
  misc_feature (643)..(643): n is a, c, g, or t
  misc_feature (661)..(661): n is a, c, g, or t
  misc_feature (677)..(677): n is a, c, g, or t
  misc_feature (680)..(681): n is a, c, g, or t
  misc_feature (694)..(694): n is a, c, g, or t
  misc_feature (711)..(711): n is a, c, g, or t
  misc_feature (730)..(730): n is a, c, g, or t
  misc_feature (735)..(736): n is a, c, g, or t
  misc_feature (746)..(746): n is a, c, g, or t
  misc_feature (771)..(771): n is a, c, g, or t
  misc_feature (774)..(774): n is a, c, g, or t
  misc_feature (780)..(780): n is a, c, g, or t
  misc_feature (804)..(804): n is a, c, g, or t
  misc_feature (814)..(814): n is a, c, g, or t
  misc_feature (818)..(818): n is a, c, g, or t
  misc_feature (828)..(828): n is a, c, g, or t
  misc_feature (848)..(848): n is a, c, g, or t
  misc_feature (851)..(851): n is a, c, g, or t
  misc_feature (856)..(856): n is a, c, g, or t
  misc_feature (858)..(858): n is a, c, g, or t
  misc_feature (875)..(875): n is a, c, g, or t
  misc_feature (893)..(1161): n is a, c, g, or t
  misc_feature (1208)..(1208): n is a, c, g, or t
  misc_feature (1241)..(1241): n is a, c, g, or t
  misc_feature (1243)..(1243): n is a, c, g, or t
  misc_feature (1245)..(1245): n is a, c, g, or t
  misc_feature (1247)..(1247): n is a, c, g, or t
  misc_feature (1251)..(1251): n is a, c, g, or t
  misc_feature (1255)..(1255): n is a, c, g, or t
  misc_feature (1258)..(1258): n is a, c, g, or t
  misc_feature (1267)..(1267): n is a, c, g, or t
  misc_feature (1279)..(1279): n is a, c, g, or t

SEQ ID NO: 274866 - DNA, 883 bp, Homo Sapiens; identical to SEQ ID NO: 250231
  misc_feature (64)..(107): n is a, c, g, or t
  misc_feature (681)..(681): n is a, c, g, or t
  misc_feature (752)..(752): n is a, c, g, or t

SEQ ID NO: 274867 - DNA, 977 bp, Homo Sapiens; identical to SEQ ID NO: 250232

SEQ ID NO: 274868 - DNA, 583 bp, Homo Sapiens; identical to SEQ ID NO: 250233
  misc_feature (30)..(30): n is a, c, g, or t
  misc_feature (149)..(149): n is a, c, g, or t
  misc_feature (433)..(481): n is a, c, g, or t

SEQ ID NO: 274869 - DNA, 719 bp, Homo Sapiens; identical to SEQ ID NO: 250234

SEQ ID NO: 274870 - DNA, 597 bp, Homo Sapiens; identical to SEQ ID NO: 250236

SEQ ID NO: 274871 - DNA, 393 bp, Homo Sapiens; identical to SEQ ID NO: 250237
  misc_feature (21)..(21): n is a, c, g, or t
  misc_feature (44)..(44): n is a, c, g, or t
  misc_feature (110)..(110): n is a, c, g, or t

SEQ ID NO: 274872 - DNA, 966 bp, Homo Sapiens; identical to SEQ ID NO: 250240

SEQ ID NO: 274873 - DNA, 975 bp, Homo Sapiens; identical to SEQ ID NO: 250241
  misc_feature (923)..(923): n is a, c, g, or t
  misc_feature (940)..(940): n is a, c, g, or t

SEQ ID NO: 274874 - DNA, 1258 bp, Homo Sapiens; identical to SEQ ID NO: 250242
  misc_feature (114)..(114): n is a, c, g, or t

SEQ ID NO: 274875 - DNA, 512 bp, Homo Sapiens; identical to SEQ ID NO: 250243
  misc_feature (50)..(50): n is a, c, g, or t
  misc_feature (133)..(133): n is a, c, g, or t

SEQ ID NO: 274876 - DNA, 508 bp, Homo Sapiens; identical to SEQ ID NO: 250244
  misc_feature (484)..(484): n is a, c, g, or t

SEQ ID NO: 274877 - DNA, 642 bp, Homo Sapiens; identical to SEQ ID NO: 250249
  misc_feature (477)..(477): n is a, c, g, or t
  misc_feature (494)..(494): n is a, c, g, or t
  misc_feature (505)..(527): n is a, c, g, or t

SEQ ID NO: 274878 - DNA, 857 bp, Homo Sapiens; identical to SEQ ID NO: 250250
  misc_feature (828)..(828): n is a, c, g, or t
  misc_feature (845)..(845): n is a, c, g, or t

SEQ ID NO: 274879 - DNA, 602 bp, Homo Sapiens; identical to SEQ ID NO: 250251
  misc_feature (527)..(527): n is a, c, g, or t
  misc_feature (551)..(551): n is a, c, g, or t
  misc_feature (559)..(559): n is a, c, g, or t

SEQ ID NO: 274880 - DNA, 807 bp, Homo Sapiens; identical to SEQ ID NO: 15290
  misc_feature (526)..(550): n is a, c, g, or t
  misc_feature (620)..(648): n is a, c, g, or t
  misc_feature (674)..(702): n is a, c, g, or t

SEQ ID NO: 274881 - DNA, 838 bp, Homo Sapiens; identical to SEQ ID NO: 250253

SEQ ID NO: 274882 - DNA, 836 bp, Homo Sapiens; identical to SEQ ID NO: 15291

SEQ ID NO: 274883 - DNA, 1002 bp, Homo Sapiens; identical to SEQ ID NO: 250261

SEQ ID NO: 274884 - DNA, 1366 bp, Homo Sapiens; identical to SEQ ID NO: 250262
  misc_feature (1182)..(1182): n is a, c, g, or t

SEQ ID NO: 274885 - DNA, 925 bp, Homo Sapiens; identical to SEQ ID NO: 250263

SEQ ID NO: 274886 - DNA, 1198 bp, Homo Sapiens; identical to SEQ ID NO: 250266

SEQ ID NO: 274887 - DNA, 1000 bp, Homo Sapiens; identical to SEQ ID NO: 250267

SEQ ID NO: 274888 - DNA, 1803 bp, Homo Sapiens; identical to SEQ ID NO: 250268

SEQ ID NO: 274889 - DNA, 1127 bp, Homo Sapiens; identical to SEQ ID NO: 250269
  misc_feature (10)..(10): n is a, c, g, or t
  misc_feature (18)..(18): n is a, c, g, or t
  misc_feature (23)..(23): n is a, c, g, or t
  misc_feature (36)..(36): n is a, c, g, or t
  misc_feature (41)..(41): n is a, c, g, or t
  misc_feature (59)..(59): n is a, c, g, or t
  misc_feature (61)..(61): n is a, c, g, or t
  misc_feature (70)..(72): n is a, c, g, or t
  misc_feature (75)..(75): n is a, c, g, or t
  misc_feature (80)..(80): n is a, c, g, or t
  misc_feature (110)..(111): n is a, c, g, or t
  misc_feature (116)..(119): n is a, c, g, or t
  misc_feature (123)..(123): n is a, c, g, or t

SEQ ID NO: 274890 - DNA, 1089 bp, Homo Sapiens; identical to SEQ ID NO: 250270
  misc_feature (21)..(21): n is a, c, g, or t
  misc_feature (56)..(56): n is a, c, g, or t
  misc_feature (61)..(61): n is a, c, g, or t
  misc_feature (467)..(467): n is a, c, g, or t
  misc_feature (826)..(826): n is a, c, g, or t
  misc_feature (873)..(873): n is a, c, g, or t
  misc_feature (899)..(899): n is a, c, g, or t
  misc_feature (903)..(903): n is a, c, g, or t
  misc_feature (917)..(917): n is a, c, g, or t
  misc_feature (924)..(924): n is a, c, g, or t
  misc_feature (935)..(935): n is a, c, g, or t
  misc_feature (951)..(951): n is a, c, g, or t
  misc_feature (968)..(968): n is a, c, g, or t
  misc_feature (971)..(971): n is a, c, g, or t
  misc_feature (974)..(974): n is a, c, g, or t
  misc_feature (977)..(977): n is a, c, g, or t
  misc_feature (980)..(980): n is a, c, g, or t
  misc_feature (991)..(991): n is a, c, g, or t
  misc_feature (1011)..(1011): n is a, c, g, or t
  misc_feature (1023)..(1023): n is a, c, g, or t
  misc_feature (1029)..(1029): n is a, c, g, or t
  misc_feature (1034)..(1034): n is a, c, g, or t
  misc_feature (1044)..(1044): n is a, c, g, or t
  misc_feature (1051)..(1051): n is a, c, g, or t
  misc_feature (1057)..(1057): n is a, c, g, or t
  misc_feature (1060)..(1060): n is a, c, g, or t
  misc_feature (1066)..(1066): n is a, c, g, or t
  misc_feature (1071)..(1071): n is a, c, g, or t
  misc_feature (1075)..(1075): n is a, c, g, or t
  misc_feature (1086)..(1086): n is a, c, g, or t

SEQ ID NO: 274891 - DNA, 966 bp, Homo Sapiens; identical to SEQ ID NO: 250271

SEQ ID NO: 274892 - DNA, 897 bp, Homo Sapiens; identical to SEQ ID NO: 250274

SEQ ID NO: 274893 - DNA, 730 bp, Homo Sapiens; identical to SEQ ID NO: 250275
  misc_feature (264)..(454): n is a, c, g, or t
  misc_feature (526)..(559): n is a, c, g, or t

SEQ ID NO: 274894 - DNA, 572 bp, Homo Sapiens; identical to SEQ ID NO: 250292
  misc_feature (265)..(270): n is a, c, g, or t

SEQ ID NO: 274895 - DNA, 1963 bp, Homo Sapiens; identical to SEQ ID NO: 250293
  misc_feature (176)..(199): n is a, c, g, or t
  misc_feature (925)..(936): n is a, c, g, or t
  misc_feature (1492)..(1492): n is a, c, g, or t
  misc_feature (1817)..(1817): n is a, c, g, or t
  misc_feature (1861)..(1861): n is a, c, g, or t
  misc_feature (1872)..(1872): n is a, c, g, or t
  misc_feature (1907)..(1907): n is a, c, g, or t
  misc_feature (1950)..(1950): n is a, c, g, or t

SEQ ID NO: 274896 - DNA, 349 bp, Homo Sapiens; identical to SEQ ID NO: 250294

SEQ ID NO: 274897 - DNA, 373 bp, Homo Sapiens; identical to SEQ ID NO: 250295

SEQ ID NO: 274898 - DNA, 497 bp, Homo Sapiens; identical to SEQ ID NO: 250296
  misc_feature (247)..(248): n is a, c, g, or t
  misc_feature (252)..(252): n is a, c, g, or t

SEQ ID NO: 274899 - DNA, 511 bp, Homo Sapiens; identical to SEQ ID NO: 250297
  misc_feature (54)..(54): n is a, c, g, or t
  misc_feature (75)..(75): n is a, c, g, or t

SEQ ID NO: 274900 - DNA, 665 bp, Homo Sapiens; identical to SEQ ID NO: 250298

SEQ ID NO: 274901 - DNA, 1075 bp, Homo Sapiens; identical to SEQ ID NO: 250299
  misc_feature (11)..(11): n is a, c, g, or t
  misc_feature (17)..(17): n is a, c, g, or t
  misc_feature (26)..(26): n is a, c, g, or t
  misc_feature (32)..(32): n is a, c, g, or t
  misc_feature (60)..(60): n is a, c, g, or t
  misc_feature (74)..(74): n is a, c, g, or t

SEQ ID NO: 274902 - DNA, 2055 bp, Homo Sapiens; identical to SEQ ID NO: 250300
  misc_feature (1686)..(1686): n is a, c, g, or t
  misc_feature (1931)..(1931): n is a, c, g, or t
  misc_feature (1990)..(1990): n is a, c, g, or t
  misc_feature (1998)..(1998): n is a, c, g, or t
  misc_feature (2007)..(2007): n is a, c, g, or t
  misc_feature (2030)..(2030): n is a, c, g, or t
  misc_feature (2038)..(2038): n is a, c, g, or t

SEQ ID NO: 274903 - DNA, 413 bp, Homo Sapiens; identical to SEQ ID NO: 250301
  misc_feature (32)..(32): n is a, c, g, or t
  misc_feature (41)..(41): n is a, c, g, or t
  misc_feature (47)..(47): n is a, c, g, or t
  misc_feature (54)..(54): n is a, c, g, or t
  misc_feature (64)..(64): n is a, c, g, or t

SEQ ID NO: 274904 - DNA, 676 bp, Homo Sapiens; identical to SEQ ID NO: 250302
  misc_feature (375)..(389): n is a, c, g, or t

SEQ ID NO: 274905 - DNA, 1801 bp, Homo Sapiens; identical to SEQ ID NO: 250303
  misc_feature (982)..(996): n is a, c, g, or t
  misc_feature (1536)..(1549): n is a, c, g, or t
  misc_feature (1571)..(1571): n is a, c, g, or t
  misc_feature (1573)..(1577): n is a, c, g, or t
  misc_feature (1580)..(1593): n is a, c, g, or t
  misc_feature (1595)..(1617): n is a, c, g, or t
  misc_feature (1619)..(1620): n is a, c, g, or t
  misc_feature (1623)..(1624): n is a, c, g, or t
  misc_feature (1628)..(1634): n is a, c, g, or t
  misc_feature (1636)..(1644): n is a, c, g, or t
  misc_feature (1646)..(1652): n is a, c, g, or t

SEQ ID NO: 274906 - DNA, 382 bp, Homo Sapiens; identical to SEQ ID NO: 250304

SEQ ID NO: 274907 - DNA, 634 bp, Homo Sapiens; identical to SEQ ID NO: 250305

SEQ ID NO: 274908 - DNA, 773 bp, Homo Sapiens; identical to SEQ ID NO: 250306

SEQ ID NO: 274909 - DNA, 917 bp, Homo Sapiens; identical to SEQ ID NO: 250307

SEQ ID NO: 274910 - DNA, 537 bp, Homo Sapiens; identical to SEQ ID NO: 250308

SEQ ID NO: 274911 - DNA, 1967 bp, Homo Sapiens; identical to SEQ ID NO: 250309

SEQ ID NO: 274912 - DNA, 409 bp, Homo Sapiens; identical to SEQ ID NO: 250310
  misc_feature (20)..(20): n is a, c, g, or t
  misc_feature (26)..(26): n is a, c, g, or t
  misc_feature (60)..(60): n is a, c, g, or t
  misc_feature (115)..(115): n is a, c, g, or t
  misc_feature (207)..(207): n is a, c, g, or t

SEQ ID NO: 274913 - DNA, 423 bp, Homo Sapiens; identical to SEQ ID NO: 250311
  misc_feature (353)..(353): n is a, c, g, or t
  misc_feature (365)..(365): n is a, c, g, or t
  misc_feature (378)..(378): n is a, c, g, or t
  misc_feature (391)..(391): n is a, c, g, or t

SEQ ID NO: 274914 - DNA, 700 bp, Homo Sapiens; identical to SEQ ID NO: 250312
  misc_feature (449)..(523): n is a, c, g, or t

SEQ ID NO: 274915 - DNA, 964 bp, Homo Sapiens; identical to SEQ ID NO: 250314

SEQ ID NO: 274916 - DNA, 668 bp, Homo Sapiens; identical to SEQ ID NO: 250315

SEQ ID NO: 274917 - DNA, 1143 bp, Homo Sapiens; identical to SEQ ID NO: 250316

SEQ ID NO: 274918 - DNA, 1447 bp, Homo Sapiens; identical to SEQ ID NO: 250317
  misc_feature (1018)..(1018): n is a, c, g, or t
  misc_feature (1383)..(1383): n is a, c, g, or t

SEQ ID NO: 274919 - DNA, 1118 bp, Homo Sapiens; identical to SEQ ID NO: 250318

SEQ ID NO: 274920 - DNA, 341 bp, Homo Sapiens; identical to SEQ ID NO: 250319

SEQ ID NO: 274921 - DNA, 930 bp, Homo Sapiens; identical to SEQ ID NO: 250325
  misc_feature (494)..(536): n is a, c, g, or t
  misc_feature (554)..(610): n is a, c, g, or t
  misc_feature (686)..(703): n is a, c, g, or t

SEQ ID NO: 274922 - DNA, 447 bp, Homo Sapiens; identical to SEQ ID NO: 250326
  misc_feature (429)..(429): n is a, c, g, or t

SEQ ID NO: 274923 - DNA, 1250 bp, Homo Sapiens; identical to SEQ ID NO: 250327
  misc_feature (58)..(79): n is a, c, g, or t

SEQ ID NO: 274924 - DNA, 921 bp, Homo Sapiens; identical to SEQ ID NO: 250328
  misc_feature (12)..(12): n is a, c, g, or t
  misc_feature (49)..(49): n is a, c, g, or t
  misc_feature (64)..(64): n is a, c, g, or t
  misc_feature (76)..(76): n is a, c, g, or t
  misc_feature (112)..(112): n is a, c, g, or t
  misc_feature (119)..(119): n is a, c, g, or t
  misc_feature (162)..(162): n is a, c, g, or t
  misc_feature (216)..(255): n is a, c, g, or t
  misc_feature (727)..(735): n is a, c, g, or t
  misc_feature (793)..(814): n is a, c, g, or t

SEQ ID NO: 274925 - DNA, 1559 bp, Homo Sapiens; identical to SEQ ID NO: 250330
  misc_feature (223)..(363): n is a, c, g, or t
  misc_feature (1263)..(1263): n is a, c, g, or t
  misc_feature (1269)..(1269): n is a, c, g, or t
  misc_feature (1285)..(1285): n is a, c, g, or t
  misc_feature (1311)..(1311): n is a, c, g, or t
  misc_feature (1329)..(1329): n is a, c, g, or t
  misc_feature (1332)..(1332): n is a, c, g, or t
  misc_feature (1338)..(1338): n is a, c, g, or t
  misc_feature (1344)..(1364): n is a, c, g, or t
  misc_feature (1366)..(1366): n is a, c, g, or t
  misc_feature (1368)..(1368): n is a, c, g, or t
  misc_feature (1384)..(1384): n is a, c, g, or t
  misc_feature (1415)..(1415): n is a, c, g, or t
  misc_feature (1419)..(1419): n is a, c, g, or t
  misc_feature (1422)..(1422): n is a, c, g, or t
  misc_feature (1428)..(1428): n is a, c, g, or t
  misc_feature (1443)..(1443): n is a, c, g, or t
  misc_feature (1453)..(1455): n is a, c, g, or t
  misc_feature (1458)..(1459): n is a, c, g, or t
  misc_feature (1461)..(1461): n is a, c, g, or t
  misc_feature (1505)..(1505): n is a, c, g, or t
  misc_feature (1521)..(1522): n is a, c, g, or t

SEQ ID NO: 274926 - DNA, 1559 bp, Homo Sapiens; identical to SEQ ID NO: 250331
  misc_feature (198)..(198): n is a, c, g, or t
  misc_feature (300)..(300): n is a, c, g, or t

SEQ ID NO: 274927 - DNA, 911 bp, Homo Sapiens; identical to SEQ ID NO: 250332

SEQ ID NO: 274928 - DNA, 856 bp, Homo Sapiens; identical to SEQ ID NO: 250333
  misc_feature (775)..(783): n is a, c, g, or t

SEQ ID NO: 274929 - DNA, 1782 bp, Homo Sapiens; identical to SEQ ID NO: 250335
  misc_feature (42)..(42): n is a, c, g, or t
  misc_feature (62)..(62): n is a, c, g, or t
  misc_feature (87)..(87): n is a, c, g, or t
  misc_feature (94)..(94): n is a, c, g, or t
  misc_feature (129)..(129): n is a, c, g, or t
  misc_feature (143)..(143): n is a, c, g, or t
  misc_feature (145)..(145): n is a, c, g, or t
  misc_feature (164)..(164): n is a, c, g, or t
  misc_feature (170)..(170): n is a, c, g, or t
  misc_feature (177)..(177): n is a, c, g, or t
  misc_feature (180)..(180): n is a, c, g, or t
  misc_feature (186)..(186): n is a, c, g, or t
  misc_feature (229)..(229): n is a, c, g, or t
  misc_feature (254)..(254): n is a, c, g, or t
  misc_feature (278)..(278): n is a, c, g, or t
  misc_feature (290)..(290): n is a, c, g, or t
  misc_feature (377)..(377): n is a, c, g, or t
  misc_feature (553)..(553): n is a, c, g, or t
  misc_feature (556)..(556): n is a, c, g, or t
  misc_feature (574)..(574): n is a, c, g, or t
  misc_feature (581)..(581): n is a, c, g, or t
  misc_feature (583)..(583): n is a, c, g, or t
  misc_feature (585)..(585): n is a, c, g, or t
  misc_feature (620)..(620): n is a, c, g, or t
  misc_feature (622)..(622): n is a, c, g, or t
  misc_feature (626)..(626): n is a, c, g, or t
  misc_feature (628)..(628): n is a, c, g, or t
  misc_feature (630)..(630): n is a, c, g, or t
  misc_feature (632)..(632): n is a, c, g, or t
  misc_feature (637)..(637): n is a, c, g, or t
  misc_feature (657)..(657): n is a, c, g, or t
  misc_feature (662)..(663): n is a, c, g, or t
  misc_feature (666)..(666): n is a, c, g, or t
  misc_feature (670)..(671): n is a, c, g, or t
  misc_feature (676)..(676): n is a, c, g, or t
  misc_feature (686)..(686): n is a, c, g, or t
  misc_feature (695)..(695): n is a, c, g, or t
  misc_feature (706)..(707): n is a, c, g, or t
  misc_feature (1753)..(1753): n is a, c, g, or t

SEQ ID NO: 274930 - DNA, 1509 bp, Homo Sapiens; identical to SEQ ID NO: 250336

SEQ ID NO: 274931 - DNA, 476 bp, Homo Sapiens; identical to SEQ ID NO: 250337

SEQ ID NO: 274932 - DNA, 385 bp, Homo Sapiens; identical to SEQ ID NO: 250338
  misc_feature (35)..(35): n is a, c, g, or t
  misc_feature (54)..(54): n is a, c, g, or t
  misc_feature (61)..(61): n is a, c, g, or t

SEQ ID NO: 274933 - DNA, 429 bp, Homo Sapiens; identical to SEQ ID NO: 250339
  misc_feature (71)..(71): n is a, c, g, or t

SEQ ID NO: 274934 - DNA, 310 bp, Homo Sapiens; identical to SEQ ID NO: 250340
  misc_feature (45)..(45): n is a, c, g, or t
  misc_feature (58)..(58): n is a, c, g, or t
  misc_feature (224)..(224): n is a, c, g, or t
  misc_feature (228)..(228): n is a, c, g, or t

SEQ ID NO: 274935 - DNA, 449 bp, Homo Sapiens; identical to SEQ ID NO: 250341

SEQ ID NO: 274936 - DNA, 394 bp, Homo Sapiens; identical to SEQ ID NO: 250350

SEQ ID NO: 274937 - DNA, 544 bp, Homo Sapiens; identical to SEQ ID NO: 250351
  misc_feature (18)..(18): n is a, c, g, or t

SEQ ID NO: 274938 - DNA, 2307 bp, Homo Sapiens; identical to SEQ ID NO: 250352
  misc_feature (17)..(17): n is a, c, g, or t
  misc_feature (48)..(48): n is a, c, g, or t
  misc_feature (52)..(52): n is a, c, g, or t
  misc_feature (55)..(55): n is a, c, g, or t
  misc_feature (68)..(68): n is a, c, g, or t
  misc_feature (74)..(74): n is a, c, g, or t
  misc_feature (79)..(79): n is a, c, g, or t
  misc_feature (83)..(84): n is a, c, g, or t
  misc_feature (86)..(86): n is a, c, g, or t
  misc_feature (89)..(89): n is a, c, g, or t
  misc_feature (91)..(91): n is a, c, g, or t
  misc_feature (93)..(93): n is a, c, g, or t
  misc_feature (115)..(115): n is a, c, g, or t
  misc_feature (138)..(138): n is a, c, g, or t
  misc_feature (148)..(149): n is a, c, g, or t
  misc_feature (161)..(161): n is a, c, g, or t
  misc_feature (163)..(163): n is a, c, g, or t
  misc_feature (172)..(172): n is a, c, g, or t
  misc_feature (176)..(176): n is a, c, g, or t
  misc_feature (180)..(180): n is a, c, g, or t
  misc_feature (199)..(199): n is a, c, g, or t
  misc_feature (230)..(230): n is a, c, g, or t
  misc_feature (242)..(243): n is a, c, g, or t
  misc_feature (265)..(265): n is a, c, g, or t
  misc_feature (282)..(282): n is a, c, g, or t
  misc_feature (294)..(294): n is a, c, g, or t
  misc_feature (313)..(313): n is a, c, g, or t
  misc_feature (342)..(343): n is a, c, g, or t
  misc_feature (350)..(350): n is a, c, g, or t
  misc_feature (358)..(358): n is a, c, g, or t
  misc_feature (377)..(377): n is a, c, g, or t
  misc_feature (410)..(410): n is a, c, g, or t
  misc_feature (415)..(415): n is a, c, g, or t
  misc_feature (420)..(420): n is a, c, g, or t
  misc_feature (1684)..(1684): n is a, c, g, or t
  misc_feature (1813)..(1813): n is a, c, g, or t
  misc_feature (1815)..(1815): n is a, c, g, or t
  misc_feature (1839)..(1839): n is a, c, g, or t
  misc_feature (1865)..(1865): n is a, c, g, or t
  misc_feature (1872)..(1872): n is a, c, g, or t
  misc_feature (1884)..(1885): n is a, c, g, or t
  misc_feature (1918)..(1918): n is a, c, g, or t
  misc_feature (1920)..(1920): n is a, c, g, or t
  misc_feature (1924)..(1925): n is a, c, g, or t
  misc_feature (1928)..(1930): n is a, c, g, or t
  misc_feature (1936)..(1937): n is a, c, g, or t
  misc_feature (1952)..(1952): n is a, c, g, or t
  misc_feature (1956)..(1956): n is a, c, g, or t
  misc_feature (1984)..(1984): n is a, c, g, or t
  misc_feature (2031)..(2032): n is a, c, g, or t
  misc_feature (2039)..(2039): n is a, c, g, or t
  misc_feature (2050)..(2050): n is a, c, g, or t
  misc_feature (2060)..(2060): n is a, c, g, or t
  misc_feature (2066)..(2066): n is a, c, g, or t
  misc_feature (2069)..(2069): n is a, c, g, or t
  misc_feature (2079)..(2079): n is a, c, g, or t
  misc_feature (2091)..(2091): n is a, c, g, or t
  misc_feature (2104)..(2104): n is a, c, g, or t
  misc_feature (2131)..(2131): n is a, c, g, or t
  misc_feature (2151)..(2151): n is a, c, g, or t
  misc_feature (2163)..(2164): n is a, c, g, or t
  misc_feature (2169)..(2169): n is a, c, g, or t
  misc_feature (2203)..(2203): n is a, c, g, or t
  misc_feature (2278)..(2278): n is a, c, g, or t

SEQ ID NO: 274939 - DNA, 1040 bp, Homo Sapiens; identical to SEQ ID NO: 250353

SEQ ID NO: 274940 - DNA, 366 bp, Homo Sapiens; identical to SEQ ID NO: 250354

SEQ ID NO: 274941 - DNA, 745 bp, Homo Sapiens; identical to SEQ ID NO: 250355
  misc_feature (108)..(108): n is a, c, g, or t

SEQ ID NO: 274942 - DNA, 385 bp, Homo Sapiens; identical to SEQ ID NO: 250356

SEQ ID NO: 274943 - DNA, 704 bp, Homo Sapiens; identical to SEQ ID NO: 250357
  misc_feature (692)..(692): n is a, c, g, or t

SEQ ID NO: 274944 - DNA, 2219 bp, Homo Sapiens; identical to SEQ ID NO: 250358
  misc_feature (1398)..(1426): n is a, c, g, or t
  misc_feature (2034)..(2078): n is a, c, g, or t

SEQ ID NO: 274945 - DNA, 485 bp, Homo Sapiens; identical to SEQ ID NO: 250359
  misc_feature (26)..(26): n is a, c, g, or t
  misc_feature (48)..(48): n is a, c, g, or t

SEQ ID NO: 274946 - DNA, 1678 bp, Homo Sapiens; identical to SEQ ID NO: 250360
  misc_feature (1158)..(1448): n is a, c, g, or t

SEQ ID NO: 274947 - DNA, 1005 bp, Homo Sapiens; identical to SEQ ID NO: 250361
  misc_feature (15)..(15): n is a, c, g, or t
  misc_feature (284)..(574): n is a, c, g, or t
  misc_feature (923)..(923): n is a, c, g, or t

SEQ ID NO: 274948 - DNA, 1109 bp, Homo Sapiens; identical to SEQ ID NO: 250363
  misc_feature (138)..(138): n is a, c, g, or t
  misc_feature (440)..(440): n is a, c, g, or t
  misc_feature (475)..(475): n is a, c, g, or t
  misc_feature (494)..(494): n is a, c, g, or t
  misc_feature (821)..(821): n is a, c, g, or t
  misc_feature (823)..(823): n is a, c, g, or t

SEQ ID NO: 274949 - DNA, 631 bp, Homo Sapiens; identical to SEQ ID NO: 250364

SEQ ID NO: 274950 - DNA, 2942 bp, Homo Sapiens; identical to SEQ ID NO: 250366
  misc_feature (1974)..(1974): n is a, c, g, or t
  misc_feature (2798)..(2798): n is a, c, g, or t

SEQ ID NO: 274951 - DNA, 605 bp, Homo Sapiens; identical to SEQ ID NO: 250367

SEQ ID NO: 274952 - DNA, 2074 bp, Homo Sapiens; identical to SEQ ID NO: 250370

SEQ ID NO: 274953 - DNA, 1251 bp, Homo Sapiens; identical to SEQ ID NO: 250371

SEQ ID NO: 274954 - DNA, 1272 bp, Homo Sapiens; identical to SEQ ID NO: 250372
  misc_feature (1054)..(1054): n is a, c, g, or t
  misc_feature (1212)..(1212): n is a, c, g, or t
  misc_feature (1262)..(1262): n is a, c, g, or t

SEQ ID NO: 274955 - DNA, 344 bp, Homo Sapiens; identical to SEQ ID NO: 250373

SEQ ID NO: 274956 - DNA, 384 bp, Homo Sapiens; identical to SEQ ID NO: 250374

SEQ ID NO: 274957 - DNA, 1236 bp, Homo Sapiens; identical to SEQ ID NO: 250375
  misc_feature (33)..(33): n is a, c, g, or t
  misc_feature (50)..(50): n is a, c, g, or t

SEQ ID NO: 274958 - DNA, 783 bp, Homo Sapiens; identical to SEQ ID NO: 250376

SEQ ID NO: 274959 - DNA, 1548 bp, Homo Sapiens; identical to SEQ ID NO: 250377
  misc_feature (1488)..(1488): n is a, c, g, or t
  misc_feature (1514)..(1514): n is a, c, g, or t

SEQ ID NO: 274960 - DNA, 1341 bp, Homo Sapiens; identical to SEQ ID NO: 250378

SEQ ID NO: 274961 - DNA, 1180 bp, Homo Sapiens; identical to SEQ ID NO: 250379
  misc_feature (825)..(825): n is a, c, g, or t
  misc_feature (974)..(974): n is a, c, g, or t

SEQ ID NO: 274962 - DNA, 1709 bp, Homo Sapiens; identical to SEQ ID NO: 250380
  misc_feature (890)..(890): n is a, c, g, or t
  misc_feature (949)..(949): n is a, c, g, or t
  misc_feature (1156)..(1183): n is a, c, g, or t
  misc_feature (1194)..(1194): n is a, c, g, or t
  misc_feature (1202)..(1202): n is a, c, g, or t
  misc_feature (1205)..(1205): n is a, c, g, or t
  misc_feature (1223)..(1223): n is a, c, g, or t
  misc_feature (1235)..(1235): n is a, c, g, or t
  misc_feature (1240)..(1240): n is a, c, g, or t
  misc_feature (1253)..(1253): n is a, c, g, or t
  misc_feature (1256)..(1256): n is a, c, g, or t
  misc_feature (1261)..(1261): n is a, c, g, or t
  misc_feature (1276)..(1293): n is a, c, g, or t
  misc_feature (1296)..(1296): n is a, c, g, or t
  misc_feature (1335)..(1335): n is a, c, g, or t
  misc_feature (1337)..(1337): n is a, c, g, or t
  misc_feature (1358)..(1358): n is a, c, g, or t
  misc_feature (1363)..(1363): n is a, c, g, or t
  misc_feature (1371)..(1371): n is a, c, g, or t
  misc_feature (1373)..(1373): n is a, c, g, or t
  misc_feature (1375)..(1375): n is a, c, g, or t
  misc_feature (1380)..(1380): n is a, c, g, or t
  misc_feature (1386)..(1386): n is a, c, g, or t
  misc_feature (1409)..(1409): n is a, c, g, or t
  misc_feature (1419)..(1419): n is a, c, g, or t
  misc_feature (1426)..(1426): n is a, c, g, or t
  misc_feature (1462)..(1462): n is a, c, g, or t
  misc_feature (1474)..(1474): n is a, c, g, or t
  misc_feature (1515)..(1515): n is a, c, g, or t
  misc_feature (1517)..(1517): n is a, c, g, or t
  misc_feature (1519)..(1519): n is a, c, g, or t
  misc_feature (1531)..(1531): n is a, c, g, or t
  misc_feature (1533)..(1533): n is a, c, g, or t
  misc_feature (1546)..(1546): n is a, c, g, or t
  misc_feature (1548)..(1548): n is a, c, g, or t
  misc_feature (1552)..(1552): n is a, c, g, or t
  misc_feature (1589)..(1589): n is a, c, g, or t
  misc_feature (1603)..(1603): n is a, c, g, or t

SEQ ID NO: 274963 - DNA, 1044 bp, Homo Sapiens; identical to SEQ ID NO: 250381
  misc_feature (34)..(34): n is a, c, g, or t
  misc_feature (49)..(49): n is a, c, g, or t
  misc_feature (65)..(65): n is a, c, g, or t
  misc_feature (67)..(67): n is a, c, g, or t
  misc_feature (81)..(81): n is a, c, g, or t
  misc_feature (85)..(85): n is a, c, g, or t
  misc_feature (90)..(90): n is a, c, g, or t
  misc_feature (100)..(100): n is a, c, g, or t

SEQ ID NO: 274964 - DNA, 3030 bp, Homo Sapiens; identical to SEQ ID NO: 250382
  misc_feature (1312)..(1321): n is a, c, g, or t

SEQ ID NO: 274965 - DNA, 662 bp, Homo Sapiens; identical to SEQ ID NO: 250383

SEQ ID NO: 274966 - DNA, 470 bp, Homo Sapiens; identical to SEQ ID NO: 250384

SEQ ID NO: 274967 - DNA, 578 bp, Homo Sapiens; identical to SEQ ID NO: 250385

SEQ ID NO: 274968 - DNA, 372 bp, Homo Sapiens; identical to SEQ ID NO: 250386

SEQ ID NO: 274969 - DNA, 2522 bp, Homo Sapiens; identical to SEQ ID NO: 250390
  misc_feature (2006)..(2016): n is a, c, g, or t
  misc_feature (2481)..(2481): n is a, c, g, or t
  misc_feature (2489)..(2489): n is a, c, g, or t

SEQ ID NO: 274970 - DNA, 734 bp, Homo Sapiens; identical to SEQ ID NO: 250391
  misc_feature (414)..(436): n is a, c, g, or t
  misc_feature (597)..(597): n is a, c, g, or t
  misc_feature (659)..(659): n is a, c, g, or t
  misc_feature (663)..(663): n is a, c, g, or t
  misc_feature (686)..(686): n is a, c, g, or t
  misc_feature (702)..(702): n is a, c, g, or t
  misc_feature (704)..(704): n is a, c, g, or t

SEQ ID NO: 274971 - DNA, 457 bp, Homo Sapiens; identical to SEQ ID NO: 250392
  misc_feature (258)..(258): n is a, c, g, or t
  misc_feature (269)..(269): n is a, c, g, or t
  misc_feature (288)..(288): n is a, c, g, or t
  misc_feature (291)..(291): n is a, c, g, or t
  misc_feature (328)..(328): n is a, c, g, or t
  misc_feature (393)..(393): n is a, c, g, or t
  misc_feature (404)..(404): n is a, c, g, or t
  misc_feature (415)..(415): n is a, c, g, or t
  misc_feature (431)..(431): n is a, c, g, or t
  misc_feature (445)..(445): n is a, c, g, or t

SEQ ID NO: 274972 - DNA, 646 bp, Homo Sapiens; identical to SEQ ID NO: 250395
  misc_feature (34)..(34): n is a, c, g, or t

SEQ ID NO: 274973 - DNA, 589 bp, Homo Sapiens; identical to SEQ ID NO: 250396

SEQ ID NO: 274974 - DNA, 941 bp, Homo Sapiens; identical to SEQ ID NO: 250397
  misc_feature (727)..(727): n is a, c, g, or t
  misc_feature (761)..(761): n is a, c, g, or t
  misc_feature (799)..(799): n is a, c, g, or t

SEQ ID NO: 274975 - DNA, 1219 bp, Homo Sapiens; identical to SEQ ID NO: 250398
  misc_feature (157)..(157): n is a, c, g, or t

SEQ ID NO: 274976 - DNA, 606 bp, Homo Sapiens; identical to SEQ ID NO: 250399

SEQ ID NO: 274977 - DNA, 985 bp, Homo Sapiens; identical to SEQ ID NO: 250400

SEQ ID NO: 274978 - DNA, 654 bp, Homo Sapiens; identical to SEQ ID NO: 250403
  misc_feature (48)..(49): n is a, c, g, or t

SEQ ID NO: 274979 - DNA, 674 bp, Homo Sapiens; identical to SEQ ID NO: 250404

SEQ ID NO: 274980 - DNA, 1600 bp, Homo Sapiens; identical to SEQ ID NO: 250405
  misc_feature (812)..(822): n is a, c, g, or t
  misc_feature (879)..(935): n is a, c, g, or t
  misc_feature (1087)..(1110): n is a, c, g, or t
  misc_feature (1484)..(1484): n is a, c, g, or t
  misc_feature (1560)..(1560): n is a, c, g, or t

SEQ ID NO: 274981 - DNA, 493 bp, Homo Sapiens; identical to SEQ ID NO: 250406
  misc_feature (446)..(446): n is a, c, g, or t
  misc_feature (453)..(453): n is a, c, g, or t
  misc_feature (459)..(459): n is a, c, g, or t
  misc_feature (472)..(472): n is a, c, g, or t

SEQ ID NO: 274982 - DNA, 2878 bp, Homo Sapiens; identical to SEQ ID NO: 250417
  misc_feature (2059)..(2059): n is a, c, g, or t

SEQ ID NO: 274983 - DNA, 602 bp, Homo Sapiens; identical to SEQ ID NO: 250418

SEQ ID NO: 274984 - DNA, 1264 bp, Homo Sapiens; identical to SEQ ID NO: 250419

SEQ ID NO: 274985 - DNA, 1087 bp, Homo Sapiens; identical to SEQ ID NO: 250423
  misc_feature (904)..(904): n is a, c, g, or t
  misc_feature (965)..(965): n is a, c, g, or t
  misc_feature (968)..(968): n is a, c, g, or t
  misc_feature (992)..(992): n is a, c, g, or t
  misc_feature (1005)..(1005): n is a, c, g, or t
  misc_feature (1017)..(1017): n is a, c, g, or t
  misc_feature (1026)..(1026): n is a, c, g, or t
  misc_feature (1042)..(1042): n is a, c, g, or t
  misc_feature (1062)..(1062): n is a, c, g, or t
  misc_feature (1064)..(1064): n is a, c, g, or t
  misc_feature (1067)..(1067): n is a, c, g, or t
  misc_feature (1072)..(1072): n is a, c, g, or t

SEQ ID NO: 274986 - DNA, 2086 bp, Homo Sapiens; identical to SEQ ID NO: 250424
  misc_feature (1581)..(1593): n is a, c, g, or t
  misc_feature (1613)..(1613): n is a, c, g, or t
  misc_feature (1748)..(1760): n is a, c, g, or t
  misc_feature (2072)..(2075): n is a, c, g, or t
  misc_feature (2080)..(2080): n is a, c, g, or t
  misc_feature (2082)..(2082): n is a, c, g, or t

SEQ ID NO: 274987 - DNA, 477 bp, Homo Sapiens; identical to SEQ ID NO: 250425
  misc_feature (397)..(397): n is a, c, g, or t

SEQ ID NO: 274988 - DNA, 664 bp, Homo Sapiens; identical to SEQ ID NO: 250428

SEQ ID NO: 274989 - DNA, 798 bp, Homo Sapiens; identical to SEQ ID NO: 250429
  misc_feature (14)..(14): n is a, c, g, or t
  misc_feature (487)..(487): n is a, c, g, or t

SEQ ID NO: 274990 - DNA, 1181 bp, Homo Sapiens; identical to SEQ ID NO: 250435

SEQ ID NO: 274991 - DNA, 350 bp, Homo Sapiens; identical to SEQ ID NO: 250436

SEQ ID NO: 274992 - DNA, 1067 bp, Homo Sapiens; identical to SEQ ID NO: 250437

SEQ ID NO: 274993 - DNA, 964 bp, Homo Sapiens; identical to SEQ ID NO: 250438
  misc_feature (57)..(89): n is a, c, g, or t

SEQ ID NO: 274994 - DNA, 639 bp, Homo Sapiens; identical to SEQ ID NO: 250439

SEQ ID NO: 274995 - DNA, 463 bp, Homo Sapiens; identical to SEQ ID NO: 250440
  misc_feature (57)..(57): n is a, c, g, or t
  misc_feature (299)..(352): n is a, c, g, or t
  misc_feature (391)..(391): n is a, c, g, or t

SEQ ID NO: 274996 - DNA, 743 bp, Homo Sapiens; identical to SEQ ID NO: 250446

SEQ ID NO: 274997 - DNA, 732 bp, Homo Sapiens; identical to SEQ ID NO: 250447

SEQ ID NO: 274998 - DNA, 1241 bp, Homo Sapiens; identical to SEQ ID NO: 250449

SEQ ID NO: 274999 - DNA, 825 bp, Homo Sapiens; identical to SEQ ID NO: 250450

SEQ ID NO: 275000 - DNA, 820 bp, Homo Sapiens; identical to SEQ ID NO: 250451
  misc_feature (14)..(14): n is a, c, g, or t
  misc_feature (32)..(32): n is a, c, g, or t
  misc_feature (460)..(460): n is a, c, g, or t

SEQ ID NO: 275001 - DNA, 809 bp, Homo Sapiens; identical to SEQ ID NO: 250452

SEQ ID NO: 275002 - DNA, 1293 bp, Homo Sapiens; identical to SEQ ID NO: 250453
  misc_feature (901)..(1089): n is a, c, g, or t

SEQ ID NO: 275003 - DNA, 619 bp, Homo Sapiens; identical to SEQ ID NO: 250454
  misc_feature (522)..(522): n is a, c, g, or t
  misc_feature (562)..(562): n is a, c, g, or t

SEQ ID NO: 275004 - DNA, 743 bp, Homo Sapiens; identical to SEQ ID NO: 250455

SEQ ID NO: 275005 - DNA, 340 bp, Homo Sapiens; identical to SEQ ID NO: 250463

SEQ ID NO: 275006 - DNA, 1125 bp, Homo Sapiens; identical to SEQ ID NO: 250464

SEQ ID NO: 275007 - DNA, 1049 bp, Homo Sapiens; identical to SEQ ID NO: 250469
  misc_feature (14)..(15): n is a, c, g, or t
  misc_feature (24)..(24): n is a, c, g, or t
  misc_feature (29)..(29): n is a, c, g, or t
  misc_feature (31)..(32): n is a, c, g, or t
  misc_feature (40)..(40): n is a, c, g, or t
  misc_feature (46)..(46): n is a, c, g, or t
  misc_feature (48)..(48): n is a, c, g, or t
  misc_feature (52)..(52): n is a, c, g, or t
  misc_feature (58)..(58): n is a, c, g, or t
  misc_feature (62)..(62): n is a, c, g, or t
  misc_feature (69)..(69): n is a, c, g, or t
  misc_feature (73)..(73): n is a, c, g, or t
  misc_feature (75)..(76): n is a, c, g, or t
  misc_feature (80)..(81): n is a, c, g, or t
  misc_feature (84)..(85): n is a, c, g, or t
  misc_feature (89)..(90): n is a, c, g, or t
  misc_feature (96)..(96): n is a, c, g, or t
  misc_feature (104)..(104): n is a, c, g, or t
  misc_feature (115)..(115): n is a, c, g, or t
  misc_feature (120)..(120): n is a, c, g, or t
  misc_feature (122)..(122): n is a, c, g, or t
  misc_feature (130)..(131): n is a, c, g, or t
  misc_feature (135)..(135): n is a, c, g, or t
  misc_feature (139)..(147): n is a, c, g, or t
  misc_feature (167)..(167): n is a, c, g, or t
  misc_feature (171)..(171): n is a, c, g, or t
  misc_feature (192)..(192): n is a, c, g, or t
  misc_feature (195)..(272): n is a, c, g, or t
  misc_feature (274)..(274): n is a, c, g, or t
  misc_feature (299)..(299): n is a, c, g, or t
  misc_feature (309)..(309): n is a, c, g, or t
  misc_feature (324)..(324): n is a, c, g, or t
  misc_feature (328)..(328): n is a, c, g, or t
  misc_feature (331)..(331): n is a, c, g, or t
  misc_feature (352)..(352): n is a, c, g, or t
  misc_feature (356)..(356): n is a, c, g, or t
  misc_feature (359)..(359): n is a, c, g, or t
  misc_feature (376)..(376): n is a, c, g, or t
  misc_feature (382)..(382): n is a, c, g, or t
  misc_feature (416)..(416): n is a, c, g, or t
  misc_feature (428)..(428): n is a, c, g, or t
  misc_feature (434)..(764): n is a, c, g, or t

SEQ ID NO: 275008 - DNA, 947 bp, Homo Sapiens; identical to SEQ ID NO: 250470
  misc_feature (379)..(437): n is a, c, g, or t

SEQ ID NO: 275009 - DNA, 924 bp, Homo Sapiens; identical to SEQ ID NO: 250473

SEQ ID NO: 275010 - DNA, 1378 bp, Homo Sapiens; identical to SEQ ID NO: 250474
  misc_feature (14)..(14): n is a, c, g, or t
  misc_feature (71)..(71): n is a, c, g, or t
  misc_feature (143)..(143): n is a, c, g, or t
  misc_feature (902)..(902): n is a, c, g, or t
  misc_feature (986)..(986): n is a, c, g, or t
  misc_feature (1079)..(1079): n is a, c, g, or t
  misc_feature (1085)..(1085): n is a, c, g, or t
  misc_feature (1143)..(1143): n is a, c, g, or t

SEQ ID NO: 275011 - DNA, 1288 bp, Homo Sapiens; identical to SEQ ID NO: 250477
  misc_feature (302)..(302): n is a, c, g, or t
  misc_feature (895)..(904): n is a, c, g, or t

SEQ ID NO: 275012 - DNA, 449 bp, Homo Sapiens; identical to SEQ ID NO: 250478
  misc_feature (25)..(25): n is a, c, g, or t
  misc_feature (31)..(31): n is a, c, g, or t
  misc_feature (46)..(46): n is a, c, g, or t
  misc_feature (63)..(63): n is a, c, g, or t
  misc_feature (122)..(122): n is a, c, g, or t
  misc_feature (300)..(309): n is a, c, g, or t

SEQ ID NO: 275013 - DNA, 475 bp, Homo Sapiens; identical to SEQ ID NO: 250484

SEQ ID NO: 275014 - DNA, 628 bp, Homo Sapiens; identical to SEQ ID NO: 250485

SEQ ID NO: 275015 - DNA, 2451 bp, Homo Sapiens; identical to SEQ ID NO: 250486

SEQ ID NO: 275016 - DNA, 495 bp, Homo Sapiens; identical to SEQ ID NO: 250487
  misc_feature (11)..(11): n is a, c, g, or t
  misc_feature (42)..(42): n is a, c, g, or t
  misc_feature (164)..(164): n is a, c, g, or t
  misc_feature (177)..(177): n is a, c, g, or t
  misc_feature (191)..(300): n is a, c, g, or t
  misc_feature (415)..(423): n is a, c, g, or t

SEQ ID NO: 275017 - DNA, 496 bp, Homo Sapiens; identical to SEQ ID NO: 250498
  misc_feature (79)..(79): n is a, c, g, or t

SEQ ID NO: 275018 - DNA, 655 bp, Homo Sapiens; identical to SEQ ID NO: 250499

SEQ ID NO: 275019 - DNA, 798 bp, Homo Sapiens; identical to SEQ ID NO: 250500
  misc_feature (37)..(37): n is a, c, g, or t
  misc_feature (53)..(53): n is a, c, g, or t

SEQ ID NO: 275020 - DNA, 794 bp, Homo Sapiens; identical to SEQ ID NO: 250503
  misc_feature (563)..(563): n is a, c, g, or t

SEQ ID NO: 275021 - DNA, 531 bp, Homo Sapiens; identical to SEQ ID NO: 250504

SEQ ID NO: 275022 - DNA, 851 bp, Homo Sapiens; identical to SEQ ID NO: 250516
  misc_feature (820)..(820): n is a, c, g, or t
  misc_feature (837)..(837): n is a, c, g, or t

SEQ ID NO: 275023 - DNA, 624 bp, Homo Sapiens; identical to SEQ ID NO: 250517
  misc_feature (35)..(35): n is a, c, g, or t
  misc_feature (47)..(47): n is a, c, g, or t
  misc_feature (52)..(52): n is a, c, g, or t
  misc_feature (63)..(63): n is a, c, g, or t
  misc_feature (73)..(73): n is a, c, g, or t
  misc_feature (88)..(88): n is a, c, g, or t
  misc_feature (93)..(93): n is a, c, g, or t
  misc_feature (103)..(103): n is a, c, g, or t
  misc_feature (610)..(610): n is a, c, g, or t

SEQ ID NO: 275024 - DNA, 2381 bp, Homo Sapiens; identical to SEQ ID NO: 250518
  misc_feature (1477)..(1504): n is a, c, g, or t
  misc_feature (1510)..(1510): n is a, c, g, or t
  misc_feature (1717)..(1717): n is a, c, g, or t
  misc_feature (1866)..(1866): n is a, c, g, or t
  misc_feature (1939)..(1939): n is a, c, g, or t
  misc_feature (1962)..(1962): n is a, c, g, or t
  misc_feature (2003)..(2003): n is a, c, g, or t
  misc_feature (2158)..(2158): n is a, c, g, or t
  misc_feature (2172)..(2172): n is a, c, g, or t
  misc_feature (2198)..(2198): n is a, c, g, or t
  misc_feature (2318)..(2318): n is a, c, g, or t
  misc_feature (2334)..(2334): n is a, c, g, or t

SEQ ID NO: 275025 - DNA, 1480 bp, Homo Sapiens; identical to SEQ ID NO: 250519
  misc_feature (116)..(116): n is a, c, g, or t

SEQ ID NO: 275026 - DNA, 420 bp, Homo Sapiens; identical to SEQ ID NO: 250520

SEQ ID NO: 275027 - DNA, 512 bp, Homo Sapiens; identical to SEQ ID NO: 250528

SEQ ID NO: 275028 - DNA, 1079 bp, Homo Sapiens; identical to SEQ ID NO: 250529
  misc_feature (848)..(848): n is a, c, g, or t

SEQ ID NO: 275029 - DNA, 1138 bp, Homo Sapiens; identical to SEQ ID NO: 250530
  misc_feature (837)..(972): n is a, c, g, or t
  misc_feature (978)..(978): n is a, c, g, or t
  misc_feature (1050)..(1050): n is a, c, g, or t
  misc_feature (1058)..(1058): n is a, c, g, or t
  misc_feature (1088)..(1089): n is a, c, g, or t
  misc_feature (1095)..(1095): n is a, c, g, or t
  misc_feature (1111)..(1111): n is a, c, g, or t
  misc_feature (1116)..(1116): n is a, c, g, or t
  misc_feature (1124)..(1124): n is a, c, g, or t
  misc_feature (1126)..(1126): n is a, c, g, or t
  misc_feature (1131)..(1131): n is a, c, g, or t

SEQ ID NO: 275030 - DNA, 1211 bp, Homo Sapiens; identical to SEQ ID NO: 250532

SEQ ID NO: 275031 - DNA, 478 bp, Homo Sapiens; identical to SEQ ID NO: 250533
  misc_feature (16)..(16): n is a, c, g, or t
  misc_feature (25)..(25): n is a, c, g, or t
  misc_feature (158)..(158): n is a, c, g, or t
  misc_feature (311)..(311): n is a, c, g, or t

SEQ ID NO: 275032 - DNA, 1751 bp, Homo Sapiens; identical to SEQ ID NO: 250534
  misc_feature (1461)..(1559): n is a, c, g, or t
  misc_feature (1622)..(1631): n is a, c, g, or t

SEQ ID NO: 275033 - DNA, 742 bp, Homo Sapiens; identical to SEQ ID NO: 250535
  misc_feature (257)..(257): n is a, c, g, or t

SEQ ID NO: 275034 - DNA, 654 bp, Homo Sapiens; identical to SEQ ID NO: 250539

SEQ ID NO: 275035 - DNA, 630 bp, Homo Sapiens; identical to SEQ ID NO: 250540

SEQ ID NO: 275036 - DNA, 934 bp, Homo Sapiens; identical to SEQ ID NO: 250541
  misc_feature (445)..(445): n is a, c, g, or t
  misc_feature (554)..(554): n is a, c, g, or t
  misc_feature (767)..(767): n is a, c, g, or t
  misc_feature (781)..(781): n is a, c, g, or t
  misc_feature (788)..(788): n is a, c, g, or t
  misc_feature (794)..(794): n is a, c, g, or t
  misc_feature (841)..(841): n is a, c, g, or t
  misc_feature (887)..(888): n is a, c, g, or t
  misc_feature (896)..(896): n is a, c, g, or t
  misc_feature (904)..(904): n is a, c, g, or t
  misc_feature (917)..(919): n is a, c, g, or t
  misc_feature (922)..(922): n is a, c, g, or t
  misc_feature (927)..(927): n is a, c, g, or t
  misc_feature (933)..(933): n is a, c, g, or t

SEQ ID NO: 275037 - DNA, 373 bp, Homo Sapiens; identical to SEQ ID NO: 250542

SEQ ID NO: 275038 - DNA, 2974 bp, Homo Sapiens; identical to SEQ ID NO: 250545
  misc_feature (2006)..(2082): n is a, c, g, or t
  misc_feature (2089)..(2090): n is a, c, g, or t
  misc_feature (2092)..(2093): n is a, c, g, or t
  misc_feature (2095)..(2096): n is a, c, g, or t
  misc_feature (2125)..(2125): n is a, c, g, or t

SEQ ID NO: 275039 - DNA, 849 bp, Homo Sapiens; identical to SEQ ID NO: 250546

SEQ ID NO: 275040 - DNA, 796 bp, Homo Sapiens; identical to SEQ ID NO: 250556

SEQ ID NO: 275041 - DNA, 586 bp, Homo Sapiens; identical to SEQ ID NO: 250557

SEQ ID NO: 275042 - DNA, 591 bp, Homo Sapiens; identical to SEQ ID NO: 250558

SEQ ID NO: 275043 - DNA, 1613 bp, Homo Sapiens; identical to SEQ ID NO: 250559

SEQ ID NO: 275044 - DNA, 865 bp, Homo Sapiens; identical to SEQ ID NO: 250574

SEQ ID NO: 275045 - DNA, 1161 bp, Homo Sapiens; identical to SEQ ID NO: 250575
  misc_feature (507)..(570): n is a, c, g, or t
  misc_feature (1145)..(1145): n is a, c, g, or t

SEQ ID NO: 275046 - DNA, 1404 bp, Homo Sapiens; identical to SEQ ID NO: 250576

SEQ ID NO: 275047 - DNA, 943 bp, Homo Sapiens; identical to SEQ ID NO: 250578

SEQ ID NO: 275048 - DNA, 1501 bp, Homo Sapiens; identical to SEQ ID NO: 250579
  misc_feature (30)..(30): n is a, c, g, or t
  misc_feature (44)..(44): n is a, c, g, or t

SEQ ID NO: 275049 - DNA, 1118 bp, Homo Sapiens; identical to SEQ ID NO: 250580

SEQ ID NO: 275050 - DNA, 490 bp, Homo Sapiens; identical to SEQ ID NO: 250581
  misc_feature (15)..(15): n is a, c, g, or t
  misc_feature (474)..(474): n is a, c, g, or t

SEQ ID NO: 275051 - DNA, 714 bp, Homo Sapiens; identical to SEQ ID NO: 250587

SEQ ID NO: 275052 - DNA, 1007 bp, Homo Sapiens; identical to SEQ ID NO: 250588

SEQ ID NO: 275053 - DNA, 460 bp, Homo Sapiens; identical to SEQ ID NO: 250590

SEQ ID NO: 275054 - DNA, 1872 bp, Homo Sapiens; identical to SEQ ID NO: 250591
  misc_feature (1783)..(1783): n is a, c, g, or t
  misc_feature (1845)..(1845): n is a, c, g, or t
  misc_feature (1862)..(1862): n is a, c, g, or t

SEQ ID NO: 275055 - DNA, 450 bp, Homo Sapiens; identical to SEQ ID NO: 250592

SEQ ID NO: 275056 - DNA, 1129 bp, Homo Sapiens; identical to SEQ ID NO: 250593
  misc_feature (29)..(29): n is a, c, g, or t
  misc_feature (48)..(48): n is a, c, g, or t
  misc_feature (67)..(67): n is a, c, g, or t
  misc_feature (515)..(523): n is a, c, g, or t

SEQ ID NO: 275057 - DNA, 853 bp, Homo Sapiens; identical to SEQ ID NO: 250596

SEQ ID NO: 275058 - DNA, 607 bp, Homo Sapiens; identical to SEQ ID NO: 250597

SEQ ID NO: 275059 - DNA, 1561 bp, Homo Sapiens; identical to SEQ ID NO: 250598

SEQ ID NO: 275060 - DNA, 1346 bp, Homo Sapiens; identical to SEQ ID NO: 250599
  misc_feature (48)..(48): n is a, c, g, or t
  misc_feature (780)..(780): n is a, c, g, or t
  misc_feature (906)..(934): n is a, c, g, or t

SEQ ID NO: 275061 - DNA, 526 bp, Homo Sapiens; identical to SEQ ID NO: 250600

SEQ ID NO: 275062 - DNA, 765 bp, Homo Sapiens; identical to SEQ ID NO: 250602

SEQ ID NO: 275063 - DNA, 616 bp, Homo Sapiens; identical to SEQ ID NO: 250603
  misc_feature (29)..(29): n is a, c, g, or t
  misc_feature (34)..(34): n is a, c, g, or t
  misc_feature (83)..(83): n is a, c, g, or t

SEQ ID NO: 275064 - DNA, 580 bp, Homo Sapiens; identical to SEQ ID NO: 250604

SEQ ID NO: 275065 - DNA, 512 bp, Homo Sapiens; identical to SEQ ID NO: 250605

SEQ ID NO: 275066 - DNA, 911 bp, Homo Sapiens; identical to SEQ ID NO: 250607
  misc_feature (738)..(801): n is a, c, g, or t

SEQ ID NO: 275067 - DNA, 884 bp, Homo Sapiens; identical to SEQ ID NO: 250608
  misc_feature (103)..(104): n is a, c, g, or t

SEQ ID NO: 275068 - DNA, 663 bp, Homo Sapiens; identical to SEQ ID NO: 250609
  misc_feature (589)..(589): n is a, c, g, or t

SEQ ID NO: 275069 - DNA, 637 bp, Homo Sapiens; identical to SEQ ID NO: 250612

SEQ ID NO: 275070 - DNA, 1077 bp, Homo Sapiens; identical to SEQ ID NO: 250613
  misc_feature (641)..(658): n is a, c, g, or t
  misc_feature (667)..(705): n is a, c, g, or t
  misc_feature (752)..(808): n is a, c, g, or t

SEQ ID NO: 275071 - DNA, 809 bp, Homo Sapiens; identical to SEQ ID NO: 250614

SEQ ID NO: 275072 - DNA, 1083 bp, Homo Sapiens; identical to SEQ ID NO: 250615

SEQ ID NO: 275073 - DNA, 764 bp, Homo Sapiens; identical to SEQ ID NO: 250616

SEQ ID NO: 275074 - DNA, 684 bp, Homo Sapiens; identical to SEQ ID NO: 250620
  misc_feature (102)..(102): n is a, c, g, or t

SEQ ID NO: 275075 - DNA, 908 bp, Homo Sapiens; identical to SEQ ID NO: 250621

SEQ ID NO: 275076 - DNA, 2438 bp, Homo Sapiens; identical to SEQ ID NO: 250622
  misc_feature (35)..(35): n is a, c, g, or t
  misc_feature (54)..(54): n is a, c, g, or t
  misc_feature (1825)..(1825): n is a, c, g, or t

SEQ ID NO: 275077 - DNA, 692 bp, Homo Sapiens; identical to SEQ ID NO: 250623

SEQ ID NO: 275078 - DNA, 1132 bp, Homo Sapiens; identical to SEQ ID NO: 250626

SEQ ID NO: 275079 - DNA, 616 bp, Homo Sapiens; identical to SEQ ID NO: 250627
  misc_feature (25)..(25): n is a, c, g, or t
  misc_feature (27)..(27): n is a, c, g, or t
  misc_feature (54)..(54): n is a, c, g, or t

SEQ ID NO: 275080 - DNA, 1401 bp, Homo Sapiens; identical to SEQ ID NO: 250628

SEQ ID NO: 275081 - DNA, 1142 bp, Homo Sapiens; identical to SEQ ID NO: 250629
  misc_feature (7)..(7): n is a, c, g, or t
  misc_feature (20)..(20): n is a, c, g, or t
  misc_feature (40)..(40): n is a, c, g, or t
  misc_feature (43)..(43): n is a, c, g, or t
  misc_feature (51)..(51): n is a, c, g, or t
  misc_feature (57)..(57): n is a, c, g, or t
  misc_feature (77)..(77): n is a, c, g, or t
  misc_feature (87)..(87): n is a, c, g, or t
  misc_feature (96)..(96): n is a, c, g, or t
  misc_feature (108)..(109): n is a, c, g, or t

SEQ ID NO: 275082 - DNA, 1094 bp, Homo Sapiens; identical to SEQ ID NO: 250630
  misc_feature (1042)..(1042): n is a, c, g, or t
  misc_feature (1047)..(1047): n is a, c, g, or t
  misc_feature (1055)..(1055): n is a, c, g, or t
  misc_feature (1064)..(1065): n is a, c, g, or t
  misc_feature (1084)..(1085): n is a, c, g, or t
  misc_feature (1087)..(1087): n is a, c, g, or t

SEQ ID NO: 275083 - DNA, 931 bp, Homo Sapiens; identical to SEQ ID NO: 250631
  misc_feature (19)..(19): n is a, c, g, or t
  misc_feature (218)..(218): n is a, c, g, or t
  misc_feature (830)..(830): n is a, c, g, or t
  misc_feature (838)..(838): n is a, c, g, or t
  misc_feature (847)..(847): n is a, c, g, or t
  misc_feature (850)..(850): n is a, c, g, or t
  misc_feature (860)..(860): n is a, c, g, or t
  misc_feature (880)..(880): n is a, c, g, or t
  misc_feature (884)..(884): n is a, c, g, or t
  misc_feature (889)..(889): n is a, c, g, or t
  misc_feature (892)..(892): n is a, c, g, or t

SEQ ID NO: 275084 - DNA, 1632 bp, Homo Sapiens; identical to SEQ ID NO: 250640

SEQ ID NO: 275085 - DNA, 524 bp, Homo Sapiens; identical to SEQ ID NO: 250641
  misc_feature (27)..(27): n is a, c, g, or t
  misc_feature (41)..(41): n is a, c, g, or t
  misc_feature (59)..(59): n is a, c, g, or t
  misc_feature (69)..(69): n is a, c, g, or t
  misc_feature (162)..(162): n is a, c, g, or t

SEQ ID NO: 275086 - DNA, 755 bp, Homo Sapiens; identical to SEQ ID NO: 250643

SEQ ID NO: 275087 - DNA, 2490 bp, Homo Sapiens; identical to SEQ ID NO: 250644
  misc_feature (1407)..(1407): n is a, c, g, or t
  misc_feature (2328)..(2342): n is a, c, g, or t

SEQ ID NO: 275088 - DNA, 982 bp, Homo Sapiens; identical to SEQ ID NO: 250648
  misc_feature (25)..(25): n is a, c, g, or t
  misc_feature (57)..(57): n is a, c, g, or t

SEQ ID NO: 275089 - DNA, 458 bp, Homo Sapiens; identical to SEQ ID NO: 250649
  misc_feature (330)..(330): n is a, c, g, or t

SEQ ID NO: 275090 - DNA, 1001 bp, Homo Sapiens; identical to SEQ ID NO: 250651

SEQ ID NO: 275091 - DNA, 870 bp, Homo Sapiens; identical to SEQ ID NO: 250652

SEQ ID NO: 275092 - DNA, 444 bp, Homo Sapiens; identical to SEQ ID NO: 250653
  misc_feature (27)..(27): n is a, c, g, or t
  misc_feature (96)..(96): n is a, c, g, or t
  misc_feature (269)..(269): n is a, c, g, or t

SEQ ID NO: 275093 - DNA, 501 bp, Homo Sapiens; identical to SEQ ID NO: 250656

SEQ ID NO: 275094 - DNA, 2374 bp, Homo Sapiens; identical to SEQ ID NO: 250657

SEQ ID NO: 275095 - DNA, 427 bp, Homo Sapiens; identical to SEQ ID NO: 250658
  misc_feature (394)..(394): n is a, c, g, or t

SEQ ID NO: 275096 - DNA, 1916 bp, Homo Sapiens; identical to SEQ ID NO: 250662
  misc_feature (424)..(424): n is a, c, g, or t

SEQ ID NO: 275097 - DNA, 414 bp, Homo Sapiens; identical to SEQ ID NO: 250663
  misc_feature (19)..(19): n is a, c, g, or t
  misc_feature (27)..(27): n is a, c, g, or t
  misc_feature (40)..(40): n is a, c, g, or t

SEQ ID NO: 275098 - DNA, 809 bp, Homo Sapiens; identical to SEQ ID NO: 170332

SEQ ID NO: 275099 - DNA, 840 bp, Homo Sapiens; identical to SEQ ID NO: 170333

SEQ ID NO: 275100 - DNA, 1153 bp, Homo Sapiens; identical to SEQ ID NO: 250668

SEQ ID NO: 275101 - DNA, 878 bp, Homo Sapiens; identical to SEQ ID NO: 250670

SEQ ID NO: 275102 - DNA, 990 bp, Homo Sapiens; identical to SEQ ID NO: 250671

SEQ ID NO: 275103 - DNA, 936 bp, Homo Sapiens; identical to SEQ ID NO: 250672

SEQ ID NO: 275104 - DNA, 537 bp, Homo Sapiens; identical to SEQ ID NO: 250680

SEQ ID NO: 275105 - DNA, 1232 bp, Homo Sapiens; identical to SEQ ID NO: 250681
  misc_feature (1066)..(1066): n is a, c, g, or t
  misc_feature (1096)..(1096): n is a, c, g, or t
  misc_feature (1108)..(1108): n is a, c, g, or t
  misc_feature (1191)..(1191): n is a, c, g, or t

SEQ ID NO: 275106 - DNA, 939 bp, Homo Sapiens; identical to SEQ ID NO: 250682
  misc_feature (915)..(915): n is a, c, g, or t
  misc_feature (922)..(922): n is a, c, g, or t

SEQ ID NO: 275107 - DNA, 1414 bp, Homo Sapiens; identical to SEQ ID NO: 250683
  misc_feature (1066)..(1134): n is a, c, g, or t
  misc_feature (1138)..(1138): n is a, c, g, or t
  misc_feature (1150)..(1228): n is a, c, g, or t
  misc_feature (1230)..(1231): n is a, c, g, or t
  misc_feature (1236)..(1236): n is a, c, g, or t
  misc_feature (1238)..(1238): n is a, c, g, or t
  misc_feature (1244)..(1281): n is a, c, g, or t
  misc_feature (1307)..(1349): n is a, c, g, or t

SEQ ID NO: 275108 - DNA, 439 bp, Homo Sapiens; identical to SEQ ID NO: 250684
  misc_feature (13)..(13): n is a, c, g, or t

SEQ ID NO: 275109 - DNA, 1157 bp, Homo Sapiens; identical to SEQ ID NO: 250687

SEQ ID NO: 275110 - DNA, 554 bp, Homo Sapiens; identical to SEQ ID NO: 250688

SEQ ID NO: 275111 - DNA, 577 bp, Homo Sapiens; identical to SEQ ID NO: 250690

SEQ ID NO: 275112 - DNA, 841 bp, Homo Sapiens; identical to SEQ ID NO: 250691
  misc_feature (828)..(828): n is a, c, g, or t

SEQ ID NO: 275113 - DNA, 660 bp, Homo Sapiens; identical to SEQ ID NO: 250692

SEQ ID NO: 275114 - DNA, 370 bp, Homo Sapiens; identical to SEQ ID NO: 250693
  misc_feature (177)..(177): n is a, c, g, or t
  misc_feature (341)..(341): n is a, c, g, or t

SEQ ID NO: 275115 - DNA, 379 bp, Homo Sapiens; identical to SEQ ID NO: 250695

SEQ ID NO: 275116 - DNA, 1142 bp, Homo Sapiens; identical to SEQ ID NO: 250696
  misc_feature (1098)..(1098): n is a, c, g, or t

SEQ ID NO: 275117 - DNA, 1107 bp, Homo Sapiens; identical to SEQ ID NO: 250700

SEQ ID NO: 275118 - DNA, 1666 bp, Homo Sapiens; identical to SEQ ID NO: 250701
  misc_feature (1513)..(1513): n is a, c, g, or t
  misc_feature (1580)..(1580): n is a, c, g, or t
  misc_feature (1619)..(1619): n is a, c, g, or t

SEQ ID NO: 275119 - DNA, 549 bp, Homo Sapiens; identical to SEQ ID NO: 250702
  misc_feature (18)..(18): n is a, c, g, or t
  misc_feature (78)..(78): n is a, c, g, or t
  misc_feature (87)..(87): n is a, c, g, or t
  misc_feature (118)..(118): n is a, c, g, or t
  misc_feature (172)..(172): n is a, c, g, or t

SEQ ID NO: 275120 - DNA, 539 bp, Homo Sapiens; identical to SEQ ID NO: 250703
  misc_feature (428)..(428): n is a, c, g, or t
  misc_feature (497)..(497): n is a, c, g, or t
  misc_feature (506)..(506): n is a, c, g, or t

SEQ ID NO: 275121 - DNA, 2387 bp, Homo Sapiens; identical to SEQ ID NO: 250704

SEQ ID NO: 275122 - DNA, 350 bp, Homo Sapiens; identical to SEQ ID NO: 250705
  misc_feature (16)..(16): n is a, c, g, or t
  misc_feature (123)..(123): n is a, c, g, or t
  misc_feature (161)..(161): n is a, c, g, or t
  misc_feature (314)..(314): n is a, c, g, or t

SEQ ID NO: 275123 - DNA, 1051 bp, Homo Sapiens; identical to SEQ ID NO: 250710
  misc_feature (325)..(418): n is a, c, g, or t

SEQ ID NO: 275124 - DNA, 749 bp, Homo Sapiens; identical to SEQ ID NO: 250711

SEQ ID NO: 275125 - DNA, 816 bp, Homo Sapiens; identical to SEQ ID NO: 250712

SEQ ID NO: 275126 - DNA, 848 bp, Homo Sapiens; identical to SEQ ID NO: 250728

SEQ ID NO: 275127 - DNA, 893 bp, Homo Sapiens; identical to SEQ ID NO: 250729

SEQ ID NO: 275128 - DNA, 548 bp, Homo Sapiens; identical to SEQ ID NO: 250741

SEQ ID NO: 275129 - DNA, 1543 bp, Homo Sapiens; identical to SEQ ID NO: 250742
  misc_feature (62)..(62): n is a, c, g, or t
  misc_feature (87)..(87): n is a, c, g, or t
  misc_feature (1175)..(1231): n is a, c, g, or t
  misc_feature (1472)..(1472): n is a, c, g, or t

SEQ ID NO: 275130 - DNA, 877 bp, Homo Sapiens; identical to SEQ ID NO: 250743

SEQ ID NO: 275131 - DNA, 718 bp, Homo Sapiens; identical to SEQ ID NO: 250744
  misc_feature (94)..(94): n is a, c, g, or t

SEQ ID NO: 275132 - DNA, 3145 bp, Homo Sapiens; identical to SEQ ID NO: 250761
  misc_feature (1427)..(1427): n is a, c, g, or t
  misc_feature (2424)..(2456): n is a, c, g, or t
  misc_feature (2458)..(2506): n is a, c, g, or t
  misc_feature (2562)..(2571): n is a, c, g, or t
  misc_feature (2611)..(2626): n is a, c, g, or t
  misc_feature (2668)..(2676): n is a, c, g, or t
  misc_feature (2717)..(2728): n is a, c, g, or t
  misc_feature (2919)..(2919): n is a, c, g, or t
  misc_feature (3113)..(3113): n is a, c, g, or t

SEQ ID NO: 275133 - DNA, 901 bp, Homo Sapiens; identical to SEQ ID NO: 250762
  misc_feature (658)..(658): n is a, c, g, or t
  misc_feature (807)..(807): n is a, c, g, or t

SEQ ID NO: 275134 - DNA, 959 bp, Homo Sapiens; identical to SEQ ID NO: 250763
  misc_feature (792)..(792): n is a, c, g, or t

SEQ ID NO: 275135 - DNA, 1324 bp, Homo Sapiens; identical to SEQ ID NO: 250764
  misc_feature (1296)..(1296): n is a, c, g, or t
  misc_feature (1312)..(1312): n is a, c, g, or t

SEQ ID NO: 275136 - DNA, 971 bp, Homo Sapiens; identical to SEQ ID NO: 250765
  misc_feature (67)..(67): n is a, c, g, or t
  misc_feature (79)..(79): n is a, c, g, or t
  misc_feature (733)..(733): n is a, c, g, or t
  misc_feature (797)..(797): n is a, c, g, or t
  misc_feature (803)..(803): n is a, c, g, or t
  misc_feature (828)..(828): n is a, c, g, or t
  misc_feature (836)..(836): n is a, c, g, or t
  misc_feature (850)..(850): n is a, c, g, or t
  misc_feature (877)..(877): n is a, c, g, or t
  misc_feature (886)..(886): n is a, c, g, or t
  misc_feature (902)..(902): n is a, c, g, or t
  misc_feature (913)..(913): n is a, c, g, or t
  misc_feature (921)..(921): n is a, c, g, or t
  misc_feature (941)..(941): n is a, c, g, or t
  misc_feature (947)..(947): n is a, c, g, or t
  misc_feature (957)..(957): n is a, c, g, or t

SEQ ID NO: 275137 - DNA, 712 bp, Homo Sapiens; identical to SEQ ID NO: 250770
  misc_feature (16)..(16): n is a, c, g, or t
  misc_feature (28)..(28): n is a, c, g, or t
  misc_feature (99)..(99): n is a, c, g, or t
  misc_feature (186)..(186): n is a, c, g, or t
  misc_feature (298)..(360): n is a, c, g, or t

SEQ ID NO: 275138 - DNA, 1481 bp, Homo Sapiens; identical to SEQ ID NO: 250771

SEQ ID NO: 275139 - DNA, 1014 bp, Homo Sapiens; identical to SEQ ID NO: 250772

SEQ ID NO: 275140 - DNA, 1426 bp, Homo Sapiens; identical to SEQ ID NO: 250778
  misc_feature (1314)..(1315): n is a, c, g, or t

SEQ ID NO: 275141 - DNA, 821 bp, Homo Sapiens; identical to SEQ ID NO: 250779

SEQ ID NO: 275142 - DNA, 530 bp, Homo Sapiens; identical to SEQ ID NO: 250780
  misc_feature (447)..(447): n is a, c, g, or t
  misc_feature (510)..(510): n is a, c, g, or t

SEQ ID NO: 275143 - DNA, 2925 bp, Homo Sapiens; identical to SEQ ID NO: 250785

SEQ ID NO: 275144 - DNA, 1044 bp, Homo Sapiens; identical to SEQ ID NO: 250786
  misc_feature (843)..(843): n is a, c, g, or t
  misc_feature (888)..(888): n is a, c, g, or t
  misc_feature (941)..(941): n is a, c, g, or t
  misc_feature (950)..(950): n is a, c, g, or t
  misc_feature (986)..(986): n is a, c, g, or t
  misc_feature (997)..(997): n is a, c, g, or t
  misc_feature (1003)..(1003): n is a, c, g, or t
  misc_feature (1005)..(1005): n is a, c, g, or t
  misc_feature (1025)..(1025): n is a, c, g, or t
  misc_feature (1035)..(1035): n is a, c, g, or t
  misc_feature (1041)..(1041): n is a, c, g, or t

SEQ ID NO: 275145 - DNA, 899 bp, Homo Sapiens; identical to SEQ ID NO: 250787

SEQ ID NO: 275146 - DNA, 380 bp, Homo Sapiens; identical to SEQ ID NO: 250788
  misc_feature (218)..(218): n is a, c, g, or t
  misc_feature (253)..(253): n is a, c, g, or t
  misc_feature (341)..(341): n is a, c, g, or t
  misc_feature (355)..(355): n is a, c, g, or t
  misc_feature (363)..(363): n is a, c, g, or t

SEQ ID NO: 275147 - DNA, 468 bp, Homo Sapiens; identical to SEQ ID NO: 250789
  misc_feature (55)..(55): n is a, c, g, or t

SEQ ID NO: 275148 - DNA, 1896 bp, Homo Sapiens; identical to SEQ ID NO: 250790
  misc_feature (143)..(189): n is a, c, g, or t
  misc_feature (1648)..(1648): n is a, c, g, or t
  misc_feature (1683)..(1683): n is a, c, g, or t

SEQ ID NO: 275149 - DNA, 1223 bp, Homo Sapiens; identical to SEQ ID NO: 250791

SEQ ID NO: 275150 - DNA, 444 bp, Homo Sapiens; identical to SEQ ID NO: 250792

SEQ ID NO: 275151 - DNA, 387 bp, Homo Sapiens; identical to SEQ ID NO: 250793
  misc_feature (350)..(350): n is a, c, g, or t
  misc_feature (361)..(361): n is a, c, g, or t

SEQ ID NO: 275152 - DNA, 784 bp, Homo Sapiens; identical to SEQ ID NO: 250794

SEQ ID NO: 275153 - DNA, 634 bp, Homo Sapiens; identical to SEQ ID NO: 250795
  misc_feature (423)..(423): n is a, c, g, or t

SEQ ID NO: 275154 - DNA, 617 bp, Homo Sapiens; identical to SEQ ID NO: 250796
  misc_feature (505)..(505): n is a, c, g, or t
  misc_feature (537)..(537): n is a, c, g, or t
  misc_feature (556)..(556): n is a, c, g, or t
  misc_feature (604)..(604): n is a, c, g, or t

SEQ ID NO: 275155 - DNA, 661 bp, Homo Sapiens; identical to SEQ ID NO: 250797

SEQ ID NO: 275156 - DNA, 430 bp, Homo Sapiens; identical to SEQ ID NO: 250798

SEQ ID NO: 275157 - DNA, 539 bp, Homo Sapiens; identical to SEQ ID NO: 250799
  misc_feature (302)..(315): n is a, c, g, or t

SEQ ID NO: 275158 - DNA, 363 bp, Homo Sapiens; identical to SEQ ID NO: 250800

SEQ ID NO: 275159 - DNA, 587 bp, Homo Sapiens; identical to SEQ ID NO: 250801

SEQ ID NO: 275160 - DNA, 1965 bp, Homo Sapiens; identical to SEQ ID NO: 250802
  misc_feature (1163)..(1178): n is a, c, g, or t
  misc_feature (1292)..(1301): n is a, c, g, or t
  misc_feature (1305)..(1344): n is a, c, g, or t
  misc_feature (1349)..(1349): n is a, c, g, or t
  misc_feature (1359)..(1360): n is a, c, g, or t
  misc_feature (1365)..(1365): n is a, c, g, or t

SEQ ID NO: 275161 - DNA, 1994 bp, Homo Sapiens; identical to SEQ ID NO: 250803
  misc_feature (1803)..(1803): n is a, c, g, or t
  misc_feature (1856)..(1856): n is a, c, g, or t

SEQ ID NO: 275162 - DNA, 1626 bp, Homo Sapiens; identical to SEQ ID NO: 250804
  misc_feature (510)..(524): n is a, c, g, or t
  misc_feature (1498)..(1514): n is a, c, g, or t

SEQ ID NO: 275163 - DNA, 1412 bp, Homo Sapiens; identical to SEQ ID NO: 250807
  misc_feature (275)..(275): n is a, c, g, or t
  misc_feature (345)..(404): n is a, c, g, or t
  misc_feature (1069)..(1069): n is a, c, g, or t
  misc_feature (1095)..(1095): n is a, c, g, or t
  misc_feature (1167)..(1167): n is a, c, g, or t
  misc_feature (1261)..(1271): n is a, c, g, or t

SEQ ID NO: 275164 - DNA, 1023 bp, Homo Sapiens; identical to SEQ ID NO: 250808

SEQ ID NO: 275165 - DNA, 1039 bp, Homo Sapiens; identical to SEQ ID NO: 250809

SEQ ID NO: 275166 - DNA, 421 bp, Homo Sapiens; identical to SEQ ID NO: 250813

SEQ ID NO: 275167 - DNA, 1037 bp, Homo Sapiens; identical to SEQ ID NO: 250814
  misc_feature (929)..(930): n is a, c, g, or t
  misc_feature (933)..(934): n is a, c, g, or t
  misc_feature (936)..(936): n is a, c, g, or t
  misc_feature (938)..(938): n is a, c, g, or t
  misc_feature (975)..(975): n is a, c, g, or t
  misc_feature (981)..(981): n is a, c, g, or t
  misc_feature (1000)..(1000): n is a, c, g, or t
  misc_feature (1011)..(1011): n is a, c, g, or t

SEQ ID NO: 275168 - DNA, 1570 bp, Homo Sapiens; identical to SEQ ID NO: 250815
  misc_feature (62)..(165): n is a, c, g, or t

SEQ ID NO: 275169 - DNA, 1271 bp, Homo Sapiens; identical to SEQ ID NO: 250817

SEQ ID NO: 275170 - DNA, 1686 bp, Homo Sapiens; identical to SEQ ID NO: 250818
  misc_feature (1621)..(1621): n is a, c, g, or t

SEQ ID NO: 275171 - DNA, 858 bp, Homo Sapiens; identical to SEQ ID NO: 250820

SEQ ID NO: 275172 - DNA, 332 bp, Homo Sapiens; identical to SEQ ID NO: 250821
  misc_feature (12)..(12): n is a, c, g, or t
  misc_feature (136)..(136): n is a, c, g, or t

SEQ ID NO: 275173 - DNA, 463 bp, Homo Sapiens; identical to SEQ ID NO: 250822

SEQ ID NO: 275174 - DNA, 537 bp, Homo Sapiens; identical to SEQ ID NO: 250823
  misc_feature (241)..(281): n is a, c, g, or t
  misc_feature (285)..(298): n is a, c, g, or t
  misc_feature (306)..(362): n is a, c, g, or t
  misc_feature (382)..(435): n is a, c, g, or t

SEQ ID NO: 275175 - DNA, 330 bp, Homo Sapiens; identical to SEQ ID NO: 250824
  misc_feature (287)..(287): n is a, c, g, or t

SEQ ID NO: 275176 - DNA, 2062 bp, Homo Sapiens; identical to SEQ ID NO: 250832

SEQ ID NO: 275177 - DNA, 537 bp, Homo Sapiens; identical to SEQ ID NO: 250833
  misc_feature (400)..(400): n is a, c, g, or t
  misc_feature (409)..(409): n is a, c, g, or t
  misc_feature (433)..(433): n is a, c, g, or t
  misc_feature (446)..(446): n is a, c, g, or t
  misc_feature (454)..(454): n is a, c, g, or t
  misc_feature (463)..(463): n is a, c, g, or t
  misc_feature (484)..(494): n is a, c, g, or t
  misc_feature (520)..(520): n is a, c, g, or t

SEQ ID NO: 275178 - DNA, 994 bp, Homo Sapiens; identical to SEQ ID NO: 250837

SEQ ID NO: 275179 - DNA, 502 bp, Homo Sapiens; identical to SEQ ID NO: 250838
  misc_feature (44)..(44): n is a, c, g, or t
  misc_feature (421)..(421): n is a, c, g, or t
  misc_feature (440)..(440): n is a, c, g, or t
  misc_feature (469)..(469): n is a, c, g, or t
  misc_feature (480)..(480): n is a, c, g, or t
  misc_feature (489)..(489): n is a, c, g, or t

SEQ ID NO: 275180 - DNA, 2742 bp, Homo Sapiens; identical to SEQ ID NO: 250846

SEQ ID NO: 275181 - DNA, 966 bp, Homo Sapiens; identical to SEQ ID NO: 250847
  misc_feature (822)..(824): n is a, c, g, or t

SEQ ID NO: 275182 - DNA, 568 bp, Homo Sapiens; identical to SEQ ID NO: 250850
  misc_feature (95)..(175): n is a, c, g, or t

SEQ ID NO: 275183 - DNA, 1624 bp, Homo Sapiens; identical to SEQ ID NO: 250851
  misc_feature (1473)..(1554): n is a, c, g, or t

SEQ ID NO: 275184 - DNA, 547 bp, Homo Sapiens; identical to SEQ ID NO: 250852
  misc_feature (83)..(159): n is a, c, g, or t

SEQ ID NO: 275185 - DNA, 1098 bp, Homo Sapiens; identical to SEQ ID NO: 250856

SEQ ID NO: 275186 - DNA, 699 bp, Homo Sapiens; identical to SEQ ID NO: 250857
  misc_feature (461)..(461): n is a, c, g, or t
  misc_feature (594)..(594): n is a, c, g, or t
  misc_feature (596)..(596): n is a, c, g, or t

SEQ ID NO: 275187 - DNA, 625 bp, Homo Sapiens; identical to SEQ ID NO: 250858

SEQ ID NO: 275188 - DNA, 757 bp, Homo Sapiens; identical to SEQ ID NO: 250859

SEQ ID NO: 275189 - DNA, 975 bp, Homo Sapiens; identical to SEQ ID NO: 250864
  misc_feature (714)..(714): n is a, c, g, or t

SEQ ID NO: 275190 - DNA, 355 bp, Homo Sapiens; identical to SEQ ID NO: 250865

SEQ ID NO: 275191 - DNA, 782 bp, Homo Sapiens; identical to SEQ ID NO: 250866
  misc_feature (647)..(647): n is a, c, g, or t

SEQ ID NO: 275192 - DNA, 605 bp, Homo Sapiens; identical to SEQ ID NO: 250867

SEQ ID NO: 275193 - DNA, 1360 bp, Homo Sapiens; identical to SEQ ID NO: 250870
  misc_feature (893)..(936): n is a, c, g, or t
  misc_feature (1138)..(1182): n is a, c, g, or t

SEQ ID NO: 275194 - DNA, 684 bp, Homo Sapiens; identical to SEQ ID NO: 250871

SEQ ID NO: 275195 - DNA, 623 bp, Homo Sapiens; identical to SEQ ID NO: 250872

SEQ ID NO: 275196 - DNA, 371 bp, Homo Sapiens; identical to SEQ ID NO: 250881
  misc_feature (355)..(355): n is a, c, g, or t

SEQ ID NO: 275197 - DNA, 1253 bp, Homo Sapiens; identical to SEQ ID NO: 250882

SEQ ID NO: 275198 - DNA, 810 bp, Homo Sapiens; identical to SEQ ID NO: 250883
  misc_feature (465)..(504): n is a, c, g, or t

SEQ ID NO: 275199 - DNA, 989 bp, Homo Sapiens; identical to SEQ ID NO: 250887
  misc_feature (110)..(118): n is a, c, g, or t

SEQ ID NO: 275200 - DNA, 1323 bp, Homo Sapiens; identical to SEQ ID NO: 250888
  misc_feature (218)..(218): n is a, c, g, or t
  misc_feature (1166)..(1174): n is a, c, g, or t

SEQ ID NO: 275201 - DNA, 730 bp, Homo Sapiens; identical to SEQ ID NO: 250890

SEQ ID NO: 275202 - DNA, 1056 bp, Homo Sapiens; identical to SEQ ID NO: 250891
  misc_feature (52)..(52): n is a, c, g, or t

SEQ ID NO: 275203 - DNA, 621 bp, Homo Sapiens; identical to SEQ ID NO: 250892
  misc_feature (611)..(611): n is a, c, g, or t

SEQ ID NO: 275204 - DNA, 608 bp, Homo Sapiens; identical to SEQ ID NO: 250896
  misc_feature (434)..(434): n is a, c, g, or t

SEQ ID NO: 275205 - DNA, 1699 bp, Homo Sapiens; identical to SEQ ID NO: 250897
  misc_feature (5)..(5): n is a, c, g, or t
  misc_feature (7)..(7): n is a, c, g, or t
  misc_feature (18)..(18): n is a, c, g, or t
  misc_feature (43)..(43): n is a, c, g, or t
  misc_feature (47)..(48): n is a, c, g, or t
  misc_feature (334)..(354): n is a, c, g, or t
  misc_feature (356)..(358): n is a, c, g, or t
  misc_feature (363)..(364): n is a, c, g, or t
  misc_feature (373)..(374): n is a, c, g, or t
  misc_feature (380)..(380): n is a, c, g, or t
  misc_feature (394)..(397): n is a, c, g, or t
  misc_feature (530)..(530): n is a, c, g, or t
  misc_feature (1111)..(1263): n is a, c, g, or t
  misc_feature (1273)..(1282): n is a, c, g, or t

SEQ ID NO: 275206 - DNA, 1220 bp, Homo Sapiens; identical to SEQ ID NO: 250898

SEQ ID NO: 275207 - DNA, 1504 bp, Homo Sapiens; identical to SEQ ID NO: 250899
  misc_feature (15)..(15): n is a, c, g, or t
  misc_feature (32)..(32): n is a, c, g, or t
  misc_feature (40)..(40): n is a, c, g, or t
  misc_feature (79)..(79): n is a, c, g, or t
  misc_feature (250)..(250): n is a, c, g, or t
  misc_feature (299)..(299): n is a, c, g, or t

SEQ ID NO: 275208 - DNA, 441 bp, Homo Sapiens; identical to SEQ ID NO: 250900
  misc_feature (26)..(26): n is a, c, g, or t

SEQ ID NO: 275209 - DNA, 379 bp, Homo Sapiens; identical to SEQ ID NO: 250901

SEQ ID NO: 275210 - DNA, 669 bp, Homo Sapiens; identical to SEQ ID NO: 250902
  misc_feature (577)..(589): n is a, c, g, or t

SEQ ID NO: 275211 - DNA, 2302 bp, Homo Sapiens; identical to SEQ ID NO: 250904
  misc_feature (177)..(203): n is a, c, g, or t
  misc_feature (388)..(396): n is a, c, g, or t
  misc_feature (398)..(398): n is a, c, g, or t
  misc_feature (993)..(1071): n is a, c, g, or t

SEQ ID NO: 275212 - DNA, 374 bp, Homo Sapiens; identical to SEQ ID NO: 250905

SEQ ID NO: 275213 - DNA, 1847 bp, Homo Sapiens; identical to SEQ ID NO: 250910
  misc_feature (45)..(46): n is a, c, g, or t
  misc_feature (66)..(66): n is a, c, g, or t
  misc_feature (229)..(229): n is a, c, g, or t

SEQ ID NO: 275214 - DNA, 389 bp, Homo Sapiens; identical to SEQ ID NO: 250911

SEQ ID NO: 275215 - DNA, 447 bp, Homo Sapiens; identical to SEQ ID NO: 250912
  misc_feature (52)..(52): n is a, c, g, or t
  misc_feature (66)..(66): n is a, c, g, or t

SEQ ID NO: 275216 - DNA, 1343 bp, Homo Sapiens; identical to SEQ ID NO: 250916
  misc_feature (75)..(75): n is a, c, g, or t

SEQ ID NO: 275217 - DNA, 1397 bp, Homo Sapiens; identical to SEQ ID NO: 250917

SEQ ID NO: 275218 - DNA, 817 bp, Homo Sapiens; identical to SEQ ID NO: 250918

SEQ ID NO: 275219 - DNA, 1270 bp, Homo Sapiens; identical to SEQ ID NO: 250924

SEQ ID NO: 275220 - DNA, 544 bp, Homo Sapiens; identical to SEQ ID NO: 250925
  misc_feature (90)..(98): n is a, c, g, or t

SEQ ID NO: 275221 - DNA, 835 bp, Homo Sapiens; identical to SEQ ID NO: 250926

SEQ ID NO: 275222 - DNA, 437 bp, Homo Sapiens; identical to SEQ ID NO: 250927
  misc_feature (28)..(28): n is a, c, g, or t
  misc_feature (37)..(37): n is a, c, g, or t
  misc_feature (71)..(71): n is a, c, g, or t
  misc_feature (94)..(94): n is a, c, g, or t
  misc_feature (109)..(109): n is a, c, g, or t

SEQ ID NO: 275223 - DNA, 1043 bp, Homo Sapiens; identical to SEQ ID NO: 250929

SEQ ID NO: 275224 - DNA, 1124 bp, Homo Sapiens; identical to SEQ ID NO: 250930
  misc_feature (630)..(651): n is a, c, g, or t
  misc_feature (797)..(797): n is a, c, g, or t
  misc_feature (801)..(804): n is a, c, g, or t
  misc_feature (817)..(818): n is a, c, g, or t
  misc_feature (967)..(967): n is a, c, g, or t
  misc_feature (979)..(979): n is a, c, g, or t

SEQ ID NO: 275225 - DNA, 451 bp, Homo Sapiens; identical to SEQ ID NO: 250931

SEQ ID NO: 275226 - DNA, 497 bp, Homo Sapiens; identical to SEQ ID NO: 250932

SEQ ID NO: 275227 - DNA, 378 bp, Homo Sapiens; identical to SEQ ID NO: 250933
  misc_feature (77)..(77): n is a, c, g, or t

SEQ ID NO: 275228 - DNA, 961 bp, Homo Sapiens; identical to SEQ ID NO: 250934
  misc_feature (265)..(273): n is a, c, g, or t
  misc_feature (876)..(876): n is a, c, g, or t
  misc_feature (913)..(913): n is a, c, g, or t
  misc_feature (926)..(926): n is a, c, g, or t
  misc_feature (946)..(946): n is a, c, g, or t

SEQ ID NO: 275229 - DNA, 509 bp, Homo Sapiens; identical to SEQ ID NO: 250935
  misc_feature (17)..(17): n is a, c, g, or t
  misc_feature (27)..(27): n is a, c, g, or t
  misc_feature (32)..(32): n is a, c, g, or t
  misc_feature (63)..(63): n is a, c, g, or t
  misc_feature (111)..(111): n is a, c, g, or t

SEQ ID NO: 275230 - DNA, 457 bp, Homo Sapiens; identical to SEQ ID NO: 250936

SEQ ID NO: 275231 - DNA, 1651 bp, Homo Sapiens; identical to SEQ ID NO: 250942
  misc_feature (688)..(704): n is a, c, g, or t
  misc_feature (967)..(988): n is a, c, g, or t

SEQ ID NO: 275232 - DNA, 642 bp, Homo Sapiens; identical to SEQ ID NO: 250943
  misc_feature (278)..(346): n is a, c, g, or t

SEQ ID NO: 275233 - DNA, 932 bp, Homo Sapiens; identical to SEQ ID NO: 250944
  misc_feature (727)..(743): n is a, c, g, or t
  misc_feature (797)..(797): n is a, c, g, or t

SEQ ID NO: 275234 - DNA, 627 bp, Homo Sapiens; identical to SEQ ID NO: 250950
  misc_feature (406)..(406): n is a, c, g, or t
  misc_feature (481)..(481): n is a, c, g, or t
  misc_feature (531)..(531): n is a, c, g, or t
  misc_feature (608)..(608): n is a, c, g, or t

SEQ ID NO: 275235 - DNA, 1311 bp, Homo Sapiens; identical to SEQ ID NO: 250951
  misc_feature (814)..(814): n is a, c, g, or t

SEQ ID NO: 275236 - DNA, 615 bp, Homo Sapiens; identical to SEQ ID NO: 250952
  misc_feature (476)..(476): n is a, c, g, or t
  misc_feature (533)..(533): n is a, c, g, or t
  misc_feature (562)..(562): n is a, c, g, or t
  misc_feature (568)..(568): n is a, c, g, or t
  misc_feature (576)..(576): n is a, c, g, or t

SEQ ID NO: 275237 - DNA, 1480 bp, Homo Sapiens; identical to SEQ ID NO: 250954

SEQ ID NO: 275238 - DNA, 1047 bp, Homo Sapiens; identical to SEQ ID NO: 250955
  misc_feature (12)..(12): n is a, c, g, or t
  misc_feature (23)..(23): n is a, c, g, or t
  misc_feature (46)..(46): n is a, c, g, or t

SEQ ID NO: 275239 - DNA, 544 bp, Homo Sapiens; identical to SEQ ID NO: 250974

SEQ ID NO: 275240 - DNA, 969 bp, Homo Sapiens; identical to SEQ ID NO: 250975
  misc_feature (340)..(372): n is a, c, g, or t
  misc_feature (743)..(769): n is a, c, g, or t
  misc_feature (949)..(949): n is a, c, g, or t

SEQ ID NO: 275241 - DNA, 1062 bp, Homo Sapiens; identical to SEQ ID NO: 250982
  misc_feature (956)..(956): n is a, c, g, or t
  misc_feature (1031)..(1031): n is a, c, g, or t
  misc_feature (1042)..(1042): n is a, c, g, or t
  misc_feature (1045)..(1045): n is a, c, g, or t

SEQ ID NO: 275242 - DNA, 1184 bp, Homo Sapiens; identical to SEQ ID NO: 250983

SEQ ID NO: 275243 - DNA, 1257 bp, Homo Sapiens; identical to SEQ ID NO: 250988

SEQ ID NO: 275244 - DNA, 1267 bp, Homo Sapiens; identical to SEQ ID NO: 250989
  misc_feature (1078)..(1078): n is a, c, g, or t
  misc_feature (1162)..(1162): n is a, c, g, or t
  misc_feature (1236)..(1236): n is a, c, g, or t

SEQ ID NO: 275245 - DNA, 934 bp, Homo Sapiens; identical to SEQ ID NO: 250990

SEQ ID NO: 275246 - DNA, 697 bp, Homo Sapiens; identical to SEQ ID NO: 250991

SEQ ID NO: 275247 - DNA, 421 bp, Homo Sapiens; identical to SEQ ID NO: 250992
  misc_feature (359)..(359): n is a, c, g, or t
  misc_feature (376)..(376): n is a, c, g, or t

SEQ ID NO: 275248 - DNA, 567 bp, Homo Sapiens; identical to SEQ ID NO: 250993

SEQ ID NO: 275249 - DNA, 357 bp, Homo Sapiens; identical to SEQ ID NO: 250995

SEQ ID NO: 275250 - DNA, 651 bp, Homo Sapiens; identical to SEQ ID NO: 250996

SEQ ID NO: 275251 - DNA, 931 bp, Homo Sapiens; identical to SEQ ID NO: 79946
  misc_feature (68)..(115): n is a, c, g, or t
  misc_feature (128)..(363): n is a, c, g, or t

SEQ ID NO: 275252 - DNA, 872 bp, Homo Sapiens; identical to SEQ ID NO: 171258
  misc_feature (422)..(435): n is a, c, g, or t

SEQ ID NO: 275253 - DNA, 281 bp, Homo Sapiens; identical to SEQ ID NO: 79945

SEQ ID NO: 275254 - DNA, 585 bp, Homo Sapiens; identical to SEQ ID NO: 251002

SEQ ID NO: 275255 - DNA, 436 bp, Homo Sapiens; identical to SEQ ID NO: 251003
  misc_feature (403)..(403): n is a, c, g, or t
  misc_feature (410)..(410): n is a, c, g, or t

SEQ ID NO: 275256 - DNA, 790 bp, Homo Sapiens; identical to SEQ ID NO: 251018

SEQ ID NO: 275257 - DNA, 665 bp, Homo Sapiens; identical to SEQ ID NO: 251019

SEQ ID NO: 275258 - DNA, 1372 bp, Homo Sapiens; identical to SEQ ID NO: 251020

SEQ ID NO: 275259 - DNA, 462 bp, Homo Sapiens; identical to SEQ ID NO: 251021
  misc_feature (153)..(153): n is a, c, g, or t

SEQ ID NO: 275260 - DNA, 1971 bp, Homo Sapiens; identical to SEQ ID NO: 251022

SEQ ID NO: 275261 - DNA, 261 bp, Homo Sapiens; identical to SEQ ID NO: 251023
  misc_feature (102)..(152): n is a, c, g, or t

SEQ ID NO: 275262 - DNA, 1206 bp, Homo Sapiens; identical to SEQ ID NO: 251029
  misc_feature (1022)..(1022): n is a, c, g, or t

SEQ ID NO: 275263 - DNA, 500 bp, Homo Sapiens; identical to SEQ ID NO: 251030
  misc_feature (389)..(389): n is a, c, g, or t
  misc_feature (473)..(473): n is a, c, g, or t

SEQ ID NO: 275264 - DNA, 1547 bp, Homo Sapiens; identical to SEQ ID NO: 251033
  misc_feature (698)..(719): n is a, c, g, or t

SEQ ID NO: 275265 - DNA, 589 bp, Homo Sapiens; identical to SEQ ID NO: 251034

SEQ ID NO: 275266 - DNA, 1286 bp, Homo Sapiens; identical to SEQ ID NO: 251035
  misc_feature (18)..(18): n is a, c, g, or t
  misc_feature (30)..(30): n is a, c, g, or t
  misc_feature (45)..(45): n is a, c, g, or t
  misc_feature (64)..(64): n is a, c, g, or t
  misc_feature (72)..(72): n is a, c, g, or t
  misc_feature (77)..(77): n is a, c, g, or t
  misc_feature (109)..(109): n is a, c, g, or t
  misc_feature (118)..(118): n is a, c, g, or t
  misc_feature (184)..(184): n is a, c, g, or t
  misc_feature (826)..(826): n is a, c, g, or t
  misc_feature (1017)..(1026): n is a, c, g, or t

SEQ ID NO: 275267 - DNA, 447 bp, Homo Sapiens; identical to SEQ ID NO: 251036
  misc_feature (24)..(24): n is a, c, g, or t
  misc_feature (69)..(69): n is a, c, g, or t
  misc_feature (100)..(100): n is a, c, g, or t

SEQ ID NO: 275268 - DNA, 603 bp, Homo Sapiens; identical to SEQ ID NO: 251039

SEQ ID NO: 275269 - DNA, 397 bp, Homo Sapiens; identical to SEQ ID NO: 251040
  misc_feature (284)..(284): n is a, c, g, or t
  misc_feature (352)..(352): n is a, c, g, or t
  misc_feature (382)..(382): n is a, c, g, or t

SEQ ID NO: 275270 - DNA, 372 bp, Homo Sapiens; identical to SEQ ID NO: 251043

SEQ ID NO: 275271 - DNA, 1381 bp, Homo Sapiens; identical to SEQ ID NO: 251044

SEQ ID NO: 275272 - DNA, 547 bp, Homo Sapiens; identical to SEQ ID NO: 251051

SEQ ID NO: 275273 - DNA, 690 bp, Homo Sapiens; identical to SEQ ID NO: 251052

SEQ ID NO: 275274 - DNA, 539 bp, Homo Sapiens; identical to SEQ ID NO: 251053
  misc_feature (518)..(518): n is a, c, g, or t

SEQ ID NO: 275275 - DNA, 1129 bp, Homo Sapiens; identical to SEQ ID NO: 251054
  misc_feature (348)..(356): n is a, c, g, or t

SEQ ID NO: 275276 - DNA, 1234 bp, Homo Sapiens; identical to SEQ ID NO: 251055
  misc_feature (36)..(36): n is a, c, g, or t
  misc_feature (78)..(78): n is a, c, g, or t
  misc_feature (671)..(671): n is a, c, g, or t

SEQ ID NO: 275277 - DNA, 1389 bp, Homo Sapiens; identical to SEQ ID NO: 251056

SEQ ID NO: 275278 - DNA, 673 bp, Homo Sapiens; identical to SEQ ID NO: 251061

SEQ ID NO: 275279 - DNA, 636 bp, Homo Sapiens; identical to SEQ ID NO: 251062

SEQ ID NO: 275280 - DNA, 1248 bp, Homo Sapiens; identical to SEQ ID NO: 251063
  misc_feature (42)..(42): n is a, c, g, or t
  misc_feature (57)..(57): n is a, c, g, or t
  misc_feature (74)..(74): n is a, c, g, or t
  misc_feature (100)..(100): n is a, c, g, or t
  misc_feature (113)..(113): n is a, c, g, or t
  misc_feature (119)..(119): n is a, c, g, or t
  misc_feature (135)..(135): n is a, c, g, or t
  misc_feature (658)..(668): n is a, c, g, or t

SEQ ID NO: 275281 - DNA, 329 bp, Homo Sapiens; identical to SEQ ID NO: 251064

SEQ ID NO: 275282 - DNA, 1823 bp, Homo Sapiens; identical to SEQ ID NO: 251084
  misc_feature (438)..(466): n is a, c, g, or t
  misc_feature (1799)..(1799): n is a, c, g, or t

SEQ ID NO: 275283 - DNA, 1712 bp, Homo Sapiens; identical to SEQ ID NO: 251085
  misc_feature (11)..(11): n is a, c, g, or t
  misc_feature (37)..(37): n is a, c, g, or t
  misc_feature (52)..(52): n is a, c, g, or t

SEQ ID NO: 275284 - DNA, 1314 bp, Homo Sapiens; identical to SEQ ID NO: 251092
  misc_feature (1258)..(1258): n is a, c, g, or t

SEQ ID NO: 275285 - DNA, 160 bp, Homo Sapiens; identical to SEQ ID NO: 251093

SEQ ID NO: 275286 - DNA, 1553 bp, Homo Sapiens; identical to SEQ ID NO: 251096

SEQ ID NO: 275287 - DNA, 520 bp, Homo Sapiens; identical to SEQ ID NO: 251097
  misc_feature (25)..(25): n is a, c, g, or t
  misc_feature (39)..(39): n is a, c, g, or t

SEQ ID NO: 275288 - DNA, 525 bp, Homo Sapiens; identical to SEQ ID NO: 251098

SEQ ID NO: 275289 - DNA, 468 bp, Homo Sapiens; identical to SEQ ID NO: 251099

SEQ ID NO: 275290 - DNA, 1239 bp, Homo Sapiens; identical to SEQ ID NO: 251101

SEQ ID NO: 275291 - DNA, 390 bp, Homo Sapiens; identical to SEQ ID NO: 251102

SEQ ID NO: 275292 - DNA, 886 bp, Homo Sapiens; identical to SEQ ID NO: 97823
  misc_feature (778)..(786): n is a, c, g, or t
  misc_feature (827)..(827): n is a, c, g, or t

SEQ ID NO: 275293 - DNA, 934 bp, Homo Sapiens; identical to SEQ ID NO: 251104

SEQ ID NO: 275294 - DNA, 627 bp, Homo Sapiens; identical to SEQ ID NO: 251105

SEQ ID NO: 275295 - DNA, 419 bp, Homo Sapiens; identical to SEQ ID NO: 251106
  misc_feature (39)..(39): n is a, c, g, or t
  misc_feature (47)..(47): n is a, c, g, or t
  misc_feature (89)..(89): n is a, c, g, or t

SEQ ID NO: 275296 - DNA, 687 bp, Homo Sapiens; identical to SEQ ID NO: 251109
  misc_feature (62)..(62): n is a, c, g, or t
  misc_feature (73)..(73): n is a, c, g, or t
  misc_feature (172)..(180): n is a, c, g, or t
  misc_feature (511)..(542): n is a, c, g, or t
  misc_feature (551)..(587): n is a, c, g, or t

SEQ ID NO: 275297 - DNA, 865 bp, Homo Sapiens; identical to SEQ ID NO: 251110
  misc_feature (696)..(696): n is a, c, g, or t
  misc_feature (698)..(698): n is a, c, g, or t
  misc_feature (700)..(733): n is a, c, g, or t
  misc_feature (752)..(752): n is a, c, g, or t

SEQ ID NO: 275298 - DNA, 667 bp, Homo Sapiens; identical to SEQ ID NO: 251112

SEQ ID NO: 275299 - DNA, 372 bp, Homo Sapiens; identical to SEQ ID NO: 251113

SEQ ID NO: 275300 - DNA, 1221 bp, Homo Sapiens; identical to SEQ ID NO: 251118

SEQ ID NO: 275301 - DNA, 555 bp, Homo Sapiens; identical to SEQ ID NO: 251119

SEQ ID NO: 275302 - DNA, 484 bp, Homo Sapiens; identical to SEQ ID NO: 251123

SEQ ID NO: 275303 - DNA, 704 bp, Homo Sapiens; identical to SEQ ID NO: 251124
  misc_feature (112)..(112): n is a, c, g, or t

SEQ ID NO: 275304 - DNA, 2100 bp, Homo Sapiens; identical to SEQ ID NO: 251125
  misc_feature (714)..(725): n is a, c, g, or t
  misc_feature (1303)..(1303): n is a, c, g, or t
  misc_feature (1349)..(1349): n is a, c, g, or t
  misc_feature (2085)..(2085): n is a, c, g, or t

SEQ ID NO: 275305 - DNA, 520 bp, Homo Sapiens; identical to SEQ ID NO: 251126
  misc_feature (137)..(137): n is a, c, g, or t
  misc_feature (157)..(157): n is a, c, g, or t

SEQ ID NO: 275306 - DNA, 489 bp, Homo Sapiens; identical to SEQ ID NO: 251127
  misc_feature (16)..(16): n is a, c, g, or t

SEQ ID NO: 275307 - DNA, 834 bp, Homo Sapiens; identical to SEQ ID NO: 251133

SEQ ID NO: 275308 - DNA, 565 bp, Homo Sapiens; identical to SEQ ID NO: 251134
  misc_feature (21)..(21): n is a, c, g, or t
  misc_feature (39)..(39): n is a, c, g, or t
  misc_feature (60)..(60): n is a, c, g, or t
  misc_feature (72)..(72): n is a, c, g, or t
  misc_feature (92)..(92): n is a, c, g, or t
  misc_feature (104)..(152): n is a, c, g, or t
  misc_feature (162)..(162): n is a, c, g, or t
  misc_feature (176)..(176): n is a, c, g, or t
  misc_feature (204)..(204): n is a, c, g, or t
  misc_feature (224)..(224): n is a, c, g, or t
  misc_feature (342)..(342): n is a, c, g, or t
  misc_feature (495)..(495): n is a, c, g, or t
  misc_feature (547)..(547): n is a, c, g, or t

SEQ ID NO: 275309 - DNA, 849 bp, Homo Sapiens; identical to SEQ ID NO: 251155

SEQ ID NO: 275310 - DNA, 347 bp, Homo Sapiens; identical to SEQ ID NO: 251156

SEQ ID NO: 275311 - DNA, 1711 bp, Homo Sapiens; identical to SEQ ID NO: 251165
  misc_feature (146)..(146): n is a, c, g, or t
  misc_feature (537)..(537): n is a, c, g, or t
  misc_feature (851)..(903): n is a, c, g, or t
  misc_feature (1584)..(1584): n is a, c, g, or t
  misc_feature (1603)..(1603): n is a, c, g, or t

SEQ ID NO: 275312 - DNA, 586 bp, Homo Sapiens; identical to SEQ ID NO: 251166
  misc_feature (453)..(453): n is a, c, g, or t
  misc_feature (508)..(508): n is a, c, g, or t
  misc_feature (563)..(563): n is a, c, g, or t

SEQ ID NO: 275313 - DNA, 668 bp, Homo Sapiens; identical to SEQ ID NO: 251171
  misc_feature (576)..(576): n is a, c, g, or t
  misc_feature (582)..(582): n is a, c, g, or t
  misc_feature (590)..(590): n is a, c, g, or t
  misc_feature (592)..(592): n is a, c, g, or t
  misc_feature (594)..(595): n is a, c, g, or t
  misc_feature (598)..(598): n is a, c, g, or t
  misc_feature (600)..(600): n is a, c, g, or t
  misc_feature (609)..(610): n is a, c, g, or t
  misc_feature (621)..(621): n is a, c, g, or t
  misc_feature (638)..(638): n is a, c, g, or t

SEQ ID NO: 275314 - DNA, 662 bp, Homo Sapiens; identical to SEQ ID NO: 251172
  misc_feature (267)..(267): n is a, c, g, or t
  misc_feature (274)..(393): n is a, c, g, or t
  misc_feature (407)..(526): n is a, c, g, or t
  misc_feature (633)..(633): n is a, c, g, or t

SEQ ID NO: 275315 - DNA, 424 bp, Homo Sapiens; identical to SEQ ID NO: 251173

SEQ ID NO: 275316 - DNA, 903 bp, Homo Sapiens; identical to SEQ ID NO: 251186
  misc_feature (121)..(121): n is a, c, g, or t
  misc_feature (631)..(641): n is a, c, g, or t
  misc_feature (835)..(835): n is a, c, g, or t

SEQ ID NO: 275317 - DNA, 390 bp, Homo Sapiens; identical to SEQ ID NO: 251187
  misc_feature (335)..(347): n is a, c, g, or t

SEQ ID NO: 275318 - DNA, 1337 bp, Homo Sapiens; identical to SEQ ID NO: 251193

SEQ ID NO: 275319 - DNA, 488 bp, Homo Sapiens; identical to SEQ ID NO: 251194
  misc_feature (392)..(392): n is a, c, g, or t
  misc_feature (427)..(427): n is a, c, g, or t
  misc_feature (451)..(451): n is a, c, g, or t

SEQ ID NO: 275320 - DNA, 694 bp, Homo Sapiens; identical to SEQ ID NO: 251198

SEQ ID NO: 275321 - DNA, 949 bp, Homo Sapiens; identical to SEQ ID NO: 251199
  misc_feature (145)..(155): n is a, c, g, or t

SEQ ID NO: 275322 - DNA, 391 bp, Homo Sapiens; identical to SEQ ID NO: 251202
  misc_feature (270)..(270): n is a, c, g, or t
  misc_feature (299)..(299): n is a, c, g, or t
  misc_feature (318)..(318): n is a, c, g, or t
  misc_feature (361)..(361): n is a, c, g, or t
  misc_feature (368)..(368): n is a, c, g, or t
  misc_feature (377)..(377): n is a, c, g, or t

SEQ ID NO: 275323 - DNA, 451 bp, Homo Sapiens; identical to SEQ ID NO: 251203

SEQ ID NO: 275324 - DNA, 370 bp, Homo Sapiens; identical to SEQ ID NO: 251212
  misc_feature (331)..(331): n is a, c, g, or t
  misc_feature (343)..(343): n is a, c, g, or t

SEQ ID NO: 275325 - DNA, 1570 bp, Homo Sapiens; identical to SEQ ID NO: 251213

SEQ ID NO: 275326 - DNA, 955 bp, Homo Sapiens; identical to SEQ ID NO: 251215
  misc_feature (131)..(132): n is a, c, g, or t
  misc_feature (156)..(156): n is a, c, g, or t
  misc_feature (274)..(274): n is a, c, g, or t

SEQ ID NO: 275327 - DNA, 1049 bp, Homo Sapiens; identical to SEQ ID NO: 251216

SEQ ID NO: 275328 - DNA, 1188 bp, Homo Sapiens; identical to SEQ ID NO: 251217
  misc_feature (11)..(11): n is a, c, g, or t
  misc_feature (27)..(27): n is a, c, g, or t
  misc_feature (35)..(35): n is a, c, g, or t
  misc_feature (50)..(50): n is a, c, g, or t
  misc_feature (62)..(62): n is a, c, g, or t
  misc_feature (126)..(126): n is a, c, g, or t
  misc_feature (128)..(128): n is a, c, g, or t
  misc_feature (149)..(149): n is a, c, g, or t

SEQ ID NO: 275329 - DNA, 431 bp, Homo Sapiens; identical to SEQ ID NO: 251218

SEQ ID NO: 275330 - DNA, 781 bp, Homo Sapiens; identical to SEQ ID NO: 251221

SEQ ID NO: 275331 - DNA, 953 bp, Homo Sapiens; identical to SEQ ID NO: 251222

SEQ ID NO: 275332 - DNA, 481 bp, Homo Sapiens; identical to SEQ ID NO: 251223
  misc_feature (43)..(43): n is a, c, g, or t
  misc_feature (390)..(390): n is a, c, g, or t
  misc_feature (437)..(437): n is a, c, g, or t
  misc_feature (452)..(452): n is a, c, g, or t

SEQ ID NO: 275333 - DNA, 421 bp, Homo Sapiens; identical to SEQ ID NO: 251224
  misc_feature (244)..(244): n is a, c, g, or t

SEQ ID NO: 275334 - DNA, 599 bp, Homo Sapiens; identical to SEQ ID NO: 251230

SEQ ID NO: 275335 - DNA, 1445 bp, Homo Sapiens; identical to SEQ ID NO: 251231

SEQ ID NO: 275336 - DNA, 1541 bp, Homo Sapiens; identical to SEQ ID NO: 251233
  misc_feature (70)..(115): n is a, c, g, or t
  misc_feature (134)..(174): n is a, c, g, or t
  misc_feature (425)..(437): n is a, c, g, or t
  misc_feature (782)..(791): n is a, c, g, or t

SEQ ID NO: 275337 - DNA, 482 bp, Homo Sapiens; identical to SEQ ID NO: 251234

SEQ ID NO: 275338 - DNA, 829 bp, Homo Sapiens; identical to SEQ ID NO: 251238

SEQ ID NO: 275339 - DNA, 1071 bp, Homo Sapiens; identical to SEQ ID NO: 251239
  misc_feature (336)..(410): n is a, c, g, or t
  misc_feature (449)..(537): n is a, c, g, or t
  misc_feature (577)..(637): n is a, c, g, or t

SEQ ID NO: 275340 - DNA, 947 bp, Homo Sapiens; identical to SEQ ID NO: 251240
  misc_feature (75)..(76): n is a, c, g, or t
  misc_feature (82)..(82): n is a, c, g, or t
  misc_feature (799)..(799): n is a, c, g, or t

SEQ ID NO: 275341 - DNA, 916 bp, Homo Sapiens; identical to SEQ ID NO: 251243
  misc_feature (628)..(628): n is a, c, g, or t
  misc_feature (648)..(648): n is a, c, g, or t
  misc_feature (657)..(657): n is a, c, g, or t
  misc_feature (742)..(783): n is a, c, g, or t

SEQ ID NO: 275342 - DNA, 1765 bp, Homo Sapiens; identical to SEQ ID NO: 251244

SEQ ID NO: 275343 - DNA, 571 bp, Homo Sapiens; identical to SEQ ID NO: 251245

SEQ ID NO: 275344 - DNA, 731 bp, Homo Sapiens; identical to SEQ ID NO: 251246
  misc_feature (685)..(685): n is a, c, g, or t

SEQ ID NO: 275345 - DNA, 1089 bp, Homo Sapiens; identical to SEQ ID NO: 251247
  misc_feature (606)..(606): n is a, c, g, or t
  misc_feature (624)..(624): n is a, c, g, or t
  misc_feature (641)..(641): n is a, c, g, or t
  misc_feature (648)..(648): n is a, c, g, or t

SEQ ID NO: 275346 - DNA, 463 bp, Homo Sapiens; identical to SEQ ID NO: 251248
  misc_feature (48)..(48): n is a, c, g, or t

SEQ ID NO: 275347 - DNA, 774 bp, Homo Sapiens; identical to SEQ ID NO: 251250
  misc_feature (657)..(705): n is a, c, g, or t

SEQ ID NO: 275348 - DNA, 1468 bp, Homo Sapiens; identical to SEQ ID NO: 251251
  misc_feature (694)..(749): n is a, c, g, or t
  misc_feature (1271)..(1329): n is a, c, g, or t

SEQ ID NO: 275349 - DNA, 672 bp, Homo Sapiens; identical to SEQ ID NO: 251261

SEQ ID NO: 275350 - DNA, 481 bp, Homo Sapiens; identical to SEQ ID NO: 251262
  misc_feature (31)..(31): n is a, c, g, or t
  misc_feature (118)..(130): n is a, c, g, or t
  misc_feature (430)..(430): n is a, c, g, or t
  misc_feature (461)..(461): n is a, c, g, or t

SEQ ID NO: 275351 - DNA, 1006 bp, Homo Sapiens; identical to SEQ ID NO: 251263

SEQ ID NO: 275352 - DNA, 2004 bp, Homo Sapiens; identical to SEQ ID NO: 251264

SEQ ID NO: 275353 - DNA, 1446 bp, Homo Sapiens; identical to SEQ ID NO: 251265

SEQ ID NO: 275354 - DNA, 1253 bp, Homo Sapiens; identical to SEQ ID NO: 251268
  misc_feature (1007)..(1118): n is a, c, g, or t
  misc_feature (1127)..(1141): n is a, c, g, or t

SEQ ID NO: 275355 - DNA, 459 bp, Homo Sapiens; identical to SEQ ID NO: 251269

SEQ ID NO: 275356 - DNA, 417 bp, Homo Sapiens; identical to SEQ ID NO: 251270

SEQ ID NO: 275357 - DNA, 735 bp, Homo Sapiens; identical to SEQ ID NO: 251274
  misc_feature (92)..(92): n is a, c, g, or t

SEQ ID NO: 275358 - DNA, 632 bp, Homo Sapiens; identical to SEQ ID NO: 251275
  misc_feature (97)..(109): n is a, c, g, or t

SEQ ID NO: 275359 - DNA, 1836 bp, Homo Sapiens; identical to SEQ ID NO: 251276
  misc_feature (1402)..(1402): n is a, c, g, or t
  misc_feature (1458)..(1471): n is a, c, g, or t
  misc_feature (1641)..(1641): n is a, c, g, or t
  misc_feature (1784)..(1784): n is a, c, g, or t

SEQ ID NO: 275360 - DNA, 1729 bp, Homo Sapiens; identical to SEQ ID NO: 251277
  misc_feature (547)..(644): n is a, c, g, or t
  misc_feature (1273)..(1286): n is a, c, g, or t
  misc_feature (1339)..(1361): n is a, c, g, or t
  misc_feature (1615)..(1615): n is a, c, g, or t
  misc_feature (1642)..(1643): n is a, c, g, or t
  misc_feature (1715)..(1715): n is a, c, g, or t
  misc_feature (1723)..(1723): n is a, c, g, or t

SEQ ID NO: 275361 - DNA, 1170 bp, Homo Sapiens; identical to SEQ ID NO: 251278
  misc_feature (31)..(31): n is a, c, g, or t
  misc_feature (58)..(58): n is a, c, g, or t
  misc_feature (599)..(612): n is a, c, g, or t
  misc_feature (665)..(687): n is a, c, g, or t
  misc_feature (1032)..(1032): n is a, c, g, or t
  misc_feature (1066)..(1066): n is a, c, g, or t
  misc_feature (1070)..(1070): n is a, c, g, or t
  misc_feature (1095)..(1095): n is a, c, g, or t
  misc_feature (1104)..(1113): n is a, c, g, or t
  misc_feature (1125)..(1126): n is a, c, g, or t
  misc_feature (1135)..(1135): n is a, c, g, or t
  misc_feature (1139)..(1140): n is a, c, g, or t
  misc_feature (1154)..(1155): n is a, c, g, or t
  misc_feature (1159)..(1159): n is a, c, g, or t

SEQ ID NO: 275362 - DNA, 1215 bp, Homo Sapiens; identical to SEQ ID NO: 251279

SEQ ID NO: 275363 - DNA, 784 bp, Homo Sapiens; identical to SEQ ID NO: 251280
  misc_feature (309)..(309): n is a, c, g, or t
  misc_feature (563)..(576): n is a, c, g, or t
  misc_feature (638)..(638): n is a, c, g, or t

SEQ ID NO: 275364 - DNA, 960 bp, Homo Sapiens; identical to SEQ ID NO: 251281

SEQ ID NO: 275365 - DNA, 1091 bp, Homo Sapiens; identical to SEQ ID NO: 251282
  misc_feature (663)..(663): n is a, c, g, or t

SEQ ID NO: 275366 - DNA, 424 bp, Homo Sapiens; identical to SEQ ID NO: 251283

SEQ ID NO: 275367 - DNA, 1447 bp, Homo Sapiens; identical to SEQ ID NO: 251284

SEQ ID NO: 275368 - DNA, 1180 bp, Homo Sapiens; identical to SEQ ID NO: 251285

SEQ ID NO: 275369 - DNA, 607 bp, Homo Sapiens; identical to SEQ ID NO: 251286

SEQ ID NO: 275370 - DNA, 836 bp, Homo Sapiens; identical to SEQ ID NO: 167800
  misc_feature (702)..(702): n is a, c, g, or t
  misc_feature (704)..(706): n is a, c, g, or t

SEQ ID NO: 275371 - DNA, 492 bp, Homo Sapiens; identical to SEQ ID NO: 251288

SEQ ID NO: 275372 - DNA, 2150 bp, Homo Sapiens; identical to SEQ ID NO: 251289
  misc_feature (1129)..(1146): n is a, c, g, or t
  misc_feature (1165)..(1222): n is a, c, g, or t

SEQ ID NO: 275373 - DNA, 374 bp, Homo Sapiens; identical to SEQ ID NO: 251290
  misc_feature (176)..(190): n is a, c, g, or t

SEQ ID NO: 275374 - DNA, 650 bp, Homo Sapiens; identical to SEQ ID NO: 251291
  misc_feature (460)..(477): n is a, c, g, or t

SEQ ID NO: 275375 - DNA, 721 bp, Homo Sapiens; identical to SEQ ID NO: 251292
  misc_feature (441)..(461): n is a, c, g, or t

SEQ ID NO: 275376 - DNA, 2566 bp, Homo Sapiens; identical to SEQ ID NO: 251293
  misc_feature (1011)..(1011): n is a, c, g, or t
  misc_feature (2024)..(2168): n is a, c, g, or t
  misc_feature (2177)..(2190): n is a, c, g, or t
  misc_feature (2216)..(2224): n is a, c, g, or t
  misc_feature (2300)..(2392): n is a, c, g, or t
  misc_feature (2409)..(2418): n is a, c, g, or t

SEQ ID NO: 275377 - DNA, 497 bp, Homo Sapiens; identical to SEQ ID NO: 251294
  misc_feature (66)..(89): n is a, c, g, or t

SEQ ID NO: 275378 - DNA, 715 bp, Homo Sapiens; identical to SEQ ID NO: 251295
  misc_feature (25)..(25): n is a, c, g, or t
  misc_feature (115)..(115): n is a, c, g, or t
  misc_feature (526)..(526): n is a, c, g, or t
  misc_feature (569)..(569): n is a, c, g, or t
  misc_feature (580)..(580): n is a, c, g, or t
  misc_feature (597)..(597): n is a, c, g, or t
  misc_feature (627)..(627): n is a, c, g, or t
  misc_feature (680)..(680): n is a, c, g, or t
  misc_feature (704)..(704): n is a, c, g, or t

SEQ ID NO: 275379 - DNA, 913 bp, Homo Sapiens; identical to SEQ ID NO: 251297
  misc_feature (27)..(27): n is a, c, g, or t

SEQ ID NO: 275380 - DNA, 789 bp, Homo Sapiens; identical to SEQ ID NO: 178410

SEQ ID NO: 275381 - DNA, 1090 bp, Homo Sapiens; identical to SEQ ID NO: 251301

SEQ ID NO: 275382 - DNA, 369 bp, Homo Sapiens; identical to SEQ ID NO: 251302

SEQ ID NO: 275383 - DNA, 2300 bp, Homo Sapiens; identical to SEQ ID NO: 251308

SEQ ID NO: 275384 - DNA, 1738 bp, Homo Sapiens; identical to SEQ ID NO: 251309

SEQ ID NO: 275385 - DNA, 2224 bp, Homo Sapiens; identical to SEQ ID NO: 251318
  misc_feature (96)..(126): n is a, c, g, or t
  misc_feature (1546)..(1546): n is a, c, g, or t
  misc_feature (1549)..(1551): n is a, c, g, or t

SEQ ID NO: 275386 - DNA, 790 bp, Homo Sapiens; identical to SEQ ID NO: 251319
  misc_feature (477)..(507): n is a, c, g, or t

SEQ ID NO: 275387 - DNA, 1334 bp, Homo Sapiens; identical to SEQ ID NO: 251320

SEQ ID NO: 275388 - DNA, 911 bp, Homo Sapiens; identical to SEQ ID NO: 251321
  misc_feature (20)..(20): n is a, c, g, or t

SEQ ID NO: 275389 - DNA, 491 bp, Homo Sapiens; identical to SEQ ID NO: 251322
  misc_feature (18)..(18): n is a, c, g, or t
  misc_feature (32)..(32): n is a, c, g, or t
  misc_feature (49)..(49): n is a, c, g, or t
  misc_feature (74)..(74): n is a, c, g, or t

SEQ ID NO: 275390 - DNA, 1042 bp, Homo Sapiens; identical to SEQ ID NO: 251326
  misc_feature (781)..(842): n is a, c, g, or t
  misc_feature (987)..(987): n is a, c, g, or t
  misc_feature (1000)..(1000): n is a, c, g, or t
  misc_feature (1028)..(1028): n is a, c, g, or t

SEQ ID NO: 275391 - DNA, 772 bp, Homo Sapiens; identical to SEQ ID NO: 251327

SEQ ID NO: 275392 - DNA, 608 bp, Homo Sapiens; identical to SEQ ID NO: 251328

SEQ ID NO: 275393 - DNA, 366 bp, Homo Sapiens; identical to SEQ ID NO: 251329
  misc_feature (62)..(63): n is a, c, g, or t
  misc_feature (69)..(70): n is a, c, g, or t
  misc_feature (72)..(72): n is a, c, g, or t
  misc_feature (83)..(83): n is a, c, g, or t

SEQ ID NO: 275394 - DNA, 597 bp, Homo Sapiens; identical to SEQ ID NO: 251334
  misc_feature (77)..(96): n is a, c, g, or t

SEQ ID NO: 275395 - DNA, 1395 bp, Homo Sapiens; identical to SEQ ID NO: 251335
  misc_feature (53)..(95): n is a, c, g, or t
  misc_feature (177)..(196): n is a, c, g, or t
  misc_feature (1010)..(1010): n is a, c, g, or t
  misc_feature (1027)..(1027): n is a, c, g, or t
  misc_feature (1311)..(1311): n is a, c, g, or t
  misc_feature (1318)..(1318): n is a, c, g, or t
  misc_feature (1336)..(1336): n is a, c, g, or t
  misc_feature (1352)..(1352): n is a, c, g, or t
  misc_feature (1369)..(1369): n is a, c, g, or t

SEQ ID NO: 275396 - DNA, 990 bp, Homo Sapiens; identical to SEQ ID NO: 251336
  misc_feature (65)..(107): n is a, c, g, or t
  misc_feature (189)..(208): n is a, c, g, or t

SEQ ID NO: 275397 - DNA, 1108 bp, Homo Sapiens; identical to SEQ ID NO: 251341

SEQ ID NO: 275398 - DNA, 355 bp, Homo Sapiens; identical to SEQ ID NO: 251342
  misc_feature (25)..(25): n is a, c, g, or t
  misc_feature (31)..(31): n is a, c, g, or t
  misc_feature (52)..(52): n is a, c, g, or t

SEQ ID NO: 275399 - DNA, 721 bp, Homo Sapiens; identical to SEQ ID NO: 251347

SEQ ID NO: 275400 - DNA, 1693 bp, Homo Sapiens; identical to SEQ ID NO: 251348

SEQ ID NO: 275401 - DNA, 587 bp, Homo Sapiens; identical to SEQ ID NO: 251349

SEQ ID NO: 275402 - DNA, 761 bp, Homo Sapiens; identical to SEQ ID NO: 251353
  misc_feature (294)..(355): n is a, c, g, or t

SEQ ID NO: 275403 - DNA, 1317 bp, Homo Sapiens; identical to SEQ ID NO: 251354
  misc_feature (30)..(30): n is a, c, g, or t
  misc_feature (55)..(115): n is a, c, g, or t

SEQ ID NO: 275404 - DNA, 439 bp, Homo Sapiens; identical to SEQ ID NO: 251355
  misc_feature (28)..(28): n is a, c, g, or t
  misc_feature (35)..(35): n is a, c, g, or t
  misc_feature (71)..(71): n is a, c, g, or t
  misc_feature (217)..(217): n is a, c, g, or t
  misc_feature (252)..(304): n is a, c, g, or t

SEQ ID NO: 275405 - DNA, 407 bp, Homo Sapiens; identical to SEQ ID NO: 251363

SEQ ID NO: 275406 - DNA, 880 bp, Homo Sapiens; identical to SEQ ID NO: 251364

SEQ ID NO: 275407 - DNA, 415 bp, Homo Sapiens; identical to SEQ ID NO: 251365

SEQ ID NO: 275408 - DNA, 1295 bp, Homo Sapiens; identical to SEQ ID NO: 251366
  misc_feature (70)..(70): n is a, c, g, or t

SEQ ID NO: 275409 - DNA, 447 bp, Homo Sapiens; identical to SEQ ID NO: 251367

SEQ ID NO: 275410 - DNA, 733 bp, Homo Sapiens; identical to SEQ ID NO: 251368

SEQ ID NO: 275411 - DNA, 782 bp, Homo Sapiens; identical to SEQ ID NO: 251370
  misc_feature (447)..(519): n is a, c, g, or t

SEQ ID NO: 275412 - DNA, 362 bp, Homo Sapiens; identical to SEQ ID NO: 251371
  misc_feature (352)..(352): n is a, c, g, or t

SEQ ID NO: 275413 - DNA, 439 bp, Homo Sapiens; identical to SEQ ID NO: 251372
  misc_feature (44)..(44): n is a, c, g, or t
  misc_feature (183)..(183): n is a, c, g, or t

SEQ ID NO: 275414 - DNA, 1893 bp, Homo Sapiens; identical to SEQ ID NO: 251373

SEQ ID NO: 275415 - DNA, 946 bp, Homo Sapiens; identical to SEQ ID NO: 251374
  misc_feature (909)..(909): n is a, c, g, or t
  misc_feature (934)..(934): n is a, c, g, or t

SEQ ID NO: 275416 - DNA, 917 bp, Homo Sapiens; identical to SEQ ID NO: 251375
  misc_feature (677)..(736): n is a, c, g, or t

SEQ ID NO: 275417 - DNA, 414 bp, Homo Sapiens; identical to SEQ ID NO: 251376
  misc_feature (30)..(30): n is a, c, g, or t

SEQ ID NO: 275418 - DNA, 1524 bp, Homo Sapiens; identical to SEQ ID NO: 251378

SEQ ID NO: 275419 - DNA, 1416 bp, Homo Sapiens; identical to SEQ ID NO: 251379

SEQ ID NO: 275420 - DNA, 2019 bp, Homo Sapiens; identical to SEQ ID NO: 251380

SEQ ID NO: 275421 - DNA, 1118 bp, Homo Sapiens; identical to SEQ ID NO: 251381

SEQ ID NO: 275422 - DNA, 520 bp, Homo Sapiens; identical to SEQ ID NO: 251383
  misc_feature (487)..(487): n is a, c, g, or t
  misc_feature (490)..(490): n is a, c, g, or t
  misc_feature (494)..(494): n is a, c, g, or t

SEQ ID NO: 275423 - DNA, 351 bp, Homo Sapiens; identical to SEQ ID NO: 251384

SEQ ID NO: 275424 - DNA, 561 bp, Homo Sapiens; identical to SEQ ID NO: 251391
  misc_feature (485)..(485): n is a, c, g, or t
  misc_feature (518)..(518): n is a, c, g, or t

SEQ ID NO: 275425 - DNA, 896 bp, Homo Sapiens; identical to SEQ ID NO: 251392
  misc_feature (138)..(138): n is a, c, g, or t
  misc_feature (824)..(824): n is a, c, g, or t

SEQ ID NO: 275426 - DNA, 844 bp, Homo Sapiens; identical to SEQ ID NO: 251393
  misc_feature (672)..(672): n is a, c, g, or t

SEQ ID NO: 275427 - DNA, 1818 bp, Homo Sapiens; identical to SEQ ID NO: 251394

SEQ ID NO: 275428 - DNA, 540 bp, Homo Sapiens; identical to SEQ ID NO: 251395
  misc_feature (11)..(11): n is a, c, g, or t
  misc_feature (48)..(48): n is a, c, g, or t
  misc_feature (92)..(92): n is a, c, g, or t

SEQ ID NO: 275429 - DNA, 562 bp, Homo Sapiens; identical to SEQ ID NO: 251396

SEQ ID NO: 275430 - DNA, 571 bp, Homo Sapiens; identical to SEQ ID NO: 251397
  misc_feature (23)..(23): n is a, c, g, or t
  misc_feature (96)..(182): n is a, c, g, or t

SEQ ID NO: 275431 - DNA, 656 bp, Homo Sapiens; identical to SEQ ID NO: 251398
  misc_feature (210)..(238): n is a, c, g, or t
  misc_feature (629)..(629): n is a, c, g, or t

SEQ ID NO: 275432 - DNA, 906 bp, Homo Sapiens; identical to SEQ ID NO: 251399
  misc_feature (88)..(88): n is a, c, g, or t

SEQ ID NO: 275433 - DNA, 1086 bp, Homo Sapiens; identical to SEQ ID NO: 251405
  misc_feature (892)..(892): n is a, c, g, or t
  misc_feature (1006)..(1006): n is a, c, g, or t
  misc_feature (1012)..(1012): n is a, c, g, or t
  misc_feature (1018)..(1018): n is a, c, g, or t
  misc_feature (1037)..(1037): n is a, c, g, or t
  misc_feature (1040)..(1040): n is a, c, g, or t
  misc_feature (1043)..(1043): n is a, c, g, or t
  misc_feature (1047)..(1048): n is a, c, g, or t
  misc_feature (1062)..(1062): n is a, c, g, or t
  misc_feature (1065)..(1065): n is a, c, g, or t
  misc_feature (1071)..(1072): n is a, c, g, or t
  misc_feature (1074)..(1074): n is a, c, g, or t

SEQ ID NO: 275434 - DNA, 1140 bp, Homo Sapiens; identical to SEQ ID NO: 251406
  misc_feature (14)..(14): n is a, c, g, or t
  misc_feature (23)..(23): n is a, c, g, or t
  misc_feature (33)..(34): n is a, c, g, or t
  misc_feature (36)..(36): n is a, c, g, or t
  misc_feature (63)..(64): n is a, c, g, or t
  misc_feature (73)..(73): n is a, c, g, or t
  misc_feature (129)..(129): n is a, c, g, or t

SEQ ID NO: 275435 - DNA, 1468 bp, Homo Sapiens; identical to SEQ ID NO: 251407
  misc_feature (1094)..(1095): n is a, c, g, or t
  misc_feature (1158)..(1158): n is a, c, g, or t

SEQ ID NO: 275436 - DNA, 2266 bp, Homo Sapiens; identical to SEQ ID NO: 251408
  misc_feature (1434)..(1447): n is a, c, g, or t
  misc_feature (1750)..(1762): n is a, c, g, or t
  misc_feature (1768)..(1768): n is a, c, g, or t
  misc_feature (1797)..(1797): n is a, c, g, or t
  misc_feature (1829)..(1837): n is a, c, g, or t
  misc_feature (1843)..(1843): n is a, c, g, or t
  misc_feature (1855)..(1864): n is a, c, g, or t
  misc_feature (1869)..(1869): n is a, c, g, or t
  misc_feature (1923)..(1923): n is a, c, g, or t
  misc_feature (1982)..(1993): n is a, c, g, or t
  misc_feature (2065)..(2066): n is a, c, g, or t
  misc_feature (2099)..(2107): n is a, c, g, or t
  misc_feature (2141)..(2141): n is a, c, g, or t
  misc_feature (2181)..(2196): n is a, c, g, or t

SEQ ID NO: 275437 - DNA, 1752 bp, Homo Sapiens; identical to SEQ ID NO: 251412
  misc_feature (1356)..(1356): n is a, c, g, or t
  misc_feature (1359)..(1359): n is a, c, g, or t
  misc_feature (1385)..(1416): n is a, c, g, or t
  misc_feature (1493)..(1493): n is a, c, g, or t
  misc_feature (1545)..(1545): n is a, c, g, or t
  misc_feature (1548)..(1548): n is a, c, g, or t
  misc_feature (1593)..(1593): n is a, c, g, or t
  misc_feature (1595)..(1595): n is a, c, g, or t
  misc_feature (1628)..(1628): n is a, c, g, or t
  misc_feature (1666)..(1666): n is a, c, g, or t
  misc_feature (1673)..(1673): n is a, c, g, or t
  misc_feature (1725)..(1725): n is a, c, g, or t

SEQ ID NO: 275438 - DNA, 1445 bp, Homo Sapiens; identical to SEQ ID NO: 251413

SEQ ID NO: 275439 - DNA, 316 bp, Homo Sapiens; identical to SEQ ID NO: 251414

SEQ ID NO: 275440 - DNA, 2305 bp, Homo Sapiens; identical to SEQ ID NO: 251415
  misc_feature (1271)..(1308): n is a, c, g, or t
  misc_feature (1394)..(1394): n is a, c, g, or t
  misc_feature (1457)..(1457): n is a, c, g, or t
  misc_feature (1524)..(1524): n is a, c, g, or t
  misc_feature (1532)..(1532): n is a, c, g, or t
  misc_feature (1583)..(1597): n is a, c, g, or t
  misc_feature (1617)..(1617): n is a, c, g, or t
  misc_feature (1656)..(1656): n is a, c, g, or t
  misc_feature (1696)..(1696): n is a, c, g, or t
  misc_feature (1711)..(1711): n is a, c, g, or t
  misc_feature (1761)..(1761): n is a, c, g, or t
  misc_feature (1859)..(1859): n is a, c, g, or t
  misc_feature (1912)..(1912): n is a, c, g, or t
  misc_feature (1968)..(1968): n is a, c, g, or t
  misc_feature (2035)..(2035): n is a, c, g, or t
  misc_feature (2050)..(2050): n is a, c, g, or t
  misc_feature (2053)..(2053): n is a, c, g, or t
  misc_feature (2056)..(2056): n is a, c, g, or t
  misc_feature (2063)..(2063): n is a, c, g, or t
  misc_feature (2148)..(2148): n is a, c, g, or t
  misc_feature (2164)..(2164): n is a, c, g, or t
  misc_feature (2185)..(2185): n is a, c, g, or t
  misc_feature (2189)..(2189): n is a, c, g, or t
  misc_feature (2194)..(2194): n is a, c, g, or t
  misc_feature (2239)..(2239): n is a, c, g, or t

SEQ ID NO: 275441 - DNA, 869 bp, Homo Sapiens; identical to SEQ ID NO: 251416

SEQ ID NO: 275442 - DNA, 389 bp, Homo Sapiens; identical to SEQ ID NO: 251420

SEQ ID NO: 275443 - DNA, 1274 bp, Homo Sapiens; identical to SEQ ID NO: 251421

SEQ ID NO: 275444 - DNA, 782 bp, Homo Sapiens; identical to SEQ ID NO: 251422
  misc_feature (715)..(715): n is a, c, g, or t

SEQ ID NO: 275445 - DNA, 650 bp, Homo Sapiens; identical to SEQ ID NO: 251427

SEQ ID NO: 275446 - DNA, 2289 bp, Homo Sapiens; identical to SEQ ID NO: 251428

SEQ ID NO: 275447 - DNA, 1200 bp, Homo Sapiens; identical to SEQ ID NO: 251429
  misc_feature (1173)..(1173): n is a, c, g, or t

SEQ ID NO: 275448 - DNA, 1698 bp, Homo Sapiens; identical to SEQ ID NO: 251435
  misc_feature (1282)..(1282): n is a, c, g, or t
  misc_feature (1307)..(1307): n is a, c, g, or t

SEQ ID NO: 275449 - DNA, 863 bp, Homo Sapiens; identical to SEQ ID NO: 251436

SEQ ID NO: 275450 - DNA, 1518 bp, Homo Sapiens; identical to SEQ ID NO: 251437
  misc_feature (457)..(457): n is a, c, g, or t

SEQ ID NO: 275451 - DNA, 962 bp, Homo Sapiens; identical to SEQ ID NO: 251438
  misc_feature (96)..(96): n is a, c, g, or t
  misc_feature (157)..(157): n is a, c, g, or t
  misc_feature (159)..(197): n is a, c, g, or t
  misc_feature (233)..(253): n is a, c, g, or t

SEQ ID NO: 275452 - DNA, 670 bp, Homo Sapiens; identical to SEQ ID NO: 251443
  misc_feature (430)..(492): n is a, c, g, or t

SEQ ID NO: 275453 - DNA, 559 bp, Homo Sapiens; identical to SEQ ID NO: 82466
  misc_feature (139)..(192): n is a, c, g, or t
  misc_feature (358)..(413): n is a, c, g, or t

SEQ ID NO: 275454 - DNA, 955 bp, Homo Sapiens; identical to SEQ ID NO: 251449
  misc_feature (207)..(207): n is a, c, g, or t

SEQ ID NO: 275455 - DNA, 323 bp, Homo Sapiens; identical to SEQ ID NO: 251450

SEQ ID NO: 275456 - DNA, 1327 bp, Homo Sapiens; identical to SEQ ID NO: 251452

SEQ ID NO: 275457 - DNA, 436 bp, Homo Sapiens; identical to SEQ ID NO: 251453

SEQ ID NO: 275458 - DNA, 655 bp, Homo Sapiens; identical to SEQ ID NO: 251457

SEQ ID NO: 275459 - DNA, 1292 bp, Homo Sapiens; identical to SEQ ID NO: 251458
  misc_feature (24)..(24): n is a, c, g, or t
  misc_feature (33)..(33): n is a, c, g, or t

SEQ ID NO: 275460 - DNA, 1119 bp, Homo Sapiens; identical to SEQ ID NO: 251463
  misc_feature (12)..(12): n is a, c, g, or t
  misc_feature (25)..(25): n is a, c, g, or t
  misc_feature (56)..(56): n is a, c, g, or t
  misc_feature (64)..(64): n is a, c, g, or t
  misc_feature (69)..(69): n is a, c, g, or t
  misc_feature (96)..(96): n is a, c, g, or t
  misc_feature (123)..(123): n is a, c, g, or t
  misc_feature (129)..(129): n is a, c, g, or t

SEQ ID NO: 275461 - DNA, 1212 bp, Homo Sapiens; identical to SEQ ID NO: 251464
  misc_feature (6)..(6): n is a, c, g, or t
  misc_feature (14)..(14): n is a, c, g, or t
  misc_feature (48)..(48): n is a, c, g, or t
  misc_feature (53)..(53): n is a, c, g, or t
  misc_feature (64)..(64): n is a, c, g, or t
  misc_feature (68)..(68): n is a, c, g, or t
  misc_feature (79)..(79): n is a, c, g, or t
  misc_feature (83)..(84): n is a, c, g, or t
  misc_feature (87)..(87): n is a, c, g, or t
  misc_feature (95)..(95): n is a, c, g, or t
  misc_feature (98)..(98): n is a, c, g, or t
  misc_feature (109)..(109): n is a, c, g, or t
  misc_feature (156)..(156): n is a, c, g, or t
  misc_feature (193)..(193): n is a, c, g, or t

SEQ ID NO: 275462 - DNA, 2563 bp, Homo Sapiens; identical to SEQ ID NO: 251465
  misc_feature (2379)..(2379): n is a, c, g, or t
  misc_feature (2456)..(2456): n is a, c, g, or t
  misc_feature (2462)..(2462): n is a, c, g, or t
  misc_feature (2476)..(2476): n is a, c, g, or t
  misc_feature (2481)..(2481): n is a, c, g, or t
  misc_feature (2483)..(2483): n is a, c, g, or t
  misc_feature (2485)..(2485): n is a, c, g, or t
  misc_feature (2487)..(2487): n is a, c, g, or t
  misc_feature (2495)..(2495): n is a, c, g, or t
  misc_feature (2500)..(2520): n is a, c, g, or t
  misc_feature (2542)..(2542): n is a, c, g, or t

SEQ ID NO: 275463 - DNA, 1512 bp, Homo Sapiens; identical to SEQ ID NO: 251466

SEQ ID NO: 275464 - DNA, 724 bp, Homo Sapiens; identical to SEQ ID NO: 251467

SEQ ID NO: 275465 - DNA, 522 bp, Homo Sapiens; identical to SEQ ID NO: 251468

SEQ ID NO: 275466 - DNA, 958 bp, Homo Sapiens; identical to SEQ ID NO: 251472
  misc_feature (856)..(856): n is a, c, g, or t

SEQ ID NO: 275467 - DNA, 1757 bp, Homo Sapiens; identical to SEQ ID NO: 251473
  misc_feature (22)..(22): n is a, c, g, or t
  misc_feature (129)..(129): n is a, c, g, or t
  misc_feature (509)..(568): n is a, c, g, or t
  misc_feature (1169)..(1198): n is a, c, g, or t
  misc_feature (1533)..(1592): n is a, c, g, or t

SEQ ID NO: 275468 - DNA, 516 bp, Homo Sapiens; identical to SEQ ID NO: 251474
  misc_feature (294)..(349): n is a, c, g, or t

SEQ ID NO: 275469 - DNA, 1032 bp, Homo Sapiens; identical to SEQ ID NO: 251475
  misc_feature (98)..(183): n is a, c, g, or t
  misc_feature (333)..(359): n is a, c, g, or t
  misc_feature (667)..(810): n is a, c, g, or t
  misc_feature (821)..(863): n is a, c, g, or t
  misc_feature (920)..(947): n is a, c, g, or t
  misc_feature (968)..(980): n is a, c, g, or t

SEQ ID NO: 275470 - DNA, 688 bp, Homo Sapiens; identical to SEQ ID NO: 251478
  misc_feature (481)..(531): n is a, c, g, or t
  misc_feature (653)..(653): n is a, c, g, or t

SEQ ID NO: 275471 - DNA, 1203 bp, Homo Sapiens; identical to SEQ ID NO: 251479
  misc_feature (1115)..(1115): n is a, c, g, or t
  misc_feature (1126)..(1126): n is a, c, g, or t
  misc_feature (1133)..(1133): n is a, c, g, or t
  misc_feature (1145)..(1145): n is a, c, g, or t
  misc_feature (1161)..(1161): n is a, c, g, or t
  misc_feature (1179)..(1179): n is a, c, g, or t

SEQ ID NO: 275472 - DNA, 742 bp, Homo Sapiens; identical to SEQ ID NO: 251487

SEQ ID NO: 275473 - DNA, 806 bp, Homo Sapiens; identical to SEQ ID NO: 5496
  misc_feature (159)..(168): n is a, c, g, or t
  misc_feature (301)..(364): n is a, c, g, or t

SEQ ID NO: 275474 - DNA, 1035 bp, Homo Sapiens; identical to SEQ ID NO: 251494
  misc_feature (244)..(262): n is a, c, g, or t
  misc_feature (548)..(587): n is a, c, g, or t

SEQ ID NO: 275475 - DNA, 3063 bp, Homo Sapiens; identical to SEQ ID NO: 251495
  misc_feature (2732)..(2772): n is a, c, g, or t

SEQ ID NO: 275476 - DNA, 1557 bp, Homo Sapiens; identical to SEQ ID NO: 251506
  misc_feature (726)..(726): n is a, c, g, or t
  misc_feature (733)..(747): n is a, c, g, or t
  misc_feature (1204)..(1204): n is a, c, g, or t
  misc_feature (1342)..(1350): n is a, c, g, or t

SEQ ID NO: 275477 - DNA, 359 bp, Homo Sapiens; identical to SEQ ID NO: 251507
  misc_feature (93)..(93): n is a, c, g, or t
  misc_feature (285)..(302): n is a, c, g, or t

SEQ ID NO: 275478 - DNA, 704 bp, Homo Sapiens; identical to SEQ ID NO: 251510
  misc_feature (47)..(47): n is a, c, g, or t

SEQ ID NO: 275479 - DNA, 834 bp, Homo Sapiens; identical to SEQ ID NO: 251511
  misc_feature (733)..(733): n is a, c, g, or t

SEQ ID NO: 275480 - DNA, 1859 bp, Homo Sapiens; identical to SEQ ID NO: 251512
  misc_feature (452)..(462): n is a, c, g, or t
  misc_feature (585)..(651): n is a, c, g, or t

SEQ ID NO: 275481 - DNA, 611 bp, Homo Sapiens; identical to SEQ ID NO: 251513
  misc_feature (62)..(62): n is a, c, g, or t
  misc_feature (214)..(214): n is a, c, g, or t

SEQ ID NO: 275482 - DNA, 1203 bp, Homo Sapiens; identical to SEQ ID NO: 251518
  misc_feature (632)..(646): n is a, c, g, or t

SEQ ID NO: 275483 - DNA, 1324 bp, Homo Sapiens; identical to SEQ ID NO: 251519
  misc_feature (799)..(925): n is a, c, g, or t
  misc_feature (933)..(948): n is a, c, g, or t
  misc_feature (988)..(1042): n is a, c, g, or t
  misc_feature (1058)..(1153): n is a, c, g, or t
  misc_feature (1168)..(1178): n is a, c, g, or t

SEQ ID NO: 275484 - DNA, 1478 bp, Homo Sapiens; identical to SEQ ID NO: 251523
  misc_feature (7)..(7): n is a, c, g, or t
  misc_feature (19)..(19): n is a, c, g, or t
  misc_feature (28)..(28): n is a, c, g, or t
  misc_feature (35)..(35): n is a, c, g, or t
  misc_feature (38)..(38): n is a, c, g, or t
  misc_feature (49)..(49): n is a, c, g, or t
  misc_feature (64)..(64): n is a, c, g, or t
  misc_feature (70)..(70): n is a, c, g, or t
  misc_feature (72)..(72): n is a, c, g, or t
  misc_feature (91)..(91): n is a, c, g, or t
  misc_feature (108)..(108): n is a, c, g, or t
  misc_feature (113)..(113): n is a, c, g, or t
  misc_feature (129)..(129): n is a, c, g, or t
  misc_feature (134)..(134): n is a, c, g, or t
  misc_feature (137)..(137): n is a, c, g, or t
  misc_feature (158)..(158): n is a, c, g, or t
  misc_feature (162)..(175): n is a, c, g, or t
  misc_feature (325)..(325): n is a, c, g, or t
  misc_feature (331)..(331): n is a, c, g, or t
  misc_feature (385)..(386): n is a, c, g, or t
  misc_feature (404)..(404): n is a, c, g, or t
  misc_feature (408)..(408): n is a, c, g, or t
  misc_feature (1158)..(1171): n is a, c, g, or t

SEQ ID NO: 275485 - DNA, 1597 bp, Homo Sapiens; identical to SEQ ID NO: 251524
  misc_feature (151)..(151): n is a, c, g, or t
  misc_feature (155)..(155): n is a, c, g, or t
  misc_feature (185)..(186): n is a, c, g, or t
  misc_feature (1560)..(1560): n is a, c, g, or t
  misc_feature (1565)..(1565): n is a, c, g, or t

SEQ ID NO: 275486 - DNA, 1089 bp, Homo Sapiens; identical to SEQ ID NO: 251525
  misc_feature (57)..(57): n is a, c, g, or t
  misc_feature (64)..(64): n is a, c, g, or t
  misc_feature (70)..(70): n is a, c, g, or t
  misc_feature (96)..(96): n is a, c, g, or t
  misc_feature (120)..(120): n is a, c, g, or t

SEQ ID NO: 275487 - DNA, 1042 bp, Homo Sapiens; identical to SEQ ID NO: 251537

SEQ ID NO: 275488 - DNA, 848 bp, Homo Sapiens; identical to SEQ ID NO: 251538
  misc_feature (751)..(751): n is a, c, g, or t

SEQ ID NO: 275489 - DNA, 932 bp, Homo Sapiens; identical to SEQ ID NO: 251539

SEQ ID NO: 275490 - DNA, 1159 bp, Homo Sapiens; identical to SEQ ID NO: 251540
  misc_feature (844)..(844): n is a, c, g, or t
  misc_feature (909)..(909): n is a, c, g, or t

SEQ ID NO: 275491 - DNA, 516 bp, Homo Sapiens; identical to SEQ ID NO: 251541

SEQ ID NO: 275492 - DNA, 577 bp, Homo Sapiens; identical to SEQ ID NO: 251553
  misc_feature (46)..(46): n is a, c, g, or t
  misc_feature (81)..(81): n is a, c, g, or t
  misc_feature (129)..(129): n is a, c, g, or t
  misc_feature (449)..(449): n is a, c, g, or t
  misc_feature (502)..(502): n is a, c, g, or t
  misc_feature (515)..(516): n is a, c, g, or t
  misc_feature (529)..(529): n is a, c, g, or t
  misc_feature (556)..(556): n is a, c, g, or t

SEQ ID NO: 275493 - DNA, 613 bp, Homo Sapiens; identical to SEQ ID NO: 251554

SEQ ID NO: 275494 - DNA, 1077 bp, Homo Sapiens; identical to SEQ ID NO: 251555
  misc_feature (13)..(13): n is a, c, g, or t
  misc_feature (57)..(57): n is a, c, g, or t
  misc_feature (1002)..(1002): n is a, c, g, or t
  misc_feature (1041)..(1041): n is a, c, g, or t
  misc_feature (1061)..(1061): n is a, c, g, or t

SEQ ID NO: 275495 - DNA, 585 bp, Homo Sapiens; identical to SEQ ID NO: 251559
  misc_feature (168)..(194): n is a, c, g, or t
  misc_feature (236)..(278): n is a, c, g, or t
  misc_feature (468)..(468): n is a, c, g, or t
  misc_feature (564)..(564): n is a, c, g, or t

SEQ ID NO: 275496 - DNA, 1023 bp, Homo Sapiens; identical to SEQ ID NO: 251560
  misc_feature (702)..(727): n is a, c, g, or t
  misc_feature (769)..(811): n is a, c, g, or t
  misc_feature (818)..(818): n is a, c, g, or t

SEQ ID NO: 275497 - DNA, 926 bp, Homo Sapiens; identical to SEQ ID NO: 251561
  misc_feature (636)..(662): n is a, c, g, or t
  misc_feature (705)..(746): n is a, c, g, or t

SEQ ID NO: 275498 - DNA, 560 bp, Homo Sapiens; identical to SEQ ID NO: 251562
  misc_feature (44)..(44): n is a, c, g, or t
  misc_feature (108)..(108): n is a, c, g, or t
  misc_feature (543)..(543): n is a, c, g, or t

SEQ ID NO: 275499 - DNA, 1290 bp, Homo Sapiens; identical to SEQ ID NO: 251565
  misc_feature (851)..(870): n is a, c, g, or t
  misc_feature (879)..(917): n is a, c, g, or t
  misc_feature (964)..(1036): n is a, c, g, or t
  misc_feature (1075)..(1083): n is a, c, g, or t
  misc_feature (1167)..(1167): n is a, c, g, or t

SEQ ID NO: 275500 - DNA, 436 bp, Homo Sapiens; identical to SEQ ID NO: 251566

SEQ ID NO: 275501 - DNA, 643 bp, Homo Sapiens; identical to SEQ ID NO: 251573

SEQ ID NO: 275502 - DNA, 1491 bp, Homo Sapiens; identical to SEQ ID NO: 251574
  misc_feature (1110)..(1110): n is a, c, g, or t
  misc_feature (1115)..(1115): n is a, c, g, or t
  misc_feature (1117)..(1117): n is a, c, g, or t
  misc_feature (1353)..(1353): n is a, c, g, or t

SEQ ID NO: 275503 - DNA, 570 bp, Homo Sapiens; identical to SEQ ID NO: 251581

SEQ ID NO: 275504 - DNA, 798 bp, Homo Sapiens; identical to SEQ ID NO: 251582

SEQ ID NO: 275505 - DNA, 879 bp, Homo Sapiens; identical to SEQ ID NO: 251583

SEQ ID NO: 275506 - DNA, 835 bp, Homo Sapiens; identical to SEQ ID NO: 251586

SEQ ID NO: 275507 - DNA, 742 bp, Homo Sapiens; identical to SEQ ID NO: 251587
  misc_feature (147)..(147): n is a, c, g, or t
  misc_feature (541)..(551): n is a, c, g, or t

SEQ ID NO: 275508 - DNA, 1278 bp, Homo Sapiens; identical to SEQ ID NO: 251591
  misc_feature (1141)..(1141): n is a, c, g, or t

SEQ ID NO: 275509 - DNA, 456 bp, Homo Sapiens; identical to SEQ ID NO: 251592

SEQ ID NO: 275510 - DNA, 424 bp, Homo Sapiens; identical to SEQ ID NO: 251595

SEQ ID NO: 275511 - DNA, 440 bp, Homo Sapiens; identical to SEQ ID NO: 251596

SEQ ID NO: 275512 - DNA, 2775 bp, Homo Sapiens; identical to SEQ ID NO: 251597

SEQ ID NO: 275513 - DNA, 412 bp, Homo Sapiens; identical to SEQ ID NO: 251598

SEQ ID NO: 275514 - DNA, 633 bp, Homo Sapiens; identical to SEQ ID NO: 251600

SEQ ID NO: 275515 - DNA, 1693 bp, Homo Sapiens; identical to SEQ ID NO: 251601

SEQ ID NO: 275516 - DNA, 914 bp, Homo Sapiens; identical to SEQ ID NO: 251606
  misc_feature (328)..(331): n is a, c, g, or t
  misc_feature (333)..(333): n is a, c, g, or t
  misc_feature (335)..(338): n is a, c, g, or t
  misc_feature (346)..(347): n is a, c, g, or t

SEQ ID NO: 275517 - DNA, 522 bp, Homo Sapiens; identical to SEQ ID NO: 251607

SEQ ID NO: 275518 - DNA, 842 bp, Homo Sapiens; identical to SEQ ID NO: 251608

SEQ ID NO: 275519 - DNA, 400 bp, Homo Sapiens; identical to SEQ ID NO: 251609

SEQ ID NO: 275520 - DNA, 983 bp, Homo Sapiens; identical to SEQ ID NO: 251610
  misc_feature (486)..(607): n is a, c, g, or t
  misc_feature (655)..(670): n is a, c, g, or t
  misc_feature (680)..(690): n is a, c, g, or t
  misc_feature (766)..(776): n is a, c, g, or t
  misc_feature (833)..(833): n is a, c, g, or t
  misc_feature (924)..(924): n is a, c, g, or t

SEQ ID NO: 275521 - DNA, 424 bp, Homo Sapiens; identical to SEQ ID NO: 251611

SEQ ID NO: 275522 - DNA, 392 bp, Homo Sapiens; identical to SEQ ID NO: 251612
  misc_feature (58)..(58): n is a, c, g, or t
  misc_feature (63)..(63): n is a, c, g, or t

SEQ ID NO: 275523 - DNA, 1144 bp, Homo Sapiens; identical to SEQ ID NO: 251614
  misc_feature (492)..(492): n is a, c, g, or t
  misc_feature (1015)..(1015): n is a, c, g, or t

SEQ ID NO: 275524 - DNA, 923 bp, Homo Sapiens; identical to SEQ ID NO: 251615

SEQ ID NO: 275525 - DNA, 1262 bp, Homo Sapiens; identical to SEQ ID NO: 251620
  misc_feature (739)..(739): n is a, c, g, or t

SEQ ID NO: 275526 - DNA, 1288 bp, Homo Sapiens; identical to SEQ ID NO: 251621
  misc_feature (1054)..(1054): n is a, c, g, or t
  misc_feature (1061)..(1061): n is a, c, g, or t
  misc_feature (1082)..(1082): n is a, c, g, or t
  misc_feature (1088)..(1088): n is a, c, g, or t
  misc_feature (1103)..(1103): n is a, c, g, or t
  misc_feature (1156)..(1156): n is a, c, g, or t
  misc_feature (1172)..(1172): n is a, c, g, or t
  misc_feature (1178)..(1178): n is a, c, g, or t
  misc_feature (1183)..(1183): n is a, c, g, or t
  misc_feature (1190)..(1190): n is a, c, g, or t
  misc_feature (1207)..(1207): n is a, c, g, or t
  misc_feature (1223)..(1224): n is a, c, g, or t
  misc_feature (1234)..(1235): n is a, c, g, or t
  misc_feature (1237)..(1237): n is a, c, g, or t
  misc_feature (1267)..(1268): n is a, c, g, or t
  misc_feature (1273)..(1273): n is a, c, g, or t
  misc_feature (1281)..(1281): n is a, c, g, or t

SEQ ID NO: 275527 - DNA, 778 bp, Homo Sapiens; identical to SEQ ID NO: 251622

SEQ ID NO: 275528 - DNA, 825 bp, Homo Sapiens; identical to SEQ ID NO: 167294
  misc_feature (680)..(680): n is a, c, g, or t
  misc_feature (694)..(694): n is a, c, g, or t
  misc_feature (812)..(812): n is a, c, g, or t

SEQ ID NO: 275529 - DNA, 1090 bp, Homo Sapiens; identical to SEQ ID NO: 251624
  misc_feature (738)..(738): n is a, c, g, or t

SEQ ID NO: 275530 - DNA, 804 bp, Homo Sapiens; identical to SEQ ID NO: 251625
  misc_feature (744)..(744): n is a, c, g, or t

SEQ ID NO: 275531 - DNA, 1787 bp, Homo Sapiens; identical to SEQ ID NO: 251626
  misc_feature (1245)..(1257): n is a, c, g, or t

SEQ ID NO: 275532 - DNA, 1030 bp, Homo Sapiens; identical to SEQ ID NO: 251627
  misc_feature (773)..(780): n is a, c, g, or t
  misc_feature (783)..(783): n is a, c, g, or t
  misc_feature (785)..(785): n is a, c, g, or t
  misc_feature (787)..(844): n is a, c, g, or t
  misc_feature (846)..(846): n is a, c, g, or t
  misc_feature (848)..(851): n is a, c, g, or t
  misc_feature (859)..(860): n is a, c, g, or t
  misc_feature (863)..(864): n is a, c, g, or t
  misc_feature (867)..(867): n is a, c, g, or t
  misc_feature (874)..(889): n is a, c, g, or t
  misc_feature (891)..(904): n is a, c, g, or t

SEQ ID NO: 275533 - DNA, 722 bp, Homo Sapiens; identical to SEQ ID NO: 251630

SEQ ID NO: 275534 - DNA, 760 bp, Homo Sapiens; identical to SEQ ID NO: 251631

SEQ ID NO: 275535 - DNA, 1263 bp, Homo Sapiens; identical to SEQ ID NO: 251641
  misc_feature (22)..(22): n is a, c, g, or t
  misc_feature (31)..(31): n is a, c, g, or t
  misc_feature (37)..(37): n is a, c, g, or t
  misc_feature (97)..(97): n is a, c, g, or t
  misc_feature (291)..(346): n is a, c, g, or t
  misc_feature (924)..(980): n is a, c, g, or t
  misc_feature (1089)..(1103): n is a, c, g, or t
  misc_feature (1105)..(1207): n is a, c, g, or t

SEQ ID NO: 275536 - DNA, 360 bp, Homo Sapiens; identical to SEQ ID NO: 251642

SEQ ID NO: 275537 - DNA, 575 bp, Homo Sapiens; identical to SEQ ID NO: 251643
  misc_feature (59)..(114): n is a, c, g, or t

SEQ ID NO: 275538 - DNA, 482 bp, Homo Sapiens; identical to SEQ ID NO: 251644
  misc_feature (168)..(168): n is a, c, g, or t
  misc_feature (463)..(463): n is a, c, g, or t

SEQ ID NO: 275539 - DNA, 1038 bp, Homo Sapiens; identical to SEQ ID NO: 251645
  misc_feature (880)..(880): n is a, c, g, or t
  misc_feature (903)..(903): n is a, c, g, or t
  misc_feature (972)..(972): n is a, c, g, or t
  misc_feature (991)..(991): n is a, c, g, or t
  misc_feature (999)..(999): n is a, c, g, or t
  misc_feature (1005)..(1005): n is a, c, g, or t
  misc_feature (1021)..(1021): n is a, c, g, or t

SEQ ID NO: 275540 - DNA, 341 bp, Homo Sapiens; identical to SEQ ID NO: 251646

SEQ ID NO: 275541 - DNA, 1238 bp, Homo Sapiens; identical to SEQ ID NO: 251647
  misc_feature (3)..(3): n is a, c, g, or t
  misc_feature (66)..(67): n is a, c, g, or t
  misc_feature (87)..(87): n is a, c, g, or t
  misc_feature (90)..(90): n is a, c, g, or t
  misc_feature (101)..(101): n is a, c, g, or t
  misc_feature (106)..(106): n is a, c, g, or t
  misc_feature (120)..(120): n is a, c, g, or t
  misc_feature (144)..(144): n is a, c, g, or t

SEQ ID NO: 275542 - DNA, 2769 bp, Homo Sapiens; identical to SEQ ID NO: 251648
  misc_feature (2718)..(2718): n is a, c, g, or t

SEQ ID NO: 275543 - DNA, 1808 bp, Homo Sapiens; identical to SEQ ID NO: 251654
  misc_feature (1741)..(1741): n is a, c, g, or t
  misc_feature (1747)..(1747): n is a, c, g, or t
  misc_feature (1749)..(1749): n is a, c, g, or t
  misc_feature (1753)..(1753): n is a, c, g, or t
  misc_feature (1760)..(1760): n is a, c, g, or t
  misc_feature (1764)..(1764): n is a, c, g, or t
  misc_feature (1766)..(1767): n is a, c, g, or t
  misc_feature (1769)..(1769): n is a, c, g, or t
  misc_feature (1772)..(1772): n is a, c, g, or t
  misc_feature (1780)..(1780): n is a, c, g, or t
  misc_feature (1785)..(1785): n is a, c, g, or t

SEQ ID NO: 275544 - DNA, 861 bp, Homo Sapiens; identical to SEQ ID NO: 251655

SEQ ID NO: 275545 - DNA, 998 bp, Homo Sapiens; identical to SEQ ID NO: 251656
  misc_feature (794)..(794): n is a, c, g, or t

SEQ ID NO: 275546 - DNA, 1778 bp, Homo Sapiens; identical to SEQ ID NO: 251661
  misc_feature (1558)..(1573): n is a, c, g, or t
  misc_feature (1593)..(1593): n is a, c, g, or t
  misc_feature (1620)..(1620): n is a, c, g, or t
  misc_feature (1631)..(1631): n is a, c, g, or t
  misc_feature (1649)..(1649): n is a, c, g, or t
  misc_feature (1671)..(1671): n is a, c, g, or t
  misc_feature (1731)..(1731): n is a, c, g, or t
  misc_feature (1735)..(1735): n is a, c, g, or t
  misc_feature (1742)..(1742): n is a, c, g, or t
  misc_feature (1759)..(1759): n is a, c, g, or t
  misc_feature (1765)..(1765): n is a, c, g, or t
  misc_feature (1772)..(1772): n is a, c, g, or t

SEQ ID NO: 275547 - DNA, 944 bp, Homo Sapiens; identical to SEQ ID NO: 251662
  misc_feature (918)..(918): n is a, c, g, or t

SEQ ID NO: 275548 - DNA, 461 bp, Homo Sapiens; identical to SEQ ID NO: 251663
  misc_feature (365)..(365): n is a, c, g, or t
  misc_feature (373)..(373): n is a, c, g, or t
  misc_feature (422)..(422): n is a, c, g, or t
  misc_feature (429)..(429): n is a, c, g, or t
  misc_feature (449)..(449): n is a, c, g, or t

SEQ ID NO: 275549 - DNA, 510 bp, Homo Sapiens; identical to SEQ ID NO: 251664

SEQ ID NO: 275550 - DNA, 1094 bp, Homo Sapiens; identical to SEQ ID NO: 251676
  misc_feature (949)..(949): n is a, c, g, or t
  misc_feature (1012)..(1012): n is a, c, g, or t
  misc_feature (1015)..(1017): n is a, c, g, or t
  misc_feature (1021)..(1021): n is a, c, g, or t
  misc_feature (1031)..(1032): n is a, c, g, or t
  misc_feature (1035)..(1035): n is a, c, g, or t
  misc_feature (1038)..(1040): n is a, c, g, or t
  misc_feature (1063)..(1063): n is a, c, g, or t
  misc_feature (1067)..(1067): n is a, c, g, or t
  misc_feature (1084)..(1084): n is a, c, g, or t
  misc_feature (1088)..(1088): n is a, c, g, or t

SEQ ID NO: 275551 - DNA, 1591 bp, Homo Sapiens; identical to SEQ ID NO: 251677

SEQ ID NO: 275552 - DNA, 801 bp, Homo Sapiens; identical to SEQ ID NO: 251678

SEQ ID NO: 275553 - DNA, 1433 bp, Homo Sapiens; identical to SEQ ID NO: 251679

SEQ ID NO: 275554 - DNA, 2270 bp, Homo Sapiens; identical to SEQ ID NO: 251680
  misc_feature (1695)..(1712): n is a, c, g, or t
  misc_feature (1721)..(1759): n is a, c, g, or t
  misc_feature (1806)..(1876): n is a, c, g, or t
  misc_feature (1932)..(2133): n is a, c, g, or t

SEQ ID NO: 275555 - DNA, 716 bp, Homo Sapiens; identical to SEQ ID NO: 251681

SEQ ID NO: 275556 - DNA, 512 bp, Homo Sapiens; identical to SEQ ID NO: 251682

SEQ ID NO: 275557 - DNA, 549 bp, Homo Sapiens; identical to SEQ ID NO: 251686

SEQ ID NO: 275558 - DNA, 440 bp, Homo Sapiens; identical to SEQ ID NO: 251687
  misc_feature (42)..(42): n is a, c, g, or t
  misc_feature (385)..(385): n is a, c, g, or t
  misc_feature (405)..(405): n is a, c, g, or t

SEQ ID NO: 275559 - DNA, 946 bp, Homo Sapiens; identical to SEQ ID NO: 251691

SEQ ID NO: 275560 - DNA, 1267 bp, Homo Sapiens; identical to SEQ ID NO: 251692

SEQ ID NO: 275561 - DNA, 915 bp, Homo Sapiens; identical to SEQ ID NO: 251699

SEQ ID NO: 275562 - DNA, 922 bp, Homo Sapiens; identical to SEQ ID NO: 251700

SEQ ID NO: 275563 - DNA, 393 bp, Homo Sapiens; identical to SEQ ID NO: 251709

SEQ ID NO: 275564 - DNA, 854 bp, Homo Sapiens; identical to SEQ ID NO: 251710

SEQ ID NO: 275565 - DNA, 430 bp, Homo Sapiens; identical to SEQ ID NO: 251711

SEQ ID NO: 275566 - DNA, 633 bp, Homo Sapiens; identical to SEQ ID NO: 251713

SEQ ID NO: 275567 - DNA, 1513 bp, Homo Sapiens; identical to SEQ ID NO: 251714

SEQ ID NO: 275568 - DNA, 645 bp, Homo Sapiens; identical to SEQ ID NO: 251716

SEQ ID NO: 275569 - DNA, 1293 bp, Homo Sapiens; identical to SEQ ID NO: 251717

SEQ ID NO: 275570 - DNA, 644 bp, Homo Sapiens; identical to SEQ ID NO: 251725

SEQ ID NO: 275571 - DNA, 506 bp, Homo Sapiens; identical to SEQ ID NO: 251726
  misc_feature (16)..(16): n is a, c, g, or t
  misc_feature (23)..(23): n is a, c, g, or t
  misc_feature (36)..(36): n is a, c, g, or t
  misc_feature (53)..(53): n is a, c, g, or t
  misc_feature (101)..(101): n is a, c, g, or t
  misc_feature (468)..(468): n is a, c, g, or t

SEQ ID NO: 275572 - DNA, 680 bp, Homo Sapiens; identical to SEQ ID NO: 251727

SEQ ID NO: 275573 - DNA, 768 bp, Homo Sapiens; identical to SEQ ID NO: 251728
  misc_feature (475)..(475): n is a, c, g, or t

SEQ ID NO: 275574 - DNA, 804 bp, Homo Sapiens; identical to SEQ ID NO: 251734

SEQ ID NO: 275575 - DNA, 653 bp, Homo Sapiens; identical to SEQ ID NO: 251735
  misc_feature (76)..(185): n is a, c, g, or t

SEQ ID NO: 275576 - DNA, 2119 bp, Homo Sapiens; identical to SEQ ID NO: 251736
  misc_feature (1582)..(1632): n is a, c, g, or t
  misc_feature (1762)..(1824): n is a, c, g, or t

SEQ ID NO: 275577 - DNA, 454 bp, Homo Sapiens; identical to SEQ ID NO: 251742

SEQ ID NO: 275578 - DNA, 961 bp, Homo Sapiens; identical to SEQ ID NO: 251743

SEQ ID NO: 275579 - DNA, 944 bp, Homo Sapiens; identical to SEQ ID NO: 251744
  misc_feature (338)..(349): n is a, c, g, or t

SEQ ID NO: 275580 - DNA, 673 bp, Homo Sapiens; identical to SEQ ID NO: 251745
  misc_feature (46)..(46): n is a, c, g, or t
  misc_feature (64)..(64): n is a, c, g, or t
  misc_feature (77)..(77): n is a, c, g, or t
  misc_feature (181)..(181): n is a, c, g, or t

SEQ ID NO: 275581 - DNA, 471 bp, Homo Sapiens; identical to SEQ ID NO: 251746

SEQ ID NO: 275582 - DNA, 534 bp, Homo Sapiens; identical to SEQ ID NO: 251748

SEQ ID NO: 275583 - DNA, 1597 bp, Homo Sapiens; identical to SEQ ID NO: 251749
  misc_feature (50)..(50): n is a, c, g, or t

SEQ ID NO: 275584 - DNA, 1133 bp, Homo Sapiens; identical to SEQ ID NO: 251750
  misc_feature (674)..(674): n is a, c, g, or t

SEQ ID NO: 275585 - DNA, 573 bp, Homo Sapiens; identical to SEQ ID NO: 251751
  misc_feature (157)..(244): n is a, c, g, or t

SEQ ID NO: 275586 - DNA, 528 bp, Homo Sapiens; identical to SEQ ID NO: 251752

SEQ ID NO: 275587 - DNA, 338 bp, Homo Sapiens; identical to SEQ ID NO: 251753
  misc_feature (310)..(310): n is a, c, g, or t

SEQ ID NO: 275588 - DNA, 1266 bp, Homo Sapiens; identical to SEQ ID NO: 251758
  misc_feature (732)..(788): n is a, c, g, or t

SEQ ID NO: 275589 - DNA, 463 bp, Homo Sapiens; identical to SEQ ID NO: 251759
  misc_feature (26)..(26): n is a, c, g, or t

SEQ ID NO: 275590 - DNA, 323 bp, Homo Sapiens; identical to SEQ ID NO: 251760

SEQ ID NO: 275591 - DNA, 875 bp, Homo Sapiens; identical to SEQ ID NO: 251761
  misc_feature (307)..(316): n is a, c, g, or t
  misc_feature (338)..(399): n is a, c, g, or t
  misc_feature (445)..(464): n is a, c, g, or t
  misc_feature (467)..(596): n is a, c, g, or t
  misc_feature (615)..(634): n is a, c, g, or t

SEQ ID NO: 275592 - DNA, 2030 bp, Homo Sapiens; identical to SEQ ID NO: 251762
  misc_feature (241)..(250): n is a, c, g, or t
  misc_feature (512)..(512): n is a, c, g, or t
  misc_feature (1077)..(1110): n is a, c, g, or t
  misc_feature (1595)..(1603): n is a, c, g, or t
  misc_feature (1901)..(1914): n is a, c, g, or t

SEQ ID NO: 275593 - DNA, 2114 bp, Homo Sapiens; identical to SEQ ID NO: 251771
  misc_feature (307)..(323): n is a, c, g, or t
  misc_feature (367)..(391): n is a, c, g, or t
  misc_feature (405)..(432): n is a, c, g, or t
  misc_feature (474)..(486): n is a, c, g, or t
  misc_feature (508)..(525): n is a, c, g, or t
  misc_feature (533)..(684): n is a, c, g, or t

SEQ ID NO: 275594 - DNA, 848 bp, Homo Sapiens; identical to SEQ ID NO: 251772
  misc_feature (92)..(149): n is a, c, g, or t

SEQ ID NO: 275595 - DNA, 448 bp, Homo Sapiens; identical to SEQ ID NO: 251773

SEQ ID NO: 275596 - DNA, 465 bp, Homo Sapiens; identical to SEQ ID NO: 251774

SEQ ID NO: 275597 - DNA, 986 bp, Homo Sapiens; identical to SEQ ID NO: 251776
  misc_feature (269)..(269): n is a, c, g, or t

SEQ ID NO: 275598 - DNA, 1071 bp, Homo Sapiens; identical to SEQ ID NO: 251777
  misc_feature (993)..(993): n is a, c, g, or t
  misc_feature (1021)..(1021): n is a, c, g, or t
  misc_feature (1038)..(1038): n is a, c, g, or t

SEQ ID NO: 275599 - DNA, 379 bp, Homo Sapiens; identical to SEQ ID NO: 251778

SEQ ID NO: 275600 - DNA, 577 bp, Homo Sapiens; identical to SEQ ID NO: 251788
  misc_feature (498)..(498): n is a, c, g, or t
  misc_feature (520)..(520): n is a, c, g, or t
  misc_feature (544)..(544): n is a, c, g, or t
  misc_feature (554)..(554): n is a, c, g, or t

SEQ ID NO: 275601 - DNA, 648 bp, Homo Sapiens; identical to SEQ ID NO: 251789

SEQ ID NO: 275602 - DNA, 1954 bp, Homo Sapiens; identical to SEQ ID NO: 251810

SEQ ID NO: 275603 - DNA, 473 bp, Homo Sapiens; identical to SEQ ID NO: 251811
  misc_feature (20)..(20): n is a, c, g, or t
  misc_feature (27)..(27): n is a, c, g, or t
  misc_feature (40)..(40): n is a, c, g, or t
  misc_feature (55)..(55): n is a, c, g, or t
  misc_feature (62)..(62): n is a, c, g, or t

SEQ ID NO: 275604 - DNA, 516 bp, Homo Sapiens; identical to SEQ ID NO: 251812
  misc_feature (459)..(459): n is a, c, g, or t
  misc_feature (468)..(468): n is a, c, g, or t
  misc_feature (475)..(475): n is a, c, g, or t
  misc_feature (484)..(484): n is a, c, g, or t

SEQ ID NO: 275605 - DNA, 1816 bp, Homo Sapiens; identical to SEQ ID NO: 251840
  misc_feature (1362)..(1362): n is a, c, g, or t

SEQ ID NO: 275606 - DNA, 484 bp, Homo Sapiens; identical to SEQ ID NO: 251841

SEQ ID NO: 275607 - DNA, 1992 bp, Homo Sapiens; identical to SEQ ID NO: 251842
  misc_feature (1879)..(1879): n is a, c, g, or t

SEQ ID NO: 275608 - DNA, 681 bp, Homo Sapiens; identical to SEQ ID NO: 251843
  misc_feature (11)..(11): n is a, c, g, or t
  misc_feature (26)..(26): n is a, c, g, or t
  misc_feature (70)..(70): n is a, c, g, or t
  misc_feature (109)..(109): n is a, c, g, or t

SEQ ID NO: 275609 - DNA, 578 bp, Homo Sapiens; identical to SEQ ID NO: 251844
  misc_feature (441)..(466): n is a, c, g, or t

SEQ ID NO: 275610 - DNA, 475 bp, Homo Sapiens; identical to SEQ ID NO: 251845
  misc_feature (353)..(353): n is a, c, g, or t
  misc_feature (366)..(366): n is a, c, g, or t
  misc_feature (416)..(416): n is a, c, g, or t
  misc_feature (421)..(421): n is a, c, g, or t
  misc_feature (434)..(434): n is a, c, g, or t
  misc_feature (444)..(444): n is a, c, g, or t

SEQ ID NO: 275611 - DNA, 1090 bp, Homo Sapiens; identical to SEQ ID NO: 251850
  misc_feature (209)..(227): n is a, c, g, or t
  misc_feature (258)..(348): n is a, c, g, or t
  misc_feature (780)..(788): n is a, c, g, or t
  misc_feature (815)..(815): n is a, c, g, or t

SEQ ID NO: 275612 - DNA, 503 bp, Homo Sapiens; identical to SEQ ID NO: 251851
  misc_feature (281)..(281): n is a, c, g, or t
  misc_feature (319)..(342): n is a, c, g, or t

SEQ ID NO: 275613 - DNA, 647 bp, Homo Sapiens; identical to SEQ ID NO: 251852
  misc_feature (628)..(628): n is a, c, g, or t

SEQ ID NO: 275614 - DNA, 669 bp, Homo Sapiens; identical to SEQ ID NO: 251853
  misc_feature (632)..(632): n is a, c, g, or t

SEQ ID NO: 275615 - DNA, 1644 bp, Homo Sapiens; identical to SEQ ID NO: 251854

SEQ ID NO: 275616 - DNA, 878 bp, Homo Sapiens; identical to SEQ ID NO: 251855

SEQ ID NO: 275617 - DNA, 1344 bp, Homo Sapiens; identical to SEQ ID NO: 251856
  misc_feature (139)..(139): n is a, c, g, or t
  misc_feature (741)..(852): n is a, c, g, or t
  misc_feature (971)..(1000): n is a, c, g, or t
  misc_feature (1109)..(1109): n is a, c, g, or t

SEQ ID NO: 275618 - DNA, 1605 bp, Homo Sapiens; identical to SEQ ID NO: 251857

SEQ ID NO: 275619 - DNA, 465 bp, Homo Sapiens; identical to SEQ ID NO: 251858

SEQ ID NO: 275620 - DNA, 443 bp, Homo Sapiens; identical to SEQ ID NO: 251859
  misc_feature (370)..(370): n is a, c, g, or t
  misc_feature (421)..(421): n is a, c, g, or t

SEQ ID NO: 275621 - DNA, 617 bp, Homo Sapiens; identical to SEQ ID NO: 251866

SEQ ID NO: 275622 - DNA, 1032 bp, Homo Sapiens; identical to SEQ ID NO: 251867

SEQ ID NO: 275623 - DNA, 1629 bp, Homo Sapiens; identical to SEQ ID NO: 251869
  misc_feature (1094)..(1094): n is a, c, g, or t

SEQ ID NO: 275624 - DNA, 1088 bp, Homo Sapiens; identical to SEQ ID NO: 251870
  misc_feature (82)..(82): n is a, c, g, or t

SEQ ID NO: 275625 - DNA, 1089 bp, Homo Sapiens; identical to SEQ ID NO: 251880
  misc_feature (267)..(295): n is a, c, g, or t
  misc_feature (468)..(476): n is a, c, g, or t
  misc_feature (519)..(549): n is a, c, g, or t
  misc_feature (1018)..(1018): n is a, c, g, or t

SEQ ID NO: 275626 - DNA, 1149 bp, Homo Sapiens; identical to SEQ ID NO: 251881
  misc_feature (1087)..(1087): n is a, c, g, or t
  misc_feature (1109)..(1109): n is a, c, g, or t
  misc_feature (1118)..(1118): n is a, c, g, or t
  misc_feature (1125)..(1125): n is a, c, g, or t

SEQ ID NO: 275627 - DNA, 355 bp, Homo Sapiens; identical to SEQ ID NO: 251882
  misc_feature (228)..(256): n is a, c, g, or t

SEQ ID NO: 275628 - DNA, 449 bp, Homo Sapiens; identical to SEQ ID NO: 251883
  misc_feature (416)..(416): n is a, c, g, or t
  misc_feature (432)..(432): n is a, c, g, or t

SEQ ID NO: 275629 - DNA, 299 bp, Homo Sapiens; identical to SEQ ID NO: 251884
  misc_feature (177)..(177): n is a, c, g, or t

SEQ ID NO: 275630 - DNA, 1089 bp, Homo Sapiens; identical to SEQ ID NO: 251892
  misc_feature (650)..(666): n is a, c, g, or t
  misc_feature (1012)..(1012): n is a, c, g, or t
  misc_feature (1036)..(1036): n is a, c, g, or t
  misc_feature (1074)..(1074): n is a, c, g, or t

SEQ ID NO: 275631 - DNA, 723 bp, Homo Sapiens; identical to SEQ ID NO: 251893
  misc_feature (498)..(512): n is a, c, g, or t
  misc_feature (536)..(587): n is a, c, g, or t
  misc_feature (652)..(652): n is a, c, g, or t
  misc_feature (663)..(674): n is a, c, g, or t
  misc_feature (694)..(694): n is a, c, g, or t

SEQ ID NO: 275632 - DNA, 734 bp, Homo Sapiens; identical to SEQ ID NO: 251896
  misc_feature (172)..(181): n is a, c, g, or t

SEQ ID NO: 275633 - DNA, 861 bp, Homo Sapiens; identical to SEQ ID NO: 251897
  misc_feature (170)..(253): n is a, c, g, or t

SEQ ID NO: 275634 - DNA, 958 bp, Homo Sapiens; identical to SEQ ID NO: 251898

SEQ ID NO: 275635 - DNA, 929 bp, Homo Sapiens; identical to SEQ ID NO: 251905
  misc_feature (549)..(669): n is a, c, g, or t
  misc_feature (724)..(822): n is a, c, g, or t

SEQ ID NO: 275636 - DNA, 531 bp, Homo Sapiens; identical to SEQ ID NO: 251906

SEQ ID NO: 275637 - DNA, 1019 bp, Homo Sapiens; identical to SEQ ID NO: 251907
  misc_feature (716)..(740): n is a, c, g, or t

SEQ ID NO: 275638 - DNA, 470 bp, Homo Sapiens; identical to SEQ ID NO: 251908
  misc_feature (98)..(138): n is a, c, g, or t

SEQ ID NO: 275639 - DNA, 909 bp, Homo Sapiens; identical to SEQ ID NO: 251911
  misc_feature (590)..(590): n is a, c, g, or t

SEQ ID NO: 275640 - DNA, 836 bp, Homo Sapiens; identical to SEQ ID NO: 251912

SEQ ID NO: 275641 - DNA, 823 bp, Homo Sapiens; identical to SEQ ID NO: 251919
  misc_feature (765)..(765): n is a, c, g, or t
  misc_feature (777)..(777): n is a, c, g, or t

SEQ ID NO: 275642 - DNA, 735 bp, Homo Sapiens; identical to SEQ ID NO: 14811
  misc_feature (632)..(632): n is a, c, g, or t

SEQ ID NO: 275643 - DNA, 2553 bp, Homo Sapiens; identical to SEQ ID NO: 251921
  misc_feature (644)..(644): n is a, c, g, or t
  misc_feature (649)..(649): n is a, c, g, or t
  misc_feature (672)..(672): n is a, c, g, or t
  misc_feature (720)..(720): n is a, c, g, or t
  misc_feature (783)..(783): n is a, c, g, or t
  misc_feature (822)..(822): n is a, c, g, or t
  misc_feature (2192)..(2192): n is a, c, g, or t

SEQ ID NO: 275644 - DNA, 611 bp, Homo Sapiens; identical to SEQ ID NO: 251922

SEQ ID NO: 275645 - DNA, 557 bp, Homo Sapiens; identical to SEQ ID NO: 251923

SEQ ID NO: 275646 - DNA, 587 bp, Homo Sapiens; identical to SEQ ID NO: 251929
  misc_feature (378)..(420): n is a, c, g, or t
  misc_feature (443)..(497): n is a, c, g, or t

SEQ ID NO: 275647 - DNA, 486 bp, Homo Sapiens; identical to SEQ ID NO: 251930

SEQ ID NO: 275648 - DNA, 1445 bp, Homo Sapiens; identical to SEQ ID NO: 251931
  misc_feature (81)..(81): n is a, c, g, or t
  misc_feature (84)..(85): n is a, c, g, or t
  misc_feature (87)..(87): n is a, c, g, or t
  misc_feature (89)..(92): n is a, c, g, or t
  misc_feature (94)..(98): n is a, c, g, or t

SEQ ID NO: 275649 - DNA, 1083 bp, Homo Sapiens; identical to SEQ ID NO: 251952
  misc_feature (14)..(14): n is a, c, g, or t
  misc_feature (30)..(30): n is a, c, g, or t
  misc_feature (161)..(219): n is a, c, g, or t
  misc_feature (233)..(233): n is a, c, g, or t

SEQ ID NO: 275650 - DNA, 441 bp, Homo Sapiens; identical to SEQ ID NO: 251953
  misc_feature (403)..(403): n is a, c, g, or t

SEQ ID NO: 275651 - DNA, 1049 bp, Homo Sapiens; identical to SEQ ID NO: 251954
  misc_feature (69)..(69): n is a, c, g, or t
  misc_feature (85)..(85): n is a, c, g, or t
  misc_feature (106)..(106): n is a, c, g, or t

SEQ ID NO: 275652 - DNA, 2230 bp, Homo Sapiens; identical to SEQ ID NO: 251962
  misc_feature (11)..(11): n is a, c, g, or t

SEQ ID NO: 275653 - DNA, 981 bp, Homo Sapiens; identical to SEQ ID NO: 251963
  misc_feature (896)..(896): n is a, c, g, or t
  misc_feature (915)..(916): n is a, c, g, or t
  misc_feature (919)..(919): n is a, c, g, or t
  misc_feature (921)..(921): n is a, c, g, or t
  misc_feature (925)..(926): n is a, c, g, or t
  misc_feature (932)..(932): n is a, c, g, or t
  misc_feature (939)..(941): n is a, c, g, or t
  misc_feature (959)..(959): n is a, c, g, or t
  misc_feature (964)..(964): n is a, c, g, or t
  misc_feature (967)..(967): n is a, c, g, or t
  misc_feature (970)..(970): n is a, c, g, or t
  misc_feature (976)..(976): n is a, c, g, or t

SEQ ID NO: 275654 - DNA, 1243 bp, Homo Sapiens; identical to SEQ ID NO: 251966

SEQ ID NO: 275655 - DNA, 1106 bp, Homo Sapiens; identical to SEQ ID NO: 251967
  misc_feature (964)..(1002): n is a, c, g, or t

SEQ ID NO: 275656 - DNA, 1916 bp, Homo Sapiens; identical to SEQ ID NO: 251968
  misc_feature (607)..(607): n is a, c, g, or t
  misc_feature (1770)..(1770): n is a, c, g, or t

SEQ ID NO: 275657 - DNA, 1066 bp, Homo Sapiens; identical to SEQ ID NO: 251969
  misc_feature (849)..(849): n is a, c, g, or t

SEQ ID NO: 275658 - DNA, 1247 bp, Homo Sapiens; identical to SEQ ID NO: 251970
  misc_feature (1039)..(1137): n is a, c, g, or t

SEQ ID NO: 275659 - DNA, 834 bp, Homo Sapiens; identical to SEQ ID NO: 251971
  misc_feature (774)..(776): n is a, c, g, or t

SEQ ID NO: 275660 - DNA, 565 bp, Homo Sapiens; identical to SEQ ID NO: 251972
  misc_feature (90)..(90): n is a, c, g, or t
  misc_feature (229)..(229): n is a, c, g, or t
  misc_feature (244)..(244): n is a, c, g, or t

SEQ ID NO: 275661 - DNA, 536 bp, Homo Sapiens; identical to SEQ ID NO: 251973
  misc_feature (46)..(46): n is a, c, g, or t
  misc_feature (67)..(67): n is a, c, g, or t
  misc_feature (135)..(135): n is a, c, g, or t
  misc_feature (228)..(228): n is a, c, g, or t
  misc_feature (383)..(421): n is a, c, g, or t

SEQ ID NO: 275662 - DNA, 914 bp, Homo Sapiens; identical to SEQ ID NO: 251976
  misc_feature (617)..(637): n is a, c, g, or t
  misc_feature (768)..(828): n is a, c, g, or t

SEQ ID NO: 275663 - DNA, 1875 bp, Homo Sapiens; identical to SEQ ID NO: 251977
  misc_feature (1163)..(1171): n is a, c, g, or t
  misc_feature (1591)..(1742): n is a, c, g, or t
  misc_feature (1791)..(1800): n is a, c, g, or t

SEQ ID NO: 275664 - DNA, 1001 bp, Homo Sapiens; identical to SEQ ID NO: 251978
  misc_feature (704)..(724): n is a, c, g, or t

SEQ ID NO: 275665 - DNA, 523 bp, Homo Sapiens; identical to SEQ ID NO: 251979
  misc_feature (21)..(21): n is a, c, g, or t

SEQ ID NO: 275666 - DNA, 394 bp, Homo Sapiens; identical to SEQ ID NO: 251980
  misc_feature (17)..(17): n is a, c, g, or t
  misc_feature (31)..(31): n is a, c, g, or t
  misc_feature (49)..(49): n is a, c, g, or t
  misc_feature (94)..(94): n is a, c, g, or t

SEQ ID NO: 275667 - DNA, 588 bp, Homo Sapiens; identical to SEQ ID NO: 251990
  misc_feature (443)..(474): n is a, c, g, or t

SEQ ID NO: 275668 - DNA, 574 bp, Homo Sapiens; identical to SEQ ID NO: 251991
  misc_feature (452)..(475): n is a, c, g, or t
  misc_feature (511)..(511): n is a, c, g, or t

SEQ ID NO: 275669 - DNA, 863 bp, Homo Sapiens; identical to SEQ ID NO: 251997
  misc_feature (587)..(599): n is a, c, g, or t

SEQ ID NO: 275670 - DNA, 1190 bp, Homo Sapiens; identical to SEQ ID NO: 251998

SEQ ID NO: 275671 - DNA, 635 bp, Homo Sapiens; identical to SEQ ID NO: 251999

SEQ ID NO: 275672 - DNA, 1127 bp, Homo Sapiens; identical to SEQ ID NO: 252008
  misc_feature (30)..(30): n is a, c, g, or t

SEQ ID NO: 275673 - DNA, 927 bp, Homo Sapiens; identical to SEQ ID NO: 252009
  misc_feature (54)..(54): n is a, c, g, or t
  misc_feature (63)..(119): n is a, c, g, or t
  misc_feature (682)..(698): n is a, c, g, or t
  misc_feature (835)..(835): n is a, c, g, or t
  misc_feature (913)..(913): n is a, c, g, or t

SEQ ID NO: 275674 - DNA, 750 bp, Homo Sapiens; identical to SEQ ID NO: 252018

SEQ ID NO: 275675 - DNA, 1340 bp, Homo Sapiens; identical to SEQ ID NO: 252019
  misc_feature (140)..(140): n is a, c, g, or t

SEQ ID NO: 275676 - DNA, 498 bp, Homo Sapiens; identical to SEQ ID NO: 252038

SEQ ID NO: 275677 - DNA, 1252 bp, Homo Sapiens; identical to SEQ ID NO: 252039

SEQ ID NO: 275678 - DNA, 629 bp, Homo Sapiens; identical to SEQ ID NO: 252041
  misc_feature (84)..(92): n is a, c, g, or t

SEQ ID NO: 275679 - DNA, 2750 bp, Homo Sapiens; identical to SEQ ID NO: 252042
  misc_feature (695)..(695): n is a, c, g, or t

SEQ ID NO: 275680 - DNA, 609 bp, Homo Sapiens; identical to SEQ ID NO: 252043

SEQ ID NO: 275681 - DNA, 1039 bp, Homo Sapiens; identical to SEQ ID NO: 252045
  misc_feature (645)..(653): n is a, c, g, or t
  misc_feature (728)..(761): n is a, c, g, or t
  misc_feature (886)..(927): n is a, c, g, or t

SEQ ID NO: 275682 - DNA, 877 bp, Homo Sapiens; identical to SEQ ID NO: 252046
  misc_feature (844)..(844): n is a, c, g, or t

SEQ ID NO: 275683 - DNA, 2132 bp, Homo Sapiens; identical to SEQ ID NO: 252056

SEQ ID NO: 275684 - DNA, 1009 bp, Homo Sapiens; identical to SEQ ID NO: 252057

SEQ ID NO: 275685 - DNA, 865 bp, Homo Sapiens; identical to SEQ ID NO: 252058
  misc_feature (87)..(87): n is a, c, g, or t
  misc_feature (96)..(96): n is a, c, g, or t

SEQ ID NO: 275686 - DNA, 2023 bp, Homo Sapiens; identical to SEQ ID NO: 252061
  misc_feature (554)..(575): n is a, c, g, or t
  misc_feature (1115)..(1125): n is a, c, g, or t

SEQ ID NO: 275687 - DNA, 1635 bp, Homo Sapiens; identical to SEQ ID NO: 252062

SEQ ID NO: 275688 - DNA, 829 bp, Homo Sapiens; identical to SEQ ID NO: 252063

SEQ ID NO: 275689 - DNA, 584 bp, Homo Sapiens; identical to SEQ ID NO: 252073
  misc_feature (22)..(22): n is a, c, g, or t
  misc_feature (413)..(448): n is a, c, g, or t

SEQ ID NO: 275690 - DNA, 546 bp, Homo Sapiens; identical to SEQ ID NO: 252074

SEQ ID NO: 275691 - DNA, 401 bp, Homo Sapiens; identical to SEQ ID NO: 252075
  misc_feature (21)..(21): n is a, c, g, or t
  misc_feature (235)..(270): n is a, c, g, or t

SEQ ID NO: 275692 - DNA, 1081 bp, Homo Sapiens; identical to SEQ ID NO: 252081
  misc_feature (17)..(17): n is a, c, g, or t
  misc_feature (22)..(22): n is a, c, g, or t
  misc_feature (40)..(40): n is a, c, g, or t
  misc_feature (43)..(43): n is a, c, g, or t
  misc_feature (45)..(45): n is a, c, g, or t
  misc_feature (50)..(50): n is a, c, g, or t
  misc_feature (55)..(56): n is a, c, g, or t
  misc_feature (61)..(61): n is a, c, g, or t
  misc_feature (66)..(66): n is a, c, g, or t
  misc_feature (68)..(68): n is a, c, g, or t
  misc_feature (634)..(668): n is a, c, g, or t
  misc_feature (1032)..(1040): n is a, c, g, or t

SEQ ID NO: 275693 - DNA, 857 bp, Homo Sapiens; identical to SEQ ID NO: 164197

SEQ ID NO: 275694 - DNA, 1396 bp, Homo Sapiens; identical to SEQ ID NO: 252083
  misc_feature (1215)..(1215): n is a, c, g, or t

SEQ ID NO: 275695 - DNA, 1038 bp, Homo Sapiens; identical to SEQ ID NO: 252084
  misc_feature (53)..(53): n is a, c, g, or t
  misc_feature (63)..(63): n is a, c, g, or t

SEQ ID NO: 275696 - DNA, 817 bp, Homo Sapiens; identical to SEQ ID NO: 173672

SEQ ID NO: 275697 - DNA, 778 bp, Homo Sapiens; identical to SEQ ID NO: 252086
  misc_feature (224)..(224): n is a, c, g, or t
  misc_feature (688)..(688): n is a, c, g, or t

SEQ ID NO: 275698 - DNA, 976 bp, Homo Sapiens; identical to SEQ ID NO: 252095

SEQ ID NO: 275699 - DNA, 636 bp, Homo Sapiens; identical to SEQ ID NO: 252096
  misc_feature (488)..(489): n is a, c, g, or t
  misc_feature (505)..(505): n is a, c, g, or t
  misc_feature (515)..(515): n is a, c, g, or t
  misc_feature (519)..(519): n is a, c, g, or t
  misc_feature (521)..(521): n is a, c, g, or t
  misc_feature (529)..(529): n is a, c, g, or t
  misc_feature (547)..(547): n is a, c, g, or t
  misc_feature (550)..(550): n is a, c, g, or t
  misc_feature (555)..(555): n is a, c, g, or t
  misc_feature (557)..(557): n is a, c, g, or t
  misc_feature (559)..(559): n is a, c, g, or t
  misc_feature (595)..(595): n is a, c, g, or t

SEQ ID NO: 275700 - DNA, 957 bp, Homo Sapiens; identical to SEQ ID NO: 252097

SEQ ID NO: 275701 - DNA, 1939 bp, Homo Sapiens; identical to SEQ ID NO: 252105

SEQ ID NO: 275702 - DNA, 450 bp, Homo Sapiens; identical to SEQ ID NO: 252106
  misc_feature (15)..(15): n is a, c, g, or t
  misc_feature (48)..(48): n is a, c, g, or t
  misc_feature (126)..(126): n is a, c, g, or t
  misc_feature (183)..(183): n is a, c, g, or t

SEQ ID NO: 275703 - DNA, 1690 bp, Homo Sapiens; identical to SEQ ID NO: 252112

SEQ ID NO: 275704 - DNA, 475 bp, Homo Sapiens; identical to SEQ ID NO: 252113
  misc_feature (348)..(348): n is a, c, g, or t
  misc_feature (373)..(373): n is a, c, g, or t
  misc_feature (378)..(378): n is a, c, g, or t
  misc_feature (389)..(389): n is a, c, g, or t
  misc_feature (394)..(394): n is a, c, g, or t
  misc_feature (399)..(399): n is a, c, g, or t
  misc_feature (426)..(426): n is a, c, g, or t

SEQ ID NO: 275705 - DNA, 568 bp, Homo Sapiens; identical to SEQ ID NO: 252114

SEQ ID NO: 275706 - DNA, 789 bp, Homo Sapiens; identical to SEQ ID NO: 252115
  misc_feature (601)..(606): n is a, c, g, or t
  misc_feature (608)..(608): n is a, c, g, or t
  misc_feature (610)..(611): n is a, c, g, or t
  misc_feature (614)..(616): n is a, c, g, or t
  misc_feature (619)..(619): n is a, c, g, or t
  misc_feature (627)..(627): n is a, c, g, or t

SEQ ID NO: 275707 - DNA, 494 bp, Homo Sapiens; identical to SEQ ID NO: 252116
  misc_feature (401)..(401): n is a, c, g, or t
  misc_feature (420)..(420): n is a, c, g, or t
  misc_feature (438)..(438): n is a, c, g, or t
  misc_feature (453)..(453): n is a, c, g, or t
  misc_feature (468)..(468): n is a, c, g, or t

SEQ ID NO: 275708 - DNA, 989 bp, Homo Sapiens; identical to SEQ ID NO: 252117

SEQ ID NO: 275709 - DNA, 570 bp, Homo Sapiens; identical to SEQ ID NO: 252123
  misc_feature (534)..(534): n is a, c, g, or t
  misc_feature (545)..(545): n is a, c, g, or t

SEQ ID NO: 275710 - DNA, 921 bp, Homo Sapiens; identical to SEQ ID NO: 252124
  misc_feature (765)..(773): n is a, c, g, or t

SEQ ID NO: 275711 - DNA, 755 bp, Homo Sapiens; identical to SEQ ID NO: 252125

SEQ ID NO: 275712 - DNA, 922 bp, Homo Sapiens; identical to SEQ ID NO: 252126
  misc_feature (823)..(853): n is a, c, g, or t

SEQ ID NO: 275713 - DNA, 833 bp, Homo Sapiens; identical to SEQ ID NO: 252127
  misc_feature (762)..(762): n is a, c, g, or t
  misc_feature (775)..(775): n is a, c, g, or t
  misc_feature (780)..(780): n is a, c, g, or t
  misc_feature (787)..(787): n is a, c, g, or t
  misc_feature (797)..(797): n is a, c, g, or t

SEQ ID NO: 275714 - DNA, 646 bp, Homo Sapiens; identical to SEQ ID NO: 252128
  misc_feature (572)..(572): n is a, c, g, or t
  misc_feature (605)..(605): n is a, c, g, or t
  misc_feature (630)..(630): n is a, c, g, or t

SEQ ID NO: 275715 - DNA, 365 bp, Homo Sapiens; identical to SEQ ID NO: 252129

SEQ ID NO: 275716 - DNA, 976 bp, Homo Sapiens; identical to SEQ ID NO: 252132

SEQ ID NO: 275717 - DNA, 630 bp, Homo Sapiens; identical to SEQ ID NO: 252133

SEQ ID NO: 275718 - DNA, 910 bp, Homo Sapiens; identical to SEQ ID NO: 252134
  misc_feature (22)..(22): n is a, c, g, or t
  misc_feature (60)..(60): n is a, c, g, or t

SEQ ID NO: 275719 - DNA, 1565 bp, Homo Sapiens; identical to SEQ ID NO: 252137
  misc_feature (495)..(495): n is a, c, g, or t
  misc_feature (1231)..(1232): n is a, c, g, or t
  misc_feature (1239)..(1239): n is a, c, g, or t
  misc_feature (1242)..(1244): n is a, c, g, or t
  misc_feature (1266)..(1267): n is a, c, g, or t
  misc_feature (1281)..(1335): n is a, c, g, or t
  misc_feature (1337)..(1337): n is a, c, g, or t
  misc_feature (1351)..(1352): n is a, c, g, or t
  misc_feature (1357)..(1357): n is a, c, g, or t
  misc_feature (1359)..(1359): n is a, c, g, or t
  misc_feature (1453)..(1453): n is a, c, g, or t
  misc_feature (1465)..(1465): n is a, c, g, or t
  misc_feature (1468)..(1468): n is a, c, g, or t
  misc_feature (1494)..(1494): n is a, c, g, or t
  misc_feature (1513)..(1514): n is a, c, g, or t
  misc_feature (1538)..(1538): n is a, c, g, or t

SEQ ID NO: 275720 - DNA, 1009 bp, Homo Sapiens; identical to SEQ ID NO: 252138

SEQ ID NO: 275721 - DNA, 813 bp, Homo Sapiens; identical to SEQ ID NO: 252144
  misc_feature (131)..(243): n is a, c, g, or t

SEQ ID NO: 275722 - DNA, 1615 bp, Homo Sapiens; identical to SEQ ID NO: 252145
  misc_feature (1505)..(1505): n is a, c, g, or t
  misc_feature (1523)..(1523): n is a, c, g, or t

SEQ ID NO: 275723 - DNA, 498 bp, Homo Sapiens; identical to SEQ ID NO: 252146

SEQ ID NO: 275724 - DNA, 485 bp, Homo Sapiens; identical to SEQ ID NO: 252149

SEQ ID NO: 275725 - DNA, 834 bp, Homo Sapiens; identical to SEQ ID NO: 252150
  misc_feature (545)..(545): n is a, c, g, or t
  misc_feature (598)..(598): n is a, c, g, or t
  misc_feature (660)..(660): n is a, c, g, or t
  misc_feature (683)..(683): n is a, c, g, or t
  misc_feature (783)..(783): n is a, c, g, or t
  misc_feature (787)..(787): n is a, c, g, or t
  misc_feature (789)..(789): n is a, c, g, or t
  misc_feature (794)..(794): n is a, c, g, or t
  misc_feature (796)..(797): n is a, c, g, or t

SEQ ID NO: 275726 - DNA, 706 bp, Homo Sapiens; identical to SEQ ID NO: 252151

SEQ ID NO: 275727 - DNA, 590 bp, Homo Sapiens; identical to SEQ ID NO: 252152
  misc_feature (28)..(28): n is a, c, g, or t

SEQ ID NO: 275728 - DNA, 454 bp, Homo Sapiens; identical to SEQ ID NO: 252158

SEQ ID NO: 275729 - DNA, 757 bp, Homo Sapiens; identical to SEQ ID NO: 252159
  misc_feature (184)..(231): n is a, c, g, or t
  misc_feature (335)..(335): n is a, c, g, or t
  misc_feature (719)..(719): n is a, c, g, or t
  misc_feature (731)..(731): n is a, c, g, or t
  misc_feature (740)..(740): n is a, c, g, or t

SEQ ID NO: 275730 - DNA, 642 bp, Homo Sapiens; identical to SEQ ID NO: 252160

SEQ ID NO: 275731 - DNA, 1287 bp, Homo Sapiens; identical to SEQ ID NO: 252161

SEQ ID NO: 275732 - DNA, 886 bp, Homo Sapiens; identical to SEQ ID NO: 252163

SEQ ID NO: 275733 - DNA, 519 bp, Homo Sapiens; identical to SEQ ID NO: 252164
  misc_feature (25)..(25): n is a, c, g, or t
  misc_feature (39)..(39): n is a, c, g, or t
  misc_feature (55)..(55): n is a, c, g, or t
  misc_feature (112)..(112): n is a, c, g, or t
  misc_feature (118)..(118): n is a, c, g, or t

SEQ ID NO: 275734 - DNA, 924 bp, Homo Sapiens; identical to SEQ ID NO: 252171
  misc_feature (829)..(829): n is a, c, g, or t
  misc_feature (876)..(876): n is a, c, g, or t

SEQ ID NO: 275735 - DNA, 1728 bp, Homo Sapiens; identical to SEQ ID NO: 252172

SEQ ID NO: 275736 - DNA, 1021 bp, Homo Sapiens; identical to SEQ ID NO: 252173
  misc_feature (524)..(524): n is a, c, g, or t
  misc_feature (551)..(551): n is a, c, g, or t
  misc_feature (555)..(555): n is a, c, g, or t
  misc_feature (632)..(640): n is a, c, g, or t
  misc_feature (658)..(659): n is a, c, g, or t
  misc_feature (696)..(696): n is a, c, g, or t
  misc_feature (736)..(736): n is a, c, g, or t
  misc_feature (772)..(772): n is a, c, g, or t
  misc_feature (815)..(815): n is a, c, g, or t
  misc_feature (824)..(824): n is a, c, g, or t
  misc_feature (867)..(867): n is a, c, g, or t
  misc_feature (870)..(870): n is a, c, g, or t
  misc_feature (892)..(892): n is a, c, g, or t
  misc_feature (908)..(908): n is a, c, g, or t
  misc_feature (932)..(932): n is a, c, g, or t
  misc_feature (958)..(958): n is a, c, g, or t
  misc_feature (965)..(965): n is a, c, g, or t
  misc_feature (972)..(972): n is a, c, g, or t
  misc_feature (976)..(976): n is a, c, g, or t
  misc_feature (1008)..(1008): n is a, c, g, or t
  misc_feature (1013)..(1013): n is a, c, g, or t

SEQ ID NO: 275737 - DNA, 1024 bp, Homo Sapiens; identical to SEQ ID NO: 252174

SEQ ID NO: 275738 - DNA, 906 bp, Homo Sapiens; identical to SEQ ID NO: 252175
  misc_feature (662)..(749): n is a, c, g, or t

SEQ ID NO: 275739 - DNA, 719 bp, Homo Sapiens; identical to SEQ ID NO: 252176

SEQ ID NO: 275740 - DNA, 902 bp, Homo Sapiens; identical to SEQ ID NO: 252177
  misc_feature (787)..(787): n is a, c, g, or t
  misc_feature (878)..(878): n is a, c, g, or t

SEQ ID NO: 275741 - DNA, 1035 bp, Homo Sapiens; identical to SEQ ID NO: 252189
  misc_feature (692)..(713): n is a, c, g, or t

SEQ ID NO: 275742 - DNA, 421 bp, Homo Sapiens; identical to SEQ ID NO: 252190
  misc_feature (101)..(101): n is a, c, g, or t
  misc_feature (136)..(136): n is a, c, g, or t

SEQ ID NO: 275743 - DNA, 942 bp, Homo Sapiens; identical to SEQ ID NO: 252192

SEQ ID NO: 275744 - DNA, 884 bp, Homo Sapiens; identical to SEQ ID NO: 252193
  misc_feature (720)..(720): n is a, c, g, or t
  misc_feature (787)..(787): n is a, c, g, or t

SEQ ID NO: 275745 - DNA, 1926 bp, Homo Sapiens; identical to SEQ ID NO: 252194

SEQ ID NO: 275746 - DNA, 847 bp, Homo Sapiens; identical to SEQ ID NO: 252195

SEQ ID NO: 275747 - DNA, 460 bp, Homo Sapiens; identical to SEQ ID NO: 252196
  misc_feature (361)..(361): n is a, c, g, or t
  misc_feature (407)..(407): n is a, c, g, or t
  misc_feature (412)..(412): n is a, c, g, or t
  misc_feature (438)..(438): n is a, c, g, or t
  misc_feature (449)..(449): n is a, c, g, or t

SEQ ID NO: 275748 - DNA, 507 bp, Homo Sapiens; identical to SEQ ID NO: 252203

SEQ ID NO: 275749 - DNA, 646 bp, Homo Sapiens; identical to SEQ ID NO: 252204

SEQ ID NO: 275750 - DNA, 834 bp, Homo Sapiens; identical to SEQ ID NO: 252206
  misc_feature (657)..(658): n is a, c, g, or t
  misc_feature (661)..(662): n is a, c, g, or t
  misc_feature (664)..(674): n is a, c, g, or t
  misc_feature (676)..(676): n is a, c, g, or t
  misc_feature (679)..(682): n is a, c, g, or t

SEQ ID NO: 275751 - DNA, 919 bp, Homo Sapiens; identical to SEQ ID NO: 83016
  misc_feature (600)..(600): n is a, c, g, or t
  misc_feature (603)..(603): n is a, c, g, or t
  misc_feature (609)..(609): n is a, c, g, or t
  misc_feature (841)..(849): n is a, c, g, or t

SEQ ID NO: 275752 - DNA, 1478 bp, Homo Sapiens; identical to SEQ ID NO: 252210
  misc_feature (1333)..(1333): n is a, c, g, or t

SEQ ID NO: 275753 - DNA, 731 bp, Homo Sapiens; identical to SEQ ID NO: 252211
  misc_feature (564)..(594): n is a, c, g, or t

SEQ ID NO: 275754 - DNA, 776 bp, Homo Sapiens; identical to SEQ ID NO: 252212
  misc_feature (668)..(668): n is a, c, g, or t

SEQ ID NO: 275755 - DNA, 506 bp, Homo Sapiens; identical to SEQ ID NO: 252213
  misc_feature (436)..(436): n is a, c, g, or t
  misc_feature (451)..(451): n is a, c, g, or t
  misc_feature (473)..(473): n is a, c, g, or t
  misc_feature (490)..(490): n is a, c, g, or t

SEQ ID NO: 275756 - DNA, 372 bp, Homo Sapiens; identical to SEQ ID NO: 252223

SEQ ID NO: 275757 - DNA, 718 bp, Homo Sapiens; identical to SEQ ID NO: 14355
  misc_feature (688)..(688): n is a, c, g, or t
  misc_feature (700)..(700): n is a, c, g, or t

SEQ ID NO: 275758 - DNA, 1142 bp, Homo Sapiens; identical to SEQ ID NO: 252225

SEQ ID NO: 275759 - DNA, 919 bp, Homo Sapiens; identical to SEQ ID NO: 252226

SEQ ID NO: 275760 - DNA, 380 bp, Homo Sapiens; identical to SEQ ID NO: 252228

SEQ ID NO: 275761 - DNA, 633 bp, Homo Sapiens; identical to SEQ ID NO: 252229
  misc_feature (23)..(23): n is a, c, g, or t
  misc_feature (42)..(42): n is a, c, g, or t

SEQ ID NO: 275762 - DNA, 2082 bp, Homo Sapiens; identical to SEQ ID NO: 252230

SEQ ID NO: 275763 - DNA, 1371 bp, Homo Sapiens; identical to SEQ ID NO: 252231
  misc_feature (11)..(12): n is a, c, g, or t
  misc_feature (15)..(15): n is a, c, g, or t
  misc_feature (33)..(33): n is a, c, g, or t
  misc_feature (50)..(50): n is a, c, g, or t
  misc_feature (1005)..(1005): n is a, c, g, or t
  misc_feature (1016)..(1016): n is a, c, g, or t
  misc_feature (1345)..(1345): n is a, c, g, or t

SEQ ID NO: 275764 - DNA, 1642 bp, Homo Sapiens; identical to SEQ ID NO: 252242
  misc_feature (457)..(457): n is a, c, g, or t
  misc_feature (461)..(461): n is a, c, g, or t
  misc_feature (463)..(463): n is a, c, g, or t
  misc_feature (466)..(466): n is a, c, g, or t
  misc_feature (470)..(470): n is a, c, g, or t
  misc_feature (573)..(573): n is a, c, g, or t
  misc_feature (579)..(579): n is a, c, g, or t
  misc_feature (586)..(586): n is a, c, g, or t
  misc_feature (588)..(588): n is a, c, g, or t
  misc_feature (598)..(598): n is a, c, g, or t
  misc_feature (600)..(600): n is a, c, g, or t
  misc_feature (608)..(610): n is a, c, g, or t
  misc_feature (615)..(615): n is a, c, g, or t
  misc_feature (617)..(617): n is a, c, g, or t
  misc_feature (623)..(623): n is a, c, g, or t
  misc_feature (941)..(941): n is a, c, g, or t
  misc_feature (1249)..(1249): n is a, c, g, or t
  misc_feature (1329)..(1329): n is a, c, g, or t
  misc_feature (1376)..(1376): n is a, c, g, or t
  misc_feature (1444)..(1444): n is a, c, g, or t
  misc_feature (1464)..(1464): n is a, c, g, or t
  misc_feature (1577)..(1577): n is a, c, g, or t
  misc_feature (1627)..(1627): n is a, c, g, or t
  misc_feature (1630)..(1630): n is a, c, g, or t
  misc_feature (1634)..(1635): n is a, c, g, or t

SEQ ID NO: 275765 - DNA, 459 bp, Homo Sapiens; identical to SEQ ID NO: 252243
  misc_feature (442)..(442): n is a, c, g, or t

SEQ ID NO: 275766 - DNA, 400 bp, Homo Sapiens; identical to SEQ ID NO: 252244
  misc_feature (369)..(369): n is a, c, g, or t
  misc_feature (389)..(389): n is a, c, g, or t

SEQ ID NO: 275767 - DNA, 341 bp, Homo Sapiens; identical to SEQ ID NO: 252255

SEQ ID NO: 275768 - DNA, 2011 bp, Homo Sapiens; identical to SEQ ID NO: 252256
  misc_feature (748)..(776): n is a, c, g, or t

SEQ ID NO: 275769 - DNA, 1032 bp, Homo Sapiens; identical to SEQ ID NO: 252257
  misc_feature (15)..(15): n is a, c, g, or t
  misc_feature (431)..(619): n is a, c, g, or t
  misc_feature (643)..(652): n is a, c, g, or t
  misc_feature (681)..(771): n is a, c, g, or t
  misc_feature (835)..(835): n is a, c, g, or t
  misc_feature (865)..(875): n is a, c, g, or t

SEQ ID NO: 275770 - DNA, 419 bp, Homo Sapiens; identical to SEQ ID NO: 252261

SEQ ID NO: 275771 - DNA, 643 bp, Homo Sapiens; identical to SEQ ID NO: 252262

SEQ ID NO: 275772 - DNA, 1922 bp, Homo Sapiens; identical to SEQ ID NO: 252283

SEQ ID NO: 275773 - DNA, 439 bp, Homo Sapiens; identical to SEQ ID NO: 252284
  misc_feature (403)..(403): n is a, c, g, or t

SEQ ID NO: 275774 - DNA, 1058 bp, Homo Sapiens; identical to SEQ ID NO: 252287

SEQ ID NO: 275775 - DNA, 1355 bp, Homo Sapiens; identical to SEQ ID NO: 252288
  misc_feature (13)..(13): n is a, c, g, or t
  misc_feature (157)..(157): n is a, c, g, or t

SEQ ID NO: 275776 - DNA, 948 bp, Homo Sapiens; identical to SEQ ID NO: 252289
  misc_feature (91)..(91): n is a, c, g, or t
  misc_feature (101)..(101): n is a, c, g, or t
  misc_feature (502)..(502): n is a, c, g, or t

SEQ ID NO: 275777 - DNA, 611 bp, Homo Sapiens; identical to SEQ ID NO: 252290
  misc_feature (453)..(453): n is a, c, g, or t

SEQ ID NO: 275778 - DNA, 1094 bp, Homo Sapiens; identical to SEQ ID NO: 252291
  misc_feature (1040)..(1040): n is a, c, g, or t
  misc_feature (1044)..(1044): n is a, c, g, or t
  misc_feature (1060)..(1060): n is a, c, g, or t
  misc_feature (1062)..(1062): n is a, c, g, or t
  misc_feature (1065)..(1065): n is a, c, g, or t
  misc_feature (1071)..(1071): n is a, c, g, or t
  misc_feature (1073)..(1073): n is a, c, g, or t
  misc_feature (1082)..(1082): n is a, c, g, or t

SEQ ID NO: 275779 - DNA, 1354 bp, Homo Sapiens; identical to SEQ ID NO: 252292

SEQ ID NO: 275780 - DNA, 2345 bp, Homo Sapiens; identical to SEQ ID NO: 252293
  misc_feature (1151)..(1151): n is a, c, g, or t
  misc_feature (1196)..(1196): n is a, c, g, or t
  misc_feature (1205)..(1205): n is a, c, g, or t

SEQ ID NO: 275781 - DNA, 815 bp, Homo Sapiens; identical to SEQ ID NO: 252300
  misc_feature (21)..(21): n is a, c, g, or t
  misc_feature (32)..(32): n is a, c, g, or t
  misc_feature (105)..(105): n is a, c, g, or t
  misc_feature (107)..(188): n is a, c, g, or t

SEQ ID NO: 275782 - DNA, 534 bp, Homo Sapiens; identical to SEQ ID NO: 252301
  misc_feature (24)..(24): n is a, c, g, or t
  misc_feature (37)..(37): n is a, c, g, or t
  misc_feature (45)..(45): n is a, c, g, or t
  misc_feature (54)..(54): n is a, c, g, or t

SEQ ID NO: 275783 - DNA, 983 bp, Homo Sapiens; identical to SEQ ID NO: 252306
  misc_feature (842)..(928): n is a, c, g, or t

SEQ ID NO: 275784 - DNA, 702 bp, Homo Sapiens; identical to SEQ ID NO: 252307

SEQ ID NO: 275785 - DNA, 596 bp, Homo Sapiens; identical to SEQ ID NO: 252308

SEQ ID NO: 275786 - DNA, 1223 bp, Homo Sapiens; identical to SEQ ID NO: 252309
  misc_feature (1031)..(1031): n is a, c, g, or t
  misc_feature (1080)..(1080): n is a, c, g, or t
  misc_feature (1084)..(1084): n is a, c, g, or t
  misc_feature (1118)..(1118): n is a, c, g, or t
  misc_feature (1125)..(1125): n is a, c, g, or t
  misc_feature (1144)..(1144): n is a, c, g, or t
  misc_feature (1157)..(1158): n is a, c, g, or t
  misc_feature (1166)..(1166): n is a, c, g, or t
  misc_feature (1168)..(1169): n is a, c, g, or t
  misc_feature (1183)..(1183): n is a, c, g, or t
  misc_feature (1187)..(1188): n is a, c, g, or t
  misc_feature (1191)..(1192): n is a, c, g, or t
  misc_feature (1198)..(1198): n is a, c, g, or t
  misc_feature (1201)..(1201): n is a, c, g, or t
  misc_feature (1210)..(1210): n is a, c, g, or t
  misc_feature (1215)..(1215): n is a, c, g, or t
  misc_feature (1218)..(1218): n is a, c, g, or t

SEQ ID NO: 275787 - DNA, 2109 bp, Homo Sapiens; identical to SEQ ID NO: 252313
  misc_feature (1492)..(1514): n is a, c, g, or t
  misc_feature (1670)..(1696): n is a, c, g, or t
  misc_feature (1802)..(1810): n is a, c, g, or t
  misc_feature (1856)..(1875): n is a, c, g, or t

SEQ ID NO: 275788 - DNA, 420 bp, Homo Sapiens; identical to SEQ ID NO: 252314

SEQ ID NO: 275789 - DNA, 2161 bp, Homo Sapiens; identical to SEQ ID NO: 252319
  misc_feature (2094)..(2094): n is a, c, g, or t

SEQ ID NO: 275790 - DNA, 535 bp, Homo Sapiens; identical to SEQ ID NO: 252320

SEQ ID NO: 275791 - DNA, 405 bp, Homo Sapiens; identical to SEQ ID NO: 252321

SEQ ID NO: 275792 - DNA, 867 bp, Homo Sapiens; identical to SEQ ID NO: 252341

SEQ ID NO: 275793 - DNA, 592 bp, Homo Sapiens; identical to SEQ ID NO: 252342

SEQ ID NO: 275794 - DNA, 575 bp, Homo Sapiens; identical to SEQ ID NO: 252343

SEQ ID NO: 275795 - DNA, 719 bp, Homo Sapiens; identical to SEQ ID NO: 252347

SEQ ID NO: 275796 - DNA, 861 bp, Homo Sapiens; identical to SEQ ID NO: 252348

SEQ ID NO: 275797 - DNA, 889 bp, Homo Sapiens; identical to SEQ ID NO: 252349

SEQ ID NO: 275798 - DNA, 680 bp, Homo Sapiens; identical to SEQ ID NO: 252350

SEQ ID NO: 275799 - DNA, 1903 bp, Homo Sapiens; identical to SEQ ID NO: 252354

SEQ ID NO: 275800 - DNA, 922 bp, Homo Sapiens; identical to SEQ ID NO: 252355
  misc_feature (903)..(903): n is a, c, g, or t

SEQ ID NO: 275801 - DNA, 1095 bp, Homo Sapiens; identical to SEQ ID NO: 252356

SEQ ID NO: 275802 - DNA, 852 bp, Homo Sapiens; identical to SEQ ID NO: 252360
  misc_feature (125)..(134): n is a, c, g, or t
  misc_feature (819)..(819): n is a, c, g, or t

SEQ ID NO: 275803 - DNA, 483 bp, Homo Sapiens; identical to SEQ ID NO: 252361

SEQ ID NO: 275804 - DNA, 1194 bp, Homo Sapiens; identical to SEQ ID NO: 252364
  misc_feature (1024)..(1024): n is a, c, g, or t

SEQ ID NO: 275805 - DNA, 729 bp, Homo Sapiens; identical to SEQ ID NO: 252365
  misc_feature (681)..(681): n is a, c, g, or t

SEQ ID NO: 275806 - DNA, 1902 bp, Homo Sapiens; identical to SEQ ID NO: 252371
  misc_feature (1877)..(1878): n is a, c, g, or t

SEQ ID NO: 275807 - DNA, 334 bp, Homo Sapiens; identical to SEQ ID NO: 252372

SEQ ID NO: 275808 - DNA, 632 bp, Homo Sapiens; identical to SEQ ID NO: 252373
  misc_feature (48)..(48): n is a, c, g, or t
  misc_feature (85)..(85): n is a, c, g, or t
  misc_feature (122)..(122): n is a, c, g, or t

SEQ ID NO: 275809 - DNA, 1340 bp, Homo Sapiens; identical to SEQ ID NO: 252374
  misc_feature (681)..(681): n is a, c, g, or t
  misc_feature (695)..(695): n is a, c, g, or t
  misc_feature (884)..(930): n is a, c, g, or t

SEQ ID NO: 275810 - DNA, 834 bp, Homo Sapiens; identical to SEQ ID NO: 252377
  misc_feature (103)..(159): n is a, c, g, or t
  misc_feature (723)..(773): n is a, c, g, or t

SEQ ID NO: 275811 - DNA, 415 bp, Homo Sapiens; identical to SEQ ID NO: 252378
  misc_feature (115)..(171): n is a, c, g, or t

SEQ ID NO: 275812 - DNA, 1129 bp, Homo Sapiens; identical to SEQ ID NO: 252388
  misc_feature (852)..(852): n is a, c, g, or t
  misc_feature (888)..(888): n is a, c, g, or t

SEQ ID NO: 275813 - DNA, 1698 bp, Homo Sapiens; identical to SEQ ID NO: 252389

SEQ ID NO: 275814 - DNA, 538 bp, Homo Sapiens; identical to SEQ ID NO: 252390
  misc_feature (14)..(14): n is a, c, g, or t
  misc_feature (80)..(80): n is a, c, g, or t
  misc_feature (82)..(82): n is a, c, g, or t
  misc_feature (104)..(104): n is a, c, g, or t
  misc_feature (108)..(108): n is a, c, g, or t

SEQ ID NO: 275815 - DNA, 677 bp, Homo Sapiens; identical to SEQ ID NO: 252396
  misc_feature (598)..(598): n is a, c, g, or t

SEQ ID NO: 275816 - DNA, 626 bp, Homo Sapiens; identical to SEQ ID NO: 252397

SEQ ID NO: 275817 - DNA, 1722 bp, Homo Sapiens; identical to SEQ ID NO: 252409
  misc_feature (1665)..(1665): n is a, c, g, or t
  misc_feature (1676)..(1676): n is a, c, g, or t

SEQ ID NO: 275818 - DNA, 430 bp, Homo Sapiens; identical to SEQ ID NO: 252410

SEQ ID NO: 275819 - DNA, 424 bp, Homo Sapiens; identical to SEQ ID NO: 252411
  misc_feature (70)..(70): n is a, c, g, or t

SEQ ID NO: 275820 - DNA, 1443 bp, Homo Sapiens; identical to SEQ ID NO: 252416
  misc_feature (582)..(746): n is a, c, g, or t

SEQ ID NO: 275821 - DNA, 555 bp, Homo Sapiens; identical to SEQ ID NO: 252417
  misc_feature (18)..(18): n is a, c, g, or t
  misc_feature (36)..(36): n is a, c, g, or t
  misc_feature (97)..(97): n is a, c, g, or t
  misc_feature (428)..(428): n is a, c, g, or t
  misc_feature (431)..(431): n is a, c, g, or t
  misc_feature (434)..(434): n is a, c, g, or t
  misc_feature (436)..(436): n is a, c, g, or t

SEQ ID NO: 275822 - DNA, 481 bp, Homo Sapiens; identical to SEQ ID NO: 252418
  misc_feature (227)..(227): n is a, c, g, or t
  misc_feature (426)..(426): n is a, c, g, or t
  misc_feature (438)..(438): n is a, c, g, or t
  misc_feature (443)..(443): n is a, c, g, or t
  misc_feature (448)..(448): n is a, c, g, or t
  misc_feature (462)..(462): n is a, c, g, or t

SEQ ID NO: 275823 - DNA, 595 bp, Homo Sapiens; identical to SEQ ID NO: 252426

SEQ ID NO: 275824 - DNA, 1088 bp, Homo Sapiens; identical to SEQ ID NO: 252427

SEQ ID NO: 275825 - DNA, 1664 bp, Homo Sapiens; identical to SEQ ID NO: 252443

SEQ ID NO: 275826 - DNA, 475 bp, Homo Sapiens; identical to SEQ ID NO: 252444
  misc_feature (412)..(412): n is a, c, g, or t
  misc_feature (445)..(445): n is a, c, g, or t

SEQ ID NO: 275827 - DNA, 1026 bp, Homo Sapiens; identical to SEQ ID NO: 252447
  misc_feature (560)..(800): n is a, c, g, or t

SEQ ID NO: 275828 - DNA, 440 bp, Homo Sapiens; identical to SEQ ID NO: 252448
  misc_feature (24)..(24): n is a, c, g, or t
  misc_feature (44)..(44): n is a, c, g, or t

SEQ ID NO: 275829 - DNA, 1819 bp, Homo Sapiens; identical to SEQ ID NO: 252452
  misc_feature (1432)..(1468): n is a, c, g, or t
  misc_feature (1608)..(1662): n is a, c, g, or t
  misc_feature (1664)..(1666): n is a, c, g, or t
  misc_feature (1670)..(1670): n is a, c, g, or t

SEQ ID NO: 275830 - DNA, 540 bp, Homo Sapiens; identical to SEQ ID NO: 252453
  misc_feature (450)..(450): n is a, c, g, or t
  misc_feature (478)..(478): n is a, c, g, or t
  misc_feature (521)..(521): n is a, c, g, or t

SEQ ID NO: 275831 - DNA, 2145 bp, Homo Sapiens; identical to SEQ ID NO: 252454
  misc_feature (519)..(526): n is a, c, g, or t
  misc_feature (640)..(640): n is a, c, g, or t
  misc_feature (658)..(701): n is a, c, g, or t

SEQ ID NO: 275832 - DNA, 436 bp, Homo Sapiens; identical to SEQ ID NO: 252455
  misc_feature (43)..(43): n is a, c, g, or t
  misc_feature (193)..(193): n is a, c, g, or t

SEQ ID NO: 275833 - DNA, 988 bp, Homo Sapiens; identical to SEQ ID NO: 252459
  misc_feature (552)..(552): n is a, c, g, or t

SEQ ID NO: 275834 - DNA, 1284 bp, Homo Sapiens; identical to SEQ ID NO: 252460
  misc_feature (979)..(979): n is a, c, g, or t
  misc_feature (1027)..(1027): n is a, c, g, or t
  misc_feature (1262)..(1262): n is a, c, g, or t

SEQ ID NO: 275835 - DNA, 674 bp, Homo Sapiens; identical to SEQ ID NO: 252462
  misc_feature (663)..(663): n is a, c, g, or t

SEQ ID NO: 275836 - DNA, 383 bp, Homo Sapiens; identical to SEQ ID NO: 252463

SEQ ID NO: 275837 - DNA, 1063 bp, Homo Sapiens; identical to SEQ ID NO: 252466
  misc_feature (359)..(453): n is a, c, g, or t
  misc_feature (457)..(468): n is a, c, g, or t
  misc_feature (475)..(475): n is a, c, g, or t
  misc_feature (600)..(600): n is a, c, g, or t
  misc_feature (720)..(720): n is a, c, g, or t
  misc_feature (904)..(904): n is a, c, g, or t
  misc_feature (920)..(920): n is a, c, g, or t

SEQ ID NO: 275838 - DNA, 1206 bp, Homo Sapiens; identical to SEQ ID NO: 252467
  misc_feature (17)..(17): n is a, c, g, or t
  misc_feature (23)..(23): n is a, c, g, or t
  misc_feature (26)..(26): n is a, c, g, or t
  misc_feature (46)..(46): n is a, c, g, or t
  misc_feature (50)..(50): n is a, c, g, or t
  misc_feature (52)..(52): n is a, c, g, or t
  misc_feature (101)..(101): n is a, c, g, or t
  misc_feature (109)..(109): n is a, c, g, or t
  misc_feature (124)..(124): n is a, c, g, or t
  misc_feature (128)..(128): n is a, c, g, or t
  misc_feature (160)..(160): n is a, c, g, or t
  misc_feature (184)..(184): n is a, c, g, or t
  misc_feature (315)..(315): n is a, c, g, or t
  misc_feature (492)..(600): n is a, c, g, or t

SEQ ID NO: 275839 - DNA, 981 bp, Homo Sapiens; identical to SEQ ID NO: 252468
  misc_feature (14)..(14): n is a, c, g, or t
  misc_feature (585)..(693): n is a, c, g, or t
  misc_feature (829)..(829): n is a, c, g, or t
  misc_feature (839)..(839): n is a, c, g, or t
  misc_feature (848)..(848): n is a, c, g, or t
  misc_feature (901)..(901): n is a, c, g, or t
  misc_feature (905)..(905): n is a, c, g, or t
  misc_feature (974)..(974): n is a, c, g, or t

SEQ ID NO: 275840 - DNA, 1471 bp, Homo Sapiens; identical to SEQ ID NO: 252469
  misc_feature (6)..(6): n is a, c, g, or t
  misc_feature (11)..(11): n is a, c, g, or t
  misc_feature (16)..(16): n is a, c, g, or t
  misc_feature (20)..(21): n is a, c, g, or t
  misc_feature (24)..(24): n is a, c, g, or t
  misc_feature (26)..(26): n is a, c, g, or t
  misc_feature (28)..(29): n is a, c, g, or t
  misc_feature (35)..(35): n is a, c, g, or t
  misc_feature (41)..(42): n is a, c, g, or t
  misc_feature (53)..(53): n is a, c, g, or t
  misc_feature (57)..(57): n is a, c, g, or t
  misc_feature (94)..(94): n is a, c, g, or t
  misc_feature (99)..(99): n is a, c, g, or t
  misc_feature (119)..(119): n is a, c, g, or t
  misc_feature (127)..(127): n is a, c, g, or t
  misc_feature (129)..(129): n is a, c, g, or t
  misc_feature (139)..(139): n is a, c, g, or t
  misc_feature (152)..(152): n is a, c, g, or t
  misc_feature (161)..(161): n is a, c, g, or t
  misc_feature (324)..(324): n is a, c, g, or t
  misc_feature (442)..(550): n is a, c, g, or t
  misc_feature (795)..(795): n is a, c, g, or t
  misc_feature (1211)..(1231): n is a, c, g, or t
  misc_feature (1332)..(1351): n is a, c, g, or t

SEQ ID NO: 275841 - DNA, 1449 bp, Homo Sapiens; identical to SEQ ID NO: 252470
  misc_feature (572)..(680): n is a, c, g, or t
  misc_feature (1177)..(1271): n is a, c, g, or t
  misc_feature (1355)..(1395): n is a, c, g, or t

SEQ ID NO: 275842 - DNA, 930 bp, Homo Sapiens; identical to SEQ ID NO: 252471
  misc_feature (678)..(679): n is a, c, g, or t
  misc_feature (681)..(681): n is a, c, g, or t
  misc_feature (683)..(683): n is a, c, g, or t
  misc_feature (704)..(704): n is a, c, g, or t
  misc_feature (706)..(707): n is a, c, g, or t
  misc_feature (709)..(709): n is a, c, g, or t
  misc_feature (712)..(712): n is a, c, g, or t
  misc_feature (718)..(718): n is a, c, g, or t
  misc_feature (721)..(721): n is a, c, g, or t
  misc_feature (724)..(724): n is a, c, g, or t
  misc_feature (737)..(737): n is a, c, g, or t
  misc_feature (742)..(742): n is a, c, g, or t
  misc_feature (747)..(748): n is a, c, g, or t
  misc_feature (758)..(759): n is a, c, g, or t
  misc_feature (763)..(763): n is a, c, g, or t
  misc_feature (766)..(766): n is a, c, g, or t
  misc_feature (768)..(768): n is a, c, g, or t
  misc_feature (782)..(782): n is a, c, g, or t
  misc_feature (796)..(796): n is a, c, g, or t
  misc_feature (808)..(808): n is a, c, g, or t
  misc_feature (823)..(823): n is a, c, g, or t
  misc_feature (835)..(835): n is a, c, g, or t
  misc_feature (856)..(856): n is a, c, g, or t
  misc_feature (863)..(865): n is a, c, g, or t
  misc_feature (868)..(868): n is a, c, g, or t
  misc_feature (872)..(872): n is a, c, g, or t
  misc_feature (884)..(884): n is a, c, g, or t
  misc_feature (886)..(886): n is a, c, g, or t
  misc_feature (888)..(888): n is a, c, g, or t
  misc_feature (896)..(896): n is a, c, g, or t
  misc_feature (904)..(905): n is a, c, g, or t
  misc_feature (907)..(907): n is a, c, g, or t
  misc_feature (911)..(912): n is a, c, g, or t

SEQ ID NO: 275843 - DNA, 1126 bp, Homo Sapiens; identical to SEQ ID NO: 252472
  misc_feature (3)..(3): n is a, c, g, or t
  misc_feature (5)..(5): n is a, c, g, or t
  misc_feature (11)..(11): n is a, c, g, or t
  misc_feature (19)..(19): n is a, c, g, or t
  misc_feature (24)..(24): n is a, c, g, or t
  misc_feature (26)..(26): n is a, c, g, or t
  misc_feature (33)..(33): n is a, c, g, or t
  misc_feature (36)..(36): n is a, c, g, or t
  misc_feature (39)..(39): n is a, c, g, or t
  misc_feature (45)..(45): n is a, c, g, or t
  misc_feature (52)..(52): n is a, c, g, or t
  misc_feature (62)..(62): n is a, c, g, or t
  misc_feature (67)..(67): n is a, c, g, or t
  misc_feature (96)..(96): n is a, c, g, or t
  misc_feature (107)..(107): n is a, c, g, or t
  misc_feature (142)..(142): n is a, c, g, or t
  misc_feature (151)..(151): n is a, c, g, or t
  misc_feature (170)..(170): n is a, c, g, or t
  misc_feature (174)..(174): n is a, c, g, or t
  misc_feature (329)..(329): n is a, c, g, or t
  misc_feature (401)..(509): n is a, c, g, or t
  misc_feature (754)..(754): n is a, c, g, or t
  misc_feature (1116)..(1116): n is a, c, g, or t
  misc_feature (1123)..(1123): n is a, c, g, or t

SEQ ID NO: 275844 - DNA, 1007 bp, Homo Sapiens; identical to SEQ ID NO: 252473
  misc_feature (397)..(399): n is a, c, g, or t
  misc_feature (412)..(412): n is a, c, g, or t
  misc_feature (459)..(459): n is a, c, g, or t
  misc_feature (560)..(561): n is a, c, g, or t
  misc_feature (568)..(568): n is a, c, g, or t
  misc_feature (572)..(572): n is a, c, g, or t
  misc_feature (578)..(578): n is a, c, g, or t
  misc_feature (581)..(581): n is a, c, g, or t
  misc_feature (585)..(585): n is a, c, g, or t
  misc_feature (588)..(588): n is a, c, g, or t
  misc_feature (591)..(592): n is a, c, g, or t
  misc_feature (594)..(594): n is a, c, g, or t
  misc_feature (596)..(597): n is a, c, g, or t
  misc_feature (599)..(602): n is a, c, g, or t
  misc_feature (697)..(697): n is a, c, g, or t
  misc_feature (701)..(701): n is a, c, g, or t
  misc_feature (721)..(769): n is a, c, g, or t
  misc_feature (772)..(772): n is a, c, g, or t
  misc_feature (942)..(942): n is a, c, g, or t

SEQ ID NO: 275845 - DNA, 1015 bp, Homo Sapiens; identical to SEQ ID NO: 252474
  misc_feature (12)..(12): n is a, c, g, or t
  misc_feature (19)..(19): n is a, c, g, or t
  misc_feature (24)..(24): n is a, c, g, or t
  misc_feature (33)..(33): n is a, c, g, or t
  misc_feature (47)..(49): n is a, c, g, or t
  misc_feature (53)..(53): n is a, c, g, or t
  misc_feature (60)..(60): n is a, c, g, or t
  misc_feature (67)..(67): n is a, c, g, or t
  misc_feature (78)..(78): n is a, c, g, or t
  misc_feature (85)..(85): n is a, c, g, or t
  misc_feature (92)..(93): n is a, c, g, or t
  misc_feature (99)..(100): n is a, c, g, or t
  misc_feature (110)..(110): n is a, c, g, or t
  misc_feature (112)..(112): n is a, c, g, or t
  misc_feature (116)..(116): n is a, c, g, or t
  misc_feature (122)..(122): n is a, c, g, or t
  misc_feature (127)..(127): n is a, c, g, or t
  misc_feature (141)..(141): n is a, c, g, or t
  misc_feature (151)..(151): n is a, c, g, or t
  misc_feature (158)..(158): n is a, c, g, or t
  misc_feature (189)..(189): n is a, c, g, or t
  misc_feature (202)..(202): n is a, c, g, or t
  misc_feature (208)..(209): n is a, c, g, or t
  misc_feature (213)..(213): n is a, c, g, or t
  misc_feature (217)..(217): n is a, c, g, or t
  misc_feature (221)..(221): n is a, c, g, or t
  misc_feature (238)..(238): n is a, c, g, or t
  misc_feature (246)..(246): n is a, c, g, or t
  misc_feature (337)..(445): n is a, c, g, or t

SEQ ID NO: 275846 - DNA, 2454 bp, Homo Sapiens; identical to SEQ ID NO: 252475

SEQ ID NO: 275847 - DNA, 1333 bp, Homo Sapiens; identical to SEQ ID NO: 252476
  misc_feature (1163)..(1172): n is a, c, g, or t

SEQ ID NO: 275848 - DNA, 462 bp, Homo Sapiens; identical to SEQ ID NO: 252477
  misc_feature (17)..(17): n is a, c, g, or t

SEQ ID NO: 275849 - DNA, 521 bp, Homo Sapiens; identical to SEQ ID NO: 252478
  misc_feature (476)..(476): n is a, c, g, or t
  misc_feature (483)..(483): n is a, c, g, or t

SEQ ID NO: 275850 - DNA, 520 bp, Homo Sapiens; identical to SEQ ID NO: 252479
  misc_feature (16)..(16): n is a, c, g, or t
  misc_feature (34)..(34): n is a, c, g, or t
  misc_feature (55)..(55): n is a, c, g, or t
  misc_feature (81)..(81): n is a, c, g, or t
  misc_feature (144)..(144): n is a, c, g, or t
  misc_feature (164)..(164): n is a, c, g, or t

SEQ ID NO: 275851 - DNA, 691 bp, Homo Sapiens; identical to SEQ ID NO: 252480
  misc_feature (64)..(72): n is a, c, g, or t

SEQ ID NO: 275852 - DNA, 1461 bp, Homo Sapiens; identical to SEQ ID NO: 252481

SEQ ID NO: 275853 - DNA, 1367 bp, Homo Sapiens; identical to SEQ ID NO: 252485
  misc_feature (102)..(164): n is a, c, g, or t
  misc_feature (816)..(830): n is a, c, g, or t

SEQ ID NO: 275854 - DNA, 956 bp, Homo Sapiens; identical to SEQ ID NO: 252486
  misc_feature (261)..(261): n is a, c, g, or t
  misc_feature (269)..(269): n is a, c, g, or t
  misc_feature (916)..(916): n is a, c, g, or t
  misc_feature (924)..(924): n is a, c, g, or t
  misc_feature (941)..(941): n is a, c, g, or t

SEQ ID NO: 275855 - DNA, 937 bp, Homo Sapiens; identical to SEQ ID NO: 252487
  misc_feature (230)..(292): n is a, c, g, or t
  misc_feature (873)..(873): n is a, c, g, or t
  misc_feature (895)..(895): n is a, c, g, or t
  misc_feature (910)..(910): n is a, c, g, or t
  misc_feature (914)..(914): n is a, c, g, or t
  misc_feature (932)..(932): n is a, c, g, or t

SEQ ID NO: 275856 - DNA, 1006 bp, Homo Sapiens; identical to SEQ ID NO: 252488
  misc_feature (6)..(6): n is a, c, g, or t
  misc_feature (10)..(10): n is a, c, g, or t
  misc_feature (18)..(18): n is a, c, g, or t
  misc_feature (23)..(23): n is a, c, g, or t
  misc_feature (26)..(26): n is a, c, g, or t
  misc_feature (36)..(36): n is a, c, g, or t
  misc_feature (41)..(41): n is a, c, g, or t
  misc_feature (55)..(55): n is a, c, g, or t
  misc_feature (59)..(59): n is a, c, g, or t
  misc_feature (62)..(62): n is a, c, g, or t
  misc_feature (76)..(76): n is a, c, g, or t
  misc_feature (87)..(87): n is a, c, g, or t
  misc_feature (117)..(117): n is a, c, g, or t
  misc_feature (120)..(120): n is a, c, g, or t
  misc_feature (141)..(143): n is a, c, g, or t
  misc_feature (146)..(146): n is a, c, g, or t
  misc_feature (148)..(148): n is a, c, g, or t
  misc_feature (152)..(152): n is a, c, g, or t
  misc_feature (160)..(160): n is a, c, g, or t
  misc_feature (163)..(163): n is a, c, g, or t
  misc_feature (167)..(167): n is a, c, g, or t
  misc_feature (185)..(199): n is a, c, g, or t

SEQ ID NO: 275857 - DNA, 361 bp, Homo Sapiens; identical to SEQ ID NO: 252489
  misc_feature (264)..(315): n is a, c, g, or t

SEQ ID NO: 275858 - DNA, 494 bp, Homo Sapiens; identical to SEQ ID NO: 252490
  misc_feature (328)..(328): n is a, c, g, or t
  misc_feature (416)..(416): n is a, c, g, or t
  misc_feature (422)..(422): n is a, c, g, or t
  misc_feature (434)..(434): n is a, c, g, or t
  misc_feature (466)..(466): n is a, c, g, or t
  misc_feature (476)..(476): n is a, c, g, or t

SEQ ID NO: 275859 - DNA, 276 bp, Homo Sapiens; identical to SEQ ID NO: 252491
  misc_feature (176)..(176): n is a, c, g, or t

SEQ ID NO: 275860 - DNA, 621 bp, Homo Sapiens; identical to SEQ ID NO: 252492
  misc_feature (346)..(450): n is a, c, g, or t

SEQ ID NO: 275861 - DNA, 378 bp, Homo Sapiens; identical to SEQ ID NO: 252493

SEQ ID NO: 275862 - DNA, 530 bp, Homo Sapiens; identical to SEQ ID NO: 252494

SEQ ID NO: 275863 - DNA, 1871 bp, Homo Sapiens; identical to SEQ ID NO: 252495
  misc_feature (1704)..(1712): n is a, c, g, or t
  misc_feature (1809)..(1817): n is a, c, g, or t

SEQ ID NO: 275864 - DNA, 1468 bp, Homo Sapiens; identical to SEQ ID NO: 252501

SEQ ID NO: 275865 - DNA, 977 bp, Homo Sapiens; identical to SEQ ID NO: 252502

SEQ ID NO: 275866 - DNA, 353 bp, Homo Sapiens; identical to SEQ ID NO: 252504

SEQ ID NO: 275867 - DNA, 987 bp, Homo Sapiens; identical to SEQ ID NO: 252505
  misc_feature (311)..(334): n is a, c, g, or t
  misc_feature (739)..(739): n is a, c, g, or t

SEQ ID NO: 275868 - DNA, 652 bp, Homo Sapiens; identical to SEQ ID NO: 252509
  misc_feature (333)..(333): n is a, c, g, or t
  misc_feature (342)..(342): n is a, c, g, or t
  misc_feature (351)..(351): n is a, c, g, or t
  misc_feature (383)..(383): n is a, c, g, or t
  misc_feature (444)..(444): n is a, c, g, or t
  misc_feature (503)..(503): n is a, c, g, or t
  misc_feature (584)..(584): n is a, c, g, or t
  misc_feature (634)..(634): n is a, c, g, or t

SEQ ID NO: 275869 - DNA, 1119 bp, Homo Sapiens; identical to SEQ ID NO: 252510

SEQ ID NO: 275870 - DNA, 457 bp, Homo Sapiens; identical to SEQ ID NO: 252511
  misc_feature (87)..(87): n is a, c, g, or t

SEQ ID NO: 275871 - DNA, 1164 bp, Homo Sapiens; identical to SEQ ID NO: 252512

SEQ ID NO: 275872 - DNA, 2036 bp, Homo Sapiens; identical to SEQ ID NO: 252513
  misc_feature (79)..(79): n is a, c, g, or t
  misc_feature (291)..(291): n is a, c, g, or t
  misc_feature (297)..(297): n is a, c, g, or t
  misc_feature (1534)..(1640): n is a, c, g, or t
  misc_feature (1652)..(1662): n is a, c, g, or t
  misc_feature (1731)..(1811): n is a, c, g, or t

SEQ ID NO: 275873 - DNA, 1383 bp, Homo Sapiens; identical to SEQ ID NO: 252514

SEQ ID NO: 275874 - DNA, 766 bp, Homo Sapiens; identical to SEQ ID NO: 252515

SEQ ID NO: 275875 - DNA, 696 bp, Homo Sapiens; identical to SEQ ID NO: 252516
  misc_feature (442)..(482): n is a, c, g, or t
  misc_feature (613)..(650): n is a, c, g, or t

SEQ ID NO: 275876 - DNA, 848 bp, Homo Sapiens; identical to SEQ ID NO: 6521
  misc_feature (648)..(652): n is a, c, g, or t
  misc_feature (656)..(656): n is a, c, g, or t
  misc_feature (659)..(659): n is a, c, g, or t
  misc_feature (689)..(690): n is a, c, g, or t
  misc_feature (692)..(692): n is a, c, g, or t
  misc_feature (698)..(701): n is a, c, g, or t
  misc_feature (757)..(757): n is a, c, g, or t

SEQ ID NO: 275877 - DNA, 455 bp, Homo Sapiens; identical to SEQ ID NO: 252518
  misc_feature (104)..(104): n is a, c, g, or t
  misc_feature (128)..(128): n is a, c, g, or t
  misc_feature (180)..(180): n is a, c, g, or t
  misc_feature (195)..(195): n is a, c, g, or t
  misc_feature (203)..(203): n is a, c, g, or t
  misc_feature (221)..(221): n is a, c, g, or t
  misc_feature (395)..(395): n is a, c, g, or t

SEQ ID NO: 275878 - DNA, 1180 bp, Homo Sapiens; identical to SEQ ID NO: 252533

SEQ ID NO: 275879 - DNA, 649 bp, Homo Sapiens; identical to SEQ ID NO: 252534
  misc_feature (89)..(90): n is a, c, g, or t
  misc_feature (92)..(92): n is a, c, g, or t

SEQ ID NO: 275880 - DNA, 943 bp, Homo Sapiens; identical to SEQ ID NO: 252535

SEQ ID NO: 275881 - DNA, 761 bp, Homo Sapiens; identical to SEQ ID NO: 252543
  misc_feature (50)..(51): n is a, c, g, or t
  misc_feature (57)..(65): n is a, c, g, or t
  misc_feature (112)..(112): n is a, c, g, or t
  misc_feature (137)..(137): n is a, c, g, or t
  misc_feature (293)..(293): n is a, c, g, or t
  misc_feature (358)..(358): n is a, c, g, or t

SEQ ID NO: 275882 - DNA, 1463 bp, Homo Sapiens; identical to SEQ ID NO: 252544

SEQ ID NO: 275883 - DNA, 415 bp, Homo Sapiens; identical to SEQ ID NO: 252548

SEQ ID NO: 275884 - DNA, 2991 bp, Homo Sapiens; identical to SEQ ID NO: 252549
  misc_feature (1135)..(1135): n is a, c, g, or t
  misc_feature (1138)..(1138): n is a, c, g, or t
  misc_feature (2443)..(2443): n is a, c, g, or t
  misc_feature (2448)..(2545): n is a, c, g, or t
  misc_feature (2680)..(2689): n is a, c, g, or t
  misc_feature (2899)..(2944): n is a, c, g, or t

SEQ ID NO: 275885 - DNA, 399 bp, Homo Sapiens; identical to SEQ ID NO: 252550
  misc_feature (23)..(23): n is a, c, g, or t

SEQ ID NO: 275886 - DNA, 1041 bp, Homo Sapiens; identical to SEQ ID NO: 252552
  misc_feature (1015)..(1015): n is a, c, g, or t

SEQ ID NO: 275887 - DNA, 1423 bp, Homo Sapiens; identical to SEQ ID NO: 252553

SEQ ID NO: 275888 - DNA, 528 bp, Homo Sapiens; identical to SEQ ID NO: 252554

SEQ ID NO: 275889 - DNA, 407 bp, Homo Sapiens; identical to SEQ ID NO: 252555

SEQ ID NO: 275890 - DNA, 1158 bp, Homo Sapiens; identical to SEQ ID NO: 252556

SEQ ID NO: 275891 - DNA, 359 bp, Homo Sapiens; identical to SEQ ID NO: 252557
  misc_feature (111)..(111): n is a, c, g, or t
  misc_feature (283)..(283): n is a, c, g, or t

SEQ ID NO: 275892 - DNA, 477 bp, Homo Sapiens; identical to SEQ ID NO: 252558
  misc_feature (22)..(22): n is a, c, g, or t
  misc_feature (54)..(54): n is a, c, g, or t
  misc_feature (67)..(67): n is a, c, g, or t
  misc_feature (84)..(84): n is a, c, g, or t
  misc_feature (164)..(164): n is a, c, g, or t
  misc_feature (217)..(217): n is a, c, g, or t

SEQ ID NO: 275893 - DNA, 398 bp, Homo Sapiens; identical to SEQ ID NO: 252559
  misc_feature (369)..(369): n is a, c, g, or t
  misc_feature (382)..(382): n is a, c, g, or t

SEQ ID NO: 275894 - DNA, 998 bp, Homo Sapiens; identical to SEQ ID NO: 252561
  misc_feature (260)..(539): n is a, c, g, or t
  misc_feature (541)..(549): n is a, c, g, or t
  misc_feature (917)..(917): n is a, c, g, or t

SEQ ID NO: 275895 - DNA, 2049 bp, Homo Sapiens; identical to SEQ ID NO: 252562
  misc_feature (43)..(43): n is a, c, g, or t
  misc_feature (62)..(62): n is a, c, g, or t
  misc_feature (90)..(328): n is a, c, g, or t
  misc_feature (1981)..(1981): n is a, c, g, or t

SEQ ID NO: 275896 - DNA, 756 bp, Homo Sapiens; identical to SEQ ID NO: 252563
  misc_feature (598)..(615): n is a, c, g, or t

SEQ ID NO: 275897 - DNA, 430 bp, Homo Sapiens; identical to SEQ ID NO: 252564

SEQ ID NO: 275898 - DNA, 731 bp, Homo Sapiens; identical to SEQ ID NO: 252565

SEQ ID NO: 275899 - DNA, 484 bp, Homo Sapiens; identical to SEQ ID NO: 252566

SEQ ID NO: 275900 - DNA, 1024 bp, Homo Sapiens; identical to SEQ ID NO: 252567

SEQ ID NO: 275901 - DNA, 1120 bp, Homo Sapiens; identical to SEQ ID NO: 252568

SEQ ID NO: 275902 - DNA, 502 bp, Homo Sapiens; identical to SEQ ID NO: 252573
  misc_feature (256)..(293): n is a, c, g, or t

SEQ ID NO: 275903 - DNA, 1032 bp, Homo Sapiens; identical to SEQ ID NO: 252574

SEQ ID NO: 275904 - DNA, 688 bp, Homo Sapiens; identical to SEQ ID NO: 252575

SEQ ID NO: 275905 - DNA, 1061 bp, Homo Sapiens; identical to SEQ ID NO: 252576

SEQ ID NO: 275906 - DNA, 1127 bp, Homo Sapiens; identical to SEQ ID NO: 252577

SEQ ID NO: 275907 - DNA, 521 bp, Homo Sapiens; identical to SEQ ID NO: 252578
  misc_feature (56)..(56): n is a, c, g, or t
  misc_feature (59)..(59): n is a, c, g, or t
  misc_feature (495)..(495): n is a, c, g, or t
  misc_feature (507)..(507): n is a, c, g, or t

SEQ ID NO: 275908 - DNA, 1536 bp, Homo Sapiens; identical to SEQ ID NO: 252580
  misc_feature (811)..(1094): n is a, c, g, or t
  misc_feature (1097)..(1110): n is a, c, g, or t
  misc_feature (1133)..(1133): n is a, c, g, or t
  misc_feature (1470)..(1470): n is a, c, g, or t
  misc_feature (1495)..(1495): n is a, c, g, or t

SEQ ID NO: 275909 - DNA, 507 bp, Homo Sapiens; identical to SEQ ID NO: 252581
  misc_feature (392)..(392): n is a, c, g, or t
  misc_feature (413)..(413): n is a, c, g, or t
  misc_feature (436)..(436): n is a, c, g, or t
  misc_feature (469)..(469): n is a, c, g, or t

SEQ ID NO: 275910 - DNA, 2193 bp, Homo Sapiens; identical to SEQ ID NO: 252582
  misc_feature (711)..(711): n is a, c, g, or t

SEQ ID NO: 275911 - DNA, 536 bp, Homo Sapiens; identical to SEQ ID NO: 252583
  misc_feature (294)..(294): n is a, c, g, or t
  misc_feature (442)..(442): n is a, c, g, or t
  misc_feature (452)..(452): n is a, c, g, or t
  misc_feature (508)..(508): n is a, c, g, or t

SEQ ID NO: 275912 - DNA, 419 bp, Homo Sapiens; identical to SEQ ID NO: 252584

SEQ ID NO: 275913 - DNA, 993 bp, Homo Sapiens; identical to SEQ ID NO: 252586

SEQ ID NO: 275914 - DNA, 1315 bp, Homo Sapiens; identical to SEQ ID NO: 252587

SEQ ID NO: 275915 - DNA, 470 bp, Homo Sapiens; identical to SEQ ID NO: 252589

SEQ ID NO: 275916 - DNA, 1387 bp, Homo Sapiens; identical to SEQ ID NO: 252590

SEQ ID NO: 275917 - DNA, 1501 bp, Homo Sapiens; identical to SEQ ID NO: 252594

SEQ ID NO: 275918 - DNA, 863 bp, Homo Sapiens; identical to SEQ ID NO: 252595
  misc_feature (841)..(841): n is a, c, g, or t

SEQ ID NO: 275919 - DNA, 536 bp, Homo Sapiens; identical to SEQ ID NO: 252596

SEQ ID NO: 275920 - DNA, 2002 bp, Homo Sapiens; identical to SEQ ID NO: 252600

SEQ ID NO: 275921 - DNA, 2211 bp, Homo Sapiens; identical to SEQ ID NO: 252601
  misc_feature (1672)..(1672): n is a, c, g, or t
  misc_feature (1688)..(1688): n is a, c, g, or t
  misc_feature (1740)..(1740): n is a, c, g, or t
  misc_feature (1743)..(1743): n is a, c, g, or t
  misc_feature (1746)..(1746): n is a, c, g, or t

SEQ ID NO: 275922 - DNA, 1125 bp, Homo Sapiens; identical to SEQ ID NO: 252602
  misc_feature (725)..(726): n is a, c, g, or t
  misc_feature (728)..(729): n is a, c, g, or t
  misc_feature (732)..(732): n is a, c, g, or t
  misc_feature (734)..(735): n is a, c, g, or t
  misc_feature (738)..(741): n is a, c, g, or t
  misc_feature (749)..(749): n is a, c, g, or t
  misc_feature (754)..(757): n is a, c, g, or t
  misc_feature (762)..(762): n is a, c, g, or t
  misc_feature (776)..(779): n is a, c, g, or t
  misc_feature (785)..(785): n is a, c, g, or t
  misc_feature (789)..(789): n is a, c, g, or t
  misc_feature (855)..(856): n is a, c, g, or t
  misc_feature (880)..(880): n is a, c, g, or t
  misc_feature (889)..(889): n is a, c, g, or t
  misc_feature (906)..(906): n is a, c, g, or t
  misc_feature (925)..(984): n is a, c, g, or t
  misc_feature (999)..(1001): n is a, c, g, or t
  misc_feature (1055)..(1058): n is a, c, g, or t
  misc_feature (1078)..(1078): n is a, c, g, or t

SEQ ID NO: 275923 - DNA, 554 bp, Homo Sapiens; identical to SEQ ID NO: 252603
  misc_feature (460)..(460): n is a, c, g, or t
  misc_feature (481)..(481): n is a, c, g, or t
  misc_feature (487)..(487): n is a, c, g, or t
  misc_feature (523)..(523): n is a, c, g, or t
  misc_feature (534)..(534): n is a, c, g, or t

SEQ ID NO: 275924 - DNA, 1750 bp, Homo Sapiens; identical to SEQ ID NO: 252605

SEQ ID NO: 275925 - DNA, 1388 bp, Homo Sapiens; identical to SEQ ID NO: 252606

SEQ ID NO: 275926 - DNA, 1478 bp, Homo Sapiens; identical to SEQ ID NO: 252608
  misc_feature (204)..(255): n is a, c, g, or t
  misc_feature (435)..(435): n is a, c, g, or t
  misc_feature (830)..(839): n is a, c, g, or t

SEQ ID NO: 275927 - DNA, 736 bp, Homo Sapiens; identical to SEQ ID NO: 252609
  misc_feature (92)..(92): n is a, c, g, or t
  misc_feature (138)..(138): n is a, c, g, or t
  misc_feature (172)..(182): n is a, c, g, or t

SEQ ID NO: 275928 - DNA, 1171 bp, Homo Sapiens; identical to SEQ ID NO: 252610

SEQ ID NO: 275929 - DNA, 426 bp, Homo Sapiens; identical to SEQ ID NO: 252611
  misc_feature (22)..(22): n is a, c, g, or t
  misc_feature (33)..(33): n is a, c, g, or t
  misc_feature (72)..(72): n is a, c, g, or t

SEQ ID NO: 275930 - DNA, 965 bp, Homo Sapiens; identical to SEQ ID NO: 252619

SEQ ID NO: 275931 - DNA, 1101 bp, Homo Sapiens; identical to SEQ ID NO: 252620

SEQ ID NO: 275932 - DNA, 534 bp, Homo Sapiens; identical to SEQ ID NO: 252622

SEQ ID NO: 275933 - DNA, 559 bp, Homo Sapiens; identical to SEQ ID NO: 252623

SEQ ID NO: 275934 - DNA, 1735 bp, Homo Sapiens; identical to SEQ ID NO: 252629
  misc_feature (32)..(32): n is a, c, g, or t
  misc_feature (762)..(816): n is a, c, g, or t

SEQ ID NO: 275935 - DNA, 1583 bp, Homo Sapiens; identical to SEQ ID NO: 252630
  misc_feature (16)..(16): n is a, c, g, or t
  misc_feature (477)..(560): n is a, c, g, or t
  misc_feature (1283)..(1283): n is a, c, g, or t
  misc_feature (1417)..(1417): n is a, c, g, or t
  misc_feature (1546)..(1546): n is a, c, g, or t

SEQ ID NO: 275936 - DNA, 326 bp, Homo Sapiens; identical to SEQ ID NO: 252631
  misc_feature (282)..(282): n is a, c, g, or t

SEQ ID NO: 275937 - DNA, 590 bp, Homo Sapiens; identical to SEQ ID NO: 252633

SEQ ID NO: 275938 - DNA, 1190 bp, Homo Sapiens; identical to SEQ ID NO: 252634

SEQ ID NO: 275939 - DNA, 923 bp, Homo Sapiens; identical to SEQ ID NO: 3584
  misc_feature (559)..(568): n is a, c, g, or t
  misc_feature (682)..(720): n is a, c, g, or t
  misc_feature (723)..(751): n is a, c, g, or t

SEQ ID NO: 275940 - DNA, 685 bp, Homo Sapiens; identical to SEQ ID NO: 252642
  misc_feature (553)..(571): n is a, c, g, or t

SEQ ID NO: 275941 - DNA, 567 bp, Homo Sapiens; identical to SEQ ID NO: 252643

SEQ ID NO: 275942 - DNA, 1257 bp, Homo Sapiens; identical to SEQ ID NO: 252648
  misc_feature (542)..(542): n is a, c, g, or t
  misc_feature (1194)..(1203): n is a, c, g, or t

SEQ ID NO: 275943 - DNA, 458 bp, Homo Sapiens; identical to SEQ ID NO: 252649
  misc_feature (269)..(330): n is a, c, g, or t

SEQ ID NO: 275944 - DNA, 1043 bp, Homo Sapiens; identical to SEQ ID NO: 252651
  misc_feature (885)..(945): n is a, c, g, or t

SEQ ID NO: 275945 - DNA, 1366 bp, Homo Sapiens; identical to SEQ ID NO: 252652

SEQ ID NO: 275946 - DNA, 1012 bp, Homo Sapiens; identical to SEQ ID NO: 252653

SEQ ID NO: 275947 - DNA, 580 bp, Homo Sapiens; identical to SEQ ID NO: 252654
  misc_feature (491)..(491): n is a, c, g, or t
  misc_feature (506)..(506): n is a, c, g, or t
  misc_feature (555)..(555): n is a, c, g, or t
  misc_feature (565)..(565): n is a, c, g, or t

SEQ ID NO: 275948 - DNA, 1537 bp, Homo Sapiens; identical to SEQ ID NO: 252655
  misc_feature (1387)..(1436): n is a, c, g, or t

SEQ ID NO: 275949 - DNA, 1496 bp, Homo Sapiens; identical to SEQ ID NO: 252656
  misc_feature (1305)..(1401): n is a, c, g, or t
  misc_feature (1408)..(1410): n is a, c, g, or t
  misc_feature (1413)..(1413): n is a, c, g, or t
  misc_feature (1415)..(1418): n is a, c, g, or t
  misc_feature (1420)..(1420): n is a, c, g, or t
  misc_feature (1428)..(1428): n is a, c, g, or t
  misc_feature (1431)..(1431): n is a, c, g, or t
  misc_feature (1434)..(1434): n is a, c, g, or t
  misc_feature (1443)..(1443): n is a, c, g, or t
  misc_feature (1447)..(1450): n is a, c, g, or t
  misc_feature (1452)..(1453): n is a, c, g, or t
  misc_feature (1487)..(1487): n is a, c, g, or t
  misc_feature (1491)..(1491): n is a, c, g, or t

SEQ ID NO: 275950 - DNA, 1391 bp, Homo Sapiens; identical to SEQ ID NO: 252657
  misc_feature (17)..(17): n is a, c, g, or t
  misc_feature (41)..(42): n is a, c, g, or t
  misc_feature (49)..(49): n is a, c, g, or t
  misc_feature (52)..(52): n is a, c, g, or t
  misc_feature (56)..(56): n is a, c, g, or t
  misc_feature (65)..(65): n is a, c, g, or t
  misc_feature (68)..(68): n is a, c, g, or t
  misc_feature (77)..(77): n is a, c, g, or t
  misc_feature (81)..(81): n is a, c, g, or t
  misc_feature (85)..(85): n is a, c, g, or t
  misc_feature (102)..(102): n is a, c, g, or t
  misc_feature (121)..(121): n is a, c, g, or t
  misc_feature (126)..(126): n is a, c, g, or t
  misc_feature (140)..(141): n is a, c, g, or t
  misc_feature (154)..(154): n is a, c, g, or t
  misc_feature (606)..(606): n is a, c, g, or t
  misc_feature (690)..(718): n is a, c, g, or t
  misc_feature (830)..(989): n is a, c, g, or t
  misc_feature (994)..(1031): n is a, c, g, or t
  misc_feature (1120)..(1129): n is a, c, g, or t
  misc_feature (1235)..(1247): n is a, c, g, or t
  misc_feature (1311)..(1323): n is a, c, g, or t

SEQ ID NO: 275951 - DNA, 1113 bp, Homo Sapiens; identical to SEQ ID NO: 252658
  misc_feature (704)..(704): n is a, c, g, or t
  misc_feature (723)..(723): n is a, c, g, or t

SEQ ID NO: 275952 - DNA, 1306 bp, Homo Sapiens; identical to SEQ ID NO: 252659

SEQ ID NO: 275953 - DNA, 477 bp, Homo Sapiens; identical to SEQ ID NO: 252660
  misc_feature (11)..(11): n is a, c, g, or t
  misc_feature (364)..(364): n is a, c, g, or t
  misc_feature (385)..(385): n is a, c, g, or t
  misc_feature (414)..(414): n is a, c, g, or t
  misc_feature (438)..(438): n is a, c, g, or t

SEQ ID NO: 275954 - DNA, 1679 bp, Homo Sapiens; identical to SEQ ID NO: 252662
  misc_feature (17)..(17): n is a, c, g, or t
  misc_feature (132)..(132): n is a, c, g, or t
  misc_feature (136)..(136): n is a, c, g, or t
  misc_feature (284)..(284): n is a, c, g, or t
  misc_feature (1259)..(1259): n is a, c, g, or t
  misc_feature (1267)..(1267): n is a, c, g, or t
  misc_feature (1298)..(1298): n is a, c, g, or t
  misc_feature (1300)..(1300): n is a, c, g, or t
  misc_feature (1319)..(1319): n is a, c, g, or t

SEQ ID NO: 275955 - DNA, 340 bp, Homo Sapiens; identical to SEQ ID NO: 252663
  misc_feature (24)..(24): n is a, c, g, or t

SEQ ID NO: 275956 - DNA, 1124 bp, Homo Sapiens; identical to SEQ ID NO: 252668
  misc_feature (214)..(214): n is a, c, g, or t
  misc_feature (414)..(414): n is a, c, g, or t
  misc_feature (466)..(466): n is a, c, g, or t
  misc_feature (728)..(736): n is a, c, g, or t
  misc_feature (1059)..(1059): n is a, c, g, or t
  misc_feature (1099)..(1099): n is a, c, g, or t
  misc_feature (1105)..(1105): n is a, c, g, or t

SEQ ID NO: 275957 - DNA, 491 bp, Homo Sapiens; identical to SEQ ID NO: 252669

SEQ ID NO: 275958 - DNA, 2355 bp, Homo Sapiens; identical to SEQ ID NO: 252673
  misc_feature (3)..(3): n is a, c, g, or t

SEQ ID NO: 275959 - DNA, 1038 bp, Homo Sapiens; identical to SEQ ID NO: 252674
  misc_feature (13)..(13): n is a, c, g, or t
  misc_feature (17)..(17): n is a, c, g, or t
  misc_feature (20)..(21): n is a, c, g, or t
  misc_feature (66)..(66): n is a, c, g, or t
  misc_feature (87)..(87): n is a, c, g, or t
  misc_feature (119)..(119): n is a, c, g, or t
  misc_feature (375)..(375): n is a, c, g, or t
  misc_feature (387)..(387): n is a, c, g, or t

SEQ ID NO: 275960 - DNA, 908 bp, Homo Sapiens; identical to SEQ ID NO: 252675
  misc_feature (195)..(195): n is a, c, g, or t

SEQ ID NO: 275961 - DNA, 858 bp, Homo Sapiens; identical to SEQ ID NO: 252676

SEQ ID NO: 275962 - DNA, 507 bp, Homo Sapiens; identical to SEQ ID NO: 252677

SEQ ID NO: 275963 - DNA, 633 bp, Homo Sapiens; identical to SEQ ID NO: 252678
  misc_feature (15)..(15): n is a, c, g, or t
  misc_feature (28)..(28): n is a, c, g, or t
  misc_feature (34)..(34): n is a, c, g, or t
  misc_feature (41)..(41): n is a, c, g, or t

SEQ ID NO: 275964 - DNA, 593 bp, Homo Sapiens; identical to SEQ ID NO: 252683

SEQ ID NO: 275965 - DNA, 848 bp, Homo Sapiens; identical to SEQ ID NO: 252684
  misc_feature (732)..(736): n is a, c, g, or t
  misc_feature (738)..(746): n is a, c, g, or t
  misc_feature (749)..(752): n is a, c, g, or t

SEQ ID NO: 275966 - DNA, 801 bp, Homo Sapiens; identical to SEQ ID NO: 74066

SEQ ID NO: 275967 - DNA, 1000 bp, Homo Sapiens; identical to SEQ ID NO: 252688
  misc_feature (161)..(161): n is a, c, g, or t
  misc_feature (280)..(322): n is a, c, g, or t

SEQ ID NO: 275968 - DNA, 1153 bp, Homo Sapiens; identical to SEQ ID NO: 252689

SEQ ID NO: 275969 - DNA, 837 bp, Homo Sapiens; identical to SEQ ID NO: 252693

SEQ ID NO: 275970 - DNA, 819 bp, Homo Sapiens; identical to SEQ ID NO: 75234

SEQ ID NO: 275971 - DNA, 1444 bp, Homo Sapiens; identical to SEQ ID NO: 252695

SEQ ID NO: 275972 - DNA, 529 bp, Homo Sapiens; identical to SEQ ID NO: 252696
  misc_feature (397)..(407): n is a, c, g, or t
  misc_feature (420)..(420): n is a, c, g, or t
  misc_feature (498)..(498): n is a, c, g, or t
  misc_feature (508)..(508): n is a, c, g, or t

SEQ ID NO: 275973 - DNA, 748 bp, Homo Sapiens; identical to SEQ ID NO: 252697

SEQ ID NO: 275974 - DNA, 815 bp, Homo Sapiens; identical to SEQ ID NO: 252702

SEQ ID NO: 275975 - DNA, 683 bp, Homo Sapiens; identical to SEQ ID NO: 252703
  misc_feature (499)..(499): n is a, c, g, or t
  misc_feature (502)..(502): n is a, c, g, or t
  misc_feature (562)..(562): n is a, c, g, or t
  misc_feature (610)..(610): n is a, c, g, or t

SEQ ID NO: 275976 - DNA, 613 bp, Homo Sapiens; identical to SEQ ID NO: 252707

SEQ ID NO: 275977 - DNA, 1258 bp, Homo Sapiens; identical to SEQ ID NO: 252708
  misc_feature (1037)..(1044): n is a, c, g, or t
  misc_feature (1046)..(1046): n is a, c, g, or t
  misc_feature (1048)..(1056): n is a, c, g, or t
  misc_feature (1058)..(1078): n is a, c, g, or t
  misc_feature (1080)..(1112): n is a, c, g, or t
  misc_feature (1114)..(1118): n is a, c, g, or t
  misc_feature (1120)..(1149): n is a, c, g, or t
  misc_feature (1151)..(1154): n is a, c, g, or t
  misc_feature (1156)..(1157): n is a, c, g, or t
  misc_feature (1159)..(1159): n is a, c, g, or t
  misc_feature (1167)..(1180): n is a, c, g, or t
  misc_feature (1188)..(1191): n is a, c, g, or t
  misc_feature (1194)..(1194): n is a, c, g, or t
  misc_feature (1199)..(1202): n is a, c, g, or t

SEQ ID NO: 275978 - DNA, 2113 bp, Homo Sapiens; identical to SEQ ID NO: 252711

SEQ ID NO: 275979 - DNA, 517 bp, Homo Sapiens; identical to SEQ ID NO: 252712
  misc_feature (80)..(102): n is a, c, g, or t

SEQ ID NO: 275980 - DNA, 452 bp, Homo Sapiens; identical to SEQ ID NO: 252713
  misc_feature (295)..(316): n is a, c, g, or t

SEQ ID NO: 275981 - DNA, 2153 bp, Homo Sapiens; identical to SEQ ID NO: 252718
  misc_feature (1877)..(1885): n is a, c, g, or t

SEQ ID NO: 275982 - DNA, 694 bp, Homo Sapiens; identical to SEQ ID NO: 252719
  misc_feature (12)..(12): n is a, c, g, or t
  misc_feature (27)..(27): n is a, c, g, or t
  misc_feature (56)..(56): n is a, c, g, or t
  misc_feature (117)..(117): n is a, c, g, or t
  misc_feature (582)..(582): n is a, c, g, or t

SEQ ID NO: 275983 - DNA, 577 bp, Homo Sapiens; identical to SEQ ID NO: 252722

SEQ ID NO: 275984 - DNA, 642 bp, Homo Sapiens; identical to SEQ ID NO: 252723

SEQ ID NO: 275985 - DNA, 400 bp, Homo Sapiens; identical to SEQ ID NO: 252724
  misc_feature (24)..(24): n is a, c, g, or t

SEQ ID NO: 275986 - DNA, 749 bp, Homo Sapiens; identical to SEQ ID NO: 252728
  misc_feature (557)..(557): n is a, c, g, or t
  misc_feature (627)..(627): n is a, c, g, or t
  misc_feature (641)..(641): n is a, c, g, or t
  misc_feature (649)..(649): n is a, c, g, or t
  misc_feature (653)..(653): n is a, c, g, or t
  misc_feature (655)..(655): n is a, c, g, or t
  misc_feature (660)..(660): n is a, c, g, or t
  misc_feature (679)..(679): n is a, c, g, or t
  misc_feature (693)..(693): n is a, c, g, or t
  misc_feature (698)..(698): n is a, c, g, or t
  misc_feature (716)..(716): n is a, c, g, or t
  misc_feature (721)..(721): n is a, c, g, or t

SEQ ID NO: 275987 - DNA, 1146 bp, Homo Sapiens; identical to SEQ ID NO: 252729
  misc_feature (1057)..(1057): n is a, c, g, or t

SEQ ID NO: 275988 - DNA, 1349 bp, Homo Sapiens; identical to SEQ ID NO: 252730
  misc_feature (240)..(259): n is a, c, g, or t
  misc_feature (612)..(612): n is a, c, g, or t

SEQ ID NO: 275989 - DNA, 889 bp, Homo Sapiens; identical to SEQ ID NO: 252731
  misc_feature (646)..(685): n is a, c, g, or t

SEQ ID NO: 275990 - DNA, 1778 bp, Homo Sapiens; identical to SEQ ID NO: 252732
  misc_feature (77)..(126): n is a, c, g, or t
  misc_feature (1634)..(1635): n is a, c, g, or t
  misc_feature (1741)..(1741): n is a, c, g, or t

SEQ ID NO: 275991 - DNA, 961 bp, Homo Sapiens; identical to SEQ ID NO: 252733
  misc_feature (847)..(894): n is a, c, g, or t

SEQ ID NO: 275992 - DNA, 478 bp, Homo Sapiens; identical to SEQ ID NO: 252734
  misc_feature (114)..(151): n is a, c, g, or t
  misc_feature (402)..(402): n is a, c, g, or t
  misc_feature (431)..(431): n is a, c, g, or t
  misc_feature (436)..(436): n is a, c, g, or t
  misc_feature (441)..(441): n is a, c, g, or t
  misc_feature (446)..(446): n is a, c, g, or t
  misc_feature (464)..(464): n is a, c, g, or t

SEQ ID NO: 275993 - DNA, 962 bp, Homo Sapiens; identical to SEQ ID NO: 252735
  misc_feature (11)..(11): n is a, c, g, or t

SEQ ID NO: 275994 - DNA, 356 bp, Homo Sapiens; identical to SEQ ID NO: 252736
  misc_feature (234)..(251): n is a, c, g, or t

SEQ ID NO: 275995 - DNA, 617 bp, Homo Sapiens; identical to SEQ ID NO: 252747
  misc_feature (594)..(594): n is a, c, g, or t

SEQ ID NO: 275996 - DNA, 438 bp, Homo Sapiens; identical to SEQ ID NO: 252748

SEQ ID NO: 275997 - DNA, 669 bp, Homo Sapiens; identical to SEQ ID NO: 252751
  misc_feature (55)..(55): n is a, c, g, or t
  misc_feature (68)..(68): n is a, c, g, or t
  misc_feature (561)..(579): n is a, c, g, or t

SEQ ID NO: 275998 - DNA, 1113 bp, Homo Sapiens; identical to SEQ ID NO: 252752
  misc_feature (351)..(384): n is a, c, g, or t

SEQ ID NO: 275999 - DNA, 2239 bp, Homo Sapiens; identical to SEQ ID NO: 252753
  misc_feature (1408)..(1416): n is a, c, g, or t
  misc_feature (1578)..(1586): n is a, c, g, or t
  misc_feature (1891)..(1891): n is a, c, g, or t
  misc_feature (1920)..(1920): n is a, c, g, or t
  misc_feature (1988)..(1988): n is a, c, g, or t
  misc_feature (2015)..(2015): n is a, c, g, or t
  misc_feature (2082)..(2082): n is a, c, g, or t
  misc_feature (2098)..(2098): n is a, c, g, or t

SEQ ID NO: 276000 - DNA, 381 bp, Homo Sapiens; identical to SEQ ID NO: 252754
  misc_feature (12)..(12): n is a, c, g, or t

SEQ ID NO: 276001 - DNA, 641 bp, Homo Sapiens; identical to SEQ ID NO: 252756

SEQ ID NO: 276002 - DNA, 918 bp, Homo Sapiens; identical to SEQ ID NO: 252757
  misc_feature (18)..(18): n is a, c, g, or t
  misc_feature (73)..(73): n is a, c, g, or t
  misc_feature (92)..(92): n is a, c, g, or t
  misc_feature (365)..(365): n is a, c, g, or t
  misc_feature (545)..(585): n is a, c, g, or t

SEQ ID NO: 276003 - DNA, 1495 bp, Homo Sapiens; identical to SEQ ID NO: 252759

SEQ ID NO: 276004 - DNA, 1323 bp, Homo Sapiens; identical to SEQ ID NO: 252760

SEQ ID NO: 276005 - DNA, 687 bp, Homo Sapiens; identical to SEQ ID NO: 252761

SEQ ID NO: 276006 - DNA, 686 bp, Homo Sapiens; identical to SEQ ID NO: 252762

SEQ ID NO: 276007 - DNA, 1564 bp, Homo Sapiens; identical to SEQ ID NO: 252763

SEQ ID NO: 276008 - DNA, 1001 bp, Homo Sapiens; identical to SEQ ID NO: 252765
  misc_feature (50)..(67): n is a, c, g, or t
  misc_feature (791)..(791): n is a, c, g, or t

SEQ ID NO: 276009 - DNA, 1130 bp, Homo Sapiens; identical to SEQ ID NO: 252766
  misc_feature (1014)..(1040): n is a, c, g, or t

SEQ ID NO: 276010 - DNA, 845 bp, Homo Sapiens; identical to SEQ ID NO: 252767
  misc_feature (241)..(297): n is a, c, g, or t
  misc_feature (527)..(527): n is a, c, g, or t
  misc_feature (778)..(778): n is a, c, g, or t
  misc_feature (819)..(819): n is a, c, g, or t

SEQ ID NO: 276011 - DNA, 374 bp, Homo Sapiens; identical to SEQ ID NO: 252768

SEQ ID NO: 276012 - DNA, 435 bp, Homo Sapiens; identical to SEQ ID NO: 252769
  misc_feature (25)..(25): n is a, c, g, or t
  misc_feature (41)..(41): n is a, c, g, or t

SEQ ID NO: 276013 - DNA, 493 bp, Homo Sapiens; identical to SEQ ID NO: 252770
  misc_feature (336)..(336): n is a, c, g, or t
  misc_feature (412)..(412): n is a, c, g, or t
  misc_feature (435)..(435): n is a, c, g, or t
  misc_feature (448)..(448): n is a, c, g, or t
  misc_feature (467)..(467): n is a, c, g, or t

SEQ ID NO: 276014 - DNA, 810 bp, Homo Sapiens; identical to SEQ ID NO: 252773

SEQ ID NO: 276015 - DNA, 906 bp, Homo Sapiens; identical to SEQ ID NO: 252774
  misc_feature (786)..(786): n is a, c, g, or t

SEQ ID NO: 276016 - DNA, 795 bp, Homo Sapiens; identical to SEQ ID NO: 82499

SEQ ID NO: 276017 - DNA, 556 bp, Homo Sapiens; identical to SEQ ID NO: 252776
  misc_feature (501)..(501): n is a, c, g, or t
  misc_feature (506)..(506): n is a, c, g, or t
  misc_feature (514)..(514): n is a, c, g, or t

SEQ ID NO: 276018 - DNA, 969 bp, Homo Sapiens; identical to SEQ ID NO: 252777

SEQ ID NO: 276019 - DNA, 386 bp, Homo Sapiens; identical to SEQ ID NO: 252778
  misc_feature (22)..(22): n is a, c, g, or t
  misc_feature (27)..(27): n is a, c, g, or t
  misc_feature (103)..(103): n is a, c, g, or t
  misc_feature (163)..(163): n is a, c, g, or t
  misc_feature (349)..(349): n is a, c, g, or t

SEQ ID NO: 276020 - DNA, 771 bp, Homo Sapiens; identical to SEQ ID NO: 252779
  misc_feature (694)..(719): n is a, c, g, or t

SEQ ID NO: 276021 - DNA, 771 bp, Homo Sapiens; identical to SEQ ID NO: 9389

SEQ ID NO: 276022 - DNA, 615 bp, Homo Sapiens; identical to SEQ ID NO: 252781

SEQ ID NO: 276023 - DNA, 1238 bp, Homo Sapiens; identical to SEQ ID NO: 252782

SEQ ID NO: 276024 - DNA, 545 bp, Homo Sapiens; identical to SEQ ID NO: 252786
  misc_feature (362)..(362): n is a, c, g, or t
  misc_feature (497)..(497): n is a, c, g, or t

SEQ ID NO: 276025 - DNA, 2686 bp, Homo Sapiens; identical to SEQ ID NO: 252787
  misc_feature (47)..(47): n is a, c, g, or t
  misc_feature (1599)..(1843): n is a, c, g, or t

SEQ ID NO: 276026 - DNA, 413 bp, Homo Sapiens; identical to SEQ ID NO: 252788

SEQ ID NO: 276027 - DNA, 809 bp, Homo Sapiens; identical to SEQ ID NO: 252790
  misc_feature (578)..(605): n is a, c, g, or t
  misc_feature (727)..(727): n is a, c, g, or t

SEQ ID NO: 276028 - DNA, 1203 bp, Homo Sapiens; identical to SEQ ID NO: 252791
  misc_feature (1012)..(1012): n is a, c, g, or t
  misc_feature (1014)..(1014): n is a, c, g, or t
  misc_feature (1104)..(1104): n is a, c, g, or t
  misc_feature (1107)..(1107): n is a, c, g, or t

SEQ ID NO: 276029 - DNA, 1455 bp, Homo Sapiens; identical to SEQ ID NO: 252792
  misc_feature (556)..(584): n is a, c, g, or t
  misc_feature (816)..(943): n is a, c, g, or t
  misc_feature (1211)..(1211): n is a, c, g, or t

SEQ ID NO: 276030 - DNA, 760 bp, Homo Sapiens; identical to SEQ ID NO: 252793
  misc_feature (582)..(582): n is a, c, g, or t
  misc_feature (608)..(638): n is a, c, g, or t

SEQ ID NO: 276031 - DNA, 1292 bp, Homo Sapiens; identical to SEQ ID NO: 252794
  misc_feature (1220)..(1242): n is a, c, g, or t

SEQ ID NO: 276032 - DNA, 1082 bp, Homo Sapiens; identical to SEQ ID NO: 252795

SEQ ID NO: 276033 - DNA, 815 bp, Homo Sapiens; identical to SEQ ID NO: 252796

SEQ ID NO: 276034 - DNA, 511 bp, Homo Sapiens; identical to SEQ ID NO: 252797

SEQ ID NO: 276035 - DNA, 771 bp, Homo Sapiens; identical to SEQ ID NO: 252798
  misc_feature (365)..(365): n is a, c, g, or t
  misc_feature (391)..(450): n is a, c, g, or t
  misc_feature (471)..(471): n is a, c, g, or t
  misc_feature (545)..(545): n is a, c, g, or t
  misc_feature (550)..(550): n is a, c, g, or t
  misc_feature (607)..(608): n is a, c, g, or t
  misc_feature (612)..(612): n is a, c, g, or t
  misc_feature (627)..(627): n is a, c, g, or t

SEQ ID NO: 276036 - DNA, 583 bp, Homo Sapiens; identical to SEQ ID NO: 252799
  misc_feature (553)..(553): n is a, c, g, or t

SEQ ID NO: 276037 - DNA, 825 bp, Homo Sapiens; identical to SEQ ID NO: 252800
  misc_feature (811)..(811): n is a, c, g, or t

SEQ ID NO: 276038 - DNA, 1822 bp, Homo Sapiens; identical to SEQ ID NO: 252801
  misc_feature (1628)..(1682): n is a, c, g, or t
  misc_feature (1687)..(1753): n is a, c, g, or t

SEQ ID NO: 276039 - DNA, 368 bp, Homo Sapiens; identical to SEQ ID NO: 252802

SEQ ID NO: 276040 - DNA, 387 bp, Homo Sapiens; identical to SEQ ID NO: 252803

SEQ ID NO: 276041 - DNA, 534 bp, Homo Sapiens; identical to SEQ ID NO: 252804
  misc_feature (312)..(325): n is a, c, g, or t
  misc_feature (338)..(359): n is a, c, g, or t

SEQ ID NO: 276042 - DNA, 587 bp, Homo Sapiens; identical to SEQ ID NO: 252805
  misc_feature (216)..(481): n is a, c, g, or t

SEQ ID NO: 276043 - DNA, 910 bp, Homo Sapiens; identical to SEQ ID NO: 252806

SEQ ID NO: 276044 - DNA, 457 bp, Homo Sapiens; identical to SEQ ID NO: 252807

SEQ ID NO: 276045 - DNA, 2505 bp, Homo Sapiens; identical to SEQ ID NO: 252808

SEQ ID NO: 276046 - DNA, 878 bp, Homo Sapiens; identical to SEQ ID NO: 252809
  misc_feature (811)..(811): n is a, c, g, or t
  misc_feature (816)..(816): n is a, c, g, or t
  misc_feature (833)..(833): n is a, c, g, or t
  misc_feature (858)..(858): n is a, c, g, or t

SEQ ID NO: 276047 - DNA, 513 bp, Homo Sapiens; identical to SEQ ID NO: 252810

SEQ ID NO: 276048 - DNA, 471 bp, Homo Sapiens; identical to SEQ ID NO: 252811
  misc_feature (16)..(16): n is a, c, g, or t

SEQ ID NO: 276049 - DNA, 997 bp, Homo Sapiens; identical to SEQ ID NO: 252815
  misc_feature (3)..(3): n is a, c, g, or t
  misc_feature (5)..(5): n is a, c, g, or t
  misc_feature (59)..(59): n is a, c, g, or t
  misc_feature (912)..(912): n is a, c, g, or t
  misc_feature (932)..(932): n is a, c, g, or t
  misc_feature (939)..(939): n is a, c, g, or t
  misc_feature (949)..(949): n is a, c, g, or t
  misc_feature (977)..(977): n is a, c, g, or t

SEQ ID NO: 276050 - DNA, 1256 bp, Homo Sapiens; identical to SEQ ID NO: 252816
  misc_feature (1070)..(1117): n is a, c, g, or t
  misc_feature (1121)..(1149): n is a, c, g, or t
  misc_feature (1159)..(1172): n is a, c, g, or t

SEQ ID NO: 276051 - DNA, 1165 bp, Homo Sapiens; identical to SEQ ID NO: 252818

SEQ ID NO: 276052 - DNA, 420 bp, Homo Sapiens; identical to SEQ ID NO: 252819

SEQ ID NO: 276053 - DNA, 622 bp, Homo Sapiens; identical to SEQ ID NO: 252821

SEQ ID NO: 276054 - DNA, 1239 bp, Homo Sapiens; identical to SEQ ID NO: 252822
  misc_feature (88)..(88): n is a, c, g, or t
  misc_feature (91)..(91): n is a, c, g, or t
  misc_feature (110)..(110): n is a, c, g, or t
  misc_feature (130)..(130): n is a, c, g, or t
  misc_feature (132)..(133): n is a, c, g, or t
  misc_feature (136)..(137): n is a, c, g, or t
  misc_feature (141)..(143): n is a, c, g, or t
  misc_feature (147)..(148): n is a, c, g, or t
  misc_feature (151)..(151): n is a, c, g, or t
  misc_feature (153)..(153): n is a, c, g, or t
  misc_feature (161)..(162): n is a, c, g, or t
  misc_feature (171)..(171): n is a, c, g, or t
  misc_feature (173)..(173): n is a, c, g, or t
  misc_feature (175)..(175): n is a, c, g, or t
  misc_feature (181)..(181): n is a, c, g, or t
  misc_feature (186)..(186): n is a, c, g, or t
  misc_feature (192)..(192): n is a, c, g, or t
  misc_feature (196)..(196): n is a, c, g, or t
  misc_feature (198)..(198): n is a, c, g, or t
  misc_feature (207)..(207): n is a, c, g, or t
  misc_feature (323)..(323): n is a, c, g, or t
  misc_feature (325)..(325): n is a, c, g, or t

SEQ ID NO: 276055 - DNA, 1040 bp, Homo Sapiens; identical to SEQ ID NO: 252823
  misc_feature (929)..(929): n is a, c, g, or t
  misc_feature (934)..(935): n is a, c, g, or t
  misc_feature (948)..(948): n is a, c, g, or t
  misc_feature (950)..(950): n is a, c, g, or t
  misc_feature (957)..(957): n is a, c, g, or t
  misc_feature (963)..(963): n is a, c, g, or t
  misc_feature (981)..(982): n is a, c, g, or t
  misc_feature (991)..(991): n is a, c, g, or t
  misc_feature (993)..(993): n is a, c, g, or t
  misc_feature (1003)..(1003): n is a, c, g, or t
  misc_feature (1005)..(1005): n is a, c, g, or t
  misc_feature (1007)..(1007): n is a, c, g, or t
  misc_feature (1017)..(1017): n is a, c, g, or t
  misc_feature (1020)..(1020): n is a, c, g, or t
  misc_feature (1030)..(1031): n is a, c, g, or t
  misc_feature (1038)..(1038): n is a, c, g, or t

SEQ ID NO: 276056 - DNA, 1461 bp, Homo Sapiens; identical to SEQ ID NO: 252824

SEQ ID NO: 276057 - DNA, 389 bp, Homo Sapiens; identical to SEQ ID NO: 252825
  misc_feature (16)..(16): n is a, c, g, or t

SEQ ID NO: 276058 - DNA, 955 bp, Homo Sapiens; identical to SEQ ID NO: 252826

SEQ ID NO: 276059 - DNA, 645 bp, Homo Sapiens; identical to SEQ ID NO: 252828

SEQ ID NO: 276060 - DNA, 914 bp, Homo Sapiens; identical to SEQ ID NO: 15328

SEQ ID NO: 276061 - DNA, 671 bp, Homo Sapiens; identical to SEQ ID NO: 15329

SEQ ID NO: 276062 - DNA, 842 bp, Homo Sapiens; identical to SEQ ID NO: 252831
  misc_feature (498)..(502): n is a, c, g, or t
  misc_feature (504)..(544): n is a, c, g, or t
  misc_feature (546)..(592): n is a, c, g, or t
  misc_feature (594)..(634): n is a, c, g, or t
  misc_feature (636)..(642): n is a, c, g, or t
  misc_feature (644)..(647): n is a, c, g, or t
  misc_feature (649)..(652): n is a, c, g, or t
  misc_feature (654)..(665): n is a, c, g, or t
  misc_feature (667)..(667): n is a, c, g, or t
  misc_feature (671)..(671): n is a, c, g, or t
  misc_feature (673)..(735): n is a, c, g, or t
  misc_feature (742)..(742): n is a, c, g, or t

SEQ ID NO: 276063 - DNA, 2041 bp, Homo Sapiens; identical to SEQ ID NO: 252837
  misc_feature (400)..(400): n is a, c, g, or t

SEQ ID NO: 276064 - DNA, 612 bp, Homo Sapiens; identical to SEQ ID NO: 252838
  misc_feature (515)..(515): n is a, c, g, or t

SEQ ID NO: 276065 - DNA, 778 bp, Homo Sapiens; identical to SEQ ID NO: 252840
  misc_feature (129)..(192): n is a, c, g, or t

SEQ ID NO: 276066 - DNA, 838 bp, Homo Sapiens; identical to SEQ ID NO: 252841
  misc_feature (13)..(13): n is a, c, g, or t
  misc_feature (34)..(34): n is a, c, g, or t
  misc_feature (54)..(54): n is a, c, g, or t

SEQ ID NO: 276067 - DNA, 778 bp, Homo Sapiens; identical to SEQ ID NO: 252842
  misc_feature (110)..(110): n is a, c, g, or t

SEQ ID NO: 276068 - DNA, 642 bp, Homo Sapiens; identical to SEQ ID NO: 252843

SEQ ID NO: 276069 - DNA, 999 bp, Homo Sapiens; identical to SEQ ID NO: 252844
  misc_feature (30)..(30): n is a, c, g, or t
  misc_feature (35)..(35): n is a, c, g, or t
  misc_feature (50)..(50): n is a, c, g, or t
  misc_feature (107)..(107): n is a, c, g, or t
  misc_feature (141)..(141): n is a, c, g, or t

SEQ ID NO: 276070 - DNA, 1019 bp, Homo Sapiens; identical to SEQ ID NO: 252845

SEQ ID NO: 276071 - DNA, 1703 bp, Homo Sapiens; identical to SEQ ID NO: 252846
  misc_feature (1444)..(1468): n is a, c, g, or t

SEQ ID NO: 276072 - DNA, 621 bp, Homo Sapiens; identical to SEQ ID NO: 252847

SEQ ID NO: 276073 - DNA, 734 bp, Homo Sapiens; identical to SEQ ID NO: 252848
  misc_feature (28)..(28): n is a, c, g, or t
  misc_feature (138)..(138): n is a, c, g, or t
  misc_feature (234)..(234): n is a, c, g, or t
  misc_feature (242)..(243): n is a, c, g, or t
  misc_feature (621)..(621): n is a, c, g, or t
  misc_feature (644)..(644): n is a, c, g, or t
  misc_feature (692)..(692): n is a, c, g, or t
  misc_feature (710)..(710): n is a, c, g, or t

SEQ ID NO: 276074 - DNA, 1582 bp, Homo Sapiens; identical to SEQ ID NO: 252850

SEQ ID NO: 276075 - DNA, 194 bp, Homo Sapiens; identical to SEQ ID NO: 252851
  misc_feature (15)..(15): n is a, c, g, or t
  misc_feature (25)..(25): n is a, c, g, or t

SEQ ID NO: 276076 - DNA, 356 bp, Homo Sapiens; identical to SEQ ID NO: 252852
  misc_feature (79)..(79): n is a, c, g, or t

SEQ ID NO: 276077 - DNA, 715 bp, Homo Sapiens; identical to SEQ ID NO: 252853
  misc_feature (36)..(36): n is a, c, g, or t
  misc_feature (61)..(61): n is a, c, g, or t
  misc_feature (182)..(182): n is a, c, g, or t
  misc_feature (189)..(308): n is a, c, g, or t
  misc_feature (381)..(441): n is a, c, g, or t

SEQ ID NO: 276078 - DNA, 456 bp, Homo Sapiens; identical to SEQ ID NO: 252854
  misc_feature (39)..(39): n is a, c, g, or t

SEQ ID NO: 276079 - DNA, 795 bp, Homo Sapiens; identical to SEQ ID NO: 252856
  misc_feature (194)..(204): n is a, c, g, or t
  misc_feature (334)..(346): n is a, c, g, or t
  misc_feature (720)..(720): n is a, c, g, or t
  misc_feature (731)..(731): n is a, c, g, or t
  misc_feature (759)..(759): n is a, c, g, or t
  misc_feature (769)..(769): n is a, c, g, or t

SEQ ID NO: 276080 - DNA, 745 bp, Homo Sapiens; identical to SEQ ID NO: 252857
  misc_feature (100)..(100): n is a, c, g, or t

SEQ ID NO: 276081 - DNA, 363 bp, Homo Sapiens; identical to SEQ ID NO: 252858

SEQ ID NO: 276082 - DNA, 1493 bp, Homo Sapiens; identical to SEQ ID NO: 252859

SEQ ID NO: 276083 - DNA, 866 bp, Homo Sapiens; identical to SEQ ID NO: 252862

SEQ ID NO: 276084 - DNA, 808 bp, Homo Sapiens; identical to SEQ ID NO: 252863
  misc_feature (620)..(620): n is a, c, g, or t
  misc_feature (622)..(627): n is a, c, g, or t

SEQ ID NO: 276085 - DNA, 1536 bp, Homo Sapiens; identical to SEQ ID NO: 252868
  misc_feature (667)..(667): n is a, c, g, or t
  misc_feature (884)..(924): n is a, c, g, or t

SEQ ID NO: 276086 - DNA, 416 bp, Homo Sapiens; identical to SEQ ID NO: 252869

SEQ ID NO: 276087 - DNA, 386 bp, Homo Sapiens; identical to SEQ ID NO: 252870

SEQ ID NO: 276088 - DNA, 1135 bp, Homo Sapiens; identical to SEQ ID NO: 252873
  misc_feature (7)..(7): n is a, c, g, or t
  misc_feature (23)..(23): n is a, c, g, or t
  misc_feature (29)..(30): n is a, c, g, or t
  misc_feature (35)..(35): n is a, c, g, or t
  misc_feature (41)..(41): n is a, c, g, or t
  misc_feature (63)..(63): n is a, c, g, or t
  misc_feature (65)..(65): n is a, c, g, or t
  misc_feature (74)..(74): n is a, c, g, or t
  misc_feature (76)..(76): n is a, c, g, or t
  misc_feature (83)..(83): n is a, c, g, or t
  misc_feature (116)..(116): n is a, c, g, or t
  misc_feature (120)..(120): n is a, c, g, or t
  misc_feature (171)..(171): n is a, c, g, or t
  misc_feature (192)..(192): n is a, c, g, or t
  misc_feature (285)..(285): n is a, c, g, or t

SEQ ID NO: 276089 - DNA, 1364 bp, Homo Sapiens; identical to SEQ ID NO: 252874
  misc_feature (11)..(11): n is a, c, g, or t
  misc_feature (14)..(14): n is a, c, g, or t
  misc_feature (28)..(28): n is a, c, g, or t
  misc_feature (31)..(31): n is a, c, g, or t
  misc_feature (47)..(47): n is a, c, g, or t
  misc_feature (54)..(54): n is a, c, g, or t
  misc_feature (62)..(62): n is a, c, g, or t
  misc_feature (64)..(64): n is a, c, g, or t
  misc_feature (67)..(68): n is a, c, g, or t
  misc_feature (70)..(70): n is a, c, g, or t
  misc_feature (91)..(92): n is a, c, g, or t
  misc_feature (95)..(95): n is a, c, g, or t
  misc_feature (97)..(99): n is a, c, g, or t
  misc_feature (120)..(120): n is a, c, g, or t
  misc_feature (138)..(138): n is a, c, g, or t
  misc_feature (142)..(142): n is a, c, g, or t
  misc_feature (154)..(154): n is a, c, g, or t
  misc_feature (157)..(157): n is a, c, g, or t
  misc_feature (176)..(176): n is a, c, g, or t
  misc_feature (256)..(256): n is a, c, g, or t
  misc_feature (259)..(259): n is a, c, g, or t
  misc_feature (275)..(275): n is a, c, g, or t
  misc_feature (285)..(285): n is a, c, g, or t
  misc_feature (287)..(287): n is a, c, g, or t
  misc_feature (292)..(292): n is a, c, g, or t
  misc_feature (304)..(304): n is a, c, g, or t
  misc_feature (306)..(306): n is a, c, g, or t
  misc_feature (308)..(309): n is a, c, g, or t
  misc_feature (313)..(313): n is a, c, g, or t
  misc_feature (318)..(318): n is a, c, g, or t
  misc_feature (342)..(342): n is a, c, g, or t
  misc_feature (344)..(344): n is a, c, g, or t
  misc_feature (384)..(384): n is a, c, g, or t
  misc_feature (391)..(391): n is a, c, g, or t
  misc_feature (400)..(401): n is a, c, g, or t
  misc_feature (408)..(408): n is a, c, g, or t
  misc_feature (467)..(467): n is a, c, g, or t
  misc_feature (738)..(738): n is a, c, g, or t
  misc_feature (1125)..(1136): n is a, c, g, or t
  misc_feature (1138)..(1139): n is a, c, g, or t
  misc_feature (1141)..(1143): n is a, c, g, or t
  misc_feature (1145)..(1146): n is a, c, g, or t
  misc_feature (1149)..(1150): n is a, c, g, or t
  misc_feature (1152)..(1154): n is a, c, g, or t
  misc_feature (1156)..(1160): n is a, c, g, or t
  misc_feature (1190)..(1208): n is a, c, g, or t
  misc_feature (1261)..(1293): n is a, c, g, or t

SEQ ID NO: 276090 - DNA, 1171 bp, Homo Sapiens; identical to SEQ ID NO: 252875

SEQ ID NO: 276091 - DNA, 546 bp, Homo Sapiens; identical to SEQ ID NO: 252876

SEQ ID NO: 276092 - DNA, 483 bp, Homo Sapiens; identical to SEQ ID NO: 252877
  misc_feature (63)..(63): n is a, c, g, or t

SEQ ID NO: 276093 - DNA, 515 bp, Homo Sapiens; identical to SEQ ID NO: 252881

SEQ ID NO: 276094 - DNA, 790 bp, Homo Sapiens; identical to SEQ ID NO: 252882

SEQ ID NO: 276095 - DNA, 802 bp, Homo Sapiens; identical to SEQ ID NO: 252888
  misc_feature (664)..(664): n is a, c, g, or t
  misc_feature (717)..(717): n is a, c, g, or t
  misc_feature (738)..(738): n is a, c, g, or t
  misc_feature (755)..(755): n is a, c, g, or t

SEQ ID NO: 276096 - DNA, 1550 bp, Homo Sapiens; identical to SEQ ID NO: 252889

SEQ ID NO: 276097 - DNA, 424 bp, Homo Sapiens; identical to SEQ ID NO: 252890
  misc_feature (11)..(11): n is a, c, g, or t

SEQ ID NO: 276098 - DNA, 341 bp, Homo Sapiens; identical to SEQ ID NO: 252893

SEQ ID NO: 276099 - DNA, 845 bp, Homo Sapiens; identical to SEQ ID NO: 252894
  misc_feature (799)..(799): n is a, c, g, or t
  misc_feature (801)..(803): n is a, c, g, or t
  misc_feature (814)..(814): n is a, c, g, or t

SEQ ID NO: 276100 - DNA, 984 bp, Homo Sapiens; identical to SEQ ID NO: 252897
  misc_feature (917)..(917): n is a, c, g, or t
  misc_feature (937)..(937): n is a, c, g, or t
  misc_feature (969)..(969): n is a, c, g, or t

SEQ ID NO: 276101 - DNA, 612 bp, Homo Sapiens; identical to SEQ ID NO: 252898

SEQ ID NO: 276102 - DNA, 273 bp, Homo Sapiens; identical to SEQ ID NO: 252899
  misc_feature (13)..(13): n is a, c, g, or t
  misc_feature (78)..(78): n is a, c, g, or t

SEQ ID NO: 276103 - DNA, 1697 bp, Homo Sapiens; identical to SEQ ID NO: 252901
  misc_feature (690)..(690): n is a, c, g, or t

SEQ ID NO: 276104 - DNA, 913 bp, Homo Sapiens; identical to SEQ ID NO: 252902

SEQ ID NO: 276105 - DNA, 439 bp, Homo Sapiens; identical to SEQ ID NO: 252903
  misc_feature (24)..(24): n is a, c, g, or t
  misc_feature (258)..(258): n is a, c, g, or t

SEQ ID NO: 276106 - DNA, 1273 bp, Homo Sapiens; identical to SEQ ID NO: 252905
  misc_feature (427)..(427): n is a, c, g, or t
  misc_feature (429)..(429): n is a, c, g, or t
  misc_feature (436)..(436): n is a, c, g, or t
  misc_feature (448)..(448): n is a, c, g, or t
  misc_feature (453)..(453): n is a, c, g, or t
  misc_feature (484)..(484): n is a, c, g, or t
  misc_feature (1232)..(1232): n is a, c, g, or t
  misc_feature (1239)..(1239): n is a, c, g, or t
  misc_feature (1252)..(1252): n is a, c, g, or t

SEQ ID NO: 276107 - DNA, 1467 bp, Homo Sapiens; identical to SEQ ID NO: 252906
  misc_feature (31)..(31): n is a, c, g, or t
  misc_feature (60)..(60): n is a, c, g, or t
  misc_feature (63)..(63): n is a, c, g, or t
  misc_feature (980)..(1000): n is a, c, g, or t
  misc_feature (1052)..(1068): n is a, c, g, or t

SEQ ID NO: 276108 - DNA, 417 bp, Homo Sapiens; identical to SEQ ID NO: 252907
  misc_feature (76)..(76): n is a, c, g, or t

SEQ ID NO: 276109 - DNA, 770 bp, Homo Sapiens; identical to SEQ ID NO: 252910
  misc_feature (521)..(521): n is a, c, g, or t
  misc_feature (687)..(687): n is a, c, g, or t

SEQ ID NO: 276110 - DNA, 2796 bp, Homo Sapiens; identical to SEQ ID NO: 252911
  misc_feature (1308)..(1308): n is a, c, g, or t
  misc_feature (1312)..(1312): n is a, c, g, or t
  misc_feature (1321)..(1321): n is a, c, g, or t
  misc_feature (1327)..(1327): n is a, c, g, or t
  misc_feature (1806)..(1943): n is a, c, g, or t
  misc_feature (1946)..(1946): n is a, c, g, or t
  misc_feature (1993)..(2004): n is a, c, g, or t
  misc_feature (2048)..(2057): n is a, c, g, or t
  misc_feature (2094)..(2105): n is a, c, g, or t
  misc_feature (2338)..(2338): n is a, c, g, or t
  misc_feature (2584)..(2584): n is a, c, g, or t
  misc_feature (2695)..(2695): n is a, c, g, or t
  misc_feature (2697)..(2697): n is a, c, g, or t
  misc_feature (2715)..(2715): n is a, c, g, or t

SEQ ID NO: 276111 - DNA, 1928 bp, Homo Sapiens; identical to SEQ ID NO: 252917
  misc_feature (1733)..(1742): n is a, c, g, or t

SEQ ID NO: 276112 - DNA, 997 bp, Homo Sapiens; identical to SEQ ID NO: 252918

SEQ ID NO: 276113 - DNA, 868 bp, Homo Sapiens; identical to SEQ ID NO: 252919

SEQ ID NO: 276114 - DNA, 541 bp, Homo Sapiens; identical to SEQ ID NO: 252920
  misc_feature (407)..(407): n is a, c, g, or t
  misc_feature (488)..(488): n is a, c, g, or t
  misc_feature (505)..(505): n is a, c, g, or t

SEQ ID NO: 276115 - DNA, 470 bp, Homo Sapiens; identical to SEQ ID NO: 252922

SEQ ID NO: 276116 - DNA, 581 bp, Homo Sapiens; identical to SEQ ID NO: 252923

SEQ ID NO: 276117 - DNA, 1006 bp, Homo Sapiens; identical to SEQ ID NO: 252925
  misc_feature (20)..(20): n is a, c, g, or t
  misc_feature (38)..(38): n is a, c, g, or t

SEQ ID NO: 276118 - DNA, 934 bp, Homo Sapiens; identical to SEQ ID NO: 252926
  misc_feature (655)..(821): n is a, c, g, or t
  misc_feature (851)..(851): n is a, c, g, or t
  misc_feature (911)..(911): n is a, c, g, or t

SEQ ID NO: 276119 - DNA, 1302 bp, Homo Sapiens; identical to SEQ ID NO: 252928
  misc_feature (101)..(101): n is a, c, g, or t
  misc_feature (166)..(166): n is a, c, g, or t
  misc_feature (617)..(617): n is a, c, g, or t

SEQ ID NO: 276120 - DNA, 360 bp, Homo Sapiens; identical to SEQ ID NO: 252929

SEQ ID NO: 276121 - DNA, 567 bp, Homo Sapiens; identical to SEQ ID NO: 252931

SEQ ID NO: 276122 - DNA, 1013 bp, Homo Sapiens; identical to SEQ ID NO: 252932
  misc_feature (978)..(978): n is a, c, g, or t

SEQ ID NO: 276123 - DNA, 1150 bp, Homo Sapiens; identical to SEQ ID NO: 252933

SEQ ID NO: 276124 - DNA, 719 bp, Homo Sapiens; identical to SEQ ID NO: 252934
  misc_feature (21)..(21): n is a, c, g, or t
  misc_feature (38)..(38): n is a, c, g, or t

SEQ ID NO: 276125 - DNA, 797 bp, Homo Sapiens; identical to SEQ ID NO: 252940

SEQ ID NO: 276126 - DNA, 1115 bp, Homo Sapiens; identical to SEQ ID NO: 252941

SEQ ID NO: 276127 - DNA, 915 bp, Homo Sapiens; identical to SEQ ID NO: 252944

SEQ ID NO: 276128 - DNA, 453 bp, Homo Sapiens; identical to SEQ ID NO: 252945
  misc_feature (340)..(340): n is a, c, g, or t

SEQ ID NO: 276129 - DNA, 707 bp, Homo Sapiens; identical to SEQ ID NO: 252950
  misc_feature (69)..(289): n is a, c, g, or t
  misc_feature (559)..(570): n is a, c, g, or t
  misc_feature (696)..(696): n is a, c, g, or t

SEQ ID NO: 276130 - DNA, 1091 bp, Homo Sapiens; identical to SEQ ID NO: 252951
  misc_feature (51)..(81): n is a, c, g, or t
  misc_feature (443)..(443): n is a, c, g, or t

SEQ ID NO: 276131 - DNA, 897 bp, Homo Sapiens; identical to SEQ ID NO: 252954
  misc_feature (767)..(767): n is a, c, g, or t

SEQ ID NO: 276132 - DNA, 1259 bp, Homo Sapiens; identical to SEQ ID NO: 252955

SEQ ID NO: 276133 - DNA, 375 bp, Homo Sapiens; identical to SEQ ID NO: 252957

SEQ ID NO: 276134 - DNA, 1793 bp, Homo Sapiens; identical to SEQ ID NO: 252958

SEQ ID NO: 276135 - DNA, 465 bp, Homo Sapiens; identical to SEQ ID NO: 252961

SEQ ID NO: 276136 - DNA, 856 bp, Homo Sapiens; identical to SEQ ID NO: 252962
  misc_feature (4)..(4): n is a, c, g, or t
  misc_feature (17)..(19): n is a, c, g, or t
  misc_feature (32)..(32): n is a, c, g, or t
  misc_feature (44)..(44): n is a, c, g, or t
  misc_feature (46)..(46): n is a, c, g, or t
  misc_feature (71)..(71): n is a, c, g, or t
  misc_feature (74)..(74): n is a, c, g, or t
  misc_feature (80)..(80): n is a, c, g, or t
  misc_feature (83)..(84): n is a, c, g, or t
  misc_feature (87)..(87): n is a, c, g, or t
  misc_feature (93)..(93): n is a, c, g, or t
  misc_feature (102)..(102): n is a, c, g, or t
  misc_feature (105)..(106): n is a, c, g, or t
  misc_feature (112)..(112): n is a, c, g, or t
  misc_feature (131)..(132): n is a, c, g, or t
  misc_feature (136)..(136): n is a, c, g, or t
  misc_feature (143)..(143): n is a, c, g, or t
  misc_feature (145)..(145): n is a, c, g, or t
  misc_feature (149)..(149): n is a, c, g, or t
  misc_feature (157)..(157): n is a, c, g, or t
  misc_feature (227)..(227): n is a, c, g, or t
  misc_feature (230)..(232): n is a, c, g, or t
  misc_feature (234)..(234): n is a, c, g, or t
  misc_feature (236)..(236): n is a, c, g, or t
  misc_feature (239)..(240): n is a, c, g, or t
  misc_feature (242)..(242): n is a, c, g, or t
  misc_feature (244)..(244): n is a, c, g, or t
  misc_feature (252)..(252): n is a, c, g, or t
  misc_feature (256)..(256): n is a, c, g, or t
  misc_feature (264)..(264): n is a, c, g, or t

SEQ ID NO: 276137 - DNA, 709 bp, Homo Sapiens; identical to SEQ ID NO: 252968
  misc_feature (633)..(633): n is a, c, g, or t
  misc_feature (670)..(670): n is a, c, g, or t

SEQ ID NO: 276138 - DNA, 591 bp, Homo Sapiens; identical to SEQ ID NO: 252969
  misc_feature (54)..(54): n is a, c, g, or t

SEQ ID NO: 276139 - DNA, 738 bp, Homo Sapiens; identical to SEQ ID NO: 252970

SEQ ID NO: 276140 - DNA, 392 bp, Homo Sapiens; identical to SEQ ID NO: 252971

SEQ ID NO: 276141 - DNA, 1217 bp, Homo Sapiens; identical to SEQ ID NO: 252972
  misc_feature (25)..(25): n is a, c, g, or t

SEQ ID NO: 276142 - DNA, 384 bp, Homo Sapiens; identical to SEQ ID NO: 252973
  misc_feature (97)..(97): n is a, c, g, or t
  misc_feature (374)..(374): n is a, c, g, or t

SEQ ID NO: 276143 - DNA, 1518 bp, Homo Sapiens; identical to SEQ ID NO: 252975

SEQ ID NO: 276144 - DNA, 1060 bp, Homo Sapiens; identical to SEQ ID NO: 252976

SEQ ID NO: 276145 - DNA, 1469 bp, Homo Sapiens; identical to SEQ ID NO: 252980

SEQ ID NO: 276146 - DNA, 782 bp, Homo Sapiens; identical to SEQ ID NO: 252981
  misc_feature (306)..(415): n is a, c, g, or t
  misc_feature (592)..(626): n is a, c, g, or t

SEQ ID NO: 276147 - DNA, 410 bp, Homo Sapiens; identical to SEQ ID NO: 252982
  misc_feature (45)..(45): n is a, c, g, or t
  misc_feature (52)..(52): n is a, c, g, or t
  misc_feature (88)..(241): n is a, c, g, or t

SEQ ID NO: 276148 - DNA, 897 bp, Homo Sapiens; identical to SEQ ID NO: 252994
  misc_feature (721)..(721): n is a, c, g, or t

SEQ ID NO: 276149 - DNA, 722 bp, Homo Sapiens; identical to SEQ ID NO: 252995
  misc_feature (29)..(29): n is a, c, g, or t
  misc_feature (52)..(52): n is a, c, g, or t

SEQ ID NO: 276150 - DNA, 402 bp, Homo Sapiens; identical to SEQ ID NO: 252998

SEQ ID NO: 276151 - DNA, 589 bp, Homo Sapiens; identical to SEQ ID NO: 252999

SEQ ID NO: 276152 - DNA, 784 bp, Homo Sapiens; identical to SEQ ID NO: 253000

SEQ ID NO: 276153 - DNA, 160 bp, Homo Sapiens; identical to SEQ ID NO: 253001

SEQ ID NO: 276154 - DNA, 911 bp, Homo Sapiens; identical to SEQ ID NO: 253002

SEQ ID NO: 276155 - DNA, 604 bp, Homo Sapiens; identical to SEQ ID NO: 253006
  misc_feature (565)..(565): n is a, c, g, or t

SEQ ID NO: 276156 - DNA, 853 bp, Homo Sapiens; identical to SEQ ID NO: 253007

SEQ ID NO: 276157 - DNA, 386 bp, Homo Sapiens; identical to SEQ ID NO: 253008

SEQ ID NO: 276158 - DNA, 669 bp, Homo Sapiens; identical to SEQ ID NO: 253009

SEQ ID NO: 276159 - DNA, 605 bp, Homo Sapiens; identical to SEQ ID NO: 253010
  misc_feature (549)..(549): n is a, c, g, or t

SEQ ID NO: 276160 - DNA, 627 bp, Homo Sapiens; identical to SEQ ID NO: 253011

SEQ ID NO: 276161 - DNA, 1296 bp, Homo Sapiens; identical to SEQ ID NO: 253012
  misc_feature (442)..(442): n is a, c, g, or t

SEQ ID NO: 276162 - DNA, 1214 bp, Homo Sapiens; identical to SEQ ID NO: 253013
  misc_feature (959)..(1000): n is a, c, g, or t

SEQ ID NO: 276163 - DNA, 965 bp, Homo Sapiens; identical to SEQ ID NO: 253014

SEQ ID NO: 276164 - DNA, 1206 bp, Homo Sapiens; identical to SEQ ID NO: 253015
  misc_feature (15)..(15): n is a, c, g, or t
  misc_feature (766)..(766): n is a, c, g, or t

SEQ ID NO: 276165 - DNA, 1201 bp, Homo Sapiens; identical to SEQ ID NO: 253016

SEQ ID NO: 276166 - DNA, 622 bp, Homo Sapiens; identical to SEQ ID NO: 253017

SEQ ID NO: 276167 - DNA, 687 bp, Homo Sapiens; identical to SEQ ID NO: 253018
  misc_feature (677)..(677): n is a, c, g, or t

SEQ ID NO: 276168 - DNA, 636 bp, Homo Sapiens; identical to SEQ ID NO: 253019
  misc_feature (66)..(66): n is a, c, g, or t
  misc_feature (92)..(92): n is a, c, g, or t

SEQ ID NO: 276169 - DNA, 655 bp, Homo Sapiens; identical to SEQ ID NO: 253020
  misc_feature (35)..(35): n is a, c, g, or t
  misc_feature (44)..(44): n is a, c, g, or t
  misc_feature (47)..(47): n is a, c, g, or t
  misc_feature (49)..(49): n is a, c, g, or t
  misc_feature (53)..(53): n is a, c, g, or t
  misc_feature (218)..(218): n is a, c, g, or t

SEQ ID NO: 276170 - DNA, 1159 bp, Homo Sapiens; identical to SEQ ID NO: 253022

SEQ ID NO: 276171 - DNA, 428 bp, Homo Sapiens; identical to SEQ ID NO: 253023
  misc_feature (393)..(393): n is a, c, g, or t
  misc_feature (405)..(405): n is a, c, g, or t

SEQ ID NO: 276172 - DNA, 526 bp, Homo Sapiens; identical to SEQ ID NO: 253025

SEQ ID NO: 276173 - DNA, 750 bp, Homo Sapiens; identical to SEQ ID NO: 253026
  misc_feature (568)..(568): n is a, c, g, or t
  misc_feature (595)..(595): n is a, c, g, or t
  misc_feature (597)..(666): n is a, c, g, or t

SEQ ID NO: 276174 - DNA, 1264 bp, Homo Sapiens; identical to SEQ ID NO: 253027

SEQ ID NO: 276175 - DNA, 736 bp, Homo Sapiens; identical to SEQ ID NO: 253028

SEQ ID NO: 276176 - DNA, 483 bp, Homo Sapiens; identical to SEQ ID NO: 253029

SEQ ID NO: 276177 - DNA, 482 bp, Homo Sapiens; identical to SEQ ID NO: 253030
  misc_feature (115)..(115): n is a, c, g, or t

SEQ ID NO: 276178 - DNA, 1841 bp, Homo Sapiens; identical to SEQ ID NO: 253032
  misc_feature (1714)..(1714): n is a, c, g, or t
  misc_feature (1726)..(1759): n is a, c, g, or t
  misc_feature (1763)..(1763): n is a, c, g, or t
  misc_feature (1776)..(1776): n is a, c, g, or t
  misc_feature (1782)..(1782): n is a, c, g, or t

SEQ ID NO: 276179 - DNA, 764 bp, Homo Sapiens; identical to SEQ ID NO: 253033
  misc_feature (130)..(184): n is a, c, g, or t
  misc_feature (420)..(471): n is a, c, g, or t

SEQ ID NO: 276180 - DNA, 848 bp, Homo Sapiens; identical to SEQ ID NO: 253034
  misc_feature (422)..(422): n is a, c, g, or t
  misc_feature (450)..(504): n is a, c, g, or t
  misc_feature (745)..(749): n is a, c, g, or t
  misc_feature (753)..(754): n is a, c, g, or t
  misc_feature (797)..(797): n is a, c, g, or t
  misc_feature (821)..(821): n is a, c, g, or t
  misc_feature (824)..(824): n is a, c, g, or t

SEQ ID NO: 276181 - DNA, 379 bp, Homo Sapiens; identical to SEQ ID NO: 253035

SEQ ID NO: 276182 - DNA, 830 bp, Homo Sapiens; identical to SEQ ID NO: 4124
  misc_feature (747)..(747): n is a, c, g, or t
  misc_feature (749)..(749): n is a, c, g, or t
  misc_feature (752)..(752): n is a, c, g, or t
  misc_feature (754)..(754): n is a, c, g, or t
  misc_feature (761)..(765): n is a, c, g, or t
  misc_feature (768)..(772): n is a, c, g, or t

SEQ ID NO: 276183 - DNA, 855 bp, Homo Sapiens; identical to SEQ ID NO: 253037

SEQ ID NO: 276184 - DNA, 1523 bp, Homo Sapiens; identical to SEQ ID NO: 253038

SEQ ID NO: 276185 - DNA, 581 bp, Homo Sapiens; identical to SEQ ID NO: 253039
  misc_feature (20)..(20): n is a, c, g, or t
  misc_feature (72)..(72): n is a, c, g, or t
  misc_feature (102)..(102): n is a, c, g, or t
  misc_feature (128)..(128): n is a, c, g, or t
  misc_feature (136)..(136): n is a, c, g, or t
  misc_feature (149)..(149): n is a, c, g, or t
  misc_feature (169)..(169): n is a, c, g, or t
  misc_feature (199)..(199): n is a, c, g, or t
  misc_feature (221)..(221): n is a, c, g, or t

SEQ ID NO: 276186 - DNA, 763 bp, Homo Sapiens; identical to SEQ ID NO: 253043
  misc_feature (260)..(260): n is a, c, g, or t
  misc_feature (593)..(593): n is a, c, g, or t
  misc_feature (658)..(658): n is a, c, g, or t
  misc_feature (690)..(690): n is a, c, g, or t

SEQ ID NO: 276187 - DNA, 723 bp, Homo Sapiens; identical to SEQ ID NO: 253044
  misc_feature (90)..(90): n is a, c, g, or t
  misc_feature (188)..(188): n is a, c, g, or t

SEQ ID NO: 276188 - DNA, 408 bp, Homo Sapiens; identical to SEQ ID NO: 253045

SEQ ID NO: 276189 - DNA, 655 bp, Homo Sapiens; identical to SEQ ID NO: 253046

SEQ ID NO: 276190 - DNA, 627 bp, Homo Sapiens; identical to SEQ ID NO: 253049
  misc_feature (22)..(22): n is a, c, g, or t
  misc_feature (71)..(71): n is a, c, g, or t

SEQ ID NO: 276191 - DNA, 599 bp, Homo Sapiens; identical to SEQ ID NO: 253050
  misc_feature (45)..(45): n is a, c, g, or t

SEQ ID NO: 276192 - DNA, 1055 bp, Homo Sapiens; identical to SEQ ID NO: 253056
  misc_feature (852)..(951): n is a, c, g, or t
  misc_feature (970)..(970): n is a, c, g, or t
  misc_feature (984)..(984): n is a, c, g, or t
  misc_feature (993)..(993): n is a, c, g, or t
  misc_feature (995)..(995): n is a, c, g, or t
  misc_feature (1004)..(1004): n is a, c, g, or t
  misc_feature (1014)..(1014): n is a, c, g, or t
  misc_feature (1021)..(1021): n is a, c, g, or t
  misc_feature (1024)..(1025): n is a, c, g, or t
  misc_feature (1027)..(1027): n is a, c, g, or t
  misc_feature (1041)..(1041): n is a, c, g, or t
  misc_feature (1045)..(1045): n is a, c, g, or t

SEQ ID NO: 276193 - DNA, 644 bp, Homo Sapiens; identical to SEQ ID NO: 253057
  misc_feature (282)..(296): n is a, c, g, or t
  misc_feature (317)..(368): n is a, c, g, or t
  misc_feature (467)..(556): n is a, c, g, or t
  misc_feature (620)..(620): n is a, c, g, or t

SEQ ID NO: 276194 - DNA, 878 bp, Homo Sapiens; identical to SEQ ID NO: 253058

SEQ ID NO: 276195 - DNA, 1890 bp, Homo Sapiens; identical to SEQ ID NO: 253061
  misc_feature (83)..(83): n is a, c, g, or t
  misc_feature (759)..(759): n is a, c, g, or t
  misc_feature (1574)..(1625): n is a, c, g, or t

SEQ ID NO: 276196 - DNA, 418 bp, Homo Sapiens; identical to SEQ ID NO: 253062
  misc_feature (77)..(77): n is a, c, g, or t
  misc_feature (100)..(100): n is a, c, g, or t
  misc_feature (102)..(154): n is a, c, g, or t

SEQ ID NO: 276197 - DNA, 384 bp, Homo Sapiens; identical to SEQ ID NO: 253063
  misc_feature (53)..(53): n is a, c, g, or t
  misc_feature (92)..(92): n is a, c, g, or t
  misc_feature (329)..(329): n is a, c, g, or t

SEQ ID NO: 276198 - DNA, 754 bp, Homo Sapiens; identical to SEQ ID NO: 253065
  misc_feature (458)..(458): n is a, c, g, or t
  misc_feature (600)..(600): n is a, c, g, or t

SEQ ID NO: 276199 - DNA, 1056 bp, Homo Sapiens; identical to SEQ ID NO: 253066
  misc_feature (765)..(765): n is a, c, g, or t
  misc_feature (909)..(917): n is a, c, g, or t

SEQ ID NO: 276200 - DNA, 2650 bp, Homo Sapiens; identical to SEQ ID NO: 253072
  misc_feature (2535)..(2535): n is a, c, g, or t
  misc_feature (2542)..(2542): n is a, c, g, or t

SEQ ID NO: 276201 - DNA, 593 bp, Homo Sapiens; identical to SEQ ID NO: 253073
  misc_feature (549)..(549): n is a, c, g, or t
  misc_feature (582)..(582): n is a, c, g, or t

SEQ ID NO: 276202 - DNA, 379 bp, Homo Sapiens; identical to SEQ ID NO: 253076

SEQ ID NO: 276203 - DNA, 431 bp, Homo Sapiens; identical to SEQ ID NO: 253077
  misc_feature (42)..(51): n is a, c, g, or t

SEQ ID NO: 276204 - DNA, 1947 bp, Homo Sapiens; identical to SEQ ID NO: 253078
  misc_feature (165)..(211): n is a, c, g, or t
  misc_feature (302)..(302): n is a, c, g, or t
  misc_feature (336)..(337): n is a, c, g, or t
  misc_feature (367)..(367): n is a, c, g, or t
  misc_feature (382)..(382): n is a, c, g, or t
  misc_feature (392)..(392): n is a, c, g, or t
  misc_feature (400)..(400): n is a, c, g, or t
  misc_feature (443)..(443): n is a, c, g, or t
  misc_feature (445)..(445): n is a, c, g, or t
  misc_feature (447)..(447): n is a, c, g, or t
  misc_feature (499)..(499): n is a, c, g, or t
  misc_feature (503)..(503): n is a, c, g, or t
  misc_feature (555)..(555): n is a, c, g, or t
  misc_feature (577)..(577): n is a, c, g, or t
  misc_feature (1466)..(1467): n is a, c, g, or t
  misc_feature (1479)..(1479): n is a, c, g, or t
  misc_feature (1535)..(1535): n is a, c, g, or t
  misc_feature (1540)..(1540): n is a, c, g, or t
  misc_feature (1552)..(1552): n is a, c, g, or t
  misc_feature (1557)..(1557): n is a, c, g, or t
  misc_feature (1561)..(1562): n is a, c, g, or t
  misc_feature (1570)..(1571): n is a, c, g, or t
  misc_feature (1573)..(1573): n is a, c, g, or t

SEQ ID NO: 276205 - DNA, 871 bp, Homo Sapiens; identical to SEQ ID NO: 253079
  misc_feature (735)..(775): n is a, c, g, or t

SEQ ID NO: 276206 - DNA, 994 bp, Homo Sapiens; identical to SEQ ID NO: 253080
  misc_feature (167)..(175): n is a, c, g, or t
  misc_feature (257)..(300): n is a, c, g, or t

SEQ ID NO: 276207 - DNA, 711 bp, Homo Sapiens; identical to SEQ ID NO: 253082
  misc_feature (269)..(325): n is a, c, g, or t
  misc_feature (542)..(553): n is a, c, g, or t

SEQ ID NO: 276208 - DNA, 2520 bp, Homo Sapiens; identical to SEQ ID NO: 253083
  misc_feature (543)..(543): n is a, c, g, or t
  misc_feature (881)..(892): n is a, c, g, or t

SEQ ID NO: 276209 - DNA, 650 bp, Homo Sapiens; identical to SEQ ID NO: 253084
  misc_feature (85)..(85): n is a, c, g, or t
  misc_feature (179)..(179): n is a, c, g, or t
  misc_feature (524)..(531): n is a, c, g, or t

SEQ ID NO: 276210 - DNA, 1713 bp, Homo Sapiens; identical to SEQ ID NO: 253087
  misc_feature (1197)..(1197): n is a, c, g, or t

SEQ ID NO: 276211 - DNA, 888 bp, Homo Sapiens; identical to SEQ ID NO: 253088
  misc_feature (799)..(799): n is a, c, g, or t

SEQ ID NO: 276212 - DNA, 759 bp, Homo Sapiens; identical to SEQ ID NO: 253089
  misc_feature (20)..(20): n is a, c, g, or t
  misc_feature (26)..(26): n is a, c, g, or t
  misc_feature (614)..(627): n is a, c, g, or t

SEQ ID NO: 276213 - DNA, 746 bp, Homo Sapiens; identical to SEQ ID NO: 253092

SEQ ID NO: 276214 - DNA, 513 bp, Homo Sapiens; identical to SEQ ID NO: 253093
  misc_feature (81)..(81): n is a, c, g, or t

SEQ ID NO: 276215 - DNA, 1756 bp, Homo Sapiens; identical to SEQ ID NO: 253095
  misc_feature (1554)..(1567): n is a, c, g, or t

SEQ ID NO: 276216 - DNA, 495 bp, Homo Sapiens; identical to SEQ ID NO: 253096
  misc_feature (95)..(95): n is a, c, g, or t
  misc_feature (103)..(103): n is a, c, g, or t
  misc_feature (168)..(168): n is a, c, g, or t
  misc_feature (312)..(312): n is a, c, g, or t

SEQ ID NO: 276217 - DNA, 408 bp, Homo Sapiens; identical to SEQ ID NO: 253097

SEQ ID NO: 276218 - DNA, 1059 bp, Homo Sapiens; identical to SEQ ID NO: 253098
  misc_feature (769)..(769): n is a, c, g, or t

SEQ ID NO: 276219 - DNA, 590 bp, Homo Sapiens; identical to SEQ ID NO: 253100
  misc_feature (12)..(12): n is a, c, g, or t
  misc_feature (84)..(84): n is a, c, g, or t
  misc_feature (181)..(181): n is a, c, g, or t
  misc_feature (487)..(542): n is a, c, g, or t

SEQ ID NO: 276220 - DNA, 346 bp, Homo Sapiens; identical to SEQ ID NO: 253101

SEQ ID NO: 276221 - DNA, 2478 bp, Homo Sapiens; identical to SEQ ID NO: 253102
  misc_feature (1841)..(1862): n is a, c, g, or t
  misc_feature (1981)..(1989): n is a, c, g, or t

SEQ ID NO: 276222 - DNA, 926 bp, Homo Sapiens; identical to SEQ ID NO: 253107

SEQ ID NO: 276223 - DNA, 541 bp, Homo Sapiens; identical to SEQ ID NO: 253108
  misc_feature (487)..(487): n is a, c, g, or t

SEQ ID NO: 276224 - DNA, 715 bp, Homo Sapiens; identical to SEQ ID NO: 253112
  misc_feature (542)..(542): n is a, c, g, or t
  misc_feature (592)..(635): n is a, c, g, or t

SEQ ID NO: 276225 - DNA, 970 bp, Homo Sapiens; identical to SEQ ID NO: 253113
  misc_feature (71)..(103): n is a, c, g, or t
  misc_feature (555)..(555): n is a, c, g, or t
  misc_feature (897)..(929): n is a, c, g, or t

SEQ ID NO: 276226 - DNA, 1270 bp, Homo Sapiens; identical to SEQ ID NO: 253114
  misc_feature (75)..(75): n is a, c, g, or t
  misc_feature (831)..(871): n is a, c, g, or t
  misc_feature (888)..(950): n is a, c, g, or t
  misc_feature (955)..(991): n is a, c, g, or t

SEQ ID NO: 276227 - DNA, 637 bp, Homo Sapiens; identical to SEQ ID NO: 253116

SEQ ID NO: 276228 - DNA, 894 bp, Homo Sapiens; identical to SEQ ID NO: 253117
  misc_feature (24)..(24): n is a, c, g, or t
  misc_feature (715)..(717): n is a, c, g, or t
  misc_feature (719)..(734): n is a, c, g, or t
  misc_feature (736)..(738): n is a, c, g, or t
  misc_feature (740)..(748): n is a, c, g, or t
  misc_feature (750)..(752): n is a, c, g, or t
  misc_feature (754)..(756): n is a, c, g, or t
  misc_feature (758)..(758): n is a, c, g, or t
  misc_feature (760)..(760): n is a, c, g, or t
  misc_feature (762)..(764): n is a, c, g, or t
  misc_feature (769)..(769): n is a, c, g, or t
  misc_feature (772)..(772): n is a, c, g, or t
  misc_feature (774)..(774): n is a, c, g, or t
  misc_feature (783)..(785): n is a, c, g, or t
  misc_feature (793)..(794): n is a, c, g, or t
  misc_feature (798)..(798): n is a, c, g, or t
  misc_feature (802)..(803): n is a, c, g, or t
  misc_feature (806)..(809): n is a, c, g, or t

SEQ ID NO: 276229 - DNA, 1188 bp, Homo Sapiens; identical to SEQ ID NO: 253118
  misc_feature (858)..(886): n is a, c, g, or t
  misc_feature (918)..(918): n is a, c, g, or t
  misc_feature (932)..(948): n is a, c, g, or t

SEQ ID NO: 276230 - DNA, 924 bp, Homo Sapiens; identical to SEQ ID NO: 253119
  misc_feature (279)..(313): n is a, c, g, or t

SEQ ID NO: 276231 - DNA, 1574 bp, Homo Sapiens; identical to SEQ ID NO: 253121
  misc_feature (1509)..(1517): n is a, c, g, or t

SEQ ID NO: 276232 - DNA, 363 bp, Homo Sapiens; identical to SEQ ID NO: 253122
  misc_feature (27)..(27): n is a, c, g, or t
  misc_feature (302)..(302): n is a, c, g, or t

SEQ ID NO: 276233 - DNA, 392 bp, Homo Sapiens; identical to SEQ ID NO: 253125

SEQ ID NO: 276234 - DNA, 1307 bp, Homo Sapiens; identical to SEQ ID NO: 253126

SEQ ID NO: 276235 - DNA, 745 bp, Homo Sapiens; identical to SEQ ID NO: 253127
  misc_feature (81)..(81): n is a, c, g, or t
  misc_feature (494)..(507): n is a, c, g, or t

SEQ ID NO: 276236 - DNA, 391 bp, Homo Sapiens; identical to SEQ ID NO: 253129

SEQ ID NO: 276237 - DNA, 849 bp, Homo Sapiens; identical to SEQ ID NO: 253130
  misc_feature (720)..(720): n is a, c, g, or t
  misc_feature (725)..(725): n is a, c, g, or t
  misc_feature (728)..(728): n is a, c, g, or t
  misc_feature (731)..(731): n is a, c, g, or t
  misc_feature (739)..(739): n is a, c, g, or t
  misc_feature (746)..(746): n is a, c, g, or t
  misc_feature (749)..(749): n is a, c, g, or t
  misc_feature (752)..(752): n is a, c, g, or t

SEQ ID NO: 276238 - DNA, 538 bp, Homo Sapiens; identical to SEQ ID NO: 253131
  misc_feature (16)..(16): n is a, c, g, or t
  misc_feature (21)..(21): n is a, c, g, or t
  misc_feature (43)..(43): n is a, c, g, or t
  misc_feature (62)..(62): n is a, c, g, or t
  misc_feature (80)..(80): n is a, c, g, or t
  misc_feature (85)..(85): n is a, c, g, or t
  misc_feature (100)..(100): n is a, c, g, or t
  misc_feature (121)..(121): n is a, c, g, or t
  misc_feature (127)..(127): n is a, c, g, or t
  misc_feature (147)..(147): n is a, c, g, or t
  misc_feature (198)..(198): n is a, c, g, or t
  misc_feature (239)..(239): n is a, c, g, or t

SEQ ID NO: 276239 - DNA, 660 bp, Homo Sapiens; identical to SEQ ID NO: 253134

SEQ ID NO: 276240 - DNA, 2224 bp, Homo Sapiens; identical to SEQ ID NO: 253135
  misc_feature (34)..(34): n is a, c, g, or t
  misc_feature (1450)..(1590): n is a, c, g, or t
  misc_feature (1680)..(1681): n is a, c, g, or t

SEQ ID NO: 276241 - DNA, 383 bp, Homo Sapiens; identical to SEQ ID NO: 253136

SEQ ID NO: 276242 - DNA, 701 bp, Homo Sapiens; identical to SEQ ID NO: 253137
  misc_feature (233)..(233): n is a, c, g, or t
  misc_feature (332)..(332): n is a, c, g, or t
  misc_feature (337)..(337): n is a, c, g, or t
  misc_feature (466)..(466): n is a, c, g, or t
  misc_feature (470)..(470): n is a, c, g, or t
  misc_feature (483)..(483): n is a, c, g, or t
  misc_feature (497)..(497): n is a, c, g, or t
  misc_feature (558)..(558): n is a, c, g, or t
  misc_feature (560)..(560): n is a, c, g, or t
  misc_feature (562)..(562): n is a, c, g, or t
  misc_feature (565)..(565): n is a, c, g, or t
  misc_feature (595)..(595): n is a, c, g, or t
  misc_feature (647)..(647): n is a, c, g, or t
  misc_feature (664)..(664): n is a, c, g, or t
  misc_feature (682)..(682): n is a, c, g, or t

SEQ ID NO: 276243 - DNA, 1448 bp, Homo Sapiens; identical to SEQ ID NO: 253138

SEQ ID NO: 276244 - DNA, 615 bp, Homo Sapiens; identical to SEQ ID NO: 253140
  misc_feature (473)..(473): n is a, c, g, or t
  misc_feature (500)..(500): n is a, c, g, or t
  misc_feature (510)..(510): n is a, c, g, or t
  misc_feature (520)..(520): n is a, c, g, or t

SEQ ID NO: 276245 - DNA, 725 bp, Homo Sapiens; identical to SEQ ID NO: 253141

SEQ ID NO: 276246 - DNA, 556 bp, Homo Sapiens; identical to SEQ ID NO: 253144
  misc_feature (60)..(60): n is a, c, g, or t

SEQ ID NO: 276247 - DNA, 1295 bp, Homo Sapiens; identical to SEQ ID NO: 253145

SEQ ID NO: 276248 - DNA, 1244 bp, Homo Sapiens; identical to SEQ ID NO: 253153

SEQ ID NO: 276249 - DNA, 743 bp, Homo Sapiens; identical to SEQ ID NO: 253154

SEQ ID NO: 276250 - DNA, 787 bp, Homo Sapiens; identical to SEQ ID NO: 253155

SEQ ID NO: 276251 - DNA, 804 bp, Homo Sapiens; identical to SEQ ID NO: 253156

SEQ ID NO: 276252 - DNA, 1233 bp, Homo Sapiens; identical to SEQ ID NO: 253157

SEQ ID NO: 276253 - DNA, 395 bp, Homo Sapiens; identical to SEQ ID NO: 253158

SEQ ID NO: 276254 - DNA, 1001 bp, Homo Sapiens; identical to SEQ ID NO: 253159
  misc_feature (381)..(381): n is a, c, g, or t

SEQ ID NO: 276255 - DNA, 697 bp, Homo Sapiens; identical to SEQ ID NO: 253160
  misc_feature (16)..(16): n is a, c, g, or t
  misc_feature (26)..(26): n is a, c, g, or t
  misc_feature (35)..(35): n is a, c, g, or t
  misc_feature (43)..(44): n is a, c, g, or t
  misc_feature (47)..(47): n is a, c, g, or t
  misc_feature (50)..(50): n is a, c, g, or t
  misc_feature (686)..(686): n is a, c, g, or t

SEQ ID NO: 276256 - DNA, 1074 bp, Homo Sapiens; identical to SEQ ID NO: 253161
  misc_feature (309)..(309): n is a, c, g, or t

SEQ ID NO: 276257 - DNA, 627 bp, Homo Sapiens; identical to SEQ ID NO: 253172
  misc_feature (48)..(49): n is a, c, g, or t
  misc_feature (129)..(129): n is a, c, g, or t

SEQ ID NO: 276258 - DNA, 709 bp, Homo Sapiens; identical to SEQ ID NO: 253173
  misc_feature (121)..(121): n is a, c, g, or t
  misc_feature (432)..(464): n is a, c, g, or t

SEQ ID NO: 276259 - DNA, 351 bp, Homo Sapiens; identical to SEQ ID NO: 253181

SEQ ID NO: 276260 - DNA, 4004 bp, Homo Sapiens; identical to SEQ ID NO: 253182

SEQ ID NO: 276261 - DNA, 484 bp, Homo Sapiens; identical to SEQ ID NO: 253183
  misc_feature (368)..(368): n is a, c, g, or t
  misc_feature (399)..(399): n is a, c, g, or t
  misc_feature (470)..(470): n is a, c, g, or t

SEQ ID NO: 276262 - DNA, 1893 bp, Homo Sapiens; identical to SEQ ID NO: 253184
  misc_feature (15)..(15): n is a, c, g, or t
  misc_feature (57)..(57): n is a, c, g, or t
  misc_feature (179)..(180): n is a, c, g, or t
  misc_feature (185)..(185): n is a, c, g, or t
  misc_feature (195)..(195): n is a, c, g, or t
  misc_feature (204)..(204): n is a, c, g, or t
  misc_feature (396)..(396): n is a, c, g, or t

SEQ ID NO: 276263 - DNA, 445 bp, Homo Sapiens; identical to SEQ ID NO: 253185
  misc_feature (15)..(15): n is a, c, g, or t
  misc_feature (27)..(27): n is a, c, g, or t
  misc_feature (35)..(35): n is a, c, g, or t
  misc_feature (78)..(78): n is a, c, g, or t
  misc_feature (92)..(92): n is a, c, g, or t

SEQ ID NO: 276264 - DNA, 732 bp, Homo Sapiens; identical to SEQ ID NO: 253186

SEQ ID NO: 276265 - DNA, 3342 bp, Homo Sapiens; identical to SEQ ID NO: 253187
  misc_feature (98)..(120): n is a, c, g, or t
  misc_feature (129)..(205): n is a, c, g, or t

SEQ ID NO: 276266 - DNA, 858 bp, Homo Sapiens; identical to SEQ ID NO: 253189
  misc_feature (52)..(52): n is a, c, g, or t

SEQ ID NO: 276267 - DNA, 1604 bp, Homo Sapiens; identical to SEQ ID NO: 253190

SEQ ID NO: 276268 - DNA, 358 bp, Homo Sapiens; identical to SEQ ID NO: 253198
  misc_feature (219)..(241): n is a, c, g, or t

SEQ ID NO: 276269 - DNA, 346 bp, Homo Sapiens; identical to SEQ ID NO: 253199
  misc_feature (14)..(14): n is a, c, g, or t
  misc_feature (25)..(25): n is a, c, g, or t
  misc_feature (51)..(51): n is a, c, g, or t

SEQ ID NO: 276270 - DNA, 787 bp, Homo Sapiens; identical to SEQ ID NO: 253201

SEQ ID NO: 276271 - DNA, 741 bp, Homo Sapiens; identical to SEQ ID NO: 253202

SEQ ID NO: 276272 - DNA, 848 bp, Homo Sapiens; identical to SEQ ID NO: 15346
  misc_feature (597)..(639): n is a, c, g, or t
  misc_feature (665)..(665): n is a, c, g, or t
  misc_feature (782)..(782): n is a, c, g, or t

SEQ ID NO: 276273 - DNA, 1464 bp, Homo Sapiens; identical to SEQ ID NO: 253204

SEQ ID NO: 276274 - DNA, 945 bp, Homo Sapiens; identical to SEQ ID NO: 253205
  misc_feature (592)..(618): n is a, c, g, or t

SEQ ID NO: 276275 - DNA, 427 bp, Homo Sapiens; identical to SEQ ID NO: 253207

SEQ ID NO: 276276 - DNA, 1962 bp, Homo Sapiens; identical to SEQ ID NO: 253208
  misc_feature (16)..(17): n is a, c, g, or t
  misc_feature (19)..(19): n is a, c, g, or t
  misc_feature (93)..(93): n is a, c, g, or t
  misc_feature (275)..(393): n is a, c, g, or t
  misc_feature (521)..(521): n is a, c, g, or t

SEQ ID NO: 276277 - DNA, 2449 bp, Homo Sapiens; identical to SEQ ID NO: 253216

SEQ ID NO: 276278 - DNA, 830 bp, Homo Sapiens; identical to SEQ ID NO: 253217
  misc_feature (697)..(697): n is a, c, g, or t
  misc_feature (718)..(718): n is a, c, g, or t
  misc_feature (732)..(732): n is a, c, g, or t
  misc_feature (744)..(744): n is a, c, g, or t
  misc_feature (761)..(761): n is a, c, g, or t
  misc_feature (789)..(789): n is a, c, g, or t
  misc_feature (798)..(798): n is a, c, g, or t
  misc_feature (807)..(807): n is a, c, g, or t
  misc_feature (818)..(818): n is a, c, g, or t

SEQ ID NO: 276279 - DNA, 483 bp, Homo Sapiens; identical to SEQ ID NO: 253218
  misc_feature (28)..(28): n is a, c, g, or t
  misc_feature (43)..(43): n is a, c, g, or t
  misc_feature (353)..(353): n is a, c, g, or t
  misc_feature (372)..(372): n is a, c, g, or t
  misc_feature (419)..(419): n is a, c, g, or t
  misc_feature (468)..(468): n is a, c, g, or t

SEQ ID NO: 276280 - DNA, 536 bp, Homo Sapiens; identical to SEQ ID NO: 253219
  misc_feature (13)..(13): n is a, c, g, or t
  misc_feature (31)..(31): n is a, c, g, or t
  misc_feature (66)..(66): n is a, c, g, or t
  misc_feature (76)..(76): n is a, c, g, or t
  misc_feature (99)..(99): n is a, c, g, or t
  misc_feature (120)..(120): n is a, c, g, or t
  misc_feature (128)..(128): n is a, c, g, or t
  misc_feature (135)..(135): n is a, c, g, or t
  misc_feature (181)..(181): n is a, c, g, or t
  misc_feature (224)..(224): n is a, c, g, or t

SEQ ID NO: 276281 - DNA, 1506 bp, Homo Sapiens; identical to SEQ ID NO: 253222

SEQ ID NO: 276282 - DNA, 907 bp, Homo Sapiens; identical to SEQ ID NO: 253223

SEQ ID NO: 276283 - DNA, 1594 bp, Homo Sapiens; identical to SEQ ID NO: 253224
  misc_feature (1210)..(1214): n is a, c, g, or t
  misc_feature (1220)..(1221): n is a, c, g, or t
  misc_feature (1223)..(1224): n is a, c, g, or t
  misc_feature (1227)..(1227): n is a, c, g, or t
  misc_feature (1334)..(1350): n is a, c, g, or t
  misc_feature (1455)..(1467): n is a, c, g, or t
  misc_feature (1493)..(1538): n is a, c, g, or t

SEQ ID NO: 276284 - DNA, 827 bp, Homo Sapiens; identical to SEQ ID NO: 253225

SEQ ID NO: 276285 - DNA, 251 bp, Homo Sapiens; identical to SEQ ID NO: 253226
  misc_feature (235)..(235): n is a, c, g, or t

SEQ ID NO: 276286 - DNA, 840 bp, Homo Sapiens; identical to SEQ ID NO: 253228

SEQ ID NO: 276287 - DNA, 1775 bp, Homo Sapiens; identical to SEQ ID NO: 253229
  misc_feature (1721)..(1729): n is a, c, g, or t

SEQ ID NO: 276288 - DNA, 935 bp, Homo Sapiens; identical to SEQ ID NO: 253230
  misc_feature (676)..(676): n is a, c, g, or t
  misc_feature (679)..(679): n is a, c, g, or t
  misc_feature (701)..(701): n is a, c, g, or t
  misc_feature (705)..(705): n is a, c, g, or t
  misc_feature (732)..(732): n is a, c, g, or t
  misc_feature (771)..(772): n is a, c, g, or t
  misc_feature (778)..(778): n is a, c, g, or t
  misc_feature (800)..(800): n is a, c, g, or t
  misc_feature (806)..(806): n is a, c, g, or t
  misc_feature (825)..(825): n is a, c, g, or t
  misc_feature (830)..(830): n is a, c, g, or t
  misc_feature (839)..(839): n is a, c, g, or t
  misc_feature (841)..(841): n is a, c, g, or t
  misc_feature (852)..(852): n is a, c, g, or t
  misc_feature (863)..(863): n is a, c, g, or t
  misc_feature (869)..(869): n is a, c, g, or t
  misc_feature (879)..(880): n is a, c, g, or t
  misc_feature (884)..(884): n is a, c, g, or t
  misc_feature (888)..(888): n is a, c, g, or t
  misc_feature (891)..(891): n is a, c, g, or t
  misc_feature (902)..(902): n is a, c, g, or t
  misc_feature (905)..(905): n is a, c, g, or t
  misc_feature (917)..(917): n is a, c, g, or t
  misc_feature (925)..(925): n is a, c, g, or t

SEQ ID NO: 276289 - DNA, 543 bp, Homo Sapiens; identical to SEQ ID NO: 253233

SEQ ID NO: 276290 - DNA, 1163 bp, Homo Sapiens; identical to SEQ ID NO: 253234
  misc_feature (43)..(54): n is a, c, g, or t

SEQ ID NO: 276291 - DNA, 611 bp, Homo Sapiens; identical to SEQ ID NO: 253235

SEQ ID NO: 276292 - DNA, 928 bp, Homo Sapiens; identical to SEQ ID NO: 253236
  misc_feature (42)..(43): n is a, c, g, or t
  misc_feature (47)..(47): n is a, c, g, or t
  misc_feature (49)..(49): n is a, c, g, or t

SEQ ID NO: 276293 - DNA, 346 bp, Homo Sapiens; identical to SEQ ID NO: 253237

SEQ ID NO: 276294 - DNA, 1856 bp, Homo Sapiens; identical to SEQ ID NO: 253238

SEQ ID NO: 276295 - DNA, 980 bp, Homo Sapiens; identical to SEQ ID NO: 253239
  misc_feature (892)..(892): n is a, c, g, or t
  misc_feature (894)..(894): n is a, c, g, or t
  misc_feature (906)..(906): n is a, c, g, or t
  misc_feature (913)..(913): n is a, c, g, or t
  misc_feature (961)..(961): n is a, c, g, or t

SEQ ID NO: 276296 - DNA, 688 bp, Homo Sapiens; identical to SEQ ID NO: 253240
  misc_feature (58)..(58): n is a, c, g, or t
  misc_feature (79)..(79): n is a, c, g, or t
  misc_feature (101)..(101): n is a, c, g, or t
  misc_feature (114)..(114): n is a, c, g, or t
  misc_feature (121)..(121): n is a, c, g, or t
  misc_feature (135)..(135): n is a, c, g, or t
  misc_feature (166)..(166): n is a, c, g, or t
  misc_feature (206)..(206): n is a, c, g, or t
  misc_feature (234)..(234): n is a, c, g, or t
  misc_feature (241)..(241): n is a, c, g, or t

SEQ ID NO: 276297 - DNA, 737 bp, Homo Sapiens; identical to SEQ ID NO: 253242
  misc_feature (528)..(529): n is a, c, g, or t
  misc_feature (532)..(533): n is a, c, g, or t
  misc_feature (535)..(542): n is a, c, g, or t
  misc_feature (545)..(546): n is a, c, g, or t
  misc_feature (554)..(554): n is a, c, g, or t
  misc_feature (562)..(563): n is a, c, g, or t
  misc_feature (577)..(577): n is a, c, g, or t

SEQ ID NO: 276298 - DNA, 635 bp, Homo Sapiens; identical to SEQ ID NO: 253243
  misc_feature (30)..(30): n is a, c, g, or t

SEQ ID NO: 276299 - DNA, 652 bp, Homo Sapiens; identical to SEQ ID NO: 253249
  misc_feature (56)..(56): n is a, c, g, or t
  misc_feature (76)..(358): n is a, c, g, or t

SEQ ID NO: 276300 - DNA, 1117 bp, Homo Sapiens; identical to SEQ ID NO: 253250
  misc_feature (466)..(466): n is a, c, g, or t
  misc_feature (468)..(468): n is a, c, g, or t
  misc_feature (519)..(519): n is a, c, g, or t
  misc_feature (554)..(554): n is a, c, g, or t
  misc_feature (559)..(559): n is a, c, g, or t

SEQ ID NO: 276301 - DNA, 1225 bp, Homo Sapiens; identical to SEQ ID NO: 253251
  misc_feature (577)..(577): n is a, c, g, or t

SEQ ID NO: 276302 - DNA, 809 bp, Homo Sapiens; identical to SEQ ID NO: 253252
  misc_feature (763)..(763): n is a, c, g, or t

SEQ ID NO: 276303 - DNA, 364 bp, Homo Sapiens; identical to SEQ ID NO: 253254
  misc_feature (175)..(197): n is a, c, g, or t

SEQ ID NO: 276304 - DNA, 1189 bp, Homo Sapiens; identical to SEQ ID NO: 253255
  misc_feature (175)..(197): n is a, c, g, or t
  misc_feature (900)..(970): n is a, c, g, or t

SEQ ID NO: 276305 - DNA, 1007 bp, Homo Sapiens; identical to SEQ ID NO: 253256
  misc_feature (467)..(523): n is a, c, g, or t
  misc_feature (566)..(581): n is a, c, g, or t
  misc_feature (692)..(702): n is a, c, g, or t

SEQ ID NO: 276306 - DNA, 1029 bp, Homo Sapiens; identical to SEQ ID NO: 253257
  misc_feature (696)..(770): n is a, c, g, or t
  misc_feature (950)..(950): n is a, c, g, or t
  misc_feature (953)..(953): n is a, c, g, or t
  misc_feature (992)..(992): n is a, c, g, or t

SEQ ID NO: 276307 - DNA, 995 bp, Homo Sapiens; identical to SEQ ID NO: 253258
  misc_feature (23)..(23): n is a, c, g, or t
  misc_feature (50)..(146): n is a, c, g, or t

SEQ ID NO: 276308 - DNA, 1440 bp, Homo Sapiens; identical to SEQ ID NO: 253259

SEQ ID NO: 276309 - DNA, 1229 bp, Homo Sapiens; identical to SEQ ID NO: 253260
  misc_feature (10)..(10): n is a, c, g, or t
  misc_feature (32)..(33): n is a, c, g, or t
  misc_feature (51)..(51): n is a, c, g, or t
  misc_feature (61)..(61): n is a, c, g, or t
  misc_feature (74)..(75): n is a, c, g, or t
  misc_feature (80)..(80): n is a, c, g, or t
  misc_feature (82)..(82): n is a, c, g, or t
  misc_feature (86)..(86): n is a, c, g, or t
  misc_feature (95)..(95): n is a, c, g, or t
  misc_feature (141)..(141): n is a, c, g, or t
  misc_feature (159)..(159): n is a, c, g, or t
  misc_feature (180)..(180): n is a, c, g, or t

SEQ ID NO: 276310 - DNA, 225 bp, Homo Sapiens; identical to SEQ ID NO: 253262

SEQ ID NO: 276311 - DNA, 573 bp, Homo Sapiens; identical to SEQ ID NO: 253263
  misc_feature (134)..(168): n is a, c, g, or t
  misc_feature (448)..(448): n is a, c, g, or t

SEQ ID NO: 276312 - DNA, 1704 bp, Homo Sapiens; identical to SEQ ID NO: 253265
  misc_feature (1151)..(1166): n is a, c, g, or t
  misc_feature (1286)..(1297): n is a, c, g, or t

SEQ ID NO: 276313 - DNA, 929 bp, Homo Sapiens; identical to SEQ ID NO: 253266

SEQ ID NO: 276314 - DNA, 817 bp, Homo Sapiens; identical to SEQ ID NO: 253267

SEQ ID NO: 276315 - DNA, 923 bp, Homo Sapiens; identical to SEQ ID NO: 253268
  misc_feature (472)..(481): n is a, c, g, or t

SEQ ID NO: 276316 - DNA, 1004 bp, Homo Sapiens; identical to SEQ ID NO: 253269
  misc_feature (52)..(52): n is a, c, g, or t
  misc_feature (910)..(910): n is a, c, g, or t
  misc_feature (920)..(920): n is a, c, g, or t
  misc_feature (944)..(944): n is a, c, g, or t
  misc_feature (953)..(953): n is a, c, g, or t
  misc_feature (969)..(969): n is a, c, g, or t
  misc_feature (981)..(982): n is a, c, g, or t

SEQ ID NO: 276317 - DNA, 637 bp, Homo Sapiens; identical to SEQ ID NO: 253273

SEQ ID NO: 276318 - DNA, 570 bp, Homo Sapiens; identical to SEQ ID NO: 253274

SEQ ID NO: 276319 - DNA, 817 bp, Homo Sapiens; identical to SEQ ID NO: 253275
  misc_feature (24)..(24): n is a, c, g, or t
  misc_feature (29)..(29): n is a, c, g, or t
  misc_feature (37)..(37): n is a, c, g, or t
  misc_feature (77)..(77): n is a, c, g, or t
  misc_feature (163)..(217): n is a, c, g, or t

SEQ ID NO: 276320 - DNA, 1704 bp, Homo Sapiens; identical to SEQ ID NO: 253276
  misc_feature (982)..(1030): n is a, c, g, or t
  misc_feature (1052)..(1232): n is a, c, g, or t

SEQ ID NO: 276321 - DNA, 1161 bp, Homo Sapiens; identical to SEQ ID NO: 253277
  misc_feature (126)..(135): n is a, c, g, or t
  misc_feature (1008)..(1097): n is a, c, g, or t

SEQ ID NO: 276322 - DNA, 1076 bp, Homo Sapiens; identical to SEQ ID NO: 253278
  misc_feature (670)..(854): n is a, c, g, or t
  misc_feature (909)..(918): n is a, c, g, or t
  misc_feature (950)..(1013): n is a, c, g, or t

SEQ ID NO: 276323 - DNA, 1591 bp, Homo Sapiens; identical to SEQ ID NO: 253279
  misc_feature (415)..(426): n is a, c, g, or t
  misc_feature (665)..(674): n is a, c, g, or t
  misc_feature (688)..(688): n is a, c, g, or t
  misc_feature (820)..(820): n is a, c, g, or t

SEQ ID NO: 276324 - DNA, 1127 bp, Homo Sapiens; identical to SEQ ID NO: 253283
  misc_feature (9)..(9): n is a, c, g, or t
  misc_feature (42)..(44): n is a, c, g, or t
  misc_feature (47)..(47): n is a, c, g, or t
  misc_feature (49)..(49): n is a, c, g, or t
  misc_feature (55)..(55): n is a, c, g, or t
  misc_feature (110)..(110): n is a, c, g, or t
  misc_feature (112)..(112): n is a, c, g, or t

SEQ ID NO: 276325 - DNA, 938 bp, Homo Sapiens; identical to SEQ ID NO: 253284
  misc_feature (773)..(773): n is a, c, g, or t
  misc_feature (883)..(883): n is a, c, g, or t
  misc_feature (911)..(911): n is a, c, g, or t

SEQ ID NO: 276326 - DNA, 950 bp, Homo Sapiens; identical to SEQ ID NO: 253285
  misc_feature (802)..(802): n is a, c, g, or t
  misc_feature (829)..(829): n is a, c, g, or t
  misc_feature (834)..(834): n is a, c, g, or t
  misc_feature (842)..(842): n is a, c, g, or t
  misc_feature (902)..(902): n is a, c, g, or t

SEQ ID NO: 276327 - DNA, 377 bp, Homo Sapiens; identical to SEQ ID NO: 253286
  misc_feature (168)..(168): n is a, c, g, or t
  misc_feature (287)..(287): n is a, c, g, or t

SEQ ID NO: 276328 - DNA, 366 bp, Homo Sapiens; identical to SEQ ID NO: 253287

SEQ ID NO: 276329 - DNA, 1128 bp, Homo Sapiens; identical to SEQ ID NO: 253288
  misc_feature (1027)..(1027): n is a, c, g, or t
  misc_feature (1030)..(1030): n is a, c, g, or t
  misc_feature (1034)..(1034): n is a, c, g, or t
  misc_feature (1069)..(1069): n is a, c, g, or t
  misc_feature (1081)..(1081): n is a, c, g, or t

SEQ ID NO: 276330 - DNA, 740 bp, Homo Sapiens; identical to SEQ ID NO: 81863
  misc_feature (513)..(547): n is a, c, g, or t
  misc_feature (550)..(557): n is a, c, g, or t
  misc_feature (658)..(658): n is a, c, g, or t

SEQ ID NO: 276331 - DNA, 1008 bp, Homo Sapiens; identical to SEQ ID NO: 15279
  misc_feature (986)..(986): n is a, c, g, or t

SEQ ID NO: 276332 - DNA, 805 bp, Homo Sapiens; identical to SEQ ID NO: 170553

SEQ ID NO: 276333 - DNA, 890 bp, Homo Sapiens; identical to SEQ ID NO: 15280
  misc_feature (564)..(581): n is a, c, g, or t
  misc_feature (625)..(641): n is a, c, g, or t

SEQ ID NO: 276334 - DNA, 618 bp, Homo Sapiens; identical to SEQ ID NO: 253294

SEQ ID NO: 276335 - DNA, 367 bp, Homo Sapiens; identical to SEQ ID NO: 253295

SEQ ID NO: 276336 - DNA, 975 bp, Homo Sapiens; identical to SEQ ID NO: 253296

SEQ ID NO: 276337 - DNA, 1187 bp, Homo Sapiens; identical to SEQ ID NO: 253297
  misc_feature (42)..(42): n is a, c, g, or t
  misc_feature (225)..(225): n is a, c, g, or t
  misc_feature (247)..(247): n is a, c, g, or t
  misc_feature (261)..(261): n is a, c, g, or t
  misc_feature (296)..(296): n is a, c, g, or t
  misc_feature (329)..(329): n is a, c, g, or t

SEQ ID NO: 276338 - DNA, 1253 bp, Homo Sapiens; identical to SEQ ID NO: 253298
  misc_feature (1054)..(1054): n is a, c, g, or t
  misc_feature (1231)..(1231): n is a, c, g, or t
  misc_feature (1237)..(1237): n is a, c, g, or t

SEQ ID NO: 276339 - DNA, 500 bp, Homo Sapiens; identical to SEQ ID NO: 253299
  misc_feature (391)..(391): n is a, c, g, or t
  misc_feature (419)..(419): n is a, c, g, or t
  misc_feature (447)..(447): n is a, c, g, or t

SEQ ID NO: 276340 - DNA, 355 bp, Homo Sapiens; identical to SEQ ID NO: 253300

SEQ ID NO: 276341 - DNA, 1133 bp, Homo Sapiens; identical to SEQ ID NO: 253301
  misc_feature (4)..(4): n is a, c, g, or t
  misc_feature (7)..(7): n is a, c, g, or t
  misc_feature (17)..(18): n is a, c, g, or t
  misc_feature (20)..(20): n is a, c, g, or t
  misc_feature (27)..(27): n is a, c, g, or t
  misc_feature (29)..(29): n is a, c, g, or t
  misc_feature (36)..(36): n is a, c, g, or t
  misc_feature (41)..(41): n is a, c, g, or t
  misc_feature (48)..(48): n is a, c, g, or t
  misc_feature (58)..(58): n is a, c, g, or t
  misc_feature (63)..(63): n is a, c, g, or t
  misc_feature (83)..(83): n is a, c, g, or t
  misc_feature (183)..(183): n is a, c, g, or t

SEQ ID NO: 276342 - DNA, 1336 bp, Homo Sapiens; identical to SEQ ID NO: 253302
  misc_feature (93)..(93): n is a, c, g, or t

SEQ ID NO: 276343 - DNA, 468 bp, Homo Sapiens; identical to SEQ ID NO: 253303
  misc_feature (348)..(348): n is a, c, g, or t
  misc_feature (367)..(367): n is a, c, g, or t
  misc_feature (383)..(383): n is a, c, g, or t
  misc_feature (423)..(423): n is a, c, g, or t
  misc_feature (434)..(434): n is a, c, g, or t
  misc_feature (443)..(443): n is a, c, g, or t
  misc_feature (451)..(451): n is a, c, g, or t

SEQ ID NO: 276344 - DNA, 980 bp, Homo Sapiens; identical to SEQ ID NO: 253308
  misc_feature (493)..(493): n is a, c, g, or t

SEQ ID NO: 276345 - DNA, 1107 bp, Homo Sapiens; identical to SEQ ID NO: 253309

SEQ ID NO: 276346 - DNA, 737 bp, Homo Sapiens; identical to SEQ ID NO: 253310

SEQ ID NO: 276347 - DNA, 315 bp, Homo Sapiens; identical to SEQ ID NO: 253311

SEQ ID NO: 276348 - DNA, 1371 bp, Homo Sapiens; identical to SEQ ID NO: 253312

SEQ ID NO: 276349 - DNA, 409 bp, Homo Sapiens; identical to SEQ ID NO: 253314
  misc_feature (18)..(18): n is a, c, g, or t
  misc_feature (46)..(46): n is a, c, g, or t
  misc_feature (62)..(62): n is a, c, g, or t
  misc_feature (65)..(73): n is a, c, g, or t

SEQ ID NO: 276350 - DNA, 788 bp, Homo Sapiens; identical to SEQ ID NO: 253315
  misc_feature (297)..(305): n is a, c, g, or t

SEQ ID NO: 276351 - DNA, 1135 bp, Homo Sapiens; identical to SEQ ID NO: 253318
  misc_feature (11)..(11): n is a, c, g, or t
  misc_feature (13)..(13): n is a, c, g, or t
  misc_feature (17)..(17): n is a, c, g, or t
  misc_feature (20)..(20): n is a, c, g, or t
  misc_feature (23)..(23): n is a, c, g, or t
  misc_feature (26)..(26): n is a, c, g, or t
  misc_feature (28)..(28): n is a, c, g, or t
  misc_feature (34)..(34): n is a, c, g, or t
  misc_feature (40)..(40): n is a, c, g, or t
  misc_feature (45)..(45): n is a, c, g, or t
  misc_feature (64)..(64): n is a, c, g, or t
  misc_feature (72)..(72): n is a, c, g, or t
  misc_feature (74)..(74): n is a, c, g, or t
  misc_feature (78)..(78): n is a, c, g, or t
  misc_feature (86)..(86): n is a, c, g, or t
  misc_feature (122)..(122): n is a, c, g, or t
  misc_feature (124)..(124): n is a, c, g, or t
  misc_feature (127)..(189): n is a, c, g, or t
  misc_feature (409)..(409): n is a, c, g, or t

SEQ ID NO: 276352 - DNA, 1883 bp, Homo Sapiens; identical to SEQ ID NO: 253319
  misc_feature (368)..(368): n is a, c, g, or t

SEQ ID NO: 276353 - DNA, 1010 bp, Homo Sapiens; identical to SEQ ID NO: 253324

SEQ ID NO: 276354 - DNA, 1857 bp, Homo Sapiens; identical to SEQ ID NO: 253325

SEQ ID NO: 276355 - DNA, 1281 bp, Homo Sapiens; identical to SEQ ID NO: 253329

SEQ ID NO: 276356 - DNA, 1131 bp, Homo Sapiens; identical to SEQ ID NO: 253330

SEQ ID NO: 276357 - DNA, 1116 bp, Homo Sapiens; identical to SEQ ID NO: 253332

SEQ ID NO: 276358 - DNA, 384 bp, Homo Sapiens; identical to SEQ ID NO: 253333

SEQ ID NO: 276359 - DNA, 602 bp, Homo Sapiens; identical to SEQ ID NO: 253338
  misc_feature (42)..(80): n is a, c, g, or t
  misc_feature (528)..(528): n is a, c, g, or t

SEQ ID NO: 276360 - DNA, 618 bp, Homo Sapiens; identical to SEQ ID NO: 253339
  misc_feature (252)..(252): n is a, c, g, or t
  misc_feature (258)..(258): n is a, c, g, or t
  misc_feature (264)..(264): n is a, c, g, or t
  misc_feature (309)..(309): n is a, c, g, or t

SEQ ID NO: 276361 - DNA, 853 bp, Homo Sapiens; identical to SEQ ID NO: 253340
  misc_feature (96)..(134): n is a, c, g, or t

SEQ ID NO: 276362 - DNA, 1411 bp, Homo Sapiens; identical to SEQ ID NO: 253343
  misc_feature (484)..(599): n is a, c, g, or t
  misc_feature (675)..(740): n is a, c, g, or t
  misc_feature (1352)..(1352): n is a, c, g, or t
  misc_feature (1381)..(1381): n is a, c, g, or t

SEQ ID NO: 276363 - DNA, 1229 bp, Homo Sapiens; identical to SEQ ID NO: 253344
  misc_feature (399)..(702): n is a, c, g, or t

SEQ ID NO: 276364 - DNA, 500 bp, Homo Sapiens; identical to SEQ ID NO: 253348
  misc_feature (91)..(110): n is a, c, g, or t

SEQ ID NO: 276365 - DNA, 624 bp, Homo Sapiens; identical to SEQ ID NO: 253349

SEQ ID NO: 276366 - DNA, 642 bp, Homo Sapiens; identical to SEQ ID NO: 253350

SEQ ID NO: 276367 - DNA, 2118 bp, Homo Sapiens; identical to SEQ ID NO: 253354
  misc_feature (1834)..(1834): n is a, c, g, or t

SEQ ID NO: 276368 - DNA, 997 bp, Homo Sapiens; identical to SEQ ID NO: 253355
  misc_feature (20)..(20): n is a, c, g, or t
  misc_feature (23)..(23): n is a, c, g, or t

SEQ ID NO: 276369 - DNA, 895 bp, Homo Sapiens; identical to SEQ ID NO: 253356

SEQ ID NO: 276370 - DNA, 366 bp, Homo Sapiens; identical to SEQ ID NO: 253358

SEQ ID NO: 276371 - DNA, 621 bp, Homo Sapiens; identical to SEQ ID NO: 253359
  misc_feature (18)..(18): n is a, c, g, or t
  misc_feature (37)..(37): n is a, c, g, or t

SEQ ID NO: 276372 - DNA, 539 bp, Homo Sapiens; identical to SEQ ID NO: 253362

SEQ ID NO: 276373 - DNA, 884 bp, Homo Sapiens; identical to SEQ ID NO: 253363
  misc_feature (461)..(469): n is a, c, g, or t

SEQ ID NO: 276374 - DNA, 446 bp, Homo Sapiens; identical to SEQ ID NO: 253364
  misc_feature (30)..(30): n is a, c, g, or t
  misc_feature (54)..(54): n is a, c, g, or t
  misc_feature (60)..(60): n is a, c, g, or t

SEQ ID NO: 276375 - DNA, 1392 bp, Homo Sapiens; identical to SEQ ID NO: 253365

SEQ ID NO: 276376 - DNA, 581 bp, Homo Sapiens; identical to SEQ ID NO: 253366

SEQ ID NO: 276377 - DNA, 398 bp, Homo Sapiens; identical to SEQ ID NO: 253367
  misc_feature (383)..(383): n is a, c, g, or t

SEQ ID NO: 276378 - DNA, 597 bp, Homo Sapiens; identical to SEQ ID NO: 253368

SEQ ID NO: 276379 - DNA, 687 bp, Homo Sapiens; identical to SEQ ID NO: 253369
  misc_feature (101)..(101): n is a, c, g, or t

SEQ ID NO: 276380 - DNA, 232 bp, Homo Sapiens; identical to SEQ ID NO: 253371

SEQ ID NO: 276381 - DNA, 493 bp, Homo Sapiens; identical to SEQ ID NO: 253372

SEQ ID NO: 276382 - DNA, 1170 bp, Homo Sapiens; identical to SEQ ID NO: 253373
  misc_feature (13)..(13): n is a, c, g, or t
  misc_feature (21)..(21): n is a, c, g, or t
  misc_feature (45)..(45): n is a, c, g, or t
  misc_feature (53)..(56): n is a, c, g, or t
  misc_feature (64)..(64): n is a, c, g, or t
  misc_feature (83)..(84): n is a, c, g, or t
  misc_feature (99)..(99): n is a, c, g, or t
  misc_feature (122)..(122): n is a, c, g, or t

SEQ ID NO: 276383 - DNA, 1591 bp, Homo Sapiens; identical to SEQ ID NO: 253374
  misc_feature (1567)..(1567): n is a, c, g, or t
  misc_feature (1579)..(1579): n is a, c, g, or t
  misc_feature (1581)..(1581): n is a, c, g, or t
  misc_feature (1583)..(1583): n is a, c, g, or t

SEQ ID NO: 276384 - DNA, 992 bp, Homo Sapiens; identical to SEQ ID NO: 253375
  misc_feature (649)..(649): n is a, c, g, or t
  misc_feature (680)..(680): n is a, c, g, or t

SEQ ID NO: 276385 - DNA, 543 bp, Homo Sapiens; identical to SEQ ID NO: 253377

SEQ ID NO: 276386 - DNA, 580 bp, Homo Sapiens; identical to SEQ ID NO: 253378

SEQ ID NO: 276387 - DNA, 360 bp, Homo Sapiens; identical to SEQ ID NO: 253379

SEQ ID NO: 276388 - DNA, 352 bp, Homo Sapiens; identical to SEQ ID NO: 253381

SEQ ID NO: 276389 - DNA, 670 bp, Homo Sapiens; identical to SEQ ID NO: 253382

SEQ ID NO: 276390 - DNA, 1171 bp, Homo Sapiens; identical to SEQ ID NO: 253383

SEQ ID NO: 276391 - DNA, 1713 bp, Homo Sapiens; identical to SEQ ID NO: 253384

SEQ ID NO: 276392 - DNA, 411 bp, Homo Sapiens; identical to SEQ ID NO: 253385
  misc_feature (62)..(62): n is a, c, g, or t
  misc_feature (80)..(80): n is a, c, g, or t

SEQ ID NO: 276393 - DNA, 992 bp, Homo Sapiens; identical to SEQ ID NO: 253390

SEQ ID NO: 276394 - DNA, 886 bp, Homo Sapiens; identical to SEQ ID NO: 253391

SEQ ID NO: 276395 - DNA, 359 bp, Homo Sapiens; identical to SEQ ID NO: 253392

SEQ ID NO: 276396 - DNA, 1394 bp, Homo Sapiens; identical to SEQ ID NO: 253393
  misc_feature (21)..(21): n is a, c, g, or t
  misc_feature (40)..(40): n is a, c, g, or t
  misc_feature (80)..(80): n is a, c, g, or t
  misc_feature (146)..(146): n is a, c, g, or t
  misc_feature (658)..(658): n is a, c, g, or t
  misc_feature (1321)..(1321): n is a, c, g, or t
  misc_feature (1362)..(1362): n is a, c, g, or t

SEQ ID NO: 276397 - DNA, 1696 bp, Homo Sapiens; identical to SEQ ID NO: 253394
  misc_feature (723)..(754): n is a, c, g, or t
  misc_feature (939)..(995): n is a, c, g, or t
  misc_feature (1221)..(1221): n is a, c, g, or t
  misc_feature (1498)..(1511): n is a, c, g, or t
  misc_feature (1535)..(1535): n is a, c, g, or t
  misc_feature (1550)..(1550): n is a, c, g, or t
  misc_feature (1629)..(1629): n is a, c, g, or t

SEQ ID NO: 276398 - DNA, 573 bp, Homo Sapiens; identical to SEQ ID NO: 253395
  misc_feature (26)..(26): n is a, c, g, or t
  misc_feature (147)..(147): n is a, c, g, or t

SEQ ID NO: 276399 - DNA, 356 bp, Homo Sapiens; identical to SEQ ID NO: 253396

SEQ ID NO: 276400 - DNA, 664 bp, Homo Sapiens; identical to SEQ ID NO: 253399
  misc_feature (65)..(65): n is a, c, g, or t
  misc_feature (99)..(99): n is a, c, g, or t
  misc_feature (179)..(179): n is a, c, g, or t

SEQ ID NO: 276401 - DNA, 896 bp, Homo Sapiens; identical to SEQ ID NO: 253400

SEQ ID NO: 276402 - DNA, 716 bp, Homo Sapiens; identical to SEQ ID NO: 253401
  misc_feature (161)..(252): n is a, c, g, or t

SEQ ID NO: 276403 - DNA, 229 bp, Homo Sapiens; identical to SEQ ID NO: 253403

SEQ ID NO: 276404 - DNA, 693 bp, Homo Sapiens; identical to SEQ ID NO: 253404
  misc_feature (518)..(518): n is a, c, g, or t
  misc_feature (643)..(643): n is a, c, g, or t

SEQ ID NO: 276405 - DNA, 402 bp, Homo Sapiens; identical to SEQ ID NO: 253407

SEQ ID NO: 276406 - DNA, 683 bp, Homo Sapiens; identical to SEQ ID NO: 253408
  misc_feature (544)..(544): n is a, c, g, or t
  misc_feature (564)..(564): n is a, c, g, or t
  misc_feature (598)..(599): n is a, c, g, or t
  misc_feature (606)..(606): n is a, c, g, or t
  misc_feature (642)..(642): n is a, c, g, or t
  misc_feature (650)..(650): n is a, c, g, or t

SEQ ID NO: 276407 - DNA, 715 bp, Homo Sapiens; identical to SEQ ID NO: 253409
  misc_feature (25)..(25): n is a, c, g, or t
  misc_feature (30)..(30): n is a, c, g, or t
  misc_feature (81)..(81): n is a, c, g, or t
  misc_feature (132)..(132): n is a, c, g, or t
  misc_feature (165)..(165): n is a, c, g, or t
  misc_feature (449)..(449): n is a, c, g, or t

SEQ ID NO: 276408 - DNA, 711 bp, Homo Sapiens; identical to SEQ ID NO: 253410
  misc_feature (31)..(31): n is a, c, g, or t

SEQ ID NO: 276409 - DNA, 2044 bp, Homo Sapiens; identical to SEQ ID NO: 253411

SEQ ID NO: 276410 - DNA, 1429 bp, Homo Sapiens; identical to SEQ ID NO: 253412
  misc_feature (163)..(163): n is a, c, g, or t
  misc_feature (278)..(278): n is a, c, g, or t
  misc_feature (330)..(330): n is a, c, g, or t
  misc_feature (464)..(464): n is a, c, g, or t
  misc_feature (470)..(470): n is a, c, g, or t
  misc_feature (568)..(568): n is a, c, g, or t
  misc_feature (753)..(753): n is a, c, g, or t
  misc_feature (785)..(785): n is a, c, g, or t
  misc_feature (841)..(841): n is a, c, g, or t
  misc_feature (846)..(846): n is a, c, g, or t
  misc_feature (1249)..(1249): n is a, c, g, or t

SEQ ID NO: 276411 - DNA, 1364 bp, Homo Sapiens; identical to SEQ ID NO: 253413

SEQ ID NO: 276412 - DNA, 1122 bp, Homo Sapiens; identical to SEQ ID NO: 253414
  misc_feature (30)..(30): n is a, c, g, or t
  misc_feature (35)..(35): n is a, c, g, or t
  misc_feature (39)..(39): n is a, c, g, or t
  misc_feature (485)..(503): n is a, c, g, or t
  misc_feature (1039)..(1039): n is a, c, g, or t
  misc_feature (1057)..(1057): n is a, c, g, or t
  misc_feature (1093)..(1093): n is a, c, g, or t
  misc_feature (1100)..(1100): n is a, c, g, or t

SEQ ID NO: 276413 - DNA, 1052 bp, Homo Sapiens; identical to SEQ ID NO: 253418

SEQ ID NO: 276414 - DNA, 359 bp, Homo Sapiens; identical to SEQ ID NO: 253419

SEQ ID NO: 276415 - DNA, 840 bp, Homo Sapiens; identical to SEQ ID NO: 253428
  misc_feature (529)..(529): n is a, c, g, or t
  misc_feature (711)..(711): n is a, c, g, or t
  misc_feature (771)..(771): n is a, c, g, or t
  misc_feature (784)..(784): n is a, c, g, or t
  misc_feature (808)..(808): n is a, c, g, or t
  misc_feature (821)..(821): n is a, c, g, or t

SEQ ID NO: 276416 - DNA, 355 bp, Homo Sapiens; identical to SEQ ID NO: 253429
  misc_feature (86)..(104): n is a, c, g, or t

SEQ ID NO: 276417 - DNA, 592 bp, Homo Sapiens; identical to SEQ ID NO: 253430
  misc_feature (394)..(394): n is a, c, g, or t
  misc_feature (438)..(438): n is a, c, g, or t
  misc_feature (500)..(500): n is a, c, g, or t
  misc_feature (507)..(507): n is a, c, g, or t
  misc_feature (519)..(519): n is a, c, g, or t
  misc_feature (534)..(534): n is a, c, g, or t
  misc_feature (539)..(539): n is a, c, g, or t
  misc_feature (562)..(562): n is a, c, g, or t

SEQ ID NO: 276418 - DNA, 659 bp, Homo Sapiens; identical to SEQ ID NO: 253431

SEQ ID NO: 276419 - DNA, 746 bp, Homo Sapiens; identical to SEQ ID NO: 253432

SEQ ID NO: 276420 - DNA, 996 bp, Homo Sapiens; identical to SEQ ID NO: 253435
  misc_feature (403)..(403): n is a, c, g, or t

SEQ ID NO: 276421 - DNA, 747 bp, Homo Sapiens; identical to SEQ ID NO: 253436
  misc_feature (47)..(143): n is a, c, g, or t
  misc_feature (159)..(168): n is a, c, g, or t

SEQ ID NO: 276422 - DNA, 775 bp, Homo Sapiens; identical to SEQ ID NO: 253442

SEQ ID NO: 276423 - DNA, 644 bp, Homo Sapiens; identical to SEQ ID NO: 253443

SEQ ID NO: 276424 - DNA, 741 bp, Homo Sapiens; identical to SEQ ID NO: 253444

SEQ ID NO: 276425 - DNA, 756 bp, Homo Sapiens; identical to SEQ ID NO: 253445
  misc_feature (104)..(104): n is a, c, g, or t

SEQ ID NO: 276426 - DNA, 1915 bp, Homo Sapiens; identical to SEQ ID NO: 253446

SEQ ID NO: 276427 - DNA, 977 bp, Homo Sapiens; identical to SEQ ID NO: 253447

SEQ ID NO: 276428 - DNA, 620 bp, Homo Sapiens; identical to SEQ ID NO: 253448

SEQ ID NO: 276429 - DNA, 659 bp, Homo Sapiens; identical to SEQ ID NO: 253450

SEQ ID NO: 276430 - DNA, 368 bp, Homo Sapiens; identical to SEQ ID NO: 253451

SEQ ID NO: 276431 - DNA, 562 bp, Homo Sapiens; identical to SEQ ID NO: 253452

SEQ ID NO: 276432 - DNA, 1011 bp, Homo Sapiens; identical to SEQ ID NO: 253453

SEQ ID NO: 276433 - DNA, 481 bp, Homo Sapiens; identical to SEQ ID NO: 253454
  misc_feature (55)..(55): n is a, c, g, or t
  misc_feature (307)..(307): n is a, c, g, or t
  misc_feature (418)..(418): n is a, c, g, or t

SEQ ID NO: 276434 - DNA, 1855 bp, Homo Sapiens; identical to SEQ ID NO: 253458
  misc_feature (7)..(7): n is a, c, g, or t
  misc_feature (32)..(32): n is a, c, g, or t
  misc_feature (36)..(36): n is a, c, g, or t
  misc_feature (40)..(40): n is a, c, g, or t
  misc_feature (57)..(57): n is a, c, g, or t
  misc_feature (65)..(67): n is a, c, g, or t
  misc_feature (128)..(128): n is a, c, g, or t
  misc_feature (907)..(934): n is a, c, g, or t
  misc_feature (940)..(940): n is a, c, g, or t

SEQ ID NO: 276435 - DNA, 719 bp, Homo Sapiens; identical to SEQ ID NO: 253459

SEQ ID NO: 276436 - DNA, 443 bp, Homo Sapiens; identical to SEQ ID NO: 253460

SEQ ID NO: 276437 - DNA, 382 bp, Homo Sapiens; identical to SEQ ID NO: 253461

SEQ ID NO: 276438 - DNA, 1202 bp, Homo Sapiens; identical to SEQ ID NO: 253462
  misc_feature (1186)..(1186): n is a, c, g, or t

SEQ ID NO: 276439 - DNA, 531 bp, Homo Sapiens; identical to SEQ ID NO: 253463
  misc_feature (180)..(200): n is a, c, g, or t
  misc_feature (447)..(447): n is a, c, g, or t

SEQ ID NO: 276440 - DNA, 810 bp, Homo Sapiens; identical to SEQ ID NO: 253464

SEQ ID NO: 276441 - DNA, 2476 bp, Homo Sapiens; identical to SEQ ID NO: 253465
  misc_feature (1026)..(1046): n is a, c, g, or t
  misc_feature (1672)..(1714): n is a, c, g, or t
  misc_feature (1821)..(1892): n is a, c, g, or t
  misc_feature (2047)..(2047): n is a, c, g, or t
  misc_feature (2430)..(2430): n is a, c, g, or t
  misc_feature (2434)..(2434): n is a, c, g, or t

SEQ ID NO: 276442 - DNA, 389 bp, Homo Sapiens; identical to SEQ ID NO: 253466
  misc_feature (28)..(28): n is a, c, g, or t
  misc_feature (360)..(360): n is a, c, g, or t

SEQ ID NO: 276443 - DNA, 998 bp, Homo Sapiens; identical to SEQ ID NO: 253467
  misc_feature (28)..(28): n is a, c, g, or t
  misc_feature (34)..(34): n is a, c, g, or t
  misc_feature (40)..(40): n is a, c, g, or t
  misc_feature (57)..(57): n is a, c, g, or t
  misc_feature (498)..(533): n is a, c, g, or t
  misc_feature (934)..(934): n is a, c, g, or t

SEQ ID NO: 276444 - DNA, 399 bp, Homo Sapiens; identical to SEQ ID NO: 253468
  misc_feature (18)..(18): n is a, c, g, or t
  misc_feature (30)..(30): n is a, c, g, or t

SEQ ID NO: 276445 - DNA, 807 bp, Homo Sapiens; identical to SEQ ID NO: 253470
  misc_feature (511)..(556): n is a, c, g, or t
  misc_feature (635)..(635): n is a, c, g, or t
  misc_feature (657)..(669): n is a, c, g, or t

SEQ ID NO: 276446 - DNA, 757 bp, Homo Sapiens; identical to SEQ ID NO: 253471

SEQ ID NO: 276447 - DNA, 816 bp, Homo Sapiens; identical to SEQ ID NO: 69348

SEQ ID NO: 276448 - DNA, 576 bp, Homo Sapiens; identical to SEQ ID NO: 253477

SEQ ID NO: 276449 - DNA, 1759 bp, Homo Sapiens; identical to SEQ ID NO: 253481
  misc_feature (346)..(346): n is a, c, g, or t

SEQ ID NO: 276450 - DNA, 344 bp, Homo Sapiens; identical to SEQ ID NO: 253482
  misc_feature (322)..(322): n is a, c, g, or t

SEQ ID NO: 276451 - DNA, 366 bp, Homo Sapiens; identical to SEQ ID NO: 253484

SEQ ID NO: 276452 - DNA, 598 bp, Homo Sapiens; identical to SEQ ID NO: 253485
  misc_feature (21)..(22): n is a, c, g, or t

SEQ ID NO: 276453 - DNA, 875 bp, Homo Sapiens; identical to SEQ ID NO: 253486
  misc_feature (131)..(139): n is a, c, g, or t
  misc_feature (189)..(198): n is a, c, g, or t

SEQ ID NO: 276454 - DNA, 755 bp, Homo Sapiens; identical to SEQ ID NO: 253487
  misc_feature (137)..(208): n is a, c, g, or t
  misc_feature (223)..(223): n is a, c, g, or t
  misc_feature (225)..(225): n is a, c, g, or t
  misc_feature (237)..(237): n is a, c, g, or t
  misc_feature (248)..(249): n is a, c, g, or t

SEQ ID NO: 276455 - DNA, 711 bp, Homo Sapiens; identical to SEQ ID NO: 253488
  misc_feature (70)..(155): n is a, c, g, or t
  misc_feature (161)..(161): n is a, c, g, or t
  misc_feature (186)..(186): n is a, c, g, or t
  misc_feature (189)..(189): n is a, c, g, or t

SEQ ID NO: 276456 - DNA, 1198 bp, Homo Sapiens; identical to SEQ ID NO: 253493
  misc_feature (277)..(277): n is a, c, g, or t
  misc_feature (1164)..(1164): n is a, c, g, or t

SEQ ID NO: 276457 - DNA, 446 bp, Homo Sapiens; identical to SEQ ID NO: 253494
  misc_feature (15)..(15): n is a, c, g, or t
  misc_feature (68)..(68): n is a, c, g, or t
  misc_feature (239)..(239): n is a, c, g, or t
  misc_feature (263)..(263): n is a, c, g, or t

SEQ ID NO: 276458 - DNA, 1089 bp, Homo Sapiens; identical to SEQ ID NO: 253495

SEQ ID NO: 276459 - DNA, 897 bp, Homo Sapiens; identical to SEQ ID NO: 253496
  misc_feature (16)..(16): n is a, c, g, or t
  misc_feature (22)..(22): n is a, c, g, or t
  misc_feature (38)..(38): n is a, c, g, or t
  misc_feature (51)..(51): n is a, c, g, or t
  misc_feature (60)..(60): n is a, c, g, or t
  misc_feature (72)..(72): n is a, c, g, or t
  misc_feature (83)..(83): n is a, c, g, or t
  misc_feature (127)..(127): n is a, c, g, or t
  misc_feature (132)..(132): n is a, c, g, or t
  misc_feature (136)..(136): n is a, c, g, or t
  misc_feature (156)..(156): n is a, c, g, or t
  misc_feature (172)..(172): n is a, c, g, or t
  misc_feature (174)..(174): n is a, c, g, or t
  misc_feature (176)..(176): n is a, c, g, or t
  misc_feature (179)..(180): n is a, c, g, or t
  misc_feature (237)..(237): n is a, c, g, or t
  misc_feature (255)..(255): n is a, c, g, or t
  misc_feature (279)..(280): n is a, c, g, or t
  misc_feature (282)..(282): n is a, c, g, or t
  misc_feature (309)..(309): n is a, c, g, or t
  misc_feature (322)..(322): n is a, c, g, or t
  misc_feature (428)..(523): n is a, c, g, or t
  misc_feature (533)..(557): n is a, c, g, or t

SEQ ID NO: 276460 - DNA, 641 bp, Homo Sapiens; identical to SEQ ID NO: 253497

SEQ ID NO: 276461 - DNA, 1296 bp, Homo Sapiens; identical to SEQ ID NO: 253498
  misc_feature (107)..(107): n is a, c, g, or t
  misc_feature (122)..(122): n is a, c, g, or t

SEQ ID NO: 276462 - DNA, 487 bp, Homo Sapiens; identical to SEQ ID NO: 253500

SEQ ID NO: 276463 - DNA, 1257 bp, Homo Sapiens; identical to SEQ ID NO: 253501
  misc_feature (1208)..(1208): n is a, c, g, or t
  misc_feature (1219)..(1219): n is a, c, g, or t

SEQ ID NO: 276464 - DNA, 1694 bp, Homo Sapiens; identical to SEQ ID NO: 253504

SEQ ID NO: 276465 - DNA, 441 bp, Homo Sapiens; identical to SEQ ID NO: 253505
  misc_feature (376)..(376): n is a, c, g, or t
  misc_feature (401)..(401): n is a, c, g, or t

SEQ ID NO: 276466 - DNA, 1062 bp, Homo Sapiens; identical to SEQ ID NO: 253506
  misc_feature (14)..(14): n is a, c, g, or t
  misc_feature (24)..(24): n is a, c, g, or t
  misc_feature (29)..(29): n is a, c, g, or t
  misc_feature (38)..(38): n is a, c, g, or t
  misc_feature (53)..(53): n is a, c, g, or t
  misc_feature (61)..(61): n is a, c, g, or t
  misc_feature (67)..(67): n is a, c, g, or t
  misc_feature (73)..(73): n is a, c, g, or t
  misc_feature (80)..(83): n is a, c, g, or t
  misc_feature (90)..(90): n is a, c, g, or t
  misc_feature (97)..(98): n is a, c, g, or t
  misc_feature (106)..(106): n is a, c, g, or t
  misc_feature (110)..(110): n is a, c, g, or t
  misc_feature (142)..(142): n is a, c, g, or t
  misc_feature (1046)..(1046): n is a, c, g, or t

SEQ ID NO: 276467 - DNA, 1053 bp, Homo Sapiens; identical to SEQ ID NO: 253507
  misc_feature (968)..(968): n is a, c, g, or t
  misc_feature (970)..(970): n is a, c, g, or t
  misc_feature (973)..(973): n is a, c, g, or t
  misc_feature (987)..(987): n is a, c, g, or t
  misc_feature (991)..(991): n is a, c, g, or t
  misc_feature (997)..(997): n is a, c, g, or t
  misc_feature (1005)..(1005): n is a, c, g, or t
  misc_feature (1007)..(1007): n is a, c, g, or t

SEQ ID NO: 276468 - DNA, 775 bp, Homo Sapiens; identical to SEQ ID NO: 253510

SEQ ID NO: 276469 - DNA, 439 bp, Homo Sapiens; identical to SEQ ID NO: 253511
  misc_feature (36)..(36): n is a, c, g, or t
  misc_feature (52)..(52): n is a, c, g, or t
  misc_feature (62)..(62): n is a, c, g, or t
  misc_feature (84)..(84): n is a, c, g, or t
  misc_feature (103)..(103): n is a, c, g, or t
  misc_feature (128)..(128): n is a, c, g, or t

SEQ ID NO: 276470 - DNA, 614 bp, Homo Sapiens; identical to SEQ ID NO: 253512
  misc_feature (88)..(133): n is a, c, g, or t

SEQ ID NO: 276471 - DNA, 424 bp, Homo Sapiens; identical to SEQ ID NO: 253513
  misc_feature (401)..(401): n is a, c, g, or t

SEQ ID NO: 276472 - DNA, 315 bp, Homo Sapiens; identical to SEQ ID NO: 253518

SEQ ID NO: 276473 - DNA, 844 bp, Homo Sapiens; identical to SEQ ID NO: 253519

SEQ ID NO: 276474 - DNA, 428 bp, Homo Sapiens; identical to SEQ ID NO: 253527

SEQ ID NO: 276475 - DNA, 723 bp, Homo Sapiens; identical to SEQ ID NO: 253528
  misc_feature (61)..(61): n is a, c, g, or t
  misc_feature (67)..(67): n is a, c, g, or t
  misc_feature (110)..(110): n is a, c, g, or t
  misc_feature (170)..(170): n is a, c, g, or t

SEQ ID NO: 276476 - DNA, 965 bp, Homo Sapiens; identical to SEQ ID NO: 253529

SEQ ID NO: 276477 - DNA, 1331 bp, Homo Sapiens; identical to SEQ ID NO: 253530

SEQ ID NO: 276478 - DNA, 1683 bp, Homo Sapiens; identical to SEQ ID NO: 253531

SEQ ID NO: 276479 - DNA, 2394 bp, Homo Sapiens; identical to SEQ ID NO: 253532

SEQ ID NO: 276480 - DNA, 559 bp, Homo Sapiens; identical to SEQ ID NO: 253533

SEQ ID NO: 276481 - DNA, 930 bp, Homo Sapiens; identical to SEQ ID NO: 253534
  misc_feature (616)..(644): n is a, c, g, or t
  misc_feature (656)..(694): n is a, c, g, or t
  misc_feature (741)..(813): n is a, c, g, or t
  misc_feature (855)..(863): n is a, c, g, or t

SEQ ID NO: 276482 - DNA, 480 bp, Homo Sapiens; identical to SEQ ID NO: 253535

SEQ ID NO: 276483 - DNA, 520 bp, Homo Sapiens; identical to SEQ ID NO: 253544

SEQ ID NO: 276484 - DNA, 1652 bp, Homo Sapiens; identical to SEQ ID NO: 253545

SEQ ID NO: 276485 - DNA, 631 bp, Homo Sapiens; identical to SEQ ID NO: 253546

SEQ ID NO: 276486 - DNA, 1319 bp, Homo Sapiens; identical to SEQ ID NO: 253547

SEQ ID NO: 276487 - DNA, 646 bp, Homo Sapiens; identical to SEQ ID NO: 253549
  misc_feature (496)..(496): n is a, c, g, or t

SEQ ID NO: 276488 - DNA, 1264 bp, Homo Sapiens; identical to SEQ ID NO: 253550

SEQ ID NO: 276489 - DNA, 626 bp, Homo Sapiens; identical to SEQ ID NO: 253553
  misc_feature (472)..(472): n is a, c, g, or t
  misc_feature (538)..(538): n is a, c, g, or t

SEQ ID NO: 276490 - DNA, 649 bp, Homo Sapiens; identical to SEQ ID NO: 253554
  misc_feature (301)..(310): n is a, c, g, or t

SEQ ID NO: 276491 - DNA, 1417 bp, Homo Sapiens; identical to SEQ ID NO: 253555

SEQ ID NO: 276492 - DNA, 743 bp, Homo Sapiens; identical to SEQ ID NO: 253557
  misc_feature (732)..(732): n is a, c, g, or t

SEQ ID NO: 276493 - DNA, 840 bp, Homo Sapiens; identical to SEQ ID NO: 253558

SEQ ID NO: 276494 - DNA, 475 bp, Homo Sapiens; identical to SEQ ID NO: 253559

SEQ ID NO: 276495 - DNA, 1182 bp, Homo Sapiens; identical to SEQ ID NO: 253560
  misc_feature (671)..(693): n is a, c, g, or t
  misc_feature (704)..(742): n is a, c, g, or t
  misc_feature (789)..(861): n is a, c, g, or t
  misc_feature (885)..(885): n is a, c, g, or t
  misc_feature (900)..(908): n is a, c, g, or t
  misc_feature (937)..(1014): n is a, c, g, or t

SEQ ID NO: 276496 - DNA, 492 bp, Homo Sapiens; identical to SEQ ID NO: 253565

SEQ ID NO: 276497 - DNA, 709 bp, Homo Sapiens; identical to SEQ ID NO: 253566

SEQ ID NO: 276498 - DNA, 349 bp, Homo Sapiens; identical to SEQ ID NO: 253572

SEQ ID NO: 276499 - DNA, 561 bp, Homo Sapiens; identical to SEQ ID NO: 253573

SEQ ID NO: 276500 - DNA, 2247 bp, Homo Sapiens; identical to SEQ ID NO: 253574

SEQ ID NO: 276501 - DNA, 559 bp, Homo Sapiens; identical to SEQ ID NO: 253575
  misc_feature (359)..(359): n is a, c, g, or t
  misc_feature (460)..(460): n is a, c, g, or t
  misc_feature (491)..(499): n is a, c, g, or t
  misc_feature (508)..(508): n is a, c, g, or t
  misc_feature (538)..(538): n is a, c, g, or t

SEQ ID NO: 276502 - DNA, 972 bp, Homo Sapiens; identical to SEQ ID NO: 253578
  misc_feature (783)..(783): n is a, c, g, or t
  misc_feature (849)..(849): n is a, c, g, or t
  misc_feature (881)..(881): n is a, c, g, or t
  misc_feature (895)..(895): n is a, c, g, or t
  misc_feature (901)..(901): n is a, c, g, or t
  misc_feature (917)..(917): n is a, c, g, or t
  misc_feature (920)..(920): n is a, c, g, or t
  misc_feature (925)..(925): n is a, c, g, or t
  misc_feature (944)..(944): n is a, c, g, or t
  misc_feature (950)..(951): n is a, c, g, or t
  misc_feature (954)..(954): n is a, c, g, or t

SEQ ID NO: 276503 - DNA, 1733 bp, Homo Sapiens; identical to SEQ ID NO: 253579
  misc_feature (587)..(587): n is a, c, g, or t

SEQ ID NO: 276504 - DNA, 1253 bp, Homo Sapiens; identical to SEQ ID NO: 253582
  misc_feature (281)..(289): n is a, c, g, or t
  misc_feature (427)..(437): n is a, c, g, or t
  misc_feature (530)..(568): n is a, c, g, or t
  misc_feature (1018)..(1018): n is a, c, g, or t
  misc_feature (1084)..(1084): n is a, c, g, or t
  misc_feature (1111)..(1111): n is a, c, g, or t
  misc_feature (1201)..(1201): n is a, c, g, or t
  misc_feature (1239)..(1239): n is a, c, g, or t

SEQ ID NO: 276505 - DNA, 786 bp, Homo Sapiens; identical to SEQ ID NO: 253583

SEQ ID NO: 276506 - DNA, 444 bp, Homo Sapiens; identical to SEQ ID NO: 253584
  misc_feature (148)..(149): n is a, c, g, or t

SEQ ID NO: 276507 - DNA, 1218 bp, Homo Sapiens; identical to SEQ ID NO: 253589

SEQ ID NO: 276508 - DNA, 1041 bp, Homo Sapiens; identical to SEQ ID NO: 253590
  misc_feature (54)..(160): n is a, c, g, or t
  misc_feature (214)..(214): n is a, c, g, or t
  misc_feature (326)..(326): n is a, c, g, or t
  misc_feature (341)..(341): n is a, c, g, or t
  misc_feature (964)..(964): n is a, c, g, or t
  misc_feature (998)..(998): n is a, c, g, or t
  misc_feature (1012)..(1012): n is a, c, g, or t
  misc_feature (1026)..(1026): n is a, c, g, or t

SEQ ID NO: 276509 - DNA, 1033 bp, Homo Sapiens; identical to SEQ ID NO: 253591

SEQ ID NO: 276510 - DNA, 458 bp, Homo Sapiens; identical to SEQ ID NO: 253592

SEQ ID NO: 276511 - DNA, 915 bp, Homo Sapiens; identical to SEQ ID NO: 253593
  misc_feature (730)..(730): n is a, c, g, or t

SEQ ID NO: 276512 - DNA, 1003 bp, Homo Sapiens; identical to SEQ ID NO: 253594
  misc_feature (749)..(749): n is a, c, g, or t
  misc_feature (763)..(763): n is a, c, g, or t

SEQ ID NO: 276513 - DNA, 1921 bp, Homo Sapiens; identical to SEQ ID NO: 253595
  misc_feature (1611)..(1611): n is a, c, g, or t
  misc_feature (1789)..(1797): n is a, c, g, or t

SEQ ID NO: 276514 - DNA, 662 bp, Homo Sapiens; identical to SEQ ID NO: 253601

SEQ ID NO: 276515 - DNA, 1117 bp, Homo Sapiens; identical to SEQ ID NO: 253602
  misc_feature (901)..(901): n is a, c, g, or t
  misc_feature (932)..(932): n is a, c, g, or t
  misc_feature (938)..(938): n is a, c, g, or t
  misc_feature (1003)..(1003): n is a, c, g, or t
  misc_feature (1008)..(1008): n is a, c, g, or t
  misc_feature (1022)..(1022): n is a, c, g, or t
  misc_feature (1081)..(1081): n is a, c, g, or t
  misc_feature (1091)..(1091): n is a, c, g, or t
  misc_feature (1103)..(1103): n is a, c, g, or t

SEQ ID NO: 276516 - DNA, 1394 bp, Homo Sapiens; identical to SEQ ID NO: 253603

SEQ ID NO: 276517 - DNA, 1001 bp, Homo Sapiens; identical to SEQ ID NO: 253604

SEQ ID NO: 276518 - DNA, 1115 bp, Homo Sapiens; identical to SEQ ID NO: 253607
  misc_feature (403)..(431): n is a, c, g, or t
  misc_feature (472)..(488): n is a, c, g, or t

SEQ ID NO: 276519 - DNA, 1210 bp, Homo Sapiens; identical to SEQ ID NO: 253608

SEQ ID NO: 276520 - DNA, 901 bp, Homo Sapiens; identical to SEQ ID NO: 253609

SEQ ID NO: 276521 - DNA, 736 bp, Homo Sapiens; identical to SEQ ID NO: 253610

SEQ ID NO: 276522 - DNA, 686 bp, Homo Sapiens; identical to SEQ ID NO: 253612

SEQ ID NO: 276523 - DNA, 618 bp, Homo Sapiens; identical to SEQ ID NO: 253613
  misc_feature (466)..(466): n is a, c, g, or t
  misc_feature (491)..(491): n is a, c, g, or t

SEQ ID NO: 276524 - DNA, 997 bp, Homo Sapiens; identical to SEQ ID NO: 253614

SEQ ID NO: 276525 - DNA, 1055 bp, Homo Sapiens; identical to SEQ ID NO: 253615
  misc_feature (125)..(244): n is a, c, g, or t
  misc_feature (496)..(505): n is a, c, g, or t

SEQ ID NO: 276526 - DNA, 751 bp, Homo Sapiens; identical to SEQ ID NO: 253622
  misc_feature (29)..(29): n is a, c, g, or t
  misc_feature (31)..(32): n is a, c, g, or t
  misc_feature (316)..(316): n is a, c, g, or t

SEQ ID NO: 276527 - DNA, 1064 bp, Homo Sapiens; identical to SEQ ID NO: 253623
  misc_feature (16)..(17): n is a, c, g, or t
  misc_feature (48)..(48): n is a, c, g, or t
  misc_feature (70)..(70): n is a, c, g, or t
  misc_feature (73)..(73): n is a, c, g, or t
  misc_feature (80)..(80): n is a, c, g, or t
  misc_feature (163)..(163): n is a, c, g, or t
  misc_feature (224)..(262): n is a, c, g, or t
  misc_feature (462)..(462): n is a, c, g, or t

SEQ ID NO: 276528 - DNA, 1606 bp, Homo Sapiens; identical to SEQ ID NO: 253624
  misc_feature (533)..(533): n is a, c, g, or t
  misc_feature (928)..(968): n is a, c, g, or t
  misc_feature (1545)..(1558): n is a, c, g, or t

SEQ ID NO: 276529 - DNA, 946 bp, Homo Sapiens; identical to SEQ ID NO: 253625
  misc_feature (394)..(434): n is a, c, g, or t

SEQ ID NO: 276530 - DNA, 616 bp, Homo Sapiens; identical to SEQ ID NO: 253626
  misc_feature (424)..(424): n is a, c, g, or t
  misc_feature (473)..(473): n is a, c, g, or t

SEQ ID NO: 276531 - DNA, 476 bp, Homo Sapiens; identical to SEQ ID NO: 253627

SEQ ID NO: 276532 - DNA, 351 bp, Homo Sapiens; identical to SEQ ID NO: 253630

SEQ ID NO: 276533 - DNA, 383 bp, Homo Sapiens; identical to SEQ ID NO: 253631

SEQ ID NO: 276534 - DNA, 1654 bp, Homo Sapiens; identical to SEQ ID NO: 253633

SEQ ID NO: 276535 - DNA, 507 bp, Homo Sapiens; identical to SEQ ID NO: 253634
  misc_feature (451)..(451): n is a, c, g, or t
  misc_feature (467)..(467): n is a, c, g, or t
  misc_feature (474)..(474): n is a, c, g, or t

SEQ ID NO: 276536 - DNA, 723 bp, Homo Sapiens; identical to SEQ ID NO: 253637

SEQ ID NO: 276537 - DNA, 370 bp, Homo Sapiens; identical to SEQ ID NO: 253638

SEQ ID NO: 276538 - DNA, 628 bp, Homo Sapiens; identical to SEQ ID NO: 253639

SEQ ID NO: 276539 - DNA, 637 bp, Homo Sapiens; identical to SEQ ID NO: 253641

SEQ ID NO: 276540 - DNA, 369 bp, Homo Sapiens; identical to SEQ ID NO: 253642

SEQ ID NO: 276541 - DNA, 2304 bp, Homo Sapiens; identical to SEQ ID NO: 253646
  misc_feature (944)..(944): n is a, c, g, or t
  misc_feature (947)..(947): n is a, c, g, or t
  misc_feature (1571)..(1633): n is a, c, g, or t

SEQ ID NO: 276542 - DNA, 1182 bp, Homo Sapiens; identical to SEQ ID NO: 253647
  misc_feature (17)..(17): n is a, c, g, or t
  misc_feature (99)..(99): n is a, c, g, or t
  misc_feature (222)..(222): n is a, c, g, or t
  misc_feature (435)..(435): n is a, c, g, or t
  misc_feature (496)..(555): n is a, c, g, or t

SEQ ID NO: 276543 - DNA, 376 bp, Homo Sapiens; identical to SEQ ID NO: 253648

SEQ ID NO: 276544 - DNA, 918 bp, Homo Sapiens; identical to SEQ ID NO: 253649

SEQ ID NO: 276545 - DNA, 389 bp, Homo Sapiens; identical to SEQ ID NO: 253652

SEQ ID NO: 276546 - DNA, 395 bp, Homo Sapiens; identical to SEQ ID NO: 253653
  misc_feature (359)..(359): n is a, c, g, or t

SEQ ID NO: 276547 - DNA, 1692 bp, Homo Sapiens; identical to SEQ ID NO: 253655

SEQ ID NO: 276548 - DNA, 649 bp, Homo Sapiens; identical to SEQ ID NO: 253656
  misc_feature (595)..(595): n is a, c, g, or t

SEQ ID NO: 276549 - DNA, 367 bp, Homo Sapiens; identical to SEQ ID NO: 253657

SEQ ID NO: 276550 - DNA, 772 bp, Homo Sapiens; identical to SEQ ID NO: 253658

SEQ ID NO: 276551 - DNA, 1603 bp, Homo Sapiens; identical to SEQ ID NO: 253659

SEQ ID NO: 276552 - DNA, 2560 bp, Homo Sapiens; identical to SEQ ID NO: 253665
  misc_feature (1950)..(1961): n is a, c, g, or t
  misc_feature (2109)..(2349): n is a, c, g, or t
  misc_feature (2351)..(2364): n is a, c, g, or t
  misc_feature (2418)..(2426): n is a, c, g, or t
  misc_feature (2443)..(2505): n is a, c, g, or t

SEQ ID NO: 276553 - DNA, 821 bp, Homo Sapiens; identical to SEQ ID NO: 253666
  misc_feature (594)..(594): n is a, c, g, or t
  misc_feature (723)..(738): n is a, c, g, or t

SEQ ID NO: 276554 - DNA, 486 bp, Homo Sapiens; identical to SEQ ID NO: 253667
  misc_feature (13)..(13): n is a, c, g, or t

SEQ ID NO: 276555 - DNA, 1206 bp, Homo Sapiens; identical to SEQ ID NO: 253669
  misc_feature (258)..(258): n is a, c, g, or t
  misc_feature (890)..(900): n is a, c, g, or t
  misc_feature (1080)..(1095): n is a, c, g, or t

SEQ ID NO: 276556 - DNA, 866 bp, Homo Sapiens; identical to SEQ ID NO: 7002
  misc_feature (785)..(785): n is a, c, g, or t
  misc_feature (788)..(818): n is a, c, g, or t

SEQ ID NO: 276557 - DNA, 613 bp, Homo Sapiens; identical to SEQ ID NO: 253671
  misc_feature (516)..(516): n is a, c, g, or t

SEQ ID NO: 276558 - DNA, 952 bp, Homo Sapiens; identical to SEQ ID NO: 253672

SEQ ID NO: 276559 - DNA, 403 bp, Homo Sapiens; identical to SEQ ID NO: 253674

SEQ ID NO: 276560 - DNA, 762 bp, Homo Sapiens; identical to SEQ ID NO: 253675

SEQ ID NO: 276561 - DNA, 366 bp, Homo Sapiens; identical to SEQ ID NO: 253681

SEQ ID NO: 276562 - DNA, 727 bp, Homo Sapiens; identical to SEQ ID NO: 253682

SEQ ID NO: 276563 - DNA, 627 bp, Homo Sapiens; identical to SEQ ID NO: 253684

SEQ ID NO: 276564 - DNA, 761 bp, Homo Sapiens; identical to SEQ ID NO: 253685

SEQ ID NO: 276565 - DNA, 635 bp, Homo Sapiens; identical to SEQ ID NO: 253689

SEQ ID NO: 276566 - DNA, 493 bp, Homo Sapiens; identical to SEQ ID NO: 253690
  misc_feature (396)..(396): n is a, c, g, or t
  misc_feature (432)..(432): n is a, c, g, or t
  misc_feature (460)..(460): n is a, c, g, or t

SEQ ID NO: 276567 - DNA, 804 bp, Homo Sapiens; identical to SEQ ID NO: 253691

SEQ ID NO: 276568 - DNA, 452 bp, Homo Sapiens; identical to SEQ ID NO: 253692

SEQ ID NO: 276569 - DNA, 291 bp, Homo Sapiens; identical to SEQ ID NO: 253693
  misc_feature (271)..(271): n is a, c, g, or t

SEQ ID NO: 276570 - DNA, 960 bp, Homo Sapiens; identical to SEQ ID NO: 253694

SEQ ID NO: 276571 - DNA, 2007 bp, Homo Sapiens; identical to SEQ ID NO: 253695

SEQ ID NO: 276572 - DNA, 376 bp, Homo Sapiens; identical to SEQ ID NO: 253699

SEQ ID NO: 276573 - DNA, 1024 bp, Homo Sapiens; identical to SEQ ID NO: 253700

SEQ ID NO: 276574 - DNA, 615 bp, Homo Sapiens; identical to SEQ ID NO: 253703

SEQ ID NO: 276575 - DNA, 1081 bp, Homo Sapiens; identical to SEQ ID NO: 253704
  misc_feature (16)..(16): n is a, c, g, or t
  misc_feature (28)..(28): n is a, c, g, or t
  misc_feature (50)..(50): n is a, c, g, or t
  misc_feature (53)..(53): n is a, c, g, or t
  misc_feature (77)..(77): n is a, c, g, or t
  misc_feature (97)..(97): n is a, c, g, or t
  misc_feature (179)..(179): n is a, c, g, or t
  misc_feature (194)..(194): n is a, c, g, or t

SEQ ID NO: 276576 - DNA, 950 bp, Homo Sapiens; identical to SEQ ID NO: 253705
  misc_feature (892)..(892): n is a, c, g, or t
  misc_feature (898)..(898): n is a, c, g, or t
  misc_feature (901)..(901): n is a, c, g, or t
  misc_feature (905)..(905): n is a, c, g, or t
  misc_feature (916)..(916): n is a, c, g, or t
  misc_feature (921)..(921): n is a, c, g, or t
  misc_feature (933)..(933): n is a, c, g, or t
  misc_feature (936)..(936): n is a, c, g, or t
  misc_feature (941)..(941): n is a, c, g, or t
  misc_feature (945)..(945): n is a, c, g, or t

SEQ ID NO: 276577 - DNA, 507 bp, Homo Sapiens; identical to SEQ ID NO: 253706

SEQ ID NO: 276578 - DNA, 615 bp, Homo Sapiens; identical to SEQ ID NO: 253708
  misc_feature (76)..(76): n is a, c, g, or t

SEQ ID NO: 276579 - DNA, 818 bp, Homo Sapiens; identical to SEQ ID NO: 253709
  misc_feature (693)..(693): n is a, c, g, or t
  misc_feature (725)..(725): n is a, c, g, or t
  misc_feature (749)..(749): n is a, c, g, or t
  misc_feature (767)..(767): n is a, c, g, or t
  misc_feature (796)..(796): n is a, c, g, or t

SEQ ID NO: 276580 - DNA, 742 bp, Homo Sapiens; identical to SEQ ID NO: 253710

SEQ ID NO: 276581 - DNA, 959 bp, Homo Sapiens; identical to SEQ ID NO: 253711
  misc_feature (899)..(899): n is a, c, g, or t
  misc_feature (906)..(906): n is a, c, g, or t
  misc_feature (936)..(936): n is a, c, g, or t

SEQ ID NO: 276582 - DNA, 414 bp, Homo Sapiens; identical to SEQ ID NO: 253713

SEQ ID NO: 276583 - DNA, 744 bp, Homo Sapiens; identical to SEQ ID NO: 253714
  misc_feature (698)..(698): n is a, c, g, or t
  misc_feature (714)..(714): n is a, c, g, or t

SEQ ID NO: 276584 - DNA, 577 bp, Homo Sapiens; identical to SEQ ID NO: 253715
  misc_feature (384)..(384): n is a, c, g, or t
  misc_feature (418)..(418): n is a, c, g, or t
  misc_feature (439)..(439): n is a, c, g, or t
  misc_feature (457)..(457): n is a, c, g, or t
  misc_feature (502)..(502): n is a, c, g, or t
  misc_feature (514)..(514): n is a, c, g, or t
  misc_feature (524)..(524): n is a, c, g, or t
  misc_feature (549)..(549): n is a, c, g, or t
  misc_feature (561)..(561): n is a, c, g, or t

SEQ ID NO: 276585 - DNA, 949 bp, Homo Sapiens; identical to SEQ ID NO: 253727
  misc_feature (601)..(601): n is a, c, g, or t

SEQ ID NO: 276586 - DNA, 920 bp, Homo Sapiens; identical to SEQ ID NO: 253728
  misc_feature (853)..(874): n is a, c, g, or t

SEQ ID NO: 276587 - DNA, 561 bp, Homo Sapiens; identical to SEQ ID NO: 253729

SEQ ID NO: 276588 - DNA, 1677 bp, Homo Sapiens; identical to SEQ ID NO: 253730

SEQ ID NO: 276589 - DNA, 366 bp, Homo Sapiens; identical to SEQ ID NO: 253731

SEQ ID NO: 276590 - DNA, 614 bp, Homo Sapiens; identical to SEQ ID NO: 253732

SEQ ID NO: 276591 - DNA, 834 bp, Homo Sapiens; identical to SEQ ID NO: 253733
  misc_feature (14)..(14): n is a, c, g, or t

SEQ ID NO: 276592 - DNA, 1277 bp, Homo Sapiens; identical to SEQ ID NO: 253734

SEQ ID NO: 276593 - DNA, 1099 bp, Homo Sapiens; identical to SEQ ID NO: 253735
  misc_feature (61)..(61): n is a, c, g, or t
  misc_feature (882)..(891): n is a, c, g, or t
  misc_feature (987)..(987): n is a, c, g, or t
  misc_feature (1023)..(1023): n is a, c, g, or t
  misc_feature (1031)..(1031): n is a, c, g, or t
  misc_feature (1054)..(1054): n is a, c, g, or t

SEQ ID NO: 276594 - DNA, 361 bp, Homo Sapiens; identical to SEQ ID NO: 253739

SEQ ID NO: 276595 - DNA, 1010 bp, Homo Sapiens; identical to SEQ ID NO: 253740
  misc_feature (655)..(655): n is a, c, g, or t
  misc_feature (666)..(690): n is a, c, g, or t

SEQ ID NO: 276596 - DNA, 1926 bp, Homo Sapiens; identical to SEQ ID NO: 253741
  misc_feature (1028)..(1041): n is a, c, g, or t
  misc_feature (1115)..(1125): n is a, c, g, or t

SEQ ID NO: 276597 - DNA, 1156 bp, Homo Sapiens; identical to SEQ ID NO: 253742
  misc_feature (198)..(198): n is a, c, g, or t

SEQ ID NO: 276598 - DNA, 853 bp, Homo Sapiens; identical to SEQ ID NO: 253743
  misc_feature (685)..(685): n is a, c, g, or t
  misc_feature (805)..(805): n is a, c, g, or t
  misc_feature (811)..(811): n is a, c, g, or t

SEQ ID NO: 276599 - DNA, 587 bp, Homo Sapiens; identical to SEQ ID NO: 253744
  misc_feature (216)..(464): n is a, c, g, or t

SEQ ID NO: 276600 - DNA, 626 bp, Homo Sapiens; identical to SEQ ID NO: 253745
  misc_feature (422)..(422): n is a, c, g, or t
  misc_feature (473)..(473): n is a, c, g, or t
  misc_feature (600)..(600): n is a, c, g, or t

SEQ ID NO: 276601 - DNA, 560 bp, Homo Sapiens; identical to SEQ ID NO: 253746
  misc_feature (25)..(25): n is a, c, g, or t
  misc_feature (42)..(42): n is a, c, g, or t
  misc_feature (62)..(62): n is a, c, g, or t

SEQ ID NO: 276602 - DNA, 1231 bp, Homo Sapiens; identical to SEQ ID NO: 253747
  misc_feature (56)..(56): n is a, c, g, or t
  misc_feature (1024)..(1024): n is a, c, g, or t
  misc_feature (1179)..(1179): n is a, c, g, or t

SEQ ID NO: 276603 - DNA, 773 bp, Homo Sapiens; identical to SEQ ID NO: 253748

SEQ ID NO: 276604 - DNA, 453 bp, Homo Sapiens; identical to SEQ ID NO: 253749

SEQ ID NO: 276605 - DNA, 2448 bp, Homo Sapiens; identical to SEQ ID NO: 253751
  misc_feature (2263)..(2263): n is a, c, g, or t
  misc_feature (2309)..(2309): n is a, c, g, or t
  misc_feature (2314)..(2314): n is a, c, g, or t
  misc_feature (2330)..(2330): n is a, c, g, or t
  misc_feature (2349)..(2349): n is a, c, g, or t

SEQ ID NO: 276606 - DNA, 399 bp, Homo Sapiens; identical to SEQ ID NO: 253752

SEQ ID NO: 276607 - DNA, 1171 bp, Homo Sapiens; identical to SEQ ID NO: 253757
  misc_feature (46)..(58): n is a, c, g, or t
  misc_feature (338)..(365): n is a, c, g, or t

SEQ ID NO: 276608 - DNA, 373 bp, Homo Sapiens; identical to SEQ ID NO: 253758

SEQ ID NO: 276609 - DNA, 608 bp, Homo Sapiens; identical to SEQ ID NO: 253759
  misc_feature (342)..(342): n is a, c, g, or t
  misc_feature (360)..(360): n is a, c, g, or t
  misc_feature (367)..(367): n is a, c, g, or t
  misc_feature (370)..(370): n is a, c, g, or t
  misc_feature (387)..(387): n is a, c, g, or t

SEQ ID NO: 276610 - DNA, 999 bp, Homo Sapiens; identical to SEQ ID NO: 253760
  misc_feature (483)..(525): n is a, c, g, or t

SEQ ID NO: 276611 - DNA, 574 bp, Homo Sapiens; identical to SEQ ID NO: 253763

SEQ ID NO: 276612 - DNA, 318 bp, Homo Sapiens; identical to SEQ ID NO: 253764

SEQ ID NO: 276613 - DNA, 1296 bp, Homo Sapiens; identical to SEQ ID NO: 253766
  misc_feature (158)..(159): n is a, c, g, or t
  misc_feature (163)..(164): n is a, c, g, or t
  misc_feature (166)..(166): n is a, c, g, or t
  misc_feature (169)..(169): n is a, c, g, or t
  misc_feature (171)..(171): n is a, c, g, or t
  misc_feature (174)..(174): n is a, c, g, or t
  misc_feature (179)..(180): n is a, c, g, or t
  misc_feature (240)..(240): n is a, c, g, or t
  misc_feature (261)..(262): n is a, c, g, or t
  misc_feature (265)..(266): n is a, c, g, or t
  misc_feature (273)..(273): n is a, c, g, or t
  misc_feature (298)..(298): n is a, c, g, or t
  misc_feature (307)..(307): n is a, c, g, or t
  misc_feature (312)..(312): n is a, c, g, or t
  misc_feature (320)..(320): n is a, c, g, or t
  misc_feature (332)..(332): n is a, c, g, or t
  misc_feature (339)..(339): n is a, c, g, or t
  misc_feature (342)..(342): n is a, c, g, or t
  misc_feature (344)..(344): n is a, c, g, or t
  misc_feature (358)..(358): n is a, c, g, or t
  misc_feature (374)..(374): n is a, c, g, or t
  misc_feature (376)..(376): n is a, c, g, or t
  misc_feature (401)..(401): n is a, c, g, or t
  misc_feature (415)..(415): n is a, c, g, or t
  misc_feature (438)..(438): n is a, c, g, or t
  misc_feature (441)..(441): n is a, c, g, or t
  misc_feature (446)..(446): n is a, c, g, or t
  misc_feature (458)..(458): n is a, c, g, or t
  misc_feature (463)..(463): n is a, c, g, or t
  misc_feature (466)..(466): n is a, c, g, or t

SEQ ID NO: 276614 - DNA, 570 bp, Homo Sapiens; identical to SEQ ID NO: 253767

SEQ ID NO: 276615 - DNA, 745 bp, Homo Sapiens; identical to SEQ ID NO: 253773

SEQ ID NO: 276616 - DNA, 1283 bp, Homo Sapiens; identical to SEQ ID NO: 253774

SEQ ID NO: 276617 - DNA, 699 bp, Homo Sapiens; identical to SEQ ID NO: 253775

SEQ ID NO: 276618 - DNA, 628 bp, Homo Sapiens; identical to SEQ ID NO: 253777
  misc_feature (43)..(43): n is a, c, g, or t
  misc_feature (61)..(61): n is a, c, g, or t

SEQ ID NO: 276619 - DNA, 622 bp, Homo Sapiens; identical to SEQ ID NO: 253778
  misc_feature (414)..(414): n is a, c, g, or t
  misc_feature (588)..(588): n is a, c, g, or t

SEQ ID NO: 276620 - DNA, 720 bp, Homo Sapiens; identical to SEQ ID NO: 253779

SEQ ID NO: 276621 - DNA, 646 bp, Homo Sapiens; identical to SEQ ID NO: 253781

SEQ ID NO: 276622 - DNA, 950 bp, Homo Sapiens; identical to SEQ ID NO: 253782
  misc_feature (313)..(313): n is a, c, g, or t

SEQ ID NO: 276623 - DNA, 667 bp, Homo Sapiens; identical to SEQ ID NO: 253783

SEQ ID NO: 276624 - DNA, 827 bp, Homo Sapiens; identical to SEQ ID NO: 253784

SEQ ID NO: 276625 - DNA, 1068 bp, Homo Sapiens; identical to SEQ ID NO: 253786
  misc_feature (381)..(381): n is a, c, g, or t

SEQ ID NO: 276626 - DNA, 433 bp, Homo Sapiens; identical to SEQ ID NO: 253787

SEQ ID NO: 276627 - DNA, 428 bp, Homo Sapiens; identical to SEQ ID NO: 253788
  misc_feature (93)..(93): n is a, c, g, or t
  misc_feature (104)..(104): n is a, c, g, or t
  misc_feature (363)..(363): n is a, c, g, or t

SEQ ID NO: 276628 - DNA, 1703 bp, Homo Sapiens; identical to SEQ ID NO: 253789
  misc_feature (161)..(224): n is a, c, g, or t
  misc_feature (1629)..(1647): n is a, c, g, or t

SEQ ID NO: 276629 - DNA, 959 bp, Homo Sapiens; identical to SEQ ID NO: 253790
  misc_feature (884)..(902): n is a, c, g, or t

SEQ ID NO: 276630 - DNA, 441 bp, Homo Sapiens; identical to SEQ ID NO: 253791
  misc_feature (42)..(42): n is a, c, g, or t
  misc_feature (47)..(47): n is a, c, g, or t
  misc_feature (431)..(431): n is a, c, g, or t

SEQ ID NO: 276631 - DNA, 777 bp, Homo Sapiens; identical to SEQ ID NO: 253797
  misc_feature (41)..(54): n is a, c, g, or t
  misc_feature (74)..(87): n is a, c, g, or t

SEQ ID NO: 276632 - DNA, 1254 bp, Homo Sapiens; identical to SEQ ID NO: 253798
  misc_feature (937)..(951): n is a, c, g, or t
  misc_feature (971)..(984): n is a, c, g, or t
  misc_feature (1107)..(1107): n is a, c, g, or t

SEQ ID NO: 276633 - DNA, 637 bp, Homo Sapiens; identical to SEQ ID NO: 253799

SEQ ID NO: 276634 - DNA, 664 bp, Homo Sapiens; identical to SEQ ID NO: 253800

SEQ ID NO: 276635 - DNA, 617 bp, Homo Sapiens; identical to SEQ ID NO: 253801

SEQ ID NO: 276636 - DNA, 637 bp, Homo Sapiens; identical to SEQ ID NO: 253802

SEQ ID NO: 276637 - DNA, 626 bp, Homo Sapiens; identical to SEQ ID NO: 253803
  misc_feature (434)..(434): n is a, c, g, or t

SEQ ID NO: 276638 - DNA, 1744 bp, Homo Sapiens; identical to SEQ ID NO: 253804
  misc_feature (524)..(524): n is a, c, g, or t
  misc_feature (1650)..(1650): n is a, c, g, or t
  misc_feature (1703)..(1703): n is a, c, g, or t
  misc_feature (1733)..(1733): n is a, c, g, or t

SEQ ID NO: 276639 - DNA, 1028 bp, Homo Sapiens; identical to SEQ ID NO: 253805
  misc_feature (260)..(273): n is a, c, g, or t

SEQ ID NO: 276640 - DNA, 363 bp, Homo Sapiens; identical to SEQ ID NO: 253806
  misc_feature (11)..(11): n is a, c, g, or t

SEQ ID NO: 276641 - DNA, 1534 bp, Homo Sapiens; identical to SEQ ID NO: 253807
  misc_feature (149)..(149): n is a, c, g, or t
  misc_feature (349)..(349): n is a, c, g, or t

SEQ ID NO: 276642 - DNA, 643 bp, Homo Sapiens; identical to SEQ ID NO: 253808

SEQ ID NO: 276643 - DNA, 375 bp, Homo Sapiens; identical to SEQ ID NO: 253809
  misc_feature (202)..(202): n is a, c, g, or t

SEQ ID NO: 276644 - DNA, 1450 bp, Homo Sapiens; identical to SEQ ID NO: 253810
  misc_feature (217)..(260): n is a, c, g, or t

SEQ ID NO: 276645 - DNA, 962 bp, Homo Sapiens; identical to SEQ ID NO: 253811
  misc_feature (108)..(156): n is a, c, g, or t
  misc_feature (182)..(182): n is a, c, g, or t
  misc_feature (184)..(184): n is a, c, g, or t
  misc_feature (186)..(186): n is a, c, g, or t

SEQ ID NO: 276646 - DNA, 601 bp, Homo Sapiens; identical to SEQ ID NO: 253813

SEQ ID NO: 276647 - DNA, 1324 bp, Homo Sapiens; identical to SEQ ID NO: 253814
  misc_feature (776)..(914): n is a, c, g, or t
  misc_feature (924)..(938): n is a, c, g, or t
  misc_feature (982)..(1031): n is a, c, g, or t
  misc_feature (1049)..(1057): n is a, c, g, or t
  misc_feature (1159)..(1167): n is a, c, g, or t
  misc_feature (1208)..(1216): n is a, c, g, or t

SEQ ID NO: 276648 - DNA, 799 bp, Homo Sapiens; identical to SEQ ID NO: 74095

SEQ ID NO: 276649 - DNA, 814 bp, Homo Sapiens; identical to SEQ ID NO: 253816

SEQ ID NO: 276650 - DNA, 664 bp, Homo Sapiens; identical to SEQ ID NO: 253822
  misc_feature (647)..(647): n is a, c, g, or t

SEQ ID NO: 276651 - DNA, 781 bp, Homo Sapiens; identical to SEQ ID NO: 253823
  misc_feature (545)..(545): n is a, c, g, or t

SEQ ID NO: 276652 - DNA, 741 bp, Homo Sapiens; identical to SEQ ID NO: 253829
  misc_feature (396)..(396): n is a, c, g, or t
  misc_feature (623)..(623): n is a, c, g, or t

SEQ ID NO: 276653 - DNA, 1308 bp, Homo Sapiens; identical to SEQ ID NO: 253830
  misc_feature (1054)..(1116): n is a, c, g, or t
  misc_feature (1269)..(1269): n is a, c, g, or t
  misc_feature (1303)..(1303): n is a, c, g, or t

SEQ ID NO: 276654 - DNA, 696 bp, Homo Sapiens; identical to SEQ ID NO: 253831
  misc_feature (104)..(104): n is a, c, g, or t
  misc_feature (116)..(116): n is a, c, g, or t
  misc_feature (119)..(119): n is a, c, g, or t
  misc_feature (130)..(130): n is a, c, g, or t
  misc_feature (454)..(499): n is a, c, g, or t

SEQ ID NO: 276655 - DNA, 1460 bp, Homo Sapiens; identical to SEQ ID NO: 253832

SEQ ID NO: 276656 - DNA, 379 bp, Homo Sapiens; identical to SEQ ID NO: 253833
  misc_feature (24)..(24): n is a, c, g, or t

SEQ ID NO: 276657 - DNA, 375 bp, Homo Sapiens; identical to SEQ ID NO: 253834
  misc_feature (21)..(21): n is a, c, g, or t
  misc_feature (115)..(175): n is a, c, g, or t

SEQ ID NO: 276658 - DNA, 400 bp, Homo Sapiens; identical to SEQ ID NO: 253835
  misc_feature (89)..(134): n is a, c, g, or t

SEQ ID NO: 276659 - DNA, 417 bp, Homo Sapiens; identical to SEQ ID NO: 253843

SEQ ID NO: 276660 - DNA, 2252 bp, Homo Sapiens; identical to SEQ ID NO: 253844
  misc_feature (2197)..(2197): n is a, c, g, or t

SEQ ID NO: 276661 - DNA, 1971 bp, Homo Sapiens; identical to SEQ ID NO: 253845

SEQ ID NO: 276662 - DNA, 1223 bp, Homo Sapiens; identical to SEQ ID NO: 253846
  misc_feature (1151)..(1180): n is a, c, g, or t

SEQ ID NO: 276663 - DNA, 351 bp, Homo Sapiens; identical to SEQ ID NO: 253853

SEQ ID NO: 276664 - DNA, 796 bp, Homo Sapiens; identical to SEQ ID NO: 253854

SEQ ID NO: 276665 - DNA, 1006 bp, Homo Sapiens; identical to SEQ ID NO: 253855
  misc_feature (683)..(683): n is a, c, g, or t
  misc_feature (748)..(748): n is a, c, g, or t
  misc_feature (761)..(761): n is a, c, g, or t

SEQ ID NO: 276666 - DNA, 842 bp, Homo Sapiens; identical to SEQ ID NO: 253856
  misc_feature (748)..(748): n is a, c, g, or t
  misc_feature (816)..(816): n is a, c, g, or t
  misc_feature (832)..(832): n is a, c, g, or t

SEQ ID NO: 276667 - DNA, 1078 bp, Homo Sapiens; identical to SEQ ID NO: 253857

SEQ ID NO: 276668 - DNA, 670 bp, Homo Sapiens; identical to SEQ ID NO: 253858
  misc_feature (358)..(472): n is a, c, g, or t
  misc_feature (495)..(495): n is a, c, g, or t
  misc_feature (543)..(543): n is a, c, g, or t
  misc_feature (586)..(586): n is a, c, g, or t
  misc_feature (594)..(594): n is a, c, g, or t
  misc_feature (621)..(621): n is a, c, g, or t
  misc_feature (630)..(630): n is a, c, g, or t

SEQ ID NO: 276669 - DNA, 815 bp, Homo Sapiens; identical to SEQ ID NO: 253859
  misc_feature (80)..(108): n is a, c, g, or t
  misc_feature (122)..(238): n is a, c, g, or t
  misc_feature (712)..(739): n is a, c, g, or t

SEQ ID NO: 276670 - DNA, 870 bp, Homo Sapiens; identical to SEQ ID NO: 253860
  misc_feature (50)..(50): n is a, c, g, or t
  misc_feature (56)..(155): n is a, c, g, or t

SEQ ID NO: 276671 - DNA, 535 bp, Homo Sapiens; identical to SEQ ID NO: 253861
  misc_feature (365)..(365): n is a, c, g, or t
  misc_feature (386)..(386): n is a, c, g, or t
  misc_feature (420)..(420): n is a, c, g, or t
  misc_feature (438)..(438): n is a, c, g, or t
  misc_feature (447)..(447): n is a, c, g, or t
  misc_feature (456)..(456): n is a, c, g, or t
  misc_feature (461)..(461): n is a, c, g, or t
  misc_feature (490)..(490): n is a, c, g, or t
  misc_feature (518)..(518): n is a, c, g, or t

SEQ ID NO: 276672 - DNA, 615 bp, Homo Sapiens; identical to SEQ ID NO: 253866

SEQ ID NO: 276673 - DNA, 1003 bp, Homo Sapiens; identical to SEQ ID NO: 253867
  misc_feature (58)..(112): n is a, c, g, or t

SEQ ID NO: 276674 - DNA, 438 bp, Homo Sapiens; identical to SEQ ID NO: 253868
  misc_feature (26)..(26): n is a, c, g, or t
  misc_feature (69)..(69): n is a, c, g, or t
  misc_feature (77)..(77): n is a, c, g, or t

SEQ ID NO: 276675 - DNA, 1844 bp, Homo Sapiens; identical to SEQ ID NO: 5076

SEQ ID NO: 276676 - DNA, 1018 bp, Homo Sapiens; identical to SEQ ID NO: 253871

SEQ ID NO: 276677 - DNA, 594 bp, Homo Sapiens; identical to SEQ ID NO: 253872

SEQ ID NO: 276678 - DNA, 972 bp, Homo Sapiens; identical to SEQ ID NO: 253873
  misc_feature (17)..(17): n is a, c, g, or t
  misc_feature (869)..(869): n is a, c, g, or t

SEQ ID NO: 276679 - DNA, 864 bp, Homo Sapiens; identical to SEQ ID NO: 253874
  misc_feature (684)..(684): n is a, c, g, or t

SEQ ID NO: 276680 - DNA, 506 bp, Homo Sapiens; identical to SEQ ID NO: 253875
  misc_feature (22)..(22): n is a, c, g, or t
  misc_feature (27)..(27): n is a, c, g, or t

SEQ ID NO: 276681 - DNA, 1066 bp, Homo Sapiens; identical to SEQ ID NO: 253876
  misc_feature (628)..(628): n is a, c, g, or t
  misc_feature (918)..(926): n is a, c, g, or t
  misc_feature (955)..(963): n is a, c, g, or t

SEQ ID NO: 276682 - DNA, 1355 bp, Homo Sapiens; identical to SEQ ID NO: 253877
  misc_feature (998)..(999): n is a, c, g, or t
  misc_feature (1197)..(1208): n is a, c, g, or t
  misc_feature (1230)..(1240): n is a, c, g, or t

SEQ ID NO: 276683 - DNA, 526 bp, Homo Sapiens; identical to SEQ ID NO: 253878
  misc_feature (34)..(34): n is a, c, g, or t
  misc_feature (47)..(47): n is a, c, g, or t
  misc_feature (70)..(70): n is a, c, g, or t
  misc_feature (85)..(85): n is a, c, g, or t
  misc_feature (113)..(113): n is a, c, g, or t

SEQ ID NO: 276684 - DNA, 516 bp, Homo Sapiens; identical to SEQ ID NO: 253879
  misc_feature (467)..(467): n is a, c, g, or t
  misc_feature (476)..(476): n is a, c, g, or t

SEQ ID NO: 276685 - DNA, 1696 bp, Homo Sapiens; identical to SEQ ID NO: 253887

SEQ ID NO: 276686 - DNA, 453 bp, Homo Sapiens; identical to SEQ ID NO: 253888

SEQ ID NO: 276687 - DNA, 368 bp, Homo Sapiens; identical to SEQ ID NO: 253889
  misc_feature (33)..(33): n is a, c, g, or t

SEQ ID NO: 276688 - DNA, 1370 bp, Homo Sapiens; identical to SEQ ID NO: 253890
  misc_feature (751)..(786): n is a, c, g, or t

SEQ ID NO: 276689 - DNA, 1138 bp, Homo Sapiens; identical to SEQ ID NO: 253891

SEQ ID NO: 276690 - DNA, 926 bp, Homo Sapiens; identical to SEQ ID NO: 253895

SEQ ID NO: 276691 - DNA, 1414 bp, Homo Sapiens; identical to SEQ ID NO: 253896
  misc_feature (493)..(608): n is a, c, g, or t
  misc_feature (619)..(635): n is a, c, g, or t
  misc_feature (842)..(875): n is a, c, g, or t
  misc_feature (889)..(897): n is a, c, g, or t
  misc_feature (935)..(949): n is a, c, g, or t
  misc_feature (1169)..(1191): n is a, c, g, or t

SEQ ID NO: 276692 - DNA, 357 bp, Homo Sapiens; identical to SEQ ID NO: 253899

SEQ ID NO: 276693 - DNA, 865 bp, Homo Sapiens; identical to SEQ ID NO: 253900

SEQ ID NO: 276694 - DNA, 353 bp, Homo Sapiens; identical to SEQ ID NO: 253901

SEQ ID NO: 276695 - DNA, 1781 bp, Homo Sapiens; identical to SEQ ID NO: 253902
  misc_feature (1517)..(1558): n is a, c, g, or t

SEQ ID NO: 276696 - DNA, 455 bp, Homo Sapiens; identical to SEQ ID NO: 253903
  misc_feature (15)..(15): n is a, c, g, or t
  misc_feature (33)..(33): n is a, c, g, or t
  misc_feature (78)..(78): n is a, c, g, or t
  misc_feature (92)..(92): n is a, c, g, or t

SEQ ID NO: 276697 - DNA, 391 bp, Homo Sapiens; identical to SEQ ID NO: 253906

SEQ ID NO: 276698 - DNA, 1295 bp, Homo Sapiens; identical to SEQ ID NO: 253907
  misc_feature (1071)..(1100): n is a, c, g, or t

SEQ ID NO: 276699 - DNA, 1225 bp, Homo Sapiens; identical to SEQ ID NO: 253911
  misc_feature (840)..(840): n is a, c, g, or t
  misc_feature (1137)..(1137): n is a, c, g, or t
  misc_feature (1148)..(1148): n is a, c, g, or t
  misc_feature (1169)..(1169): n is a, c, g, or t

SEQ ID NO: 276700 - DNA, 1075 bp, Homo Sapiens; identical to SEQ ID NO: 253912
  misc_feature (917)..(918): n is a, c, g, or t
  misc_feature (1005)..(1006): n is a, c, g, or t
  misc_feature (1021)..(1021): n is a, c, g, or t

SEQ ID NO: 276701 - DNA, 861 bp, Homo Sapiens; identical to SEQ ID NO: 253913
  misc_feature (181)..(181): n is a, c, g, or t

SEQ ID NO: 276702 - DNA, 846 bp, Homo Sapiens; identical to SEQ ID NO: 253914

SEQ ID NO: 276703 - DNA, 360 bp, Homo Sapiens; identical to SEQ ID NO: 253917

SEQ ID NO: 276704 - DNA, 868 bp, Homo Sapiens; identical to SEQ ID NO: 253918

SEQ ID NO: 276705 - DNA, 721 bp, Homo Sapiens; identical to SEQ ID NO: 253919
  misc_feature (669)..(669): n is a, c, g, or t
  misc_feature (677)..(677): n is a, c, g, or t

SEQ ID NO: 276706 - DNA, 947 bp, Homo Sapiens; identical to SEQ ID NO: 253920
  misc_feature (811)..(811): n is a, c, g, or t

SEQ ID NO: 276707 - DNA, 970 bp, Homo Sapiens; identical to SEQ ID NO: 253921
  misc_feature (6)..(6): n is a, c, g, or t
  misc_feature (11)..(11): n is a, c, g, or t
  misc_feature (13)..(13): n is a, c, g, or t
  misc_feature (21)..(21): n is a, c, g, or t
  misc_feature (25)..(26): n is a, c, g, or t
  misc_feature (36)..(37): n is a, c, g, or t
  misc_feature (56)..(56): n is a, c, g, or t
  misc_feature (60)..(60): n is a, c, g, or t
  misc_feature (71)..(71): n is a, c, g, or t
  misc_feature (86)..(86): n is a, c, g, or t
  misc_feature (98)..(98): n is a, c, g, or t

SEQ ID NO: 276708 - DNA, 1252 bp, Homo Sapiens; identical to SEQ ID NO: 253922
  misc_feature (1071)..(1162): n is a, c, g, or t

SEQ ID NO: 276709 - DNA, 1222 bp, Homo Sapiens; identical to SEQ ID NO: 253923
  misc_feature (199)..(290): n is a, c, g, or t
  misc_feature (395)..(403): n is a, c, g, or t
  misc_feature (405)..(414): n is a, c, g, or t
  misc_feature (416)..(437): n is a, c, g, or t
  misc_feature (441)..(441): n is a, c, g, or t
  misc_feature (443)..(444): n is a, c, g, or t
  misc_feature (446)..(452): n is a, c, g, or t
  misc_feature (454)..(455): n is a, c, g, or t
  misc_feature (461)..(463): n is a, c, g, or t
  misc_feature (474)..(476): n is a, c, g, or t
  misc_feature (610)..(671): n is a, c, g, or t
  misc_feature (708)..(708): n is a, c, g, or t
  misc_feature (724)..(733): n is a, c, g, or t

SEQ ID NO: 276710 - DNA, 401 bp, Homo Sapiens; identical to SEQ ID NO: 253924

SEQ ID NO: 276711 - DNA, 1279 bp, Homo Sapiens; identical to SEQ ID NO: 253925

SEQ ID NO: 276712 - DNA, 2095 bp, Homo Sapiens; identical to SEQ ID NO: 253926
  misc_feature (626)..(626): n is a, c, g, or t

SEQ ID NO: 276713 - DNA, 1140 bp, Homo Sapiens; identical to SEQ ID NO: 253928
  misc_feature (126)..(142): n is a, c, g, or t

SEQ ID NO: 276714 - DNA, 524 bp, Homo Sapiens; identical to SEQ ID NO: 253929
  misc_feature (444)..(460): n is a, c, g, or t

SEQ ID NO: 276715 - DNA, 817 bp, Homo Sapiens; identical to SEQ ID NO: 253930
  misc_feature (358)..(358): n is a, c, g, or t

SEQ ID NO: 276716 - DNA, 544 bp, Homo Sapiens; identical to SEQ ID NO: 253931

SEQ ID NO: 276717 - DNA, 356 bp, Homo Sapiens; identical to SEQ ID NO: 253932

SEQ ID NO: 276718 - DNA, 809 bp, Homo Sapiens; identical to SEQ ID NO: 253934
  misc_feature (20)..(20): n is a, c, g, or t
  misc_feature (58)..(58): n is a, c, g, or t
  misc_feature (90)..(90): n is a, c, g, or t
  misc_feature (98)..(110): n is a, c, g, or t
  misc_feature (117)..(137): n is a, c, g, or t

SEQ ID NO: 276719 - DNA, 1446 bp, Homo Sapiens; identical to SEQ ID NO: 253935
  misc_feature (461)..(471): n is a, c, g, or t
  misc_feature (1006)..(1024): n is a, c, g, or t
  misc_feature (1033)..(1071): n is a, c, g, or t
  misc_feature (1118)..(1190): n is a, c, g, or t
  misc_feature (1230)..(1238): n is a, c, g, or t

SEQ ID NO: 276720 - DNA, 1491 bp, Homo Sapiens; identical to SEQ ID NO: 253937
  misc_feature (78)..(78): n is a, c, g, or t
  misc_feature (134)..(134): n is a, c, g, or t
  misc_feature (150)..(150): n is a, c, g, or t
  misc_feature (157)..(157): n is a, c, g, or t
  misc_feature (185)..(185): n is a, c, g, or t
  misc_feature (198)..(198): n is a, c, g, or t
  misc_feature (207)..(207): n is a, c, g, or t
  misc_feature (213)..(213): n is a, c, g, or t
  misc_feature (258)..(258): n is a, c, g, or t
  misc_feature (307)..(307): n is a, c, g, or t
  misc_feature (333)..(333): n is a, c, g, or t
  misc_feature (396)..(396): n is a, c, g, or t
  misc_feature (487)..(487): n is a, c, g, or t
  misc_feature (606)..(606): n is a, c, g, or t

SEQ ID NO: 276721 - DNA, 566 bp, Homo Sapiens; identical to SEQ ID NO: 253938

SEQ ID NO: 276722 - DNA, 910 bp, Homo Sapiens; identical to SEQ ID NO: 253939

SEQ ID NO: 276723 - DNA, 1070 bp, Homo Sapiens; identical to SEQ ID NO: 253941
  misc_feature (62)..(77): n is a, c, g, or t
  misc_feature (893)..(893): n is a, c, g, or t
  misc_feature (895)..(895): n is a, c, g, or t
  misc_feature (906)..(906): n is a, c, g, or t
  misc_feature (913)..(913): n is a, c, g, or t
  misc_feature (965)..(965): n is a, c, g, or t
  misc_feature (977)..(977): n is a, c, g, or t
  misc_feature (979)..(979): n is a, c, g, or t
  misc_feature (985)..(986): n is a, c, g, or t
  misc_feature (992)..(992): n is a, c, g, or t
  misc_feature (1020)..(1020): n is a, c, g, or t
  misc_feature (1043)..(1043): n is a, c, g, or t
  misc_feature (1067)..(1067): n is a, c, g, or t

SEQ ID NO: 276724 - DNA, 1638 bp, Homo Sapiens; identical to SEQ ID NO: 253942
  misc_feature (1553)..(1591): n is a, c, g, or t
  misc_feature (1607)..(1607): n is a, c, g, or t

SEQ ID NO: 276725 - DNA, 1584 bp, Homo Sapiens; identical to SEQ ID NO: 253943
  misc_feature (1201)..(1201): n is a, c, g, or t
  misc_feature (1481)..(1521): n is a, c, g, or t
  misc_feature (1574)..(1574): n is a, c, g, or t
  misc_feature (1576)..(1576): n is a, c, g, or t

SEQ ID NO: 276726 - DNA, 927 bp, Homo Sapiens; identical to SEQ ID NO: 253944
  misc_feature (357)..(396): n is a, c, g, or t
  misc_feature (478)..(549): n is a, c, g, or t
  misc_feature (578)..(578): n is a, c, g, or t
  misc_feature (582)..(582): n is a, c, g, or t
  misc_feature (584)..(588): n is a, c, g, or t
  misc_feature (696)..(761): n is a, c, g, or t

SEQ ID NO: 276727 - DNA, 376 bp, Homo Sapiens; identical to SEQ ID NO: 253945
  misc_feature (258)..(315): n is a, c, g, or t

SEQ ID NO: 276728 - DNA, 387 bp, Homo Sapiens; identical to SEQ ID NO: 253946

SEQ ID NO: 276729 - DNA, 823 bp, Homo Sapiens; identical to SEQ ID NO: 253947
  misc_feature (626)..(663): n is a, c, g, or t

SEQ ID NO: 276730 - DNA, 408 bp, Homo Sapiens; identical to SEQ ID NO: 253961
  misc_feature (113)..(223): n is a, c, g, or t

SEQ ID NO: 276731 - DNA, 1349 bp, Homo Sapiens; identical to SEQ ID NO: 253962
  misc_feature (152)..(258): n is a, c, g, or t
  misc_feature (1314)..(1314): n is a, c, g, or t
  misc_feature (1316)..(1316): n is a, c, g, or t
  misc_feature (1321)..(1321): n is a, c, g, or t

SEQ ID NO: 276732 - DNA, 612 bp, Homo Sapiens; identical to SEQ ID NO: 253966

SEQ ID NO: 276733 - DNA, 197 bp, Homo Sapiens; identical to SEQ ID NO: 253967

SEQ ID NO: 276734 - DNA, 731 bp, Homo Sapiens; identical to SEQ ID NO: 253970

SEQ ID NO: 276735 - DNA, 610 bp, Homo Sapiens; identical to SEQ ID NO: 253971
  misc_feature (336)..(336): n is a, c, g, or t
  misc_feature (509)..(509): n is a, c, g, or t

SEQ ID NO: 276736 - DNA, 365 bp, Homo Sapiens; identical to SEQ ID NO: 253981

SEQ ID NO: 276737 - DNA, 941 bp, Homo Sapiens; identical to SEQ ID NO: 253982
  misc_feature (135)..(135): n is a, c, g, or t
  misc_feature (230)..(230): n is a, c, g, or t
  misc_feature (929)..(929): n is a, c, g, or t

SEQ ID NO: 276738 - DNA, 1610 bp, Homo Sapiens; identical to SEQ ID NO: 253983

SEQ ID NO: 276739 - DNA, 633 bp, Homo Sapiens; identical to SEQ ID NO: 253984
  misc_feature (18)..(18): n is a, c, g, or t
  misc_feature (68)..(68): n is a, c, g, or t

SEQ ID NO: 276740 - DNA, 910 bp, Homo Sapiens; identical to SEQ ID NO: 253987

SEQ ID NO: 276741 - DNA, 1013 bp, Homo Sapiens; identical to SEQ ID NO: 253988

SEQ ID NO: 276742 - DNA, 942 bp, Homo Sapiens; identical to SEQ ID NO: 253989

SEQ ID NO: 276743 - DNA, 2594 bp, Homo Sapiens; identical to SEQ ID NO: 253992
  misc_feature (1461)..(1531): n is a, c, g, or t
  misc_feature (1974)..(1998): n is a, c, g, or t
  misc_feature (2069)..(2171): n is a, c, g, or t
  misc_feature (2178)..(2192): n is a, c, g, or t
  misc_feature (2261)..(2412): n is a, c, g, or t
  misc_feature (2426)..(2439): n is a, c, g, or t
  misc_feature (2462)..(2471): n is a, c, g, or t
  misc_feature (2522)..(2522): n is a, c, g, or t
  misc_feature (2526)..(2534): n is a, c, g, or t

SEQ ID NO: 276744 - DNA, 557 bp, Homo Sapiens; identical to SEQ ID NO: 253993
  misc_feature (14)..(14): n is a, c, g, or t
  misc_feature (29)..(29): n is a, c, g, or t
  misc_feature (48)..(48): n is a, c, g, or t
  misc_feature (58)..(58): n is a, c, g, or t
  misc_feature (63)..(63): n is a, c, g, or t
  misc_feature (73)..(73): n is a, c, g, or t

SEQ ID NO: 276745 - DNA, 348 bp, Homo Sapiens; identical to SEQ ID NO: 253995

SEQ ID NO: 276746 - DNA, 788 bp, Homo Sapiens; identical to SEQ ID NO: 253996
  misc_feature (387)..(387): n is a, c, g, or t

SEQ ID NO: 276747 - DNA, 456 bp, Homo Sapiens; identical to SEQ ID NO: 253997
  misc_feature (42)..(42): n is a, c, g, or t
  misc_feature (191)..(191): n is a, c, g, or t

SEQ ID NO: 276748 - DNA, 378 bp, Homo Sapiens; identical to SEQ ID NO: 253998

SEQ ID NO: 276749 - DNA, 1069 bp, Homo Sapiens; identical to SEQ ID NO: 253999
  misc_feature (102)..(151): n is a, c, g, or t
  misc_feature (539)..(547): n is a, c, g, or t
  misc_feature (1023)..(1023): n is a, c, g, or t

SEQ ID NO: 276750 - DNA, 1492 bp, Homo Sapiens; identical to SEQ ID NO: 254000
  misc_feature (881)..(930): n is a, c, g, or t
  misc_feature (1318)..(1326): n is a, c, g, or t

SEQ ID NO: 276751 - DNA, 787 bp, Homo Sapiens; identical to SEQ ID NO: 254001
  misc_feature (250)..(250): n is a, c, g, or t

SEQ ID NO: 276752 - DNA, 426 bp, Homo Sapiens; identical to SEQ ID NO: 254003

SEQ ID NO: 276753 - DNA, 1720 bp, Homo Sapiens; identical to SEQ ID NO: 254004
  misc_feature (975)..(1130): n is a, c, g, or t
  misc_feature (1285)..(1311): n is a, c, g, or t
  misc_feature (1567)..(1567): n is a, c, g, or t
  misc_feature (1585)..(1585): n is a, c, g, or t
  misc_feature (1638)..(1638): n is a, c, g, or t
  misc_feature (1641)..(1641): n is a, c, g, or t

SEQ ID NO: 276754 - DNA, 465 bp, Homo Sapiens; identical to SEQ ID NO: 254008

SEQ ID NO: 276755 - DNA, 2175 bp, Homo Sapiens; identical to SEQ ID NO: 254009
  misc_feature (152)..(152): n is a, c, g, or t
  misc_feature (154)..(154): n is a, c, g, or t

SEQ ID NO: 276756 - DNA, 475 bp, Homo Sapiens; identical to SEQ ID NO: 254010
  misc_feature (12)..(12): n is a, c, g, or t
  misc_feature (50)..(50): n is a, c, g, or t
  misc_feature (69)..(69): n is a, c, g, or t

SEQ ID NO: 276757 - DNA, 653 bp, Homo Sapiens; identical to SEQ ID NO: 254013
  misc_feature (619)..(619): n is a, c, g, or t

SEQ ID NO: 276758 - DNA, 2574 bp, Homo Sapiens; identical to SEQ ID NO: 254014
  misc_feature (2063)..(2143): n is a, c, g, or t
  misc_feature (2372)..(2384): n is a, c, g, or t

SEQ ID NO: 276759 - DNA, 967 bp, Homo Sapiens; identical to SEQ ID NO: 254024

SEQ ID NO: 276760 - DNA, 1005 bp, Homo Sapiens; identical to SEQ ID NO: 254025
  misc_feature (759)..(789): n is a, c, g, or t

SEQ ID NO: 276761 - DNA, 947 bp, Homo Sapiens; identical to SEQ ID NO: 254026

SEQ ID NO: 276762 - DNA, 1194 bp, Homo Sapiens; identical to SEQ ID NO: 254027
  misc_feature (902)..(1063): n is a, c, g, or t
  misc_feature (1065)..(1126): n is a, c, g, or t

SEQ ID NO: 276763 - DNA, 1066 bp, Homo Sapiens; identical to SEQ ID NO: 254028
  misc_feature (60)..(60): n is a, c, g, or t
  misc_feature (66)..(111): n is a, c, g, or t

SEQ ID NO: 276764 - DNA, 1138 bp, Homo Sapiens; identical to SEQ ID NO: 254029

SEQ ID NO: 276765 - DNA, 836 bp, Homo Sapiens; identical to SEQ ID NO: 254030

SEQ ID NO: 276766 - DNA, 932 bp, Homo Sapiens; identical to SEQ ID NO: 254031
  misc_feature (657)..(724): n is a, c, g, or t

SEQ ID NO: 276767 - DNA, 755 bp, Homo Sapiens; identical to SEQ ID NO: 254034
  misc_feature (30)..(30): n is a, c, g, or t
  misc_feature (234)..(234): n is a, c, g, or t

SEQ ID NO: 276768 - DNA, 1208 bp, Homo Sapiens; identical to SEQ ID NO: 254035
  misc_feature (170)..(170): n is a, c, g, or t
  misc_feature (233)..(233): n is a, c, g, or t
  misc_feature (910)..(910): n is a, c, g, or t
  misc_feature (920)..(920): n is a, c, g, or t
  misc_feature (922)..(922): n is a, c, g, or t
  misc_feature (941)..(941): n is a, c, g, or t
  misc_feature (952)..(952): n is a, c, g, or t
  misc_feature (956)..(956): n is a, c, g, or t
  misc_feature (965)..(965): n is a, c, g, or t
  misc_feature (968)..(968): n is a, c, g, or t
  misc_feature (992)..(993): n is a, c, g, or t
  misc_feature (997)..(997): n is a, c, g, or t
  misc_feature (1000)..(1000): n is a, c, g, or t
  misc_feature (1002)..(1002): n is a, c, g, or t
  misc_feature (1008)..(1008): n is a, c, g, or t
  misc_feature (1070)..(1070): n is a, c, g, or t
  misc_feature (1085)..(1085): n is a, c, g, or t
  misc_feature (1101)..(1101): n is a, c, g, or t
  misc_feature (1107)..(1107): n is a, c, g, or t
  misc_feature (1110)..(1110): n is a, c, g, or t
  misc_feature (1143)..(1143): n is a, c, g, or t
  misc_feature (1151)..(1151): n is a, c, g, or t

SEQ ID NO: 276769 - DNA, 886 bp, Homo Sapiens; identical to SEQ ID NO: 254036

SEQ ID NO: 276770 - DNA, 682 bp, Homo Sapiens; identical to SEQ ID NO: 254042
  misc_feature (82)..(82): n is a, c, g, or t

SEQ ID NO: 276771 - DNA, 647 bp, Homo Sapiens; identical to SEQ ID NO: 254043
  misc_feature (373)..(373): n is a, c, g, or t
  misc_feature (421)..(421): n is a, c, g, or t
  misc_feature (561)..(561): n is a, c, g, or t

SEQ ID NO: 276772 - DNA, 1213 bp, Homo Sapiens; identical to SEQ ID NO: 254051
  misc_feature (1041)..(1041): n is a, c, g, or t

SEQ ID NO: 276773 - DNA, 855 bp, Homo Sapiens; identical to SEQ ID NO: 254052

SEQ ID NO: 276774 - DNA, 603 bp, Homo Sapiens; identical to SEQ ID NO: 254057

SEQ ID NO: 276775 - DNA, 663 bp, Homo Sapiens; identical to SEQ ID NO: 254058

SEQ ID NO: 276776 - DNA, 990 bp, Homo Sapiens; identical to SEQ ID NO: 254059
  misc_feature (37)..(37): n is a, c, g, or t
  misc_feature (52)..(124): n is a, c, g, or t
  misc_feature (964)..(964): n is a, c, g, or t

SEQ ID NO: 276777 - DNA, 566 bp, Homo Sapiens; identical to SEQ ID NO: 254060

SEQ ID NO: 276778 - DNA, 1074 bp, Homo Sapiens; identical to SEQ ID NO: 254061
  misc_feature (791)..(791): n is a, c, g, or t
  misc_feature (794)..(794): n is a, c, g, or t
  misc_feature (963)..(963): n is a, c, g, or t
  misc_feature (1004)..(1004): n is a, c, g, or t
  misc_feature (1041)..(1041): n is a, c, g, or t
  misc_feature (1055)..(1055): n is a, c, g, or t

SEQ ID NO: 276779 - DNA, 1802 bp, Homo Sapiens; identical to SEQ ID NO: 254062
  misc_feature (1244)..(1244): n is a, c, g, or t

SEQ ID NO: 276780 - DNA, 599 bp, Homo Sapiens; identical to SEQ ID NO: 254064

SEQ ID NO: 276781 - DNA, 372 bp, Homo Sapiens; identical to SEQ ID NO: 254065

SEQ ID NO: 276782 - DNA, 1147 bp, Homo Sapiens; identical to SEQ ID NO: 254067

SEQ ID NO: 276783 - DNA, 417 bp, Homo Sapiens; identical to SEQ ID NO: 254068
  misc_feature (111)..(111): n is a, c, g, or t

SEQ ID NO: 276784 - DNA, 470 bp, Homo Sapiens; identical to SEQ ID NO: 254069

SEQ ID NO: 276785 - DNA, 1658 bp, Homo Sapiens; identical to SEQ ID NO: 254071
  misc_feature (26)..(26): n is a, c, g, or t
  misc_feature (227)..(227): n is a, c, g, or t
  misc_feature (392)..(408): n is a, c, g, or t

SEQ ID NO: 276786 - DNA, 1157 bp, Homo Sapiens; identical to SEQ ID NO: 254072
  misc_feature (939)..(950): n is a, c, g, or t
  misc_feature (1034)..(1044): n is a, c, g, or t
  misc_feature (1087)..(1098): n is a, c, g, or t

SEQ ID NO: 276787 - DNA, 2433 bp, Homo Sapiens; identical to SEQ ID NO: 254073
  misc_feature (388)..(402): n is a, c, g, or t
  misc_feature (1709)..(1799): n is a, c, g, or t
  misc_feature (2417)..(2417): n is a, c, g, or t

SEQ ID NO: 276788 - DNA, 621 bp, Homo Sapiens; identical to SEQ ID NO: 254083

SEQ ID NO: 276789 - DNA, 621 bp, Homo Sapiens; identical to SEQ ID NO: 254084

SEQ ID NO: 276790 - DNA, 626 bp, Homo Sapiens; identical to SEQ ID NO: 254086

SEQ ID NO: 276791 - DNA, 1214 bp, Homo Sapiens; identical to SEQ ID NO: 254087

SEQ ID NO: 276792 - DNA, 1596 bp, Homo Sapiens; identical to SEQ ID NO: 254088

SEQ ID NO: 276793 - DNA, 573 bp, Homo Sapiens; identical to SEQ ID NO: 254089
  misc_feature (15)..(15): n is a, c, g, or t
  misc_feature (186)..(371): n is a, c, g, or t

SEQ ID NO: 276794 - DNA, 708 bp, Homo Sapiens; identical to SEQ ID NO: 254090

SEQ ID NO: 276795 - DNA, 654 bp, Homo Sapiens; identical to SEQ ID NO: 254094

SEQ ID NO: 276796 - DNA, 1688 bp, Homo Sapiens; identical to SEQ ID NO: 254095
  misc_feature (1086)..(1086): n is a, c, g, or t
  misc_feature (1094)..(1094): n is a, c, g, or t
  misc_feature (1103)..(1106): n is a, c, g, or t

SEQ ID NO: 276797 - DNA, 414 bp, Homo Sapiens; identical to SEQ ID NO: 254096
  misc_feature (17)..(17): n is a, c, g, or t
  misc_feature (39)..(39): n is a, c, g, or t
  misc_feature (69)..(69): n is a, c, g, or t

SEQ ID NO: 276798 - DNA, 629 bp, Homo Sapiens; identical to SEQ ID NO: 254097
  misc_feature (40)..(40): n is a, c, g, or t
  misc_feature (67)..(67): n is a, c, g, or t
  misc_feature (76)..(76): n is a, c, g, or t

SEQ ID NO: 276799 - DNA, 1035 bp, Homo Sapiens; identical to SEQ ID NO: 254098
  misc_feature (909)..(909): n is a, c, g, or t
  misc_feature (1009)..(1009): n is a, c, g, or t

SEQ ID NO: 276800 - DNA, 371 bp, Homo Sapiens; identical to SEQ ID NO: 254099

SEQ ID NO: 276801 - DNA, 903 bp, Homo Sapiens; identical to SEQ ID NO: 254100

SEQ ID NO: 276802 - DNA, 478 bp, Homo Sapiens; identical to SEQ ID NO: 254103
  misc_feature (13)..(13): n is a, c, g, or t

SEQ ID NO: 276803 - DNA, 423 bp, Homo Sapiens; identical to SEQ ID NO: 254104

SEQ ID NO: 276804 - DNA, 466 bp, Homo Sapiens; identical to SEQ ID NO: 254106
  misc_feature (20)..(20): n is a, c, g, or t
  misc_feature (32)..(32): n is a, c, g, or t

SEQ ID NO: 276805 - DNA, 751 bp, Homo Sapiens; identical to SEQ ID NO: 254107

SEQ ID NO: 276806 - DNA, 775 bp, Homo Sapiens; identical to SEQ ID NO: 254108
  misc_feature (117)..(279): n is a, c, g, or t
  misc_feature (313)..(313): n is a, c, g, or t
  misc_feature (315)..(570): n is a, c, g, or t

SEQ ID NO: 276807 - DNA, 451 bp, Homo Sapiens; identical to SEQ ID NO: 254109

SEQ ID NO: 276808 - DNA, 473 bp, Homo Sapiens; identical to SEQ ID NO: 254111

SEQ ID NO: 276809 - DNA, 456 bp, Homo Sapiens; identical to SEQ ID NO: 254112
  misc_feature (434)..(434): n is a, c, g, or t
  misc_feature (443)..(443): n is a, c, g, or t

SEQ ID NO: 276810 - DNA, 1233 bp, Homo Sapiens; identical to SEQ ID NO: 254114
  misc_feature (476)..(487): n is a, c, g, or t
  misc_feature (617)..(617): n is a, c, g, or t
  misc_feature (652)..(652): n is a, c, g, or t
  misc_feature (698)..(698): n is a, c, g, or t
  misc_feature (753)..(753): n is a, c, g, or t

SEQ ID NO: 276811 - DNA, 518 bp, Homo Sapiens; identical to SEQ ID NO: 254115
  misc_feature (22)..(22): n is a, c, g, or t
  misc_feature (33)..(33): n is a, c, g, or t
  misc_feature (42)..(42): n is a, c, g, or t
  misc_feature (54)..(54): n is a, c, g, or t
  misc_feature (102)..(102): n is a, c, g, or t

SEQ ID NO: 276812 - DNA, 730 bp, Homo Sapiens; identical to SEQ ID NO: 254116
  misc_feature (565)..(565): n is a, c, g, or t
  misc_feature (576)..(576): n is a, c, g, or t
  misc_feature (582)..(582): n is a, c, g, or t
  misc_feature (585)..(585): n is a, c, g, or t

SEQ ID NO: 276813 - DNA, 716 bp, Homo Sapiens; identical to SEQ ID NO: 254117
  misc_feature (536)..(536): n is a, c, g, or t
  misc_feature (677)..(677): n is a, c, g, or t

SEQ ID NO: 276814 - DNA, 1090 bp, Homo Sapiens; identical to SEQ ID NO: 254119

SEQ ID NO: 276815 - DNA, 2243 bp, Homo Sapiens; identical to SEQ ID NO: 254120
  misc_feature (2135)..(2135): n is a, c, g, or t
  misc_feature (2148)..(2148): n is a, c, g, or t
  misc_feature (2155)..(2155): n is a, c, g, or t
  misc_feature (2176)..(2176): n is a, c, g, or t
  misc_feature (2206)..(2206): n is a, c, g, or t
  misc_feature (2227)..(2227): n is a, c, g, or t

SEQ ID NO: 276816 - DNA, 701 bp, Homo Sapiens; identical to SEQ ID NO: 254121
  misc_feature (534)..(534): n is a, c, g, or t
  misc_feature (593)..(593): n is a, c, g, or t
  misc_feature (619)..(619): n is a, c, g, or t

SEQ ID NO: 276817 - DNA, 392 bp, Homo Sapiens; identical to SEQ ID NO: 254122

SEQ ID NO: 276818 - DNA, 1653 bp, Homo Sapiens; identical to SEQ ID NO: 254123

SEQ ID NO: 276819 - DNA, 438 bp, Homo Sapiens; identical to SEQ ID NO: 254126

SEQ ID NO: 276820 - DNA, 1850 bp, Homo Sapiens; identical to SEQ ID NO: 254127

SEQ ID NO: 276821 - DNA, 1068 bp, Homo Sapiens; identical to SEQ ID NO: 254129
  misc_feature (917)..(917): n is a, c, g, or t

SEQ ID NO: 276822 - DNA, 1003 bp, Homo Sapiens; identical to SEQ ID NO: 254130
  misc_feature (873)..(873): n is a, c, g, or t

SEQ ID NO: 276823 - DNA, 357 bp, Homo Sapiens; identical to SEQ ID NO: 254131

SEQ ID NO: 276824 - DNA, 426 bp, Homo Sapiens; identical to SEQ ID NO: 254132
  misc_feature (101)..(101): n is a, c, g, or t

SEQ ID NO: 276825 - DNA, 825 bp, Homo Sapiens; identical to SEQ ID NO: 254133
  misc_feature (573)..(573): n is a, c, g, or t

SEQ ID NO: 276826 - DNA, 634 bp, Homo Sapiens; identical to SEQ ID NO: 254135
  misc_feature (504)..(504): n is a, c, g, or t
  misc_feature (595)..(595): n is a, c, g, or t
  misc_feature (616)..(616): n is a, c, g, or t

SEQ ID NO: 276827 - DNA, 1250 bp, Homo Sapiens; identical to SEQ ID NO: 254136
  misc_feature (130)..(130): n is a, c, g, or t
  misc_feature (158)..(158): n is a, c, g, or t
  misc_feature (801)..(841): n is a, c, g, or t

SEQ ID NO: 276828 - DNA, 2253 bp, Homo Sapiens; identical to SEQ ID NO: 254137

SEQ ID NO: 276829 - DNA, 601 bp, Homo Sapiens; identical to SEQ ID NO: 254141
  misc_feature (475)..(475): n is a, c, g, or t

SEQ ID NO: 276830 - DNA, 814 bp, Homo Sapiens; identical to SEQ ID NO: 254142

SEQ ID NO: 276831 - DNA, 740 bp, Homo Sapiens; identical to SEQ ID NO: 254148

SEQ ID NO: 276832 - DNA, 837 bp, Homo Sapiens; identical to SEQ ID NO: 254149

SEQ ID NO: 276833 - DNA, 375 bp, Homo Sapiens; identical to SEQ ID NO: 254150
  misc_feature (35)..(35): n is a, c, g, or t
  misc_feature (136)..(136): n is a, c, g, or t
  misc_feature (139)..(139): n is a, c, g, or t

SEQ ID NO: 276834 - DNA, 414 bp, Homo Sapiens; identical to SEQ ID NO: 254154

SEQ ID NO: 276835 - DNA, 644 bp, Homo Sapiens; identical to SEQ ID NO: 254155

SEQ ID NO: 276836 - DNA, 345 bp, Homo Sapiens; identical to SEQ ID NO: 254159

SEQ ID NO: 276837 - DNA, 921 bp, Homo Sapiens; identical to SEQ ID NO: 254160

SEQ ID NO: 276838 - DNA, 668 bp, Homo Sapiens; identical to SEQ ID NO: 254162
  misc_feature (62)..(62): n is a, c, g, or t

SEQ ID NO: 276839 - DNA, 757 bp, Homo Sapiens; identical to SEQ ID NO: 254163
  misc_feature (66)..(66): n is a, c, g, or t
  misc_feature (82)..(82): n is a, c, g, or t
  misc_feature (107)..(107): n is a, c, g, or t
  misc_feature (109)..(109): n is a, c, g, or t

SEQ ID NO: 276840 - DNA, 1255 bp, Homo Sapiens; identical to SEQ ID NO: 254164

SEQ ID NO: 276841 - DNA, 993 bp, Homo Sapiens; identical to SEQ ID NO: 254165
  misc_feature (828)..(828): n is a, c, g, or t

SEQ ID NO: 276842 - DNA, 886 bp, Homo Sapiens; identical to SEQ ID NO: 254166
  misc_feature (573)..(573): n is a, c, g, or t
  misc_feature (775)..(775): n is a, c, g, or t
  misc_feature (781)..(781): n is a, c, g, or t
  misc_feature (796)..(796): n is a, c, g, or t

SEQ ID NO: 276843 - DNA, 1677 bp, Homo Sapiens; identical to SEQ ID NO: 254167
  misc_feature (1586)..(1586): n is a, c, g, or t

SEQ ID NO: 276844 - DNA, 750 bp, Homo Sapiens; identical to SEQ ID NO: 254168
  misc_feature (36)..(36): n is a, c, g, or t
  misc_feature (92)..(92): n is a, c, g, or t
  misc_feature (125)..(125): n is a, c, g, or t
  misc_feature (448)..(456): n is a, c, g, or t
  misc_feature (474)..(545): n is a, c, g, or t
  misc_feature (595)..(620): n is a, c, g, or t

SEQ ID NO: 276845 - DNA, 829 bp, Homo Sapiens; identical to SEQ ID NO: 254173

SEQ ID NO: 276846 - DNA, 1496 bp, Homo Sapiens; identical to SEQ ID NO: 254174

SEQ ID NO: 276847 - DNA, 1727 bp, Homo Sapiens; identical to SEQ ID NO: 254175
  misc_feature (1415)..(1453): n is a, c, g, or t

SEQ ID NO: 276848 - DNA, 1673 bp, Homo Sapiens; identical to SEQ ID NO: 254176
  misc_feature (12)..(12): n is a, c, g, or t
  misc_feature (23)..(23): n is a, c, g, or t
  misc_feature (58)..(58): n is a, c, g, or t
  misc_feature (77)..(77): n is a, c, g, or t
  misc_feature (110)..(110): n is a, c, g, or t
  misc_feature (264)..(264): n is a, c, g, or t
  misc_feature (284)..(311): n is a, c, g, or t
  misc_feature (738)..(746): n is a, c, g, or t
  misc_feature (751)..(808): n is a, c, g, or t
  misc_feature (980)..(988): n is a, c, g, or t
  misc_feature (992)..(992): n is a, c, g, or t
  misc_feature (1214)..(1253): n is a, c, g, or t
  misc_feature (1305)..(1305): n is a, c, g, or t
  misc_feature (1329)..(1329): n is a, c, g, or t
  misc_feature (1515)..(1515): n is a, c, g, or t

SEQ ID NO: 276849 - DNA, 357 bp, Homo Sapiens; identical to SEQ ID NO: 254184

SEQ ID NO: 276850 - DNA, 836 bp, Homo Sapiens; identical to SEQ ID NO: 254185

SEQ ID NO: 276851 - DNA, 624 bp, Homo Sapiens; identical to SEQ ID NO: 254186

SEQ ID NO: 276852 - DNA, 387 bp, Homo Sapiens; identical to SEQ ID NO: 254187

SEQ ID NO: 276853 - DNA, 316 bp, Homo Sapiens; identical to SEQ ID NO: 254188

SEQ ID NO: 276854 - DNA, 1135 bp, Homo Sapiens; identical to SEQ ID NO: 254189

SEQ ID NO: 276855 - DNA, 448 bp, Homo Sapiens; identical to SEQ ID NO: 254190
  misc_feature (48)..(48): n is a, c, g, or t
  misc_feature (74)..(74): n is a, c, g, or t
  misc_feature (85)..(85): n is a, c, g, or t

SEQ ID NO: 276856 - DNA, 1317 bp, Homo Sapiens; identical to SEQ ID NO: 254191

SEQ ID NO: 276857 - DNA, 1570 bp, Homo Sapiens; identical to SEQ ID NO: 254192
  misc_feature (1500)..(1517): n is a, c, g, or t

SEQ ID NO: 276858 - DNA, 1670 bp, Homo Sapiens; identical to SEQ ID NO: 254193

SEQ ID NO: 276859 - DNA, 436 bp, Homo Sapiens; identical to SEQ ID NO: 254194

SEQ ID NO: 276860 - DNA, 1187 bp, Homo Sapiens; identical to SEQ ID NO: 254199
  misc_feature (1131)..(1131): n is a, c, g, or t
  misc_feature (1139)..(1139): n is a, c, g, or t

SEQ ID NO: 276861 - DNA, 2329 bp, Homo Sapiens; identical to SEQ ID NO: 254200
  misc_feature (1215)..(1216): n is a, c, g, or t
  misc_feature (1225)..(1238): n is a, c, g, or t
  misc_feature (1985)..(1986): n is a, c, g, or t
  misc_feature (2016)..(2016): n is a, c, g, or t
  misc_feature (2021)..(2021): n is a, c, g, or t
  misc_feature (2031)..(2031): n is a, c, g, or t
  misc_feature (2159)..(2159): n is a, c, g, or t

SEQ ID NO: 276862 - DNA, 801 bp, Homo Sapiens; identical to SEQ ID NO: 254203

SEQ ID NO: 276863 - DNA, 557 bp, Homo Sapiens; identical to SEQ ID NO: 254204
  misc_feature (419)..(419): n is a, c, g, or t
  misc_feature (468)..(468): n is a, c, g, or t
  misc_feature (501)..(501): n is a, c, g, or t

SEQ ID NO: 276864 - DNA, 737 bp, Homo Sapiens; identical to SEQ ID NO: 254210

SEQ ID NO: 276865 - DNA, 394 bp, Homo Sapiens; identical to SEQ ID NO: 254211
  misc_feature (11)..(11): n is a, c, g, or t
  misc_feature (37)..(37): n is a, c, g, or t
  misc_feature (214)..(214): n is a, c, g, or t

SEQ ID NO: 276866 - DNA, 498 bp, Homo Sapiens; identical to SEQ ID NO: 254212
  misc_feature (36)..(36): n is a, c, g, or t
  misc_feature (62)..(62): n is a, c, g, or t
  misc_feature (73)..(73): n is a, c, g, or t
  misc_feature (84)..(84): n is a, c, g, or t
  misc_feature (90)..(90): n is a, c, g, or t
  misc_feature (141)..(141): n is a, c, g, or t

SEQ ID NO: 276867 - DNA, 501 bp, Homo Sapiens; identical to SEQ ID NO: 254213

SEQ ID NO: 276868 - DNA, 1007 bp, Homo Sapiens; identical to SEQ ID NO: 254215

SEQ ID NO: 276869 - DNA, 810 bp, Homo Sapiens; identical to SEQ ID NO: 254216

SEQ ID NO: 276870 - DNA, 830 bp, Homo Sapiens; identical to SEQ ID NO: 254217

SEQ ID NO: 276871 - DNA, 899 bp, Homo Sapiens; identical to SEQ ID NO: 172636
  misc_feature (630)..(630): n is a, c, g, or t

SEQ ID NO: 276872 - DNA, 2184 bp, Homo Sapiens; identical to SEQ ID NO: 254224

SEQ ID NO: 276873 - DNA, 647 bp, Homo Sapiens; identical to SEQ ID NO: 254225
  misc_feature (42)..(86): n is a, c, g, or t

SEQ ID NO: 276874 - DNA, 573 bp, Homo Sapiens; identical to SEQ ID NO: 254226
  misc_feature (61)..(61): n is a, c, g, or t
  misc_feature (266)..(292): n is a, c, g, or t
  misc_feature (438)..(438): n is a, c, g, or t

SEQ ID NO: 276875 - DNA, 459 bp, Homo Sapiens; identical to SEQ ID NO: 254227

SEQ ID NO: 276876 - DNA, 403 bp, Homo Sapiens; identical to SEQ ID NO: 254230

SEQ ID NO: 276877 - DNA, 1755 bp, Homo Sapiens; identical to SEQ ID NO: 254231

SEQ ID NO: 276878 - DNA, 542 bp, Homo Sapiens; identical to SEQ ID NO: 254232

SEQ ID NO: 276879 - DNA, 962 bp, Homo Sapiens; identical to SEQ ID NO: 254233
  misc_feature (57)..(66): n is a, c, g, or t
  misc_feature (639)..(703): n is a, c, g, or t
  misc_feature (789)..(789): n is a, c, g, or t
  misc_feature (807)..(816): n is a, c, g, or t

SEQ ID NO: 276880 - DNA, 2274 bp, Homo Sapiens; identical to SEQ ID NO: 254234
  misc_feature (1690)..(1703): n is a, c, g, or t

SEQ ID NO: 276881 - DNA, 2011 bp, Homo Sapiens; identical to SEQ ID NO: 254239
  misc_feature (1483)..(1500): n is a, c, g, or t
  misc_feature (1509)..(1547): n is a, c, g, or t
  misc_feature (1594)..(1666): n is a, c, g, or t
  misc_feature (1686)..(1686): n is a, c, g, or t
  misc_feature (1719)..(1784): n is a, c, g, or t
  misc_feature (1941)..(1949): n is a, c, g, or t
  misc_feature (1983)..(1983): n is a, c, g, or t

SEQ ID NO: 276882 - DNA, 1429 bp, Homo Sapiens; identical to SEQ ID NO: 254240

SEQ ID NO: 276883 - DNA, 1514 bp, Homo Sapiens; identical to SEQ ID NO: 254241

SEQ ID NO: 276884 - DNA, 1050 bp, Homo Sapiens; identical to SEQ ID NO: 254246
  misc_feature (103)..(119): n is a, c, g, or t
  misc_feature (972)..(973): n is a, c, g, or t
  misc_feature (975)..(975): n is a, c, g, or t
  misc_feature (980)..(980): n is a, c, g, or t
  misc_feature (988)..(988): n is a, c, g, or t
  misc_feature (995)..(996): n is a, c, g, or t
  misc_feature (1004)..(1004): n is a, c, g, or t
  misc_feature (1006)..(1006): n is a, c, g, or t
  misc_feature (1009)..(1009): n is a, c, g, or t
  misc_feature (1011)..(1011): n is a, c, g, or t
  misc_feature (1015)..(1015): n is a, c, g, or t
  misc_feature (1025)..(1025): n is a, c, g, or t
  misc_feature (1027)..(1027): n is a, c, g, or t
  misc_feature (1030)..(1030): n is a, c, g, or t
  misc_feature (1040)..(1040): n is a, c, g, or t

SEQ ID NO: 276885 - DNA, 1034 bp, Homo Sapiens; identical to SEQ ID NO: 254247
  misc_feature (859)..(859): n is a, c, g, or t
  misc_feature (963)..(963): n is a, c, g, or t
  misc_feature (1023)..(1023): n is a, c, g, or t

SEQ ID NO: 276886 - DNA, 2514 bp, Homo Sapiens; identical to SEQ ID NO: 254248

SEQ ID NO: 276887 - DNA, 897 bp, Homo Sapiens; identical to SEQ ID NO: 254249
  misc_feature (813)..(814): n is a, c, g, or t
  misc_feature (817)..(824): n is a, c, g, or t
  misc_feature (826)..(826): n is a, c, g, or t
  misc_feature (828)..(828): n is a, c, g, or t
  misc_feature (830)..(830): n is a, c, g, or t
  misc_feature (835)..(835): n is a, c, g, or t

SEQ ID NO: 276888 - DNA, 738 bp, Homo Sapiens; identical to SEQ ID NO: 254254

SEQ ID NO: 276889 - DNA, 1326 bp, Homo Sapiens; identical to SEQ ID NO: 254255

SEQ ID NO: 276890 - DNA, 1784 bp, Homo Sapiens; identical to SEQ ID NO: 254257
  misc_feature (1566)..(1594): n is a, c, g, or t

SEQ ID NO: 276891 - DNA, 867 bp, Homo Sapiens; identical to SEQ ID NO: 254258

SEQ ID NO: 276892 - DNA, 1234 bp, Homo Sapiens; identical to SEQ ID NO: 254262

SEQ ID NO: 276893 - DNA, 1053 bp, Homo Sapiens; identical to SEQ ID NO: 254263
  misc_feature (917)..(917): n is a, c, g, or t
  misc_feature (934)..(934): n is a, c, g, or t

SEQ ID NO: 276894 - DNA, 1242 bp, Homo Sapiens; identical to SEQ ID NO: 254267
  misc_feature (1033)..(1033): n is a, c, g, or t

SEQ ID NO: 276895 - DNA, 727 bp, Homo Sapiens; identical to SEQ ID NO: 254268

SEQ ID NO: 276896 - DNA, 1078 bp, Homo Sapiens; identical to SEQ ID NO: 254270

SEQ ID NO: 276897 - DNA, 777 bp, Homo Sapiens; identical to SEQ ID NO: 254271

SEQ ID NO: 276898 - DNA, 1019 bp, Homo Sapiens; identical to SEQ ID NO: 254272
  misc_feature (696)..(696): n is a, c, g, or t

SEQ ID NO: 276899 - DNA, 353 bp, Homo Sapiens; identical to SEQ ID NO: 254273

SEQ ID NO: 276900 - DNA, 1012 bp, Homo Sapiens; identical to SEQ ID NO: 254274

SEQ ID NO: 276901 - DNA, 1184 bp, Homo Sapiens; identical to SEQ ID NO: 254275
  misc_feature (29)..(29): n is a, c, g, or t
  misc_feature (34)..(34): n is a, c, g, or t
  misc_feature (58)..(58): n is a, c, g, or t
  misc_feature (88)..(88): n is a, c, g, or t
  misc_feature (95)..(95): n is a, c, g, or t
  misc_feature (142)..(142): n is a, c, g, or t
  misc_feature (151)..(159): n is a, c, g, or t

SEQ ID NO: 276902 - DNA, 673 bp, Homo Sapiens; identical to SEQ ID NO: 254277
  misc_feature (85)..(85): n is a, c, g, or t

SEQ ID NO: 276903 - DNA, 1417 bp, Homo Sapiens; identical to SEQ ID NO: 254278

SEQ ID NO: 276904 - DNA, 989 bp, Homo Sapiens; identical to SEQ ID NO: 254279
  misc_feature (666)..(666): n is a, c, g, or t
  misc_feature (827)..(827): n is a, c, g, or t
  misc_feature (877)..(920): n is a, c, g, or t

SEQ ID NO: 276905 - DNA, 539 bp, Homo Sapiens; identical to SEQ ID NO: 254280

SEQ ID NO: 276906 - DNA, 636 bp, Homo Sapiens; identical to SEQ ID NO: 254281
  misc_feature (19)..(19): n is a, c, g, or t
  misc_feature (135)..(135): n is a, c, g, or t
  misc_feature (149)..(150): n is a, c, g, or t

SEQ ID NO: 276907 - DNA, 614 bp, Homo Sapiens; identical to SEQ ID NO: 254282
  misc_feature (18)..(18): n is a, c, g, or t
  misc_feature (22)..(22): n is a, c, g, or t
  misc_feature (31)..(31): n is a, c, g, or t
  misc_feature (72)..(73): n is a, c, g, or t
  misc_feature (91)..(91): n is a, c, g, or t
  misc_feature (150)..(150): n is a, c, g, or t
  misc_feature (182)..(182): n is a, c, g, or t
  misc_feature (197)..(197): n is a, c, g, or t

SEQ ID NO: 276908 - DNA, 1738 bp, Homo Sapiens; identical to SEQ ID NO: 254285
  misc_feature (868)..(876): n is a, c, g, or t

SEQ ID NO: 276909 - DNA, 1194 bp, Homo Sapiens; identical to SEQ ID NO: 254286
  misc_feature (17)..(17): n is a, c, g, or t
  misc_feature (64)..(64): n is a, c, g, or t
  misc_feature (74)..(74): n is a, c, g, or t

SEQ ID NO: 276910 - DNA, 482 bp, Homo Sapiens; identical to SEQ ID NO: 254287
  misc_feature (63)..(63): n is a, c, g, or t

SEQ ID NO: 276911 - DNA, 424 bp, Homo Sapiens; identical to SEQ ID NO: 254288
  misc_feature (401)..(401): n is a, c, g, or t
  misc_feature (407)..(407): n is a, c, g, or t

SEQ ID NO: 276912 - DNA, 542 bp, Homo Sapiens; identical to SEQ ID NO: 254289

SEQ ID NO: 276913 - DNA, 427 bp, Homo Sapiens; identical to SEQ ID NO: 254290

SEQ ID NO: 276914 - DNA, 457 bp, Homo Sapiens; identical to SEQ ID NO: 254291

SEQ ID NO: 276915 - DNA, 1420 bp, Homo Sapiens; identical to SEQ ID NO: 254295
  misc_feature (55)..(89): n is a, c, g, or t

SEQ ID NO: 276916 - DNA, 556 bp, Homo Sapiens; identical to SEQ ID NO: 254296
  misc_feature (27)..(27): n is a, c, g, or t
  misc_feature (36)..(36): n is a, c, g, or t

SEQ ID NO: 276917 - DNA, 382 bp, Homo Sapiens; identical to SEQ ID NO: 254297

SEQ ID NO: 276918 - DNA, 996 bp, Homo Sapiens; identical to SEQ ID NO: 254298

SEQ ID NO: 276919 - DNA, 485 bp, Homo Sapiens; identical to SEQ ID NO: 254299
  misc_feature (29)..(29): n is a, c, g, or t
  misc_feature (68)..(68): n is a, c, g, or t
  misc_feature (84)..(84): n is a, c, g, or t
  misc_feature (216)..(216): n is a, c, g, or t

SEQ ID NO: 276920 - DNA, 822 bp, Homo Sapiens; identical to SEQ ID NO: 254303
  misc_feature (51)..(99): n is a, c, g, or t

SEQ ID NO: 276921 - DNA, 670 bp, Homo Sapiens; identical to SEQ ID NO: 254304

SEQ ID NO: 276922 - DNA, 903 bp, Homo Sapiens; identical to SEQ ID NO: 254305

SEQ ID NO: 276923 - DNA, 626 bp, Homo Sapiens; identical to SEQ ID NO: 254306

SEQ ID NO: 276924 - DNA, 704 bp, Homo Sapiens; identical to SEQ ID NO: 254307

SEQ ID NO: 276925 - DNA, 1669 bp, Homo Sapiens; identical to SEQ ID NO: 254308
  misc_feature (1270)..(1298): n is a, c, g, or t
  misc_feature (1323)..(1327): n is a, c, g, or t
  misc_feature (1329)..(1334): n is a, c, g, or t
  misc_feature (1337)..(1337): n is a, c, g, or t
  misc_feature (1341)..(1344): n is a, c, g, or t
  misc_feature (1348)..(1350): n is a, c, g, or t
  misc_feature (1352)..(1355): n is a, c, g, or t
  misc_feature (1360)..(1360): n is a, c, g, or t
  misc_feature (1363)..(1364): n is a, c, g, or t
  misc_feature (1366)..(1369): n is a, c, g, or t
  misc_feature (1372)..(1373): n is a, c, g, or t

SEQ ID NO: 276926 - DNA, 644 bp, Homo Sapiens; identical to SEQ ID NO: 254312
  misc_feature (568)..(569): n is a, c, g, or t

SEQ ID NO: 276927 - DNA, 363 bp, Homo Sapiens; identical to SEQ ID NO: 254313

SEQ ID NO: 276928 - DNA, 1125 bp, Homo Sapiens; identical to SEQ ID NO: 254314
  misc_feature (110)..(110): n is a, c, g, or t
  misc_feature (667)..(667): n is a, c, g, or t

SEQ ID NO: 276929 - DNA, 829 bp, Homo Sapiens; identical to SEQ ID NO: 254315
  misc_feature (642)..(642): n is a, c, g, or t

SEQ ID NO: 276930 - DNA, 1542 bp, Homo Sapiens; identical to SEQ ID NO: 254316
  misc_feature (483)..(523): n is a, c, g, or t

SEQ ID NO: 276931 - DNA, 1923 bp, Homo Sapiens; identical to SEQ ID NO: 254317
  misc_feature (673)..(729): n is a, c, g, or t
  misc_feature (1329)..(1329): n is a, c, g, or t
  misc_feature (1337)..(1337): n is a, c, g, or t
  misc_feature (1719)..(1809): n is a, c, g, or t

SEQ ID NO: 276932 - DNA, 966 bp, Homo Sapiens; identical to SEQ ID NO: 254320
  misc_feature (728)..(728): n is a, c, g, or t
  misc_feature (754)..(754): n is a, c, g, or t
  misc_feature (794)..(914): n is a, c, g, or t

SEQ ID NO: 276933 - DNA, 586 bp, Homo Sapiens; identical to SEQ ID NO: 254321

SEQ ID NO: 276934 - DNA, 758 bp, Homo Sapiens; identical to SEQ ID NO: 254323
  misc_feature (29)..(29): n is a, c, g, or t
  misc_feature (34)..(34): n is a, c, g, or t

SEQ ID NO: 276935 - DNA, 1707 bp, Homo Sapiens; identical to SEQ ID NO: 254324
  misc_feature (16)..(16): n is a, c, g, or t
  misc_feature (815)..(815): n is a, c, g, or t

SEQ ID NO: 276936 - DNA, 389 bp, Homo Sapiens; identical to SEQ ID NO: 254325

SEQ ID NO: 276937 - DNA, 973 bp, Homo Sapiens; identical to SEQ ID NO: 254328

SEQ ID NO: 276938 - DNA, 1100 bp, Homo Sapiens; identical to SEQ ID NO: 254329
  misc_feature (1030)..(1030): n is a, c, g, or t
  misc_feature (1062)..(1062): n is a, c, g, or t

SEQ ID NO: 276939 - DNA, 2201 bp, Homo Sapiens; identical to SEQ ID NO: 254333

SEQ ID NO: 276940 - DNA, 423 bp, Homo Sapiens; identical to SEQ ID NO: 254334
  misc_feature (12)..(12): n is a, c, g, or t
  misc_feature (35)..(35): n is a, c, g, or t
  misc_feature (40)..(40): n is a, c, g, or t
  misc_feature (49)..(49): n is a, c, g, or t
  misc_feature (106)..(106): n is a, c, g, or t

SEQ ID NO: 276941 - DNA, 1091 bp, Homo Sapiens; identical to SEQ ID NO: 254335

SEQ ID NO: 276942 - DNA, 1040 bp, Homo Sapiens; identical to SEQ ID NO: 254336

SEQ ID NO: 276943 - DNA, 741 bp, Homo Sapiens; identical to SEQ ID NO: 254337

SEQ ID NO: 276944 - DNA, 1435 bp, Homo Sapiens; identical to SEQ ID NO: 254338
  misc_feature (129)..(192): n is a, c, g, or t
  misc_feature (448)..(448): n is a, c, g, or t

SEQ ID NO: 276945 - DNA, 1838 bp, Homo Sapiens; identical to SEQ ID NO: 254339

SEQ ID NO: 276946 - DNA, 814 bp, Homo Sapiens; identical to SEQ ID NO: 254341
  misc_feature (50)..(50): n is a, c, g, or t

SEQ ID NO: 276947 - DNA, 1162 bp, Homo Sapiens; identical to SEQ ID NO: 254342

SEQ ID NO: 276948 - DNA, 511 bp, Homo Sapiens; identical to SEQ ID NO: 254343

SEQ ID NO: 276949 - DNA, 543 bp, Homo Sapiens; identical to SEQ ID NO: 254349

SEQ ID NO: 276950 - DNA, 1397 bp, Homo Sapiens; identical to SEQ ID NO: 254350

SEQ ID NO: 276951 - DNA, 1113 bp, Homo Sapiens; identical to SEQ ID NO: 254355
  misc_feature (679)..(713): n is a, c, g, or t
  misc_feature (959)..(1044): n is a, c, g, or t

SEQ ID NO: 276952 - DNA, 772 bp, Homo Sapiens; identical to SEQ ID NO: 254356

SEQ ID NO: 276953 - DNA, 374 bp, Homo Sapiens; identical to SEQ ID NO: 254357

SEQ ID NO: 276954 - DNA, 1664 bp, Homo Sapiens; identical to SEQ ID NO: 254358

SEQ ID NO: 276955 - DNA, 370 bp, Homo Sapiens; identical to SEQ ID NO: 254367

SEQ ID NO: 276956 - DNA, 1162 bp, Homo Sapiens; identical to SEQ ID NO: 254368

SEQ ID NO: 276957 - DNA, 1803 bp, Homo Sapiens; identical to SEQ ID NO: 254369
  misc_feature (1650)..(1650): n is a, c, g, or t
  misc_feature (1654)..(1654): n is a, c, g, or t
  misc_feature (1657)..(1660): n is a, c, g, or t

SEQ ID NO: 276958 - DNA, 2470 bp, Homo Sapiens; identical to SEQ ID NO: 254370
  misc_feature (1722)..(1722): n is a, c, g, or t
  misc_feature (1735)..(1735): n is a, c, g, or t
  misc_feature (1759)..(1759): n is a, c, g, or t
  misc_feature (1785)..(1785): n is a, c, g, or t
  misc_feature (1797)..(1797): n is a, c, g, or t

SEQ ID NO: 276959 - DNA, 1122 bp, Homo Sapiens; identical to SEQ ID NO: 254371
  misc_feature (1024)..(1024): n is a, c, g, or t

SEQ ID NO: 276960 - DNA, 505 bp, Homo Sapiens; identical to SEQ ID NO: 254373

SEQ ID NO: 276961 - DNA, 729 bp, Homo Sapiens; identical to SEQ ID NO: 254374
  misc_feature (701)..(701): n is a, c, g, or t

SEQ ID NO: 276962 - DNA, 599 bp, Homo Sapiens; identical to SEQ ID NO: 254375

SEQ ID NO: 276963 - DNA, 1519 bp, Homo Sapiens; identical to SEQ ID NO: 254376

SEQ ID NO: 276964 - DNA, 406 bp, Homo Sapiens; identical to SEQ ID NO: 254377
  misc_feature (389)..(389): n is a, c, g, or t

SEQ ID NO: 276965 - DNA, 642 bp, Homo Sapiens; identical to SEQ ID NO: 254378
  misc_feature (29)..(29): n is a, c, g, or t
  misc_feature (48)..(48): n is a, c, g, or t
  misc_feature (70)..(70): n is a, c, g, or t
  misc_feature (77)..(77): n is a, c, g, or t
  misc_feature (80)..(80): n is a, c, g, or t
  misc_feature (137)..(137): n is a, c, g, or t
  misc_feature (152)..(152): n is a, c, g, or t
  misc_feature (158)..(158): n is a, c, g, or t
  misc_feature (201)..(201): n is a, c, g, or t
  misc_feature (220)..(220): n is a, c, g, or t

SEQ ID NO: 276966 - DNA, 389 bp, Homo Sapiens; identical to SEQ ID NO: 254379

SEQ ID NO: 276967 - DNA, 1516 bp, Homo Sapiens; identical to SEQ ID NO: 254380

SEQ ID NO: 276968 - DNA, 822 bp, Homo Sapiens; identical to SEQ ID NO: 254381
  misc_feature (335)..(335): n is a, c, g, or t
  misc_feature (408)..(408): n is a, c, g, or t

SEQ ID NO: 276969 - DNA, 732 bp, Homo Sapiens; identical to SEQ ID NO: 254385

SEQ ID NO: 276970 - DNA, 821 bp, Homo Sapiens; identical to SEQ ID NO: 254386
  misc_feature (527)..(527): n is a, c, g, or t
  misc_feature (756)..(756): n is a, c, g, or t

SEQ ID NO: 276971 - DNA, 1311 bp, Homo Sapiens; identical to SEQ ID NO: 254387

SEQ ID NO: 276972 - DNA, 2113 bp, Homo Sapiens; identical to SEQ ID NO: 254388
  misc_feature (1692)..(1692): n is a, c, g, or t
  misc_feature (1893)..(1893): n is a, c, g, or t
  misc_feature (2042)..(2042): n is a, c, g, or t
  misc_feature (2048)..(2048): n is a, c, g, or t
  misc_feature (2069)..(2069): n is a, c, g, or t

SEQ ID NO: 276973 - DNA, 392 bp, Homo Sapiens; identical to SEQ ID NO: 254392

SEQ ID NO: 276974 - DNA, 893 bp, Homo Sapiens; identical to SEQ ID NO: 254393

SEQ ID NO: 276975 - DNA, 552 bp, Homo Sapiens; identical to SEQ ID NO: 254396
  misc_feature (17)..(17): n is a, c, g, or t
  misc_feature (57)..(57): n is a, c, g, or t
  misc_feature (64)..(64): n is a, c, g, or t
  misc_feature (122)..(122): n is a, c, g, or t

SEQ ID NO: 276976 - DNA, 1048 bp, Homo Sapiens; identical to SEQ ID NO: 254397
  misc_feature (20)..(20): n is a, c, g, or t
  misc_feature (39)..(40): n is a, c, g, or t
  misc_feature (43)..(43): n is a, c, g, or t

SEQ ID NO: 276977 - DNA, 1619 bp, Homo Sapiens; identical to SEQ ID NO: 254398
  misc_feature (1529)..(1529): n is a, c, g, or t
  misc_feature (1563)..(1563): n is a, c, g, or t
  misc_feature (1572)..(1572): n is a, c, g, or t
  misc_feature (1593)..(1593): n is a, c, g, or t
  misc_feature (1599)..(1599): n is a, c, g, or t

SEQ ID NO: 276978 - DNA, 1240 bp, Homo Sapiens; identical to SEQ ID NO: 254399

SEQ ID NO: 276979 - DNA, 426 bp, Homo Sapiens; identical to SEQ ID NO: 254400
  misc_feature (31)..(31): n is a, c, g, or t
  misc_feature (265)..(265): n is a, c, g, or t
  misc_feature (284)..(284): n is a, c, g, or t
  misc_feature (334)..(334): n is a, c, g, or t

SEQ ID NO: 276980 - DNA, 785 bp, Homo Sapiens; identical to SEQ ID NO: 254402

SEQ ID NO: 276981 - DNA, 2053 bp, Homo Sapiens; identical to SEQ ID NO: 254403
  misc_feature (46)..(46): n is a, c, g, or t
  misc_feature (208)..(208): n is a, c, g, or t
  misc_feature (210)..(210): n is a, c, g, or t
  misc_feature (224)..(224): n is a, c, g, or t
  misc_feature (1913)..(1913): n is a, c, g, or t
  misc_feature (1916)..(1916): n is a, c, g, or t
  misc_feature (1923)..(1923): n is a, c, g, or t
  misc_feature (1925)..(1925): n is a, c, g, or t
  misc_feature (1928)..(1928): n is a, c, g, or t
  misc_feature (1939)..(1939): n is a, c, g, or t
  misc_feature (1941)..(1941): n is a, c, g, or t
  misc_feature (2004)..(2004): n is a, c, g, or t
  misc_feature (2015)..(2015): n is a, c, g, or t

SEQ ID NO: 276982 - DNA, 2013 bp, Homo Sapiens; identical to SEQ ID NO: 254407
  misc_feature (811)..(848): n is a, c, g, or t

SEQ ID NO: 276983 - DNA, 397 bp, Homo Sapiens; identical to SEQ ID NO: 254408
  misc_feature (322)..(322): n is a, c, g, or t
  misc_feature (371)..(371): n is a, c, g, or t
  misc_feature (378)..(378): n is a, c, g, or t

SEQ ID NO: 276984 - DNA, 1270 bp, Homo Sapiens; identical to SEQ ID NO: 254414

SEQ ID NO: 276985 - DNA, 974 bp, Homo Sapiens; identical to SEQ ID NO: 254415
  misc_feature (18)..(18): n is a, c, g, or t
  misc_feature (32)..(32): n is a, c, g, or t
  misc_feature (491)..(601): n is a, c, g, or t
  misc_feature (650)..(659): n is a, c, g, or t
  misc_feature (735)..(743): n is a, c, g, or t

SEQ ID NO: 276986 - DNA, 1002 bp, Homo Sapiens; identical to SEQ ID NO: 254418

SEQ ID NO: 276987 - DNA, 848 bp, Homo Sapiens; identical to SEQ ID NO: 254419

SEQ ID NO: 276988 - DNA, 1325 bp, Homo Sapiens; identical to SEQ ID NO: 254421

SEQ ID NO: 276989 - DNA, 424 bp, Homo Sapiens; identical to SEQ ID NO: 254422
  misc_feature (405)..(405): n is a, c, g, or t

SEQ ID NO: 276990 - DNA, 373 bp, Homo Sapiens; identical to SEQ ID NO: 254424

SEQ ID NO: 276991 - DNA, 696 bp, Homo Sapiens; identical to SEQ ID NO: 254425
  misc_feature (500)..(582): n is a, c, g, or t

SEQ ID NO: 276992 - DNA, 1585 bp, Homo Sapiens; identical to SEQ ID NO: 254426
  misc_feature (170)..(232): n is a, c, g, or t
  misc_feature (253)..(253): n is a, c, g, or t
  misc_feature (267)..(328): n is a, c, g, or t

SEQ ID NO: 276993 - DNA, 1394 bp, Homo Sapiens; identical to SEQ ID NO: 254427
  misc_feature (129)..(188): n is a, c, g, or t
  misc_feature (228)..(288): n is a, c, g, or t
  misc_feature (706)..(714): n is a, c, g, or t
  misc_feature (890)..(899): n is a, c, g, or t
  misc_feature (907)..(965): n is a, c, g, or t
  misc_feature (1250)..(1258): n is a, c, g, or t

SEQ ID NO: 276994 - DNA, 572 bp, Homo Sapiens; identical to SEQ ID NO: 254428
  misc_feature (56)..(56): n is a, c, g, or t
  misc_feature (126)..(126): n is a, c, g, or t
  misc_feature (155)..(155): n is a, c, g, or t

SEQ ID NO: 276995 - DNA, 659 bp, Homo Sapiens; identical to SEQ ID NO: 254429

SEQ ID NO: 276996 - DNA, 1086 bp, Homo Sapiens; identical to SEQ ID NO: 254430

SEQ ID NO: 276997 - DNA, 1038 bp, Homo Sapiens; identical to SEQ ID NO: 254435

SEQ ID NO: 276998 - DNA, 1657 bp, Homo Sapiens; identical to SEQ ID NO: 254436
  misc_feature (1447)..(1448): n is a, c, g, or t

SEQ ID NO: 276999 - DNA, 665 bp, Homo Sapiens; identical to SEQ ID NO: 254437

SEQ ID NO: 277000 - DNA, 1155 bp, Homo Sapiens; identical to SEQ ID NO: 254438
  misc_feature (926)..(927): n is a, c, g, or t

SEQ ID NO: 277001 - DNA, 629 bp, Homo Sapiens; identical to SEQ ID NO: 254440
  misc_feature (71)..(71): n is a, c, g, or t
  misc_feature (87)..(88): n is a, c, g, or t

SEQ ID NO: 277002 - DNA, 1375 bp, Homo Sapiens; identical to SEQ ID NO: 14964
  misc_feature (734)..(746): n is a, c, g, or t
  misc_feature (1175)..(1175): n is a, c, g, or t
  misc_feature (1183)..(1183): n is a, c, g, or t
  misc_feature (1216)..(1216): n is a, c, g, or t
  misc_feature (1248)..(1261): n is a, c, g, or t

SEQ ID NO: 277003 - DNA, 642 bp, Homo Sapiens; identical to SEQ ID NO: 254449

SEQ ID NO: 277004 - DNA, 1458 bp, Homo Sapiens; identical to SEQ ID NO: 254450
  misc_feature (83)..(83): n is a, c, g, or t

SEQ ID NO: 277005 - DNA, 1126 bp, Homo Sapiens; identical to SEQ ID NO: 254454

SEQ ID NO: 277006 - DNA, 1428 bp, Homo Sapiens; identical to SEQ ID NO: 254455
  misc_feature (298)..(298): n is a, c, g, or t

SEQ ID NO: 277007 - DNA, 1019 bp, Homo Sapiens; identical to SEQ ID NO: 254458
  misc_feature (899)..(920): n is a, c, g, or t

SEQ ID NO: 277008 - DNA, 606 bp, Homo Sapiens; identical to SEQ ID NO: 254459

SEQ ID NO: 277009 - DNA, 959 bp, Homo Sapiens; identical to SEQ ID NO: 254465

SEQ ID NO: 277010 - DNA, 723 bp, Homo Sapiens; identical to SEQ ID NO: 254466
  misc_feature (340)..(340): n is a, c, g, or t
  misc_feature (493)..(493): n is a, c, g, or t
  misc_feature (506)..(506): n is a, c, g, or t
  misc_feature (636)..(636): n is a, c, g, or t

SEQ ID NO: 277011 - DNA, 476 bp, Homo Sapiens; identical to SEQ ID NO: 254467

SEQ ID NO: 277012 - DNA, 989 bp, Homo Sapiens; identical to SEQ ID NO: 254468

SEQ ID NO: 277013 - DNA, 581 bp, Homo Sapiens; identical to SEQ ID NO: 254469
  misc_feature (35)..(35): n is a, c, g, or t
  misc_feature (99)..(99): n is a, c, g, or t
  misc_feature (205)..(205): n is a, c, g, or t

SEQ ID NO: 277014 - DNA, 523 bp, Homo Sapiens; identical to SEQ ID NO: 254470
  misc_feature (38)..(38): n is a, c, g, or t
  misc_feature (53)..(53): n is a, c, g, or t
  misc_feature (72)..(72): n is a, c, g, or t

SEQ ID NO: 277015 - DNA, 1007 bp, Homo Sapiens; identical to SEQ ID NO: 254471

SEQ ID NO: 277016 - DNA, 621 bp, Homo Sapiens; identical to SEQ ID NO: 254476

SEQ ID NO: 277017 - DNA, 2195 bp, Homo Sapiens; identical to SEQ ID NO: 254477
  misc_feature (1341)..(1349): n is a, c, g, or t
  misc_feature (1471)..(1483): n is a, c, g, or t
  misc_feature (1874)..(1874): n is a, c, g, or t
  misc_feature (1880)..(1880): n is a, c, g, or t
  misc_feature (1923)..(1923): n is a, c, g, or t
  misc_feature (1941)..(1941): n is a, c, g, or t
  misc_feature (2097)..(2097): n is a, c, g, or t
  misc_feature (2099)..(2099): n is a, c, g, or t
  misc_feature (2178)..(2178): n is a, c, g, or t

SEQ ID NO: 277018 - DNA, 673 bp, Homo Sapiens; identical to SEQ ID NO: 254481

SEQ ID NO: 277019 - DNA, 1562 bp, Homo Sapiens; identical to SEQ ID NO: 254482
  misc_feature (1282)..(1282): n is a, c, g, or t

SEQ ID NO: 277020 - DNA, 1586 bp, Homo Sapiens; identical to SEQ ID NO: 254483

SEQ ID NO: 277021 - DNA, 410 bp, Homo Sapiens; identical to SEQ ID NO: 254491
  misc_feature (238)..(265): n is a, c, g, or t

SEQ ID NO: 277022 - DNA, 361 bp, Homo Sapiens; identical to SEQ ID NO: 254492
  misc_feature (98)..(124): n is a, c, g, or t

SEQ ID NO: 277023 - DNA, 986 bp, Homo Sapiens; identical to SEQ ID NO: 254496
  misc_feature (45)..(45): n is a, c, g, or t
  misc_feature (632)..(633): n is a, c, g, or t

SEQ ID NO: 277024 - DNA, 589 bp, Homo Sapiens; identical to SEQ ID NO: 254497

SEQ ID NO: 277025 - DNA, 1523 bp, Homo Sapiens; identical to SEQ ID NO: 254499

SEQ ID NO: 277026 - DNA, 1623 bp, Homo Sapiens; identical to SEQ ID NO: 254500

SEQ ID NO: 277027 - DNA, 653 bp, Homo Sapiens; identical to SEQ ID NO: 254501
  misc_feature (416)..(416): n is a, c, g, or t

SEQ ID NO: 277028 - DNA, 976 bp, Homo Sapiens; identical to SEQ ID NO: 254502

SEQ ID NO: 277029 - DNA, 2194 bp, Homo Sapiens; identical to SEQ ID NO: 254503
  misc_feature (1762)..(1762): n is a, c, g, or t
  misc_feature (2176)..(2176): n is a, c, g, or t

SEQ ID NO: 277030 - DNA, 458 bp, Homo Sapiens; identical to SEQ ID NO: 254504

SEQ ID NO: 277031 - DNA, 772 bp, Homo Sapiens; identical to SEQ ID NO: 254507
  misc_feature (653)..(653): n is a, c, g, or t
  misc_feature (663)..(663): n is a, c, g, or t
  misc_feature (744)..(744): n is a, c, g, or t

SEQ ID NO: 277032 - DNA, 1386 bp, Homo Sapiens; identical to SEQ ID NO: 254508
  misc_feature (1186)..(1188): n is a, c, g, or t
  misc_feature (1192)..(1204): n is a, c, g, or t
  misc_feature (1206)..(1207): n is a, c, g, or t
  misc_feature (1209)..(1209): n is a, c, g, or t
  misc_feature (1213)..(1214): n is a, c, g, or t
  misc_feature (1216)..(1218): n is a, c, g, or t
  misc_feature (1221)..(1221): n is a, c, g, or t
  misc_feature (1226)..(1227): n is a, c, g, or t
  misc_feature (1231)..(1231): n is a, c, g, or t
  misc_feature (1235)..(1235): n is a, c, g, or t
  misc_feature (1237)..(1237): n is a, c, g, or t
  misc_feature (1239)..(1239): n is a, c, g, or t

SEQ ID NO: 277033 - DNA, 809 bp, Homo Sapiens; identical to SEQ ID NO: 254509
  misc_feature (662)..(663): n is a, c, g, or t
  misc_feature (687)..(687): n is a, c, g, or t
  misc_feature (729)..(730): n is a, c, g, or t
  misc_feature (768)..(768): n is a, c, g, or t

SEQ ID NO: 277034 - DNA, 1027 bp, Homo Sapiens; identical to SEQ ID NO: 254511

SEQ ID NO: 277035 - DNA, 797 bp, Homo Sapiens; identical to SEQ ID NO: 171861
  misc_feature (710)..(710): n is a, c, g, or t
  misc_feature (725)..(725): n is a, c, g, or t
  misc_feature (748)..(748): n is a, c, g, or t

SEQ ID NO: 277036 - DNA, 1523 bp, Homo Sapiens; identical to SEQ ID NO: 254513

SEQ ID NO: 277037 - DNA, 483 bp, Homo Sapiens; identical to SEQ ID NO: 254514
  misc_feature (53)..(53): n is a, c, g, or t
  misc_feature (311)..(311): n is a, c, g, or t
  misc_feature (395)..(395): n is a, c, g, or t

SEQ ID NO: 277038 - DNA, 360 bp, Homo Sapiens; identical to SEQ ID NO: 254522

SEQ ID NO: 277039 - DNA, 1052 bp, Homo Sapiens; identical to SEQ ID NO: 254523

SEQ ID NO: 277040 - DNA, 912 bp, Homo Sapiens; identical to SEQ ID NO: 254524

SEQ ID NO: 277041 - DNA, 1001 bp, Homo Sapiens; identical to SEQ ID NO: 254525
  misc_feature (871)..(871): n is a, c, g, or t

SEQ ID NO: 277042 - DNA, 855 bp, Homo Sapiens; identical to SEQ ID NO: 254526

SEQ ID NO: 277043 - DNA, 630 bp, Homo Sapiens; identical to SEQ ID NO: 254527

SEQ ID NO: 277044 - DNA, 357 bp, Homo Sapiens; identical to SEQ ID NO: 254529

SEQ ID NO: 277045 - DNA, 2117 bp, Homo Sapiens; identical to SEQ ID NO: 254530
  misc_feature (264)..(264): n is a, c, g, or t
  misc_feature (632)..(632): n is a, c, g, or t
  misc_feature (644)..(644): n is a, c, g, or t
  misc_feature (677)..(677): n is a, c, g, or t
  misc_feature (679)..(679): n is a, c, g, or t
  misc_feature (686)..(686): n is a, c, g, or t
  misc_feature (689)..(689): n is a, c, g, or t
  misc_feature (692)..(692): n is a, c, g, or t
  misc_feature (695)..(695): n is a, c, g, or t
  misc_feature (697)..(697): n is a, c, g, or t
  misc_feature (701)..(701): n is a, c, g, or t
  misc_feature (703)..(704): n is a, c, g, or t
  misc_feature (708)..(708): n is a, c, g, or t
  misc_feature (718)..(718): n is a, c, g, or t
  misc_feature (723)..(723): n is a, c, g, or t
  misc_feature (763)..(763): n is a, c, g, or t
  misc_feature (766)..(766): n is a, c, g, or t
  misc_feature (788)..(788): n is a, c, g, or t
  misc_feature (791)..(791): n is a, c, g, or t
  misc_feature (794)..(794): n is a, c, g, or t
  misc_feature (803)..(803): n is a, c, g, or t
  misc_feature (808)..(808): n is a, c, g, or t
  misc_feature (816)..(816): n is a, c, g, or t
  misc_feature (820)..(820): n is a, c, g, or t
  misc_feature (823)..(823): n is a, c, g, or t
  misc_feature (827)..(827): n is a, c, g, or t
  misc_feature (830)..(830): n is a, c, g, or t
  misc_feature (851)..(851): n is a, c, g, or t
  misc_feature (867)..(867): n is a, c, g, or t

SEQ ID NO: 277046 - DNA, 1700 bp, Homo Sapiens; identical to SEQ ID NO: 254531
  misc_feature (1655)..(1655): n is a, c, g, or t

SEQ ID NO: 277047 - DNA, 839 bp, Homo Sapiens; identical to SEQ ID NO: 15057

SEQ ID NO: 277048 - DNA, 443 bp, Homo Sapiens; identical to SEQ ID NO: 15245

SEQ ID NO: 277049 - DNA, 482 bp, Homo Sapiens; identical to SEQ ID NO: 254534
  misc_feature (19)..(19): n is a, c, g, or t
  misc_feature (52)..(52): n is a, c, g, or t

SEQ ID NO: 277050 - DNA, 1279 bp, Homo Sapiens; identical to SEQ ID NO: 254535
  misc_feature (907)..(915): n is a, c, g, or t
  misc_feature (1217)..(1217): n is a, c, g, or t

SEQ ID NO: 277051 - DNA, 632 bp, Homo Sapiens; identical to SEQ ID NO: 254536
  misc_feature (66)..(66): n is a, c, g, or t

SEQ ID NO: 277052 - DNA, 1001 bp, Homo Sapiens; identical to SEQ ID NO: 254538
  misc_feature (817)..(817): n is a, c, g, or t
  misc_feature (970)..(970): n is a, c, g, or t

SEQ ID NO: 277053 - DNA, 414 bp, Homo Sapiens; identical to SEQ ID NO: 254539

SEQ ID NO: 277054 - DNA, 1631 bp, Homo Sapiens; identical to SEQ ID NO: 254540

SEQ ID NO: 277055 - DNA, 857 bp, Homo Sapiens; identical to SEQ ID NO: 254541

SEQ ID NO: 277056 - DNA, 1866 bp, Homo Sapiens; identical to SEQ ID NO: 254542
  misc_feature (60)..(60): n is a, c, g, or t
  misc_feature (309)..(309): n is a, c, g, or t
  misc_feature (1707)..(1812): n is a, c, g, or t

SEQ ID NO: 277057 - DNA, 477 bp, Homo Sapiens; identical to SEQ ID NO: 254543

SEQ ID NO: 277058 - DNA, 467 bp, Homo Sapiens; identical to SEQ ID NO: 254544

SEQ ID NO: 277059 - DNA, 381 bp, Homo Sapiens; identical to SEQ ID NO: 254547
  misc_feature (361)..(361): n is a, c, g, or t

SEQ ID NO: 277060 - DNA, 1321 bp, Homo Sapiens; identical to SEQ ID NO: 254548

SEQ ID NO: 277061 - DNA, 409 bp, Homo Sapiens; identical to SEQ ID NO: 254549
  misc_feature (350)..(350): n is a, c, g, or t
  misc_feature (368)..(368): n is a, c, g, or t
  misc_feature (384)..(384): n is a, c, g, or t
  misc_feature (395)..(395): n is a, c, g, or t

SEQ ID NO: 277062 - DNA, 1931 bp, Homo Sapiens; identical to SEQ ID NO: 254555
  misc_feature (1881)..(1881): n is a, c, g, or t

SEQ ID NO: 277063 - DNA, 1064 bp, Homo Sapiens; identical to SEQ ID NO: 254556

SEQ ID NO: 277064 - DNA, 1794 bp, Homo Sapiens; identical to SEQ ID NO: 254557
  misc_feature (445)..(445): n is a, c, g, or t
  misc_feature (473)..(473): n is a, c, g, or t
  misc_feature (533)..(542): n is a, c, g, or t
  misc_feature (1369)..(1377): n is a, c, g, or t

SEQ ID NO: 277065 - DNA, 532 bp, Homo Sapiens; identical to SEQ ID NO: 254558
  misc_feature (14)..(14): n is a, c, g, or t
  misc_feature (24)..(24): n is a, c, g, or t
  misc_feature (36)..(36): n is a, c, g, or t
  misc_feature (61)..(61): n is a, c, g, or t
  misc_feature (67)..(67): n is a, c, g, or t
  misc_feature (77)..(77): n is a, c, g, or t
  misc_feature (118)..(118): n is a, c, g, or t
  misc_feature (148)..(148): n is a, c, g, or t

SEQ ID NO: 277066 - DNA, 1706 bp, Homo Sapiens; identical to SEQ ID NO: 254562
  misc_feature (1690)..(1690): n is a, c, g, or t

SEQ ID NO: 277067 - DNA, 1017 bp, Homo Sapiens; identical to SEQ ID NO: 254563

SEQ ID NO: 277068 - DNA, 956 bp, Homo Sapiens; identical to SEQ ID NO: 254564

SEQ ID NO: 277069 - DNA, 1362 bp, Homo Sapiens; identical to SEQ ID NO: 254565

SEQ ID NO: 277070 - DNA, 1412 bp, Homo Sapiens; identical to SEQ ID NO: 254573
  misc_feature (1350)..(1350): n is a, c, g, or t
  misc_feature (1365)..(1365): n is a, c, g, or t
  misc_feature (1367)..(1371): n is a, c, g, or t

SEQ ID NO: 277071 - DNA, 926 bp, Homo Sapiens; identical to SEQ ID NO: 254574

SEQ ID NO: 277072 - DNA, 1619 bp, Homo Sapiens; identical to SEQ ID NO: 254578
  misc_feature (135)..(177): n is a, c, g, or t
  misc_feature (1417)..(1433): n is a, c, g, or t

SEQ ID NO: 277073 - DNA, 803 bp, Homo Sapiens; identical to SEQ ID NO: 254579

SEQ ID NO: 277074 - DNA, 773 bp, Homo Sapiens; identical to SEQ ID NO: 254580

SEQ ID NO: 277075 - DNA, 521 bp, Homo Sapiens; identical to SEQ ID NO: 254582
  misc_feature (394)..(435): n is a, c, g, or t

SEQ ID NO: 277076 - DNA, 567 bp, Homo Sapiens; identical to SEQ ID NO: 254583
  misc_feature (440)..(480): n is a, c, g, or t

SEQ ID NO: 277077 - DNA, 555 bp, Homo Sapiens; identical to SEQ ID NO: 254584
  misc_feature (294)..(294): n is a, c, g, or t
  misc_feature (308)..(355): n is a, c, g, or t
  misc_feature (435)..(476): n is a, c, g, or t

SEQ ID NO: 277078 - DNA, 633 bp, Homo Sapiens; identical to SEQ ID NO: 254585

SEQ ID NO: 277079 - DNA, 999 bp, Homo Sapiens; identical to SEQ ID NO: 254586
  misc_feature (731)..(792): n is a, c, g, or t

SEQ ID NO: 277080 - DNA, 1138 bp, Homo Sapiens; identical to SEQ ID NO: 254587
  misc_feature (1060)..(1073): n is a, c, g, or t

SEQ ID NO: 277081 - DNA, 1075 bp, Homo Sapiens; identical to SEQ ID NO: 254588
  misc_feature (74)..(82): n is a, c, g, or t

SEQ ID NO: 277082 - DNA, 2706 bp, Homo Sapiens; identical to SEQ ID NO: 254589

SEQ ID NO: 277083 - DNA, 942 bp, Homo Sapiens; identical to SEQ ID NO: 254590
  misc_feature (775)..(775): n is a, c, g, or t

SEQ ID NO: 277084 - DNA, 500 bp, Homo Sapiens; identical to SEQ ID NO: 254591

SEQ ID NO: 277085 - DNA, 917 bp, Homo Sapiens; identical to SEQ ID NO: 254594

SEQ ID NO: 277086 - DNA, 1123 bp, Homo Sapiens; identical to SEQ ID NO: 254595
  misc_feature (703)..(721): n is a, c, g, or t

SEQ ID NO: 277087 - DNA, 1479 bp, Homo Sapiens; identical to SEQ ID NO: 254596

SEQ ID NO: 277088 - DNA, 794 bp, Homo Sapiens; identical to SEQ ID NO: 254597

SEQ ID NO: 277089 - DNA, 1270 bp, Homo Sapiens; identical to SEQ ID NO: 254598
  misc_feature (978)..(1012): n is a, c, g, or t

SEQ ID NO: 277090 - DNA, 780 bp, Homo Sapiens; identical to SEQ ID NO: 254607

SEQ ID NO: 277091 - DNA, 1166 bp, Homo Sapiens; identical to SEQ ID NO: 254608

SEQ ID NO: 277092 - DNA, 324 bp, Homo Sapiens; identical to SEQ ID NO: 254609
  misc_feature (38)..(38): n is a, c, g, or t

SEQ ID NO: 277093 - DNA, 507 bp, Homo Sapiens; identical to SEQ ID NO: 254610

SEQ ID NO: 277094 - DNA, 375 bp, Homo Sapiens; identical to SEQ ID NO: 254611

SEQ ID NO: 277095 - DNA, 1491 bp, Homo Sapiens; identical to SEQ ID NO: 254612
  misc_feature (4)..(4): n is a, c, g, or t
  misc_feature (10)..(10): n is a, c, g, or t
  misc_feature (51)..(51): n is a, c, g, or t
  misc_feature (73)..(75): n is a, c, g, or t
  misc_feature (83)..(83): n is a, c, g, or t
  misc_feature (86)..(86): n is a, c, g, or t
  misc_feature (90)..(90): n is a, c, g, or t
  misc_feature (93)..(93): n is a, c, g, or t
  misc_feature (100)..(100): n is a, c, g, or t
  misc_feature (109)..(112): n is a, c, g, or t
  misc_feature (123)..(123): n is a, c, g, or t
  misc_feature (141)..(141): n is a, c, g, or t
  misc_feature (167)..(167): n is a, c, g, or t
  misc_feature (176)..(176): n is a, c, g, or t
  misc_feature (187)..(187): n is a, c, g, or t
  misc_feature (190)..(190): n is a, c, g, or t
  misc_feature (193)..(193): n is a, c, g, or t
  misc_feature (197)..(197): n is a, c, g, or t
  misc_feature (200)..(200): n is a, c, g, or t
  misc_feature (240)..(240): n is a, c, g, or t
  misc_feature (249)..(249): n is a, c, g, or t
  misc_feature (1326)..(1326): n is a, c, g, or t

SEQ ID NO: 277096 - DNA, 727 bp, Homo Sapiens; identical to SEQ ID NO: 254613

SEQ ID NO: 277097 - DNA, 630 bp, Homo Sapiens; identical to SEQ ID NO: 254614

SEQ ID NO: 277098 - DNA, 1045 bp, Homo Sapiens; identical to SEQ ID NO: 254616
  misc_feature (72)..(72): n is a, c, g, or t
  misc_feature (192)..(192): n is a, c, g, or t

SEQ ID NO: 277099 - DNA, 943 bp, Homo Sapiens; identical to SEQ ID NO: 254617
  misc_feature (255)..(267): n is a, c, g, or t

SEQ ID NO: 277100 - DNA, 1098 bp, Homo Sapiens; identical to SEQ ID NO: 254624

SEQ ID NO: 277101 - DNA, 372 bp, Homo Sapiens; identical to SEQ ID NO: 254625

SEQ ID NO: 277102 - DNA, 1119 bp, Homo Sapiens; identical to SEQ ID NO: 254629
  misc_feature (250)..(376): n is a, c, g, or t
  misc_feature (654)..(654): n is a, c, g, or t
  misc_feature (731)..(731): n is a, c, g, or t
  misc_feature (880)..(880): n is a, c, g, or t
  misc_feature (983)..(983): n is a, c, g, or t
  misc_feature (1066)..(1066): n is a, c, g, or t
  misc_feature (1074)..(1074): n is a, c, g, or t

SEQ ID NO: 277103 - DNA, 963 bp, Homo Sapiens; identical to SEQ ID NO: 254630
  misc_feature (633)..(759): n is a, c, g, or t

SEQ ID NO: 277104 - DNA, 1641 bp, Homo Sapiens; identical to SEQ ID NO: 254631
  misc_feature (19)..(19): n is a, c, g, or t
  misc_feature (24)..(24): n is a, c, g, or t
  misc_feature (55)..(55): n is a, c, g, or t
  misc_feature (68)..(68): n is a, c, g, or t
  misc_feature (74)..(74): n is a, c, g, or t
  misc_feature (101)..(101): n is a, c, g, or t
  misc_feature (104)..(104): n is a, c, g, or t
  misc_feature (118)..(118): n is a, c, g, or t
  misc_feature (236)..(236): n is a, c, g, or t
  misc_feature (400)..(400): n is a, c, g, or t
  misc_feature (407)..(407): n is a, c, g, or t
  misc_feature (416)..(416): n is a, c, g, or t
  misc_feature (499)..(499): n is a, c, g, or t
  misc_feature (513)..(513): n is a, c, g, or t
  misc_feature (522)..(522): n is a, c, g, or t
  misc_feature (554)..(554): n is a, c, g, or t

SEQ ID NO: 277105 - DNA, 616 bp, Homo Sapiens; identical to SEQ ID NO: 254632

SEQ ID NO: 277106 - DNA, 1212 bp, Homo Sapiens; identical to SEQ ID NO: 254636

SEQ ID NO: 277107 - DNA, 1169 bp, Homo Sapiens; identical to SEQ ID NO: 254637

SEQ ID NO: 277108 - DNA, 1217 bp, Homo Sapiens; identical to SEQ ID NO: 254638
  misc_feature (463)..(471): n is a, c, g, or t
  misc_feature (1201)..(1201): n is a, c, g, or t

SEQ ID NO: 277109 - DNA, 960 bp, Homo Sapiens; identical to SEQ ID NO: 254639

SEQ ID NO: 277110 - DNA, 854 bp, Homo Sapiens; identical to SEQ ID NO: 254640
  misc_feature (34)..(34): n is a, c, g, or t
  misc_feature (43)..(43): n is a, c, g, or t

SEQ ID NO: 277111 - DNA, 1634 bp, Homo Sapiens; identical to SEQ ID NO: 254644

SEQ ID NO: 277112 - DNA, 464 bp, Homo Sapiens; identical to SEQ ID NO: 254645
  misc_feature (206)..(206): n is a, c, g, or t
  misc_feature (363)..(363): n is a, c, g, or t

SEQ ID NO: 277113 - DNA, 606 bp, Homo Sapiens; identical to SEQ ID NO: 254660

SEQ ID NO: 277114 - DNA, 857 bp, Homo Sapiens; identical to SEQ ID NO: 254661

SEQ ID NO: 277115 - DNA, 855 bp, Homo Sapiens; identical to SEQ ID NO: 254666

SEQ ID NO: 277116 - DNA, 707 bp, Homo Sapiens; identical to SEQ ID NO: 254667

SEQ ID NO: 277117 - DNA, 873 bp, Homo Sapiens; identical to SEQ ID NO: 254671

SEQ ID NO: 277118 - DNA, 562 bp, Homo Sapiens; identical to SEQ ID NO: 254672

SEQ ID NO: 277119 - DNA, 362 bp, Homo Sapiens; identical to SEQ ID NO: 254678

SEQ ID NO: 277120 - DNA, 792 bp, Homo Sapiens; identical to SEQ ID NO: 254679

SEQ ID NO: 277121 - DNA, 785 bp, Homo Sapiens; identical to SEQ ID NO: 254680
  misc_feature (705)..(705): n is a, c, g, or t

SEQ ID NO: 277122 - DNA, 1674 bp, Homo Sapiens; identical to SEQ ID NO: 14815
  misc_feature (890)..(891): n is a, c, g, or t
  misc_feature (893)..(997): n is a, c, g, or t
  misc_feature (999)..(999): n is a, c, g, or t
  misc_feature (1007)..(1010): n is a, c, g, or t
  misc_feature (1049)..(1063): n is a, c, g, or t
  misc_feature (1141)..(1165): n is a, c, g, or t
  misc_feature (1216)..(1225): n is a, c, g, or t
  misc_feature (1287)..(1307): n is a, c, g, or t
  misc_feature (1346)..(1354): n is a, c, g, or t
  misc_feature (1424)..(1444): n is a, c, g, or t

SEQ ID NO: 277123 - DNA, 515 bp, Homo Sapiens; identical to SEQ ID NO: 254682
  misc_feature (413)..(413): n is a, c, g, or t

SEQ ID NO: 277124 - DNA, 424 bp, Homo Sapiens; identical to SEQ ID NO: 254684

SEQ ID NO: 277125 - DNA, 1903 bp, Homo Sapiens; identical to SEQ ID NO: 254685

SEQ ID NO: 277126 - DNA, 972 bp, Homo Sapiens; identical to SEQ ID NO: 254686

SEQ ID NO: 277127 - DNA, 431 bp, Homo Sapiens; identical to SEQ ID NO: 254687

SEQ ID NO: 277128 - DNA, 884 bp, Homo Sapiens; identical to SEQ ID NO: 254688

SEQ ID NO: 277129 - DNA, 196 bp, Homo Sapiens; identical to SEQ ID NO: 254691

SEQ ID NO: 277130 - DNA, 1114 bp, Homo Sapiens; identical to SEQ ID NO: 254692
  misc_feature (178)..(186): n is a, c, g, or t
  misc_feature (498)..(508): n is a, c, g, or t
  misc_feature (684)..(693): n is a, c, g, or t
  misc_feature (965)..(965): n is a, c, g, or t
  misc_feature (967)..(968): n is a, c, g, or t
  misc_feature (1024)..(1025): n is a, c, g, or t
  misc_feature (1028)..(1047): n is a, c, g, or t
  misc_feature (1066)..(1066): n is a, c, g, or t
  misc_feature (1073)..(1073): n is a, c, g, or t
  misc_feature (1087)..(1087): n is a, c, g, or t

SEQ ID NO: 277131 - DNA, 1683 bp, Homo Sapiens; identical to SEQ ID NO: 254695
  misc_feature (1430)..(1581): n is a, c, g, or t
  misc_feature (1591)..(1593): n is a, c, g, or t
  misc_feature (1614)..(1615): n is a, c, g, or t
  misc_feature (1625)..(1641): n is a, c, g, or t

SEQ ID NO: 277132 - DNA, 1022 bp, Homo Sapiens; identical to SEQ ID NO: 254696
  misc_feature (246)..(246): n is a, c, g, or t
  misc_feature (264)..(264): n is a, c, g, or t
  misc_feature (297)..(297): n is a, c, g, or t
  misc_feature (330)..(330): n is a, c, g, or t
  misc_feature (353)..(353): n is a, c, g, or t
  misc_feature (419)..(419): n is a, c, g, or t
  misc_feature (437)..(437): n is a, c, g, or t
  misc_feature (451)..(451): n is a, c, g, or t
  misc_feature (458)..(458): n is a, c, g, or t
  misc_feature (896)..(896): n is a, c, g, or t
  misc_feature (902)..(902): n is a, c, g, or t
  misc_feature (910)..(910): n is a, c, g, or t
  misc_feature (920)..(920): n is a, c, g, or t
  misc_feature (937)..(937): n is a, c, g, or t
  misc_feature (962)..(962): n is a, c, g, or t

SEQ ID NO: 277133 - DNA, 2367 bp, Homo Sapiens; identical to SEQ ID NO: 254705
  misc_feature (529)..(529): n is a, c, g, or t
  misc_feature (760)..(760): n is a, c, g, or t
  misc_feature (1947)..(1947): n is a, c, g, or t
  misc_feature (1971)..(1971): n is a, c, g, or t
  misc_feature (2007)..(2007): n is a, c, g, or t
  misc_feature (2060)..(2060): n is a, c, g, or t
  misc_feature (2105)..(2105): n is a, c, g, or t
  misc_feature (2129)..(2129): n is a, c, g, or t
  misc_feature (2163)..(2163): n is a, c, g, or t
  misc_feature (2179)..(2179): n is a, c, g, or t
  misc_feature (2212)..(2212): n is a, c, g, or t
  misc_feature (2235)..(2235): n is a, c, g, or t
  misc_feature (2265)..(2265): n is a, c, g, or t
  misc_feature (2294)..(2294): n is a, c, g, or t
  misc_feature (2299)..(2299): n is a, c, g, or t
  misc_feature (2351)..(2351): n is a, c, g, or t

SEQ ID NO: 277134 - DNA, 419 bp, Homo Sapiens; identical to SEQ ID NO: 254706

SEQ ID NO: 277135 - DNA, 428 bp, Homo Sapiens; identical to SEQ ID NO: 254707

SEQ ID NO: 277136 - DNA, 2149 bp, Homo Sapiens; identical to SEQ ID NO: 254708
  misc_feature (5)..(5): n is a, c, g, or t
  misc_feature (7)..(7): n is a, c, g, or t
  misc_feature (15)..(15): n is a, c, g, or t
  misc_feature (17)..(17): n is a, c, g, or t
  misc_feature (27)..(27): n is a, c, g, or t
  misc_feature (34)..(34): n is a, c, g, or t

SEQ ID NO: 277137 - DNA, 421 bp, Homo Sapiens; identical to SEQ ID NO: 254709

SEQ ID NO: 277138 - DNA, 451 bp, Homo Sapiens; identical to SEQ ID NO: 254710

SEQ ID NO: 277139 - DNA, 560 bp, Homo Sapiens; identical to SEQ ID NO: 254714

SEQ ID NO: 277140 - DNA, 377 bp, Homo Sapiens; identical to SEQ ID NO: 254715

SEQ ID NO: 277141 - DNA, 585 bp, Homo Sapiens; identical to SEQ ID NO: 254716

SEQ ID NO: 277142 - DNA, 1342 bp, Homo Sapiens; identical to SEQ ID NO: 254717
  misc_feature (1216)..(1216): n is a, c, g, or t

SEQ ID NO: 277143 - DNA, 614 bp, Homo Sapiens; identical to SEQ ID NO: 254724
  misc_feature (36)..(36): n is a, c, g, or t
  misc_feature (102)..(102): n is a, c, g, or t

SEQ ID NO: 277144 - DNA, 327 bp, Homo Sapiens; identical to SEQ ID NO: 254725

SEQ ID NO: 277145 - DNA, 1116 bp, Homo Sapiens; identical to SEQ ID NO: 254731
  misc_feature (32)..(32): n is a, c, g, or t
  misc_feature (52)..(52): n is a, c, g, or t
  misc_feature (58)..(58): n is a, c, g, or t
  misc_feature (64)..(64): n is a, c, g, or t
  misc_feature (77)..(77): n is a, c, g, or t
  misc_feature (85)..(85): n is a, c, g, or t
  misc_feature (95)..(95): n is a, c, g, or t
  misc_feature (112)..(112): n is a, c, g, or t

SEQ ID NO: 277146 - DNA, 957 bp, Homo Sapiens; identical to SEQ ID NO: 254732
  misc_feature (194)..(233): n is a, c, g, or t

SEQ ID NO: 277147 - DNA, 1620 bp, Homo Sapiens; identical to SEQ ID NO: 254733
  misc_feature (59)..(59): n is a, c, g, or t

SEQ ID NO: 277148 - DNA, 961 bp, Homo Sapiens; identical to SEQ ID NO: 254734
  misc_feature (823)..(823): n is a, c, g, or t

SEQ ID NO: 277149 - DNA, 669 bp, Homo Sapiens; identical to SEQ ID NO: 254735

SEQ ID NO: 277150 - DNA, 950 bp, Homo Sapiens; identical to SEQ ID NO: 254736

SEQ ID NO: 277151 - DNA, 757 bp, Homo Sapiens; identical to SEQ ID NO: 254737

SEQ ID NO: 277152 - DNA, 1836 bp, Homo Sapiens; identical to SEQ ID NO: 254738
  misc_feature (519)..(519): n is a, c, g, or t
  misc_feature (532)..(532): n is a, c, g, or t
  misc_feature (542)..(542): n is a, c, g, or t
  misc_feature (741)..(741): n is a, c, g, or t
  misc_feature (1263)..(1389): n is a, c, g, or t
  misc_feature (1393)..(1534): n is a, c, g, or t
  misc_feature (1577)..(1632): n is a, c, g, or t

SEQ ID NO: 277153 - DNA, 1639 bp, Homo Sapiens; identical to SEQ ID NO: 254742
  misc_feature (1506)..(1534): n is a, c, g, or t
  misc_feature (1536)..(1536): n is a, c, g, or t
  misc_feature (1538)..(1538): n is a, c, g, or t

SEQ ID NO: 277154 - DNA, 910 bp, Homo Sapiens; identical to SEQ ID NO: 254743

SEQ ID NO: 277155 - DNA, 798 bp, Homo Sapiens; identical to SEQ ID NO: 254744
  misc_feature (696)..(729): n is a, c, g, or t

SEQ ID NO: 277156 - DNA, 2196 bp, Homo Sapiens; identical to SEQ ID NO: 254748
  misc_feature (40)..(40): n is a, c, g, or t
  misc_feature (42)..(42): n is a, c, g, or t
  misc_feature (672)..(672): n is a, c, g, or t
  misc_feature (2035)..(2043): n is a, c, g, or t

SEQ ID NO: 277157 - DNA, 500 bp, Homo Sapiens; identical to SEQ ID NO: 254749
  misc_feature (25)..(25): n is a, c, g, or t
  misc_feature (45)..(45): n is a, c, g, or t
  misc_feature (55)..(55): n is a, c, g, or t
  misc_feature (73)..(73): n is a, c, g, or t
  misc_feature (91)..(91): n is a, c, g, or t
  misc_feature (109)..(109): n is a, c, g, or t
  misc_feature (137)..(137): n is a, c, g, or t

SEQ ID NO: 277158 - DNA, 563 bp, Homo Sapiens; identical to SEQ ID NO: 254753

SEQ ID NO: 277159 - DNA, 1853 bp, Homo Sapiens; identical to SEQ ID NO: 254754
  misc_feature (186)..(186): n is a, c, g, or t
  misc_feature (1204)..(1204): n is a, c, g, or t

SEQ ID NO: 277160 - DNA, 748 bp, Homo Sapiens; identical to SEQ ID NO: 254755

SEQ ID NO: 277161 - DNA, 511 bp, Homo Sapiens; identical to SEQ ID NO: 254756
  misc_feature (47)..(47): n is a, c, g, or t
  misc_feature (77)..(77): n is a, c, g, or t
  misc_feature (136)..(136): n is a, c, g, or t

SEQ ID NO: 277162 - DNA, 631 bp, Homo Sapiens; identical to SEQ ID NO: 254757

SEQ ID NO: 277163 - DNA, 1325 bp, Homo Sapiens; identical to SEQ ID NO: 254758

SEQ ID NO: 277164 - DNA, 559 bp, Homo Sapiens; identical to SEQ ID NO: 254759
  misc_feature (190)..(237): n is a, c, g, or t

SEQ ID NO: 277165 - DNA, 895 bp, Homo Sapiens; identical to SEQ ID NO: 254760

SEQ ID NO: 277166 - DNA, 375 bp, Homo Sapiens; identical to SEQ ID NO: 254762

SEQ ID NO: 277167 - DNA, 745 bp, Homo Sapiens; identical to SEQ ID NO: 254763

SEQ ID NO: 277168 - DNA, 910 bp, Homo Sapiens; identical to SEQ ID NO: 254766

SEQ ID NO: 277169 - DNA, 644 bp, Homo Sapiens; identical to SEQ ID NO: 254767

SEQ ID NO: 277170 - DNA, 589 bp, Homo Sapiens; identical to SEQ ID NO: 254768

SEQ ID NO: 277171 - DNA, 1554 bp, Homo Sapiens; identical to SEQ ID NO: 254771
  misc_feature (1299)..(1299): n is a, c, g, or t
  misc_feature (1422)..(1422): n is a, c, g, or t
  misc_feature (1534)..(1534): n is a, c, g, or t

SEQ ID NO: 277172 - DNA, 564 bp, Homo Sapiens; identical to SEQ ID NO: 254772

SEQ ID NO: 277173 - DNA, 803 bp, Homo Sapiens; identical to SEQ ID NO: 254781

SEQ ID NO: 277174 - DNA, 644 bp, Homo Sapiens; identical to SEQ ID NO: 254782
  misc_feature (211)..(211): n is a, c, g, or t

SEQ ID NO: 277175 - DNA, 640 bp, Homo Sapiens; identical to SEQ ID NO: 254783
  misc_feature (600)..(600): n is a, c, g, or t

SEQ ID NO: 277176 - DNA, 1235 bp, Homo Sapiens; identical to SEQ ID NO: 254784
  misc_feature (984)..(984): n is a, c, g, or t
  misc_feature (994)..(994): n is a, c, g, or t
  misc_feature (1052)..(1052): n is a, c, g, or t
  misc_feature (1080)..(1080): n is a, c, g, or t
  misc_feature (1092)..(1092): n is a, c, g, or t
  misc_feature (1104)..(1104): n is a, c, g, or t
  misc_feature (1137)..(1137): n is a, c, g, or t
  misc_feature (1153)..(1153): n is a, c, g, or t
  misc_feature (1162)..(1162): n is a, c, g, or t
  misc_feature (1175)..(1175): n is a, c, g, or t
  misc_feature (1185)..(1185): n is a, c, g, or t

SEQ ID NO: 277177 - DNA, 972 bp, Homo Sapiens; identical to SEQ ID NO: 254785
  misc_feature (23)..(23): n is a, c, g, or t
  misc_feature (492)..(570): n is a, c, g, or t

SEQ ID NO: 277178 - DNA, 738 bp, Homo Sapiens; identical to SEQ ID NO: 254788
  misc_feature (26)..(26): n is a, c, g, or t
  misc_feature (31)..(31): n is a, c, g, or t

SEQ ID NO: 277179 - DNA, 618 bp, Homo Sapiens; identical to SEQ ID NO: 254789

SEQ ID NO: 277180 - DNA, 391 bp, Homo Sapiens; identical to SEQ ID NO: 254790

SEQ ID NO: 277181 - DNA, 530 bp, Homo Sapiens; identical to SEQ ID NO: 254791
  misc_feature (16)..(16): n is a, c, g, or t
  misc_feature (27)..(27): n is a, c, g, or t
  misc_feature (77)..(77): n is a, c, g, or t
  misc_feature (89)..(89): n is a, c, g, or t
  misc_feature (120)..(120): n is a, c, g, or t
  misc_feature (147)..(147): n is a, c, g, or t

SEQ ID NO: 277182 - DNA, 356 bp, Homo Sapiens; identical to SEQ ID NO: 254792

SEQ ID NO: 277183 - DNA, 549 bp, Homo Sapiens; identical to SEQ ID NO: 254793
  misc_feature (520)..(520): n is a, c, g, or t

SEQ ID NO: 277184 - DNA, 550 bp, Homo Sapiens; identical to SEQ ID NO: 254794

SEQ ID NO: 277185 - DNA, 525 bp, Homo Sapiens; identical to SEQ ID NO: 254795
  misc_feature (324)..(324): n is a, c, g, or t
  misc_feature (448)..(448): n is a, c, g, or t
  misc_feature (476)..(476): n is a, c, g, or t
  misc_feature (504)..(504): n is a, c, g, or t
  misc_feature (511)..(511): n is a, c, g, or t

SEQ ID NO: 277186 - DNA, 811 bp, Homo Sapiens; identical to SEQ ID NO: 254799
  misc_feature (675)..(675): n is a, c, g, or t
  misc_feature (732)..(732): n is a, c, g, or t
  misc_feature (739)..(739): n is a, c, g, or t
  misc_feature (752)..(752): n is a, c, g, or t
  misc_feature (758)..(758): n is a, c, g, or t
  misc_feature (767)..(767): n is a, c, g, or t
  misc_feature (775)..(775): n is a, c, g, or t
  misc_feature (793)..(793): n is a, c, g, or t

SEQ ID NO: 277187 - DNA, 805 bp, Homo Sapiens; identical to SEQ ID NO: 254800

SEQ ID NO: 277188 - DNA, 1266 bp, Homo Sapiens; identical to SEQ ID NO: 254801

SEQ ID NO: 277189 - DNA, 1741 bp, Homo Sapiens; identical to SEQ ID NO: 254802

SEQ ID NO: 277190 - DNA, 1447 bp, Homo Sapiens; identical to SEQ ID NO: 254805
  misc_feature (835)..(855): n is a, c, g, or t

SEQ ID NO: 277191 - DNA, 633 bp, Homo Sapiens; identical to SEQ ID NO: 254806

SEQ ID NO: 277192 - DNA, 367 bp, Homo Sapiens; identical to SEQ ID NO: 254812

SEQ ID NO: 277193 - DNA, 1864 bp, Homo Sapiens; identical to SEQ ID NO: 254813

SEQ ID NO: 277194 - DNA, 786 bp, Homo Sapiens; identical to SEQ ID NO: 254817
  misc_feature (340)..(372): n is a, c, g, or t

SEQ ID NO: 277195 - DNA, 587 bp, Homo Sapiens; identical to SEQ ID NO: 254818
  misc_feature (55)..(87): n is a, c, g, or t

SEQ ID NO: 277196 - DNA, 2267 bp, Homo Sapiens; identical to SEQ ID NO: 254819
  misc_feature (32)..(32): n is a, c, g, or t
  misc_feature (1067)..(1099): n is a, c, g, or t
  misc_feature (2018)..(2044): n is a, c, g, or t
  misc_feature (2092)..(2095): n is a, c, g, or t
  misc_feature (2097)..(2098): n is a, c, g, or t
  misc_feature (2100)..(2191): n is a, c, g, or t

SEQ ID NO: 277197 - DNA, 1753 bp, Homo Sapiens; identical to SEQ ID NO: 254821
  misc_feature (634)..(634): n is a, c, g, or t

SEQ ID NO: 277198 - DNA, 343 bp, Homo Sapiens; identical to SEQ ID NO: 254822

SEQ ID NO: 277199 - DNA, 725 bp, Homo Sapiens; identical to SEQ ID NO: 254823
  misc_feature (210)..(210): n is a, c, g, or t
  misc_feature (309)..(309): n is a, c, g, or t

SEQ ID NO: 277200 - DNA, 366 bp, Homo Sapiens; identical to SEQ ID NO: 254829

SEQ ID NO: 277201 - DNA, 1091 bp, Homo Sapiens; identical to SEQ ID NO: 254830
  misc_feature (850)..(852): n is a, c, g, or t
  misc_feature (854)..(854): n is a, c, g, or t
  misc_feature (856)..(859): n is a, c, g, or t
  misc_feature (861)..(861): n is a, c, g, or t
  misc_feature (865)..(866): n is a, c, g, or t
  misc_feature (875)..(930): n is a, c, g, or t
  misc_feature (980)..(981): n is a, c, g, or t
  misc_feature (995)..(1009): n is a, c, g, or t

SEQ ID NO: 277202 - DNA, 355 bp, Homo Sapiens; identical to SEQ ID NO: 254836

SEQ ID NO: 277203 - DNA, 1020 bp, Homo Sapiens; identical to SEQ ID NO: 254837
  misc_feature (164)..(164): n is a, c, g, or t
  misc_feature (167)..(167): n is a, c, g, or t
  misc_feature (629)..(659): n is a, c, g, or t

SEQ ID NO: 277204 - DNA, 435 bp, Homo Sapiens; identical to SEQ ID NO: 254838
  misc_feature (212)..(212): n is a, c, g, or t
  misc_feature (215)..(215): n is a, c, g, or t
  misc_feature (217)..(217): n is a, c, g, or t
  misc_feature (301)..(301): n is a, c, g, or t
  misc_feature (304)..(304): n is a, c, g, or t
  misc_feature (351)..(351): n is a, c, g, or t
  misc_feature (396)..(396): n is a, c, g, or t
  misc_feature (419)..(419): n is a, c, g, or t

SEQ ID NO: 277205 - DNA, 774 bp, Homo Sapiens; identical to SEQ ID NO: 254841
  misc_feature (736)..(736): n is a, c, g, or t

SEQ ID NO: 277206 - DNA, 504 bp, Homo Sapiens; identical to SEQ ID NO: 254842

SEQ ID NO: 277207 - DNA, 1828 bp, Homo Sapiens; identical to SEQ ID NO: 254847
  misc_feature (1313)..(1338): n is a, c, g, or t
  misc_feature (1700)..(1700): n is a, c, g, or t

SEQ ID NO: 277208 - DNA, 803 bp, Homo Sapiens; identical to SEQ ID NO: 254848
  misc_feature (514)..(571): n is a, c, g, or t
  misc_feature (665)..(665): n is a, c, g, or t

SEQ ID NO: 277209 - DNA, 803 bp, Homo Sapiens; identical to SEQ ID NO: 254852
  misc_feature (684)..(684): n is a, c, g, or t
  misc_feature (725)..(725): n is a, c, g, or t
  misc_feature (734)..(734): n is a, c, g, or t
  misc_feature (768)..(768): n is a, c, g, or t
  misc_feature (776)..(776): n is a, c, g, or t
  misc_feature (787)..(787): n is a, c, g, or t

SEQ ID NO: 277210 - DNA, 604 bp, Homo Sapiens; identical to SEQ ID NO: 254853

SEQ ID NO: 277211 - DNA, 633 bp, Homo Sapiens; identical to SEQ ID NO: 254854
  misc_feature (22)..(22): n is a, c, g, or t
  misc_feature (66)..(66): n is a, c, g, or t
  misc_feature (83)..(83): n is a, c, g, or t
  misc_feature (91)..(91): n is a, c, g, or t
  misc_feature (134)..(134): n is a, c, g, or t
  misc_feature (147)..(147): n is a, c, g, or t

SEQ ID NO: 277212 - DNA, 432 bp, Homo Sapiens; identical to SEQ ID NO: 254855
  misc_feature (18)..(18): n is a, c, g, or t
  misc_feature (27)..(27): n is a, c, g, or t

SEQ ID NO: 277213 - DNA, 881 bp, Homo Sapiens; identical to SEQ ID NO: 254856
  misc_feature (641)..(641): n is a, c, g, or t
  misc_feature (716)..(716): n is a, c, g, or t
  misc_feature (817)..(817): n is a, c, g, or t
  misc_feature (842)..(842): n is a, c, g, or t

SEQ ID NO: 277214 - DNA, 1019 bp, Homo Sapiens; identical to SEQ ID NO: 254857
  misc_feature (14)..(14): n is a, c, g, or t
  misc_feature (17)..(17): n is a, c, g, or t
  misc_feature (33)..(33): n is a, c, g, or t
  misc_feature (53)..(53): n is a, c, g, or t

SEQ ID NO: 277215 - DNA, 1505 bp, Homo Sapiens; identical to SEQ ID NO: 254858
  misc_feature (388)..(388): n is a, c, g, or t

SEQ ID NO: 277216 - DNA, 1357 bp, Homo Sapiens; identical to SEQ ID NO: 254869
  misc_feature (857)..(857): n is a, c, g, or t

SEQ ID NO: 277217 - DNA, 637 bp, Homo Sapiens; identical to SEQ ID NO: 254870
  misc_feature (26)..(26): n is a, c, g, or t
  misc_feature (87)..(87): n is a, c, g, or t
  misc_feature (243)..(243): n is a, c, g, or t
  misc_feature (305)..(305): n is a, c, g, or t

SEQ ID NO: 277218 - DNA, 705 bp, Homo Sapiens; identical to SEQ ID NO: 254871

SEQ ID NO: 277219 - DNA, 407 bp, Homo Sapiens; identical to SEQ ID NO: 254872

SEQ ID NO: 277220 - DNA, 1163 bp, Homo Sapiens; identical to SEQ ID NO: 254874
  misc_feature (129)..(157): n is a, c, g, or t

SEQ ID NO: 277221 - DNA, 1959 bp, Homo Sapiens; identical to SEQ ID NO: 254875
  misc_feature (1248)..(1248): n is a, c, g, or t
  misc_feature (1261)..(1276): n is a, c, g, or t

SEQ ID NO: 277222 - DNA, 1248 bp, Homo Sapiens; identical to SEQ ID NO: 254877
  misc_feature (179)..(179): n is a, c, g, or t
  misc_feature (213)..(213): n is a, c, g, or t
  misc_feature (288)..(288): n is a, c, g, or t
  misc_feature (728)..(776): n is a, c, g, or t
  misc_feature (929)..(929): n is a, c, g, or t
  misc_feature (1032)..(1066): n is a, c, g, or t

SEQ ID NO: 277223 - DNA, 460 bp, Homo Sapiens; identical to SEQ ID NO: 254878
  misc_feature (17)..(17): n is a, c, g, or t
  misc_feature (26)..(26): n is a, c, g, or t
  misc_feature (39)..(39): n is a, c, g, or t

SEQ ID NO: 277224 - DNA, 524 bp, Homo Sapiens; identical to SEQ ID NO: 254879
  misc_feature (289)..(352): n is a, c, g, or t
  misc_feature (409)..(409): n is a, c, g, or t

SEQ ID NO: 277225 - DNA, 491 bp, Homo Sapiens; identical to SEQ ID NO: 254880
  misc_feature (221)..(221): n is a, c, g, or t

SEQ ID NO: 277226 - DNA, 835 bp, Homo Sapiens; identical to SEQ ID NO: 254881

SEQ ID NO: 277227 - DNA, 842 bp, Homo Sapiens; identical to SEQ ID NO: 254882
  misc_feature (624)..(632): n is a, c, g, or t

SEQ ID NO: 277228 - DNA, 345 bp, Homo Sapiens; identical to SEQ ID NO: 254889

SEQ ID NO: 277229 - DNA, 774 bp, Homo Sapiens; identical to SEQ ID NO: 254890
  misc_feature (632)..(648): n is a, c, g, or t
  misc_feature (650)..(654): n is a, c, g, or t

SEQ ID NO: 277230 - DNA, 610 bp, Homo Sapiens; identical to SEQ ID NO: 254895
  misc_feature (160)..(160): n is a, c, g, or t

SEQ ID NO: 277231 - DNA, 632 bp, Homo Sapiens; identical to SEQ ID NO: 254896
  misc_feature (20)..(20): n is a, c, g, or t
  misc_feature (48)..(48): n is a, c, g, or t
  misc_feature (65)..(65): n is a, c, g, or t
  misc_feature (70)..(70): n is a, c, g, or t
  misc_feature (142)..(142): n is a, c, g, or t
  misc_feature (611)..(611): n is a, c, g, or t

SEQ ID NO: 277232 - DNA, 457 bp, Homo Sapiens; identical to SEQ ID NO: 254897
  misc_feature (26)..(26): n is a, c, g, or t
  misc_feature (55)..(55): n is a, c, g, or t
  misc_feature (62)..(62): n is a, c, g, or t
  misc_feature (182)..(182): n is a, c, g, or t

SEQ ID NO: 277233 - DNA, 381 bp, Homo Sapiens; identical to SEQ ID NO: 254902

SEQ ID NO: 277234 - DNA, 1916 bp, Homo Sapiens; identical to SEQ ID NO: 254903
  misc_feature (1589)..(1589): n is a, c, g, or t
  misc_feature (1661)..(1661): n is a, c, g, or t
  misc_feature (1738)..(1738): n is a, c, g, or t
  misc_feature (1748)..(1748): n is a, c, g, or t
  misc_feature (1751)..(1751): n is a, c, g, or t
  misc_feature (1754)..(1754): n is a, c, g, or t
  misc_feature (1757)..(1757): n is a, c, g, or t
  misc_feature (1760)..(1760): n is a, c, g, or t
  misc_feature (1774)..(1774): n is a, c, g, or t
  misc_feature (1777)..(1777): n is a, c, g, or t
  misc_feature (1779)..(1779): n is a, c, g, or t
  misc_feature (1781)..(1781): n is a, c, g, or t
  misc_feature (1784)..(1787): n is a, c, g, or t
  misc_feature (1790)..(1790): n is a, c, g, or t
  misc_feature (1805)..(1806): n is a, c, g, or t
  misc_feature (1811)..(1812): n is a, c, g, or t
  misc_feature (1814)..(1814): n is a, c, g, or t
  misc_feature (1817)..(1819): n is a, c, g, or t
  misc_feature (1821)..(1821): n is a, c, g, or t
  misc_feature (1827)..(1827): n is a, c, g, or t
  misc_feature (1829)..(1829): n is a, c, g, or t
  misc_feature (1835)..(1835): n is a, c, g, or t
  misc_feature (1837)..(1837): n is a, c, g, or t
  misc_feature (1858)..(1858): n is a, c, g, or t
  misc_feature (1865)..(1865): n is a, c, g, or t
  misc_feature (1899)..(1899): n is a, c, g, or t
  misc_feature (1910)..(1910): n is a, c, g, or t

SEQ ID NO: 277235 - DNA, 2032 bp, Homo Sapiens; identical to SEQ ID NO: 254904

SEQ ID NO: 277236 - DNA, 348 bp, Homo Sapiens; identical to SEQ ID NO: 254917

SEQ ID NO: 277237 - DNA, 1300 bp, Homo Sapiens; identical to SEQ ID NO: 254918

SEQ ID NO: 277238 - DNA, 343 bp, Homo Sapiens; identical to SEQ ID NO: 254919
  misc_feature (163)..(163): n is a, c, g, or t

SEQ ID NO: 277239 - DNA, 573 bp, Homo Sapiens; identical to SEQ ID NO: 254922

SEQ ID NO: 277240 - DNA, 798 bp, Homo Sapiens; identical to SEQ ID NO: 254923

SEQ ID NO: 277241 - DNA, 1495 bp, Homo Sapiens; identical to SEQ ID NO: 254924
  misc_feature (609)..(609): n is a, c, g, or t
  misc_feature (1423)..(1423): n is a, c, g, or t

SEQ ID NO: 277242 - DNA, 1368 bp, Homo Sapiens; identical to SEQ ID NO: 254925

SEQ ID NO: 277243 - DNA, 539 bp, Homo Sapiens; identical to SEQ ID NO: 254926

SEQ ID NO: 277244 - DNA, 1028 bp, Homo Sapiens; identical to SEQ ID NO: 254927

SEQ ID NO: 277245 - DNA, 994 bp, Homo Sapiens; identical to SEQ ID NO: 254933
  misc_feature (952)..(952): n is a, c, g, or t
  misc_feature (971)..(971): n is a, c, g, or t

SEQ ID NO: 277246 - DNA, 981 bp, Homo Sapiens; identical to SEQ ID NO: 254934

SEQ ID NO: 277247 - DNA, 1317 bp, Homo Sapiens; identical to SEQ ID NO: 254935
  misc_feature (841)..(887): n is a, c, g, or t

SEQ ID NO: 277248 - DNA, 362 bp, Homo Sapiens; identical to SEQ ID NO: 254936

SEQ ID NO: 277249 - DNA, 541 bp, Homo Sapiens; identical to SEQ ID NO: 254937
  misc_feature (231)..(239): n is a, c, g, or t

SEQ ID NO: 277250 - DNA, 833 bp, Homo Sapiens; identical to SEQ ID NO: 254938
  misc_feature (249)..(307): n is a, c, g, or t

SEQ ID NO: 277251 - DNA, 395 bp, Homo Sapiens; identical to SEQ ID NO: 254944

SEQ ID NO: 277252 - DNA, 1417 bp, Homo Sapiens; identical to SEQ ID NO: 254945
  misc_feature (477)..(485): n is a, c, g, or t
  misc_feature (958)..(958): n is a, c, g, or t
  misc_feature (983)..(983): n is a, c, g, or t

SEQ ID NO: 277253 - DNA, 487 bp, Homo Sapiens; identical to SEQ ID NO: 254948

SEQ ID NO: 277254 - DNA, 1019 bp, Homo Sapiens; identical to SEQ ID NO: 254949
  misc_feature (34)..(34): n is a, c, g, or t

SEQ ID NO: 277255 - DNA, 685 bp, Homo Sapiens; identical to SEQ ID NO: 254955

SEQ ID NO: 277256 - DNA, 1791 bp, Homo Sapiens; identical to SEQ ID NO: 254956
  misc_feature (1281)..(1281): n is a, c, g, or t
  misc_feature (1516)..(1516): n is a, c, g, or t

SEQ ID NO: 277257 - DNA, 422 bp, Homo Sapiens; identical to SEQ ID NO: 254957
  misc_feature (335)..(335): n is a, c, g, or t

SEQ ID NO: 277258 - DNA, 521 bp, Homo Sapiens; identical to SEQ ID NO: 254958
  misc_feature (262)..(262): n is a, c, g, or t

SEQ ID NO: 277259 - DNA, 313 bp, Homo Sapiens; identical to SEQ ID NO: 254959
  misc_feature (199)..(199): n is a, c, g, or t
  misc_feature (219)..(219): n is a, c, g, or t
  misc_feature (259)..(259): n is a, c, g, or t

SEQ ID NO: 277260 - DNA, 634 bp, Homo Sapiens; identical to SEQ ID NO: 254961

SEQ ID NO: 277261 - DNA, 985 bp, Homo Sapiens; identical to SEQ ID NO: 254962

SEQ ID NO: 277262 - DNA, 626 bp, Homo Sapiens; identical to SEQ ID NO: 254967
  misc_feature (50)..(50): n is a, c, g, or t
  misc_feature (55)..(55): n is a, c, g, or t

SEQ ID NO: 277263 - DNA, 394 bp, Homo Sapiens; identical to SEQ ID NO: 254968

SEQ ID NO: 277264 - DNA, 829 bp, Homo Sapiens; identical to SEQ ID NO: 254969
  misc_feature (11)..(11): n is a, c, g, or t
  misc_feature (533)..(533): n is a, c, g, or t

SEQ ID NO: 277265 - DNA, 578 bp, Homo Sapiens; identical to SEQ ID NO: 254970
  misc_feature (341)..(341): n is a, c, g, or t
  misc_feature (353)..(353): n is a, c, g, or t
  misc_feature (448)..(448): n is a, c, g, or t
  misc_feature (482)..(482): n is a, c, g, or t
  misc_feature (504)..(504): n is a, c, g, or t
  misc_feature (527)..(527): n is a, c, g, or t
  misc_feature (551)..(551): n is a, c, g, or t

SEQ ID NO: 277266 - DNA, 1828 bp, Homo Sapiens; identical to SEQ ID NO: 254971
  misc_feature (186)..(186): n is a, c, g, or t
  misc_feature (412)..(412): n is a, c, g, or t
  misc_feature (489)..(489): n is a, c, g, or t
  misc_feature (522)..(522): n is a, c, g, or t
  misc_feature (583)..(583): n is a, c, g, or t
  misc_feature (600)..(600): n is a, c, g, or t
  misc_feature (611)..(611): n is a, c, g, or t
  misc_feature (626)..(626): n is a, c, g, or t
  misc_feature (629)..(629): n is a, c, g, or t
  misc_feature (634)..(634): n is a, c, g, or t
  misc_feature (640)..(640): n is a, c, g, or t
  misc_feature (643)..(643): n is a, c, g, or t
  misc_feature (652)..(652): n is a, c, g, or t
  misc_feature (656)..(657): n is a, c, g, or t
  misc_feature (670)..(670): n is a, c, g, or t
  misc_feature (686)..(686): n is a, c, g, or t

SEQ ID NO: 277267 - DNA, 669 bp, Homo Sapiens; identical to SEQ ID NO: 254972

SEQ ID NO: 277268 - DNA, 1418 bp, Homo Sapiens; identical to SEQ ID NO: 254973
  misc_feature (904)..(1126): n is a, c, g, or t
  misc_feature (1296)..(1296): n is a, c, g, or t

SEQ ID NO: 277269 - DNA, 1685 bp, Homo Sapiens; identical to SEQ ID NO: 254975
  misc_feature (533)..(815): n is a, c, g, or t
  misc_feature (1267)..(1275): n is a, c, g, or t
  misc_feature (1590)..(1590): n is a, c, g, or t
  misc_feature (1595)..(1595): n is a, c, g, or t

SEQ ID NO: 277270 - DNA, 1254 bp, Homo Sapiens; identical to SEQ ID NO: 254976
  misc_feature (79)..(337): n is a, c, g, or t
  misc_feature (344)..(380): n is a, c, g, or t

SEQ ID NO: 277271 - DNA, 713 bp, Homo Sapiens; identical to SEQ ID NO: 254980
  misc_feature (323)..(376): n is a, c, g, or t
  misc_feature (414)..(444): n is a, c, g, or t
  misc_feature (636)..(668): n is a, c, g, or t

SEQ ID NO: 277272 - DNA, 751 bp, Homo Sapiens; identical to SEQ ID NO: 254981
  misc_feature (18)..(18): n is a, c, g, or t
  misc_feature (26)..(26): n is a, c, g, or t
  misc_feature (83)..(103): n is a, c, g, or t
  misc_feature (722)..(722): n is a, c, g, or t

SEQ ID NO: 277273 - DNA, 1097 bp, Homo Sapiens; identical to SEQ ID NO: 254982

SEQ ID NO: 277274 - DNA, 2272 bp, Homo Sapiens; identical to SEQ ID NO: 254983
  misc_feature (579)..(587): n is a, c, g, or t
  misc_feature (2057)..(2142): n is a, c, g, or t
  misc_feature (2145)..(2150): n is a, c, g, or t
  misc_feature (2154)..(2156): n is a, c, g, or t
  misc_feature (2158)..(2158): n is a, c, g, or t
  misc_feature (2164)..(2182): n is a, c, g, or t
  misc_feature (2188)..(2189): n is a, c, g, or t
  misc_feature (2196)..(2196): n is a, c, g, or t
  misc_feature (2218)..(2218): n is a, c, g, or t

SEQ ID NO: 277275 - DNA, 811 bp, Homo Sapiens; identical to SEQ ID NO: 254984

SEQ ID NO: 277276 - DNA, 471 bp, Homo Sapiens; identical to SEQ ID NO: 254985

SEQ ID NO: 277277 - DNA, 750 bp, Homo Sapiens; identical to SEQ ID NO: 254986
  misc_feature (501)..(623): n is a, c, g, or t
  misc_feature (696)..(696): n is a, c, g, or t

SEQ ID NO: 277278 - DNA, 1104 bp, Homo Sapiens; identical to SEQ ID NO: 254987
  misc_feature (452)..(452): n is a, c, g, or t
  misc_feature (458)..(508): n is a, c, g, or t
  misc_feature (648)..(648): n is a, c, g, or t
  misc_feature (799)..(847): n is a, c, g, or t
  misc_feature (888)..(900): n is a, c, g, or t

SEQ ID NO: 277279 - DNA, 627 bp, Homo Sapiens; identical to SEQ ID NO: 254989
  misc_feature (32)..(32): n is a, c, g, or t
  misc_feature (39)..(39): n is a, c, g, or t
  misc_feature (61)..(61): n is a, c, g, or t
  misc_feature (67)..(67): n is a, c, g, or t
  misc_feature (72)..(72): n is a, c, g, or t
  misc_feature (75)..(75): n is a, c, g, or t
  misc_feature (77)..(77): n is a, c, g, or t
  misc_feature (79)..(79): n is a, c, g, or t
  misc_feature (131)..(132): n is a, c, g, or t
  misc_feature (136)..(136): n is a, c, g, or t
  misc_feature (145)..(145): n is a, c, g, or t
  misc_feature (171)..(171): n is a, c, g, or t

SEQ ID NO: 277280 - DNA, 903 bp, Homo Sapiens; identical to SEQ ID NO: 254990
  misc_feature (307)..(307): n is a, c, g, or t
  misc_feature (457)..(457): n is a, c, g, or t
  misc_feature (483)..(483): n is a, c, g, or t
  misc_feature (498)..(498): n is a, c, g, or t
  misc_feature (500)..(500): n is a, c, g, or t

SEQ ID NO: 277281 - DNA, 1084 bp, Homo Sapiens; identical to SEQ ID NO: 254991

SEQ ID NO: 277282 - DNA, 371 bp, Homo Sapiens; identical to SEQ ID NO: 255002

SEQ ID NO: 277283 - DNA, 1164 bp, Homo Sapiens; identical to SEQ ID NO: 255003

SEQ ID NO: 277284 - DNA, 950 bp, Homo Sapiens; identical to SEQ ID NO: 255004
  misc_feature (143)..(143): n is a, c, g, or t

SEQ ID NO: 277285 - DNA, 809 bp, Homo Sapiens; identical to SEQ ID NO: 255005
  misc_feature (727)..(727): n is a, c, g, or t
  misc_feature (787)..(788): n is a, c, g, or t

SEQ ID NO: 277286 - DNA, 433 bp, Homo Sapiens; identical to SEQ ID NO: 255011

SEQ ID NO: 277287 - DNA, 1594 bp, Homo Sapiens; identical to SEQ ID NO: 255012

SEQ ID NO: 277288 - DNA, 984 bp, Homo Sapiens; identical to SEQ ID NO: 255021

SEQ ID NO: 277289 - DNA, 445 bp, Homo Sapiens; identical to SEQ ID NO: 255022
  misc_feature (16)..(16): n is a, c, g, or t
  misc_feature (69)..(69): n is a, c, g, or t
  misc_feature (299)..(299): n is a, c, g, or t

SEQ ID NO: 277290 - DNA, 510 bp, Homo Sapiens; identical to SEQ ID NO: 255023
  misc_feature (334)..(334): n is a, c, g, or t
  misc_feature (486)..(486): n is a, c, g, or t
  misc_feature (497)..(497): n is a, c, g, or t

SEQ ID NO: 277291 - DNA, 1707 bp, Homo Sapiens; identical to SEQ ID NO: 255027

SEQ ID NO: 277292 - DNA, 490 bp, Homo Sapiens; identical to SEQ ID NO: 255028
  misc_feature (18)..(18): n is a, c, g, or t
  misc_feature (30)..(30): n is a, c, g, or t
  misc_feature (53)..(53): n is a, c, g, or t
  misc_feature (81)..(81): n is a, c, g, or t

SEQ ID NO: 277293 - DNA, 1555 bp, Homo Sapiens; identical to SEQ ID NO: 255039
  misc_feature (17)..(17): n is a, c, g, or t
  misc_feature (26)..(26): n is a, c, g, or t

SEQ ID NO: 277294 - DNA, 2364 bp, Homo Sapiens; identical to SEQ ID NO: 255040
  misc_feature (1738)..(1788): n is a, c, g, or t
  misc_feature (2117)..(2117): n is a, c, g, or t
  misc_feature (2153)..(2153): n is a, c, g, or t
  misc_feature (2174)..(2174): n is a, c, g, or t
  misc_feature (2322)..(2322): n is a, c, g, or t
  misc_feature (2330)..(2330): n is a, c, g, or t
  misc_feature (2339)..(2339): n is a, c, g, or t
  misc_feature (2348)..(2348): n is a, c, g, or t

SEQ ID NO: 277295 - DNA, 623 bp, Homo Sapiens; identical to SEQ ID NO: 255041

SEQ ID NO: 277296 - DNA, 378 bp, Homo Sapiens; identical to SEQ ID NO: 255042

SEQ ID NO: 277297 - DNA, 886 bp, Homo Sapiens; identical to SEQ ID NO: 255043
  misc_feature (176)..(176): n is a, c, g, or t

SEQ ID NO: 277298 - DNA, 1282 bp, Homo Sapiens; identical to SEQ ID NO: 255049
  misc_feature (390)..(390): n is a, c, g, or t
  misc_feature (462)..(462): n is a, c, g, or t
  misc_feature (816)..(816): n is a, c, g, or t
  misc_feature (934)..(934): n is a, c, g, or t
  misc_feature (1195)..(1195): n is a, c, g, or t
  misc_feature (1200)..(1200): n is a, c, g, or t
  misc_feature (1221)..(1221): n is a, c, g, or t
  misc_feature (1260)..(1260): n is a, c, g, or t

SEQ ID NO: 277299 - DNA, 881 bp, Homo Sapiens; identical to SEQ ID NO: 255050
  misc_feature (552)..(592): n is a, c, g, or t
  misc_feature (626)..(626): n is a, c, g, or t

SEQ ID NO: 277300 - DNA, 907 bp, Homo Sapiens; identical to SEQ ID NO: 255051
  misc_feature (29)..(29): n is a, c, g, or t
  misc_feature (31)..(31): n is a, c, g, or t
  misc_feature (43)..(43): n is a, c, g, or t
  misc_feature (47)..(47): n is a, c, g, or t
  misc_feature (50)..(51): n is a, c, g, or t
  misc_feature (55)..(55): n is a, c, g, or t
  misc_feature (66)..(66): n is a, c, g, or t
  misc_feature (70)..(71): n is a, c, g, or t
  misc_feature (86)..(86): n is a, c, g, or t
  misc_feature (101)..(102): n is a, c, g, or t
  misc_feature (114)..(115): n is a, c, g, or t
  misc_feature (141)..(141): n is a, c, g, or t
  misc_feature (194)..(194): n is a, c, g, or t

SEQ ID NO: 277301 - DNA, 958 bp, Homo Sapiens; identical to SEQ ID NO: 255052

SEQ ID NO: 277302 - DNA, 985 bp, Homo Sapiens; identical to SEQ ID NO: 255053
  misc_feature (455)..(481): n is a, c, g, or t
  misc_feature (485)..(581): n is a, c, g, or t
  misc_feature (642)..(719): n is a, c, g, or t
  misc_feature (761)..(773): n is a, c, g, or t
  misc_feature (946)..(946): n is a, c, g, or t

SEQ ID NO: 277303 - DNA, 1103 bp, Homo Sapiens; identical to SEQ ID NO: 255054
  misc_feature (593)..(612): n is a, c, g, or t
  misc_feature (621)..(659): n is a, c, g, or t
  misc_feature (706)..(778): n is a, c, g, or t
  misc_feature (827)..(953): n is a, c, g, or t

SEQ ID NO: 277304 - DNA, 876 bp, Homo Sapiens; identical to SEQ ID NO: 255055

SEQ ID NO: 277305 - DNA, 921 bp, Homo Sapiens; identical to SEQ ID NO: 255056
  misc_feature (652)..(652): n is a, c, g, or t

SEQ ID NO: 277306 - DNA, 1024 bp, Homo Sapiens; identical to SEQ ID NO: 255057
  misc_feature (1000)..(1000): n is a, c, g, or t

SEQ ID NO: 277307 - DNA, 1180 bp, Homo Sapiens; identical to SEQ ID NO: 255058
  misc_feature (159)..(168): n is a, c, g, or t
  misc_feature (268)..(277): n is a, c, g, or t
  misc_feature (411)..(509): n is a, c, g, or t
  misc_feature (565)..(575): n is a, c, g, or t

SEQ ID NO: 277308 - DNA, 584 bp, Homo Sapiens; identical to SEQ ID NO: 255059

SEQ ID NO: 277309 - DNA, 1670 bp, Homo Sapiens; identical to SEQ ID NO: 255060
  misc_feature (1502)..(1502): n is a, c, g, or t
  misc_feature (1511)..(1511): n is a, c, g, or t
  misc_feature (1516)..(1517): n is a, c, g, or t
  misc_feature (1526)..(1526): n is a, c, g, or t
  misc_feature (1543)..(1543): n is a, c, g, or t

SEQ ID NO: 277310 - DNA, 1010 bp, Homo Sapiens; identical to SEQ ID NO: 255062
  misc_feature (7)..(7): n is a, c, g, or t
  misc_feature (20)..(20): n is a, c, g, or t
  misc_feature (24)..(24): n is a, c, g, or t
  misc_feature (26)..(26): n is a, c, g, or t
  misc_feature (30)..(30): n is a, c, g, or t
  misc_feature (40)..(40): n is a, c, g, or t
  misc_feature (42)..(42): n is a, c, g, or t
  misc_feature (44)..(44): n is a, c, g, or t
  misc_feature (46)..(46): n is a, c, g, or t
  misc_feature (53)..(53): n is a, c, g, or t
  misc_feature (55)..(55): n is a, c, g, or t
  misc_feature (75)..(75): n is a, c, g, or t
  misc_feature (79)..(79): n is a, c, g, or t
  misc_feature (84)..(84): n is a, c, g, or t
  misc_feature (88)..(88): n is a, c, g, or t
  misc_feature (97)..(97): n is a, c, g, or t
  misc_feature (120)..(120): n is a, c, g, or t
  misc_feature (134)..(134): n is a, c, g, or t
  misc_feature (207)..(207): n is a, c, g, or t
  misc_feature (252)..(252): n is a, c, g, or t
  misc_feature (402)..(402): n is a, c, g, or t
  misc_feature (413)..(466): n is a, c, g, or t
  misc_feature (470)..(480): n is a, c, g, or t
  misc_feature (855)..(880): n is a, c, g, or t
  misc_feature (939)..(939): n is a, c, g, or t
  misc_feature (948)..(948): n is a, c, g, or t
  misc_feature (972)..(972): n is a, c, g, or t
  misc_feature (995)..(1000): n is a, c, g, or t

SEQ ID NO: 277311 - DNA, 1787 bp, Homo Sapiens; identical to SEQ ID NO: 255063
  misc_feature (1203)..(1270): n is a, c, g, or t

SEQ ID NO: 277312 - DNA, 775 bp, Homo Sapiens; identical to SEQ ID NO: 255065
  misc_feature (37)..(37): n is a, c, g, or t
  misc_feature (63)..(63): n is a, c, g, or t
  misc_feature (69)..(69): n is a, c, g, or t
  misc_feature (73)..(73): n is a, c, g, or t

SEQ ID NO: 277313 - DNA, 832 bp, Homo Sapiens; identical to SEQ ID NO: 255066
  misc_feature (40)..(40): n is a, c, g, or t
  misc_feature (113)..(113): n is a, c, g, or t
  misc_feature (217)..(217): n is a, c, g, or t
  misc_feature (226)..(226): n is a, c, g, or t

SEQ ID NO: 277314 - DNA, 1307 bp, Homo Sapiens; identical to SEQ ID NO: 255070

SEQ ID NO: 277315 - DNA, 739 bp, Homo Sapiens; identical to SEQ ID NO: 255071

SEQ ID NO: 277316 - DNA, 716 bp, Homo Sapiens; identical to SEQ ID NO: 255072
  misc_feature (13)..(13): n is a, c, g, or t
  misc_feature (383)..(383): n is a, c, g, or t
  misc_feature (638)..(638): n is a, c, g, or t

SEQ ID NO: 277317 - DNA, 363 bp, Homo Sapiens; identical to SEQ ID NO: 255074

SEQ ID NO: 277318 - DNA, 1957 bp, Homo Sapiens; identical to SEQ ID NO: 255075
  misc_feature (135)..(135): n is a, c, g, or t
  misc_feature (163)..(163): n is a, c, g, or t
  misc_feature (1382)..(1452): n is a, c, g, or t
  misc_feature (1455)..(1458): n is a, c, g, or t

SEQ ID NO: 277319 - DNA, 561 bp, Homo Sapiens; identical to SEQ ID NO: 255076

SEQ ID NO: 277320 - DNA, 1420 bp, Homo Sapiens; identical to SEQ ID NO: 255080
  misc_feature (14)..(14): n is a, c, g, or t
  misc_feature (26)..(26): n is a, c, g, or t
  misc_feature (38)..(38): n is a, c, g, or t
  misc_feature (46)..(46): n is a, c, g, or t
  misc_feature (51)..(51): n is a, c, g, or t
  misc_feature (60)..(60): n is a, c, g, or t
  misc_feature (112)..(112): n is a, c, g, or t

SEQ ID NO: 277321 - DNA, 404 bp, Homo Sapiens; identical to SEQ ID NO: 255081
  misc_feature (21)..(21): n is a, c, g, or t
  misc_feature (34)..(34): n is a, c, g, or t

SEQ ID NO: 277322 - DNA, 585 bp, Homo Sapiens; identical to SEQ ID NO: 255083
  misc_feature (34)..(34): n is a, c, g, or t
  misc_feature (70)..(70): n is a, c, g, or t

SEQ ID NO: 277323 - DNA, 776 bp, Homo Sapiens; identical to SEQ ID NO: 255084
  misc_feature (376)..(376): n is a, c, g, or t

SEQ ID NO: 277324 - DNA, 1643 bp, Homo Sapiens; identical to SEQ ID NO: 255101
  misc_feature (799)..(811): n is a, c, g, or t
  misc_feature (1142)..(1142): n is a, c, g, or t

SEQ ID NO: 277325 - DNA, 836 bp, Homo Sapiens; identical to SEQ ID NO: 255102
  misc_feature (558)..(558): n is a, c, g, or t
  misc_feature (638)..(638): n is a, c, g, or t
  misc_feature (726)..(726): n is a, c, g, or t

SEQ ID NO: 277326 - DNA, 942 bp, Homo Sapiens; identical to SEQ ID NO: 255103
  misc_feature (289)..(289): n is a, c, g, or t

SEQ ID NO: 277327 - DNA, 573 bp, Homo Sapiens; identical to SEQ ID NO: 255104
  misc_feature (307)..(307): n is a, c, g, or t

SEQ ID NO: 277328 - DNA, 720 bp, Homo Sapiens; identical to SEQ ID NO: 255106
  misc_feature (11)..(11): n is a, c, g, or t
  misc_feature (22)..(22): n is a, c, g, or t
  misc_feature (39)..(39): n is a, c, g, or t
  misc_feature (73)..(73): n is a, c, g, or t
  misc_feature (79)..(79): n is a, c, g, or t
  misc_feature (255)..(255): n is a, c, g, or t

SEQ ID NO: 277329 - DNA, 1082 bp, Homo Sapiens; identical to SEQ ID NO: 255107
  misc_feature (17)..(17): n is a, c, g, or t
  misc_feature (878)..(878): n is a, c, g, or t
  misc_feature (947)..(947): n is a, c, g, or t
  misc_feature (1001)..(1031): n is a, c, g, or t

SEQ ID NO: 277330 - DNA, 722 bp, Homo Sapiens; identical to SEQ ID NO: 255108

SEQ ID NO: 277331 - DNA, 636 bp, Homo Sapiens; identical to SEQ ID NO: 255117
  misc_feature (370)..(420): n is a, c, g, or t

SEQ ID NO: 277332 - DNA, 552 bp, Homo Sapiens; identical to SEQ ID NO: 255118
  misc_feature (161)..(161): n is a, c, g, or t
  misc_feature (378)..(378): n is a, c, g, or t

SEQ ID NO: 277333 - DNA, 928 bp, Homo Sapiens; identical to SEQ ID NO: 255119
  misc_feature (879)..(879): n is a, c, g, or t

SEQ ID NO: 277334 - DNA, 901 bp, Homo Sapiens; identical to SEQ ID NO: 255120

SEQ ID NO: 277335 - DNA, 1128 bp, Homo Sapiens; identical to SEQ ID NO: 255121

SEQ ID NO: 277336 - DNA, 486 bp, Homo Sapiens; identical to SEQ ID NO: 255122

SEQ ID NO: 277337 - DNA, 616 bp, Homo Sapiens; identical to SEQ ID NO: 255125

SEQ ID NO: 277338 - DNA, 382 bp, Homo Sapiens; identical to SEQ ID NO: 255126
  misc_feature (247)..(247): n is a, c, g, or t

SEQ ID NO: 277339 - DNA, 1393 bp, Homo Sapiens; identical to SEQ ID NO: 255128

SEQ ID NO: 277340 - DNA, 441 bp, Homo Sapiens; identical to SEQ ID NO: 255129
  misc_feature (55)..(55): n is a, c, g, or t
  misc_feature (332)..(332): n is a, c, g, or t

SEQ ID NO: 277341 - DNA, 1570 bp, Homo Sapiens; identical to SEQ ID NO: 255133

SEQ ID NO: 277342 - DNA, 1051 bp, Homo Sapiens; identical to SEQ ID NO: 255134
  misc_feature (723)..(727): n is a, c, g, or t
  misc_feature (729)..(729): n is a, c, g, or t
  misc_feature (731)..(736): n is a, c, g, or t
  misc_feature (738)..(740): n is a, c, g, or t
  misc_feature (743)..(754): n is a, c, g, or t
  misc_feature (756)..(756): n is a, c, g, or t
  misc_feature (758)..(784): n is a, c, g, or t
  misc_feature (792)..(792): n is a, c, g, or t
  misc_feature (839)..(839): n is a, c, g, or t
  misc_feature (841)..(843): n is a, c, g, or t
  misc_feature (910)..(981): n is a, c, g, or t

SEQ ID NO: 277343 - DNA, 1581 bp, Homo Sapiens; identical to SEQ ID NO: 255139
  misc_feature (842)..(842): n is a, c, g, or t

SEQ ID NO: 277344 - DNA, 581 bp, Homo Sapiens; identical to SEQ ID NO: 255140
  misc_feature (262)..(262): n is a, c, g, or t
  misc_feature (265)..(265): n is a, c, g, or t
  misc_feature (267)..(268): n is a, c, g, or t
  misc_feature (270)..(271): n is a, c, g, or t
  misc_feature (273)..(273): n is a, c, g, or t
  misc_feature (275)..(275): n is a, c, g, or t
  misc_feature (279)..(279): n is a, c, g, or t
  misc_feature (287)..(287): n is a, c, g, or t

SEQ ID NO: 277345 - DNA, 675 bp, Homo Sapiens; identical to SEQ ID NO: 3534
  misc_feature (463)..(542): n is a, c, g, or t

SEQ ID NO: 277346 - DNA, 778 bp, Homo Sapiens; identical to SEQ ID NO: 255147

SEQ ID NO: 277347 - DNA, 650 bp, Homo Sapiens; identical to SEQ ID NO: 255149
  misc_feature (390)..(390): n is a, c, g, or t
  misc_feature (529)..(529): n is a, c, g, or t
  misc_feature (577)..(577): n is a, c, g, or t
  misc_feature (622)..(622): n is a, c, g, or t

SEQ ID NO: 277348 - DNA, 2276 bp, Homo Sapiens; identical to SEQ ID NO: 255150

SEQ ID NO: 277349 - DNA, 882 bp, Homo Sapiens; identical to SEQ ID NO: 255155

SEQ ID NO: 277350 - DNA, 419 bp, Homo Sapiens; identical to SEQ ID NO: 255156
  misc_feature (62)..(62): n is a, c, g, or t

SEQ ID NO: 277351 - DNA, 1279 bp, Homo Sapiens; identical to SEQ ID NO: 255158
  misc_feature (1177)..(1177): n is a, c, g, or t

SEQ ID NO: 277352 - DNA, 612 bp, Homo Sapiens; identical to SEQ ID NO: 255159

SEQ ID NO: 277353 - DNA, 1671 bp, Homo Sapiens; identical to SEQ ID NO: 255161
  misc_feature (162)..(162): n is a, c, g, or t
  misc_feature (200)..(200): n is a, c, g, or t

SEQ ID NO: 277354 - DNA, 830 bp, Homo Sapiens; identical to SEQ ID NO: 255162

SEQ ID NO: 277355 - DNA, 837 bp, Homo Sapiens; identical to SEQ ID NO: 255163

SEQ ID NO: 277356 - DNA, 833 bp, Homo Sapiens; identical to SEQ ID NO: 15021

SEQ ID NO: 277357 - DNA, 773 bp, Homo Sapiens; identical to SEQ ID NO: 255180
  misc_feature (81)..(81): n is a, c, g, or t

SEQ ID NO: 277358 - DNA, 631 bp, Homo Sapiens; identical to SEQ ID NO: 255181

SEQ ID NO: 277359 - DNA, 664 bp, Homo Sapiens; identical to SEQ ID NO: 255188
  misc_feature (326)..(335): n is a, c, g, or t
  misc_feature (379)..(392): n is a, c, g, or t
  misc_feature (650)..(650): n is a, c, g, or t

SEQ ID NO: 277360 - DNA, 849 bp, Homo Sapiens; identical to SEQ ID NO: 255189

SEQ ID NO: 277361 - DNA, 392 bp, Homo Sapiens; identical to SEQ ID NO: 255191

SEQ ID NO: 277362 - DNA, 1376 bp, Homo Sapiens; identical to SEQ ID NO: 255192
  misc_feature (217)..(228): n is a, c, g, or t

SEQ ID NO: 277363 - DNA, 2990 bp, Homo Sapiens; identical to SEQ ID NO: 255194
  misc_feature (1555)..(1555): n is a, c, g, or t
  misc_feature (2168)..(2185): n is a, c, g, or t
  misc_feature (2237)..(2237): n is a, c, g, or t
  misc_feature (2420)..(2420): n is a, c, g, or t
  misc_feature (2692)..(2692): n is a, c, g, or t
  misc_feature (2808)..(2808): n is a, c, g, or t
  misc_feature (2852)..(2852): n is a, c, g, or t
  misc_feature (2973)..(2973): n is a, c, g, or t

SEQ ID NO: 277364 - DNA, 821 bp, Homo Sapiens; identical to SEQ ID NO: 255195
  misc_feature (304)..(304): n is a, c, g, or t
  misc_feature (320)..(320): n is a, c, g, or t
  misc_feature (346)..(346): n is a, c, g, or t
  misc_feature (369)..(369): n is a, c, g, or t
  misc_feature (513)..(513): n is a, c, g, or t
  misc_feature (551)..(551): n is a, c, g, or t
  misc_feature (555)..(555): n is a, c, g, or t
  misc_feature (580)..(580): n is a, c, g, or t
  misc_feature (640)..(640): n is a, c, g, or t
  misc_feature (643)..(643): n is a, c, g, or t
  misc_feature (656)..(656): n is a, c, g, or t

SEQ ID NO: 277365 - DNA, 1311 bp, Homo Sapiens; identical to SEQ ID NO: 255196
  misc_feature (480)..(480): n is a, c, g, or t
  misc_feature (780)..(803): n is a, c, g, or t
  misc_feature (1118)..(1118): n is a, c, g, or t
  misc_feature (1234)..(1234): n is a, c, g, or t

SEQ ID NO: 277366 - DNA, 524 bp, Homo Sapiens; identical to SEQ ID NO: 255197

SEQ ID NO: 277367 - DNA, 753 bp, Homo Sapiens; identical to SEQ ID NO: 255199
  misc_feature (11)..(11): n is a, c, g, or t
  misc_feature (45)..(45): n is a, c, g, or t
  misc_feature (139)..(245): n is a, c, g, or t
  misc_feature (262)..(274): n is a, c, g, or t
  misc_feature (353)..(353): n is a, c, g, or t

SEQ ID NO: 277368 - DNA, 949 bp, Homo Sapiens; identical to SEQ ID NO: 255200
  misc_feature (458)..(470): n is a, c, g, or t
  misc_feature (487)..(596): n is a, c, g, or t

SEQ ID NO: 277369 - DNA, 834 bp, Homo Sapiens; identical to SEQ ID NO: 255201

SEQ ID NO: 277370 - DNA, 643 bp, Homo Sapiens; identical to SEQ ID NO: 255202
  misc_feature (517)..(517): n is a, c, g, or t
  misc_feature (537)..(537): n is a, c, g, or t
  misc_feature (602)..(602): n is a, c, g, or t

SEQ ID NO: 277371 - DNA, 557 bp, Homo Sapiens; identical to SEQ ID NO: 255203
  misc_feature (19)..(19): n is a, c, g, or t
  misc_feature (137)..(137): n is a, c, g, or t

SEQ ID NO: 277372 - DNA, 465 bp, Homo Sapiens; identical to SEQ ID NO: 255204
  misc_feature (257)..(266): n is a, c, g, or t

SEQ ID NO: 277373 - DNA, 1365 bp, Homo Sapiens; identical to SEQ ID NO: 255205
  misc_feature (1168)..(1168): n is a, c, g, or t
  misc_feature (1202)..(1202): n is a, c, g, or t
  misc_feature (1270)..(1270): n is a, c, g, or t

SEQ ID NO: 277374 - DNA, 835 bp, Homo Sapiens; identical to SEQ ID NO: 255206
  misc_feature (580)..(580): n is a, c, g, or t
  misc_feature (740)..(740): n is a, c, g, or t

SEQ ID NO: 277375 - DNA, 771 bp, Homo Sapiens; identical to SEQ ID NO: 255207
  misc_feature (564)..(564): n is a, c, g, or t

SEQ ID NO: 277376 - DNA, 1223 bp, Homo Sapiens; identical to SEQ ID NO: 255208
  misc_feature (1205)..(1205): n is a, c, g, or t

SEQ ID NO: 277377 - DNA, 786 bp, Homo Sapiens; identical to SEQ ID NO: 255209
  misc_feature (705)..(705): n is a, c, g, or t
  misc_feature (720)..(720): n is a, c, g, or t

SEQ ID NO: 277378 - DNA, 1265 bp, Homo Sapiens; identical to SEQ ID NO: 255215
  misc_feature (994)..(994): n is a, c, g, or t
  misc_feature (1008)..(1008): n is a, c, g, or t
  misc_feature (1021)..(1021): n is a, c, g, or t
  misc_feature (1050)..(1050): n is a, c, g, or t
  misc_feature (1101)..(1101): n is a, c, g, or t
  misc_feature (1105)..(1105): n is a, c, g, or t
  misc_feature (1120)..(1120): n is a, c, g, or t
  misc_feature (1130)..(1130): n is a, c, g, or t
  misc_feature (1141)..(1141): n is a, c, g, or t
  misc_feature (1160)..(1160): n is a, c, g, or t
  misc_feature (1185)..(1185): n is a, c, g, or t
  misc_feature (1187)..(1187): n is a, c, g, or t
  misc_feature (1194)..(1194): n is a, c, g, or t
  misc_feature (1201)..(1201): n is a, c, g, or t
  misc_feature (1205)..(1205): n is a, c, g, or t
  misc_feature (1213)..(1213): n is a, c, g, or t
  misc_feature (1218)..(1218): n is a, c, g, or t
  misc_feature (1227)..(1227): n is a, c, g, or t
  misc_feature (1231)..(1232): n is a, c, g, or t
  misc_feature (1240)..(1240): n is a, c, g, or t
  misc_feature (1245)..(1245): n is a, c, g, or t
  misc_feature (1247)..(1247): n is a, c, g, or t
  misc_feature (1257)..(1257): n is a, c, g, or t
  misc_feature (1259)..(1259): n is a, c, g, or t

SEQ ID NO: 277379 - DNA, 1077 bp, Homo Sapiens; identical to SEQ ID NO: 255216
  misc_feature (783)..(783): n is a, c, g, or t

SEQ ID NO: 277380 - DNA, 1643 bp, Homo Sapiens; identical to SEQ ID NO: 255220
  misc_feature (97)..(97): n is a, c, g, or t

SEQ ID NO: 277381 - DNA, 958 bp, Homo Sapiens; identical to SEQ ID NO: 255221
  misc_feature (90)..(90): n is a, c, g, or t
  misc_feature (167)..(167): n is a, c, g, or t
  misc_feature (728)..(777): n is a, c, g, or t
  misc_feature (900)..(900): n is a, c, g, or t
  misc_feature (902)..(902): n is a, c, g, or t
  misc_feature (908)..(908): n is a, c, g, or t
  misc_feature (912)..(912): n is a, c, g, or t
  misc_feature (916)..(916): n is a, c, g, or t
  misc_feature (920)..(920): n is a, c, g, or t
  misc_feature (927)..(927): n is a, c, g, or t
  misc_feature (930)..(930): n is a, c, g, or t
  misc_feature (937)..(938): n is a, c, g, or t
  misc_feature (949)..(949): n is a, c, g, or t

SEQ ID NO: 277382 - DNA, 478 bp, Homo Sapiens; identical to SEQ ID NO: 255222
  misc_feature (43)..(43): n is a, c, g, or t

SEQ ID NO: 277383 - DNA, 572 bp, Homo Sapiens; identical to SEQ ID NO: 255223
  misc_feature (12)..(12): n is a, c, g, or t
  misc_feature (372)..(372): n is a, c, g, or t
  misc_feature (411)..(411): n is a, c, g, or t
  misc_feature (550)..(550): n is a, c, g, or t

SEQ ID NO: 277384 - DNA, 648 bp, Homo Sapiens; identical to SEQ ID NO: 255224
  misc_feature (546)..(546): n is a, c, g, or t
  misc_feature (616)..(616): n is a, c, g, or t
  misc_feature (628)..(628): n is a, c, g, or t

SEQ ID NO: 277385 - DNA, 1689 bp, Homo Sapiens; identical to SEQ ID NO: 255225
  misc_feature (632)..(632): n is a, c, g, or t
  misc_feature (634)..(634): n is a, c, g, or t
  misc_feature (1469)..(1469): n is a, c, g, or t
  misc_feature (1588)..(1588): n is a, c, g, or t
  misc_feature (1593)..(1593): n is a, c, g, or t

SEQ ID NO: 277386 - DNA, 1130 bp, Homo Sapiens; identical to SEQ ID NO: 255227
  misc_feature (703)..(870): n is a, c, g, or t

SEQ ID NO: 277387 - DNA, 1040 bp, Homo Sapiens; identical to SEQ ID NO: 255228
  misc_feature (14)..(14): n is a, c, g, or t

SEQ ID NO: 277388 - DNA, 459 bp, Homo Sapiens; identical to SEQ ID NO: 255229
  misc_feature (11)..(11): n is a, c, g, or t
  misc_feature (28)..(28): n is a, c, g, or t
  misc_feature (46)..(46): n is a, c, g, or t
  misc_feature (72)..(72): n is a, c, g, or t
  misc_feature (87)..(87): n is a, c, g, or t
  misc_feature (120)..(120): n is a, c, g, or t

SEQ ID NO: 277389 - DNA, 506 bp, Homo Sapiens; identical to SEQ ID NO: 255230
  misc_feature (321)..(353): n is a, c, g, or t
  misc_feature (453)..(453): n is a, c, g, or t

SEQ ID NO: 277390 - DNA, 852 bp, Homo Sapiens; identical to SEQ ID NO: 255232

SEQ ID NO: 277391 - DNA, 811 bp, Homo Sapiens; identical to SEQ ID NO: 255233

SEQ ID NO: 277392 - DNA, 587 bp, Homo Sapiens; identical to SEQ ID NO: 255234

SEQ ID NO: 277393 - DNA, 636 bp, Homo Sapiens; identical to SEQ ID NO: 255243
  misc_feature (171)..(171): n is a, c, g, or t

SEQ ID NO: 277394 - DNA, 1332 bp, Homo Sapiens; identical to SEQ ID NO: 255244

SEQ ID NO: 277395 - DNA, 545 bp, Homo Sapiens; identical to SEQ ID NO: 255246
  misc_feature (427)..(441): n is a, c, g, or t
  misc_feature (476)..(476): n is a, c, g, or t
  misc_feature (487)..(487): n is a, c, g, or t
  misc_feature (492)..(492): n is a, c, g, or t
  misc_feature (502)..(502): n is a, c, g, or t
  misc_feature (517)..(517): n is a, c, g, or t
  misc_feature (533)..(533): n is a, c, g, or t

SEQ ID NO: 277396 - DNA, 350 bp, Homo Sapiens; identical to SEQ ID NO: 255247
  misc_feature (122)..(136): n is a, c, g, or t

SEQ ID NO: 277397 - DNA, 871 bp, Homo Sapiens; identical to SEQ ID NO: 255248
  misc_feature (52)..(52): n is a, c, g, or t
  misc_feature (60)..(60): n is a, c, g, or t
  misc_feature (249)..(263): n is a, c, g, or t

SEQ ID NO: 277398 - DNA, 388 bp, Homo Sapiens; identical to SEQ ID NO: 255249

SEQ ID NO: 277399 - DNA, 1265 bp, Homo Sapiens; identical to SEQ ID NO: 255250

SEQ ID NO: 277400 - DNA, 483 bp, Homo Sapiens; identical to SEQ ID NO: 255252
  misc_feature (21)..(21): n is a, c, g, or t
  misc_feature (222)..(222): n is a, c, g, or t

SEQ ID NO: 277401 - DNA, 828 bp, Homo Sapiens; identical to SEQ ID NO: 255253

SEQ ID NO: 277402 - DNA, 823 bp, Homo Sapiens; identical to SEQ ID NO: 255261

SEQ ID NO: 277403 - DNA, 2463 bp, Homo Sapiens; identical to SEQ ID NO: 255262
  misc_feature (1429)..(1443): n is a, c, g, or t
  misc_feature (1516)..(1525): n is a, c, g, or t
  misc_feature (1746)..(1754): n is a, c, g, or t
  misc_feature (1874)..(1874): n is a, c, g, or t
  misc_feature (1939)..(1939): n is a, c, g, or t
  misc_feature (2039)..(2039): n is a, c, g, or t
  misc_feature (2061)..(2061): n is a, c, g, or t
  misc_feature (2111)..(2111): n is a, c, g, or t
  misc_feature (2172)..(2172): n is a, c, g, or t
  misc_feature (2177)..(2177): n is a, c, g, or t
  misc_feature (2204)..(2204): n is a, c, g, or t
  misc_feature (2246)..(2246): n is a, c, g, or t
  misc_feature (2300)..(2300): n is a, c, g, or t
  misc_feature (2376)..(2376): n is a, c, g, or t

SEQ ID NO: 277404 - DNA, 1425 bp, Homo Sapiens; identical to SEQ ID NO: 255263
  misc_feature (1067)..(1127): n is a, c, g, or t
  misc_feature (1171)..(1171): n is a, c, g, or t
  misc_feature (1210)..(1210): n is a, c, g, or t

SEQ ID NO: 277405 - DNA, 950 bp, Homo Sapiens; identical to SEQ ID NO: 255264
  misc_feature (326)..(348): n is a, c, g, or t
  misc_feature (837)..(849): n is a, c, g, or t

SEQ ID NO: 277406 - DNA, 1585 bp, Homo Sapiens; identical to SEQ ID NO: 255267
  misc_feature (1191)..(1191): n is a, c, g, or t
  misc_feature (1197)..(1197): n is a, c, g, or t
  misc_feature (1215)..(1215): n is a, c, g, or t
  misc_feature (1456)..(1456): n is a, c, g, or t
  misc_feature (1470)..(1470): n is a, c, g, or t

SEQ ID NO: 277407 - DNA, 487 bp, Homo Sapiens; identical to SEQ ID NO: 255268

SEQ ID NO: 277408 - DNA, 1785 bp, Homo Sapiens; identical to SEQ ID NO: 255271
  misc_feature (84)..(103): n is a, c, g, or t

SEQ ID NO: 277409 - DNA, 1406 bp, Homo Sapiens; identical to SEQ ID NO: 255272
  misc_feature (22)..(22): n is a, c, g, or t
  misc_feature (33)..(33): n is a, c, g, or t
  misc_feature (90)..(90): n is a, c, g, or t
  misc_feature (112)..(112): n is a, c, g, or t
  misc_feature (166)..(166): n is a, c, g, or t
  misc_feature (168)..(168): n is a, c, g, or t
  misc_feature (176)..(178): n is a, c, g, or t
  misc_feature (219)..(219): n is a, c, g, or t

SEQ ID NO: 277410 - DNA, 388 bp, Homo Sapiens; identical to SEQ ID NO: 255273
  misc_feature (287)..(287): n is a, c, g, or t

SEQ ID NO: 277411 - DNA, 495 bp, Homo Sapiens; identical to SEQ ID NO: 255274
  misc_feature (76)..(76): n is a, c, g, or t
  misc_feature (267)..(267): n is a, c, g, or t

SEQ ID NO: 277412 - DNA, 1562 bp, Homo Sapiens; identical to SEQ ID NO: 255283
  misc_feature (43)..(43): n is a, c, g, or t
  misc_feature (1289)..(1308): n is a, c, g, or t

SEQ ID NO: 277413 - DNA, 939 bp, Homo Sapiens; identical to SEQ ID NO: 255284

SEQ ID NO: 277414 - DNA, 696 bp, Homo Sapiens; identical to SEQ ID NO: 255285
  misc_feature (14)..(14): n is a, c, g, or t

SEQ ID NO: 277415 - DNA, 416 bp, Homo Sapiens; identical to SEQ ID NO: 255286
  misc_feature (342)..(342): n is a, c, g, or t
  misc_feature (396)..(396): n is a, c, g, or t

SEQ ID NO: 277416 - DNA, 479 bp, Homo Sapiens; identical to SEQ ID NO: 255292

SEQ ID NO: 277417 - DNA, 964 bp, Homo Sapiens; identical to SEQ ID NO: 255293
  misc_feature (928)..(928): n is a, c, g, or t

SEQ ID NO: 277418 - DNA, 430 bp, Homo Sapiens; identical to SEQ ID NO: 255294

SEQ ID NO: 277419 - DNA, 756 bp, Homo Sapiens; identical to SEQ ID NO: 255295

SEQ ID NO: 277420 - DNA, 797 bp, Homo Sapiens; identical to SEQ ID NO: 74207
  misc_feature (779)..(779): n is a, c, g, or t

SEQ ID NO: 277421 - DNA, 464 bp, Homo Sapiens; identical to SEQ ID NO: 168486
  misc_feature (292)..(292): n is a, c, g, or t

SEQ ID NO: 277422 - DNA, 1218 bp, Homo Sapiens; identical to SEQ ID NO: 255298
  misc_feature (1100)..(1110): n is a, c, g, or t
  misc_feature (1112)..(1115): n is a, c, g, or t
  misc_feature (1117)..(1125): n is a, c, g, or t

SEQ ID NO: 277423 - DNA, 820 bp, Homo Sapiens; identical to SEQ ID NO: 74206
  misc_feature (731)..(731): n is a, c, g, or t

SEQ ID NO: 277424 - DNA, 478 bp, Homo Sapiens; identical to SEQ ID NO: 255308
  misc_feature (69)..(69): n is a, c, g, or t
  misc_feature (130)..(130): n is a, c, g, or t

SEQ ID NO: 277425 - DNA, 1117 bp, Homo Sapiens; identical to SEQ ID NO: 255309

SEQ ID NO: 277426 - DNA, 1090 bp, Homo Sapiens; identical to SEQ ID NO: 255316

SEQ ID NO: 277427 - DNA, 470 bp, Homo Sapiens; identical to SEQ ID NO: 255317
  misc_feature (344)..(344): n is a, c, g, or t
  misc_feature (373)..(373): n is a, c, g, or t
  misc_feature (423)..(423): n is a, c, g, or t
  misc_feature (436)..(436): n is a, c, g, or t
  misc_feature (451)..(451): n is a, c, g, or t

SEQ ID NO: 277428 - DNA, 546 bp, Homo Sapiens; identical to SEQ ID NO: 255325

SEQ ID NO: 277429 - DNA, 1944 bp, Homo Sapiens; identical to SEQ ID NO: 255326
  misc_feature (48)..(48): n is a, c, g, or t
  misc_feature (632)..(632): n is a, c, g, or t

SEQ ID NO: 277430 - DNA, 738 bp, Homo Sapiens; identical to SEQ ID NO: 255333
  misc_feature (498)..(498): n is a, c, g, or t
  misc_feature (625)..(625): n is a, c, g, or t
  misc_feature (657)..(657): n is a, c, g, or t

SEQ ID NO: 277431 - DNA, 1181 bp, Homo Sapiens; identical to SEQ ID NO: 255334

SEQ ID NO: 277432 - DNA, 1080 bp, Homo Sapiens; identical to SEQ ID NO: 255335
  misc_feature (453)..(465): n is a, c, g, or t
  misc_feature (941)..(950): n is a, c, g, or t

SEQ ID NO: 277433 - DNA, 992 bp, Homo Sapiens; identical to SEQ ID NO: 255336
  misc_feature (799)..(799): n is a, c, g, or t

SEQ ID NO: 277434 - DNA, 451 bp, Homo Sapiens; identical to SEQ ID NO: 255337
  misc_feature (120)..(120): n is a, c, g, or t

SEQ ID NO: 277435 - DNA, 454 bp, Homo Sapiens; identical to SEQ ID NO: 255338
  misc_feature (334)..(334): n is a, c, g, or t
  misc_feature (368)..(368): n is a, c, g, or t
  misc_feature (378)..(378): n is a, c, g, or t
  misc_feature (389)..(389): n is a, c, g, or t

SEQ ID NO: 277436 - DNA, 860 bp, Homo Sapiens; identical to SEQ ID NO: 255341

SEQ ID NO: 277437 - DNA, 821 bp, Homo Sapiens; identical to SEQ ID NO: 255342

SEQ ID NO: 277438 - DNA, 1317 bp, Homo Sapiens; identical to SEQ ID NO: 255352
  misc_feature (11)..(11): n is a, c, g, or t
  misc_feature (892)..(900): n is a, c, g, or t

SEQ ID NO: 277439 - DNA, 465 bp, Homo Sapiens; identical to SEQ ID NO: 255353

SEQ ID NO: 277440 - DNA, 932 bp, Homo Sapiens; identical to SEQ ID NO: 255354
  misc_feature (71)..(71): n is a, c, g, or t
  misc_feature (339)..(369): n is a, c, g, or t

SEQ ID NO: 277441 - DNA, 2292 bp, Homo Sapiens; identical to SEQ ID NO: 255357

SEQ ID NO: 277442 - DNA, 370 bp, Homo Sapiens; identical to SEQ ID NO: 255358
  misc_feature (20)..(20): n is a, c, g, or t
  misc_feature (27)..(27): n is a, c, g, or t
  misc_feature (36)..(36): n is a, c, g, or t
  misc_feature (177)..(177): n is a, c, g, or t
  misc_feature (345)..(345): n is a, c, g, or t

SEQ ID NO: 277443 - DNA, 1261 bp, Homo Sapiens; identical to SEQ ID NO: 255363

SEQ ID NO: 277444 - DNA, 944 bp, Homo Sapiens; identical to SEQ ID NO: 255364

SEQ ID NO: 277445 - DNA, 1086 bp, Homo Sapiens; identical to SEQ ID NO: 255365
  misc_feature (94)..(170): n is a, c, g, or t
  misc_feature (1060)..(1060): n is a, c, g, or t

SEQ ID NO: 277446 - DNA, 1437 bp, Homo Sapiens; identical to SEQ ID NO: 255368
  misc_feature (840)..(948): n is a, c, g, or t
  misc_feature (956)..(969): n is a, c, g, or t
  misc_feature (1101)..(1188): n is a, c, g, or t
  misc_feature (1229)..(1239): n is a, c, g, or t
  misc_feature (1346)..(1360): n is a, c, g, or t

SEQ ID NO: 277447 - DNA, 894 bp, Homo Sapiens; identical to SEQ ID NO: 255369

SEQ ID NO: 277448 - DNA, 936 bp, Homo Sapiens; identical to SEQ ID NO: 255371
  misc_feature (785)..(785): n is a, c, g, or t

SEQ ID NO: 277449 - DNA, 2077 bp, Homo Sapiens; identical to SEQ ID NO: 255372
  misc_feature (1742)..(1800): n is a, c, g, or t

SEQ ID NO: 277450 - DNA, 412 bp, Homo Sapiens; identical to SEQ ID NO: 255373
  misc_feature (21)..(21): n is a, c, g, or t
  misc_feature (31)..(31): n is a, c, g, or t
  misc_feature (37)..(37): n is a, c, g, or t
  misc_feature (46)..(46): n is a, c, g, or t
  misc_feature (52)..(52): n is a, c, g, or t
  misc_feature (114)..(114): n is a, c, g, or t

SEQ ID NO: 277451 - DNA, 750 bp, Homo Sapiens; identical to SEQ ID NO: 255374

SEQ ID NO: 277452 - DNA, 1822 bp, Homo Sapiens; identical to SEQ ID NO: 255375
  misc_feature (704)..(1017): n is a, c, g, or t
  misc_feature (1713)..(1726): n is a, c, g, or t

SEQ ID NO: 277453 - DNA, 419 bp, Homo Sapiens; identical to SEQ ID NO: 255379
  misc_feature (270)..(270): n is a, c, g, or t

SEQ ID NO: 277454 - DNA, 1245 bp, Homo Sapiens; identical to SEQ ID NO: 255380
  misc_feature (975)..(1110): n is a, c, g, or t
  misc_feature (1122)..(1133): n is a, c, g, or t
  misc_feature (1160)..(1169): n is a, c, g, or t

SEQ ID NO: 277455 - DNA, 925 bp, Homo Sapiens; identical to SEQ ID NO: 255382

SEQ ID NO: 277456 - DNA, 1068 bp, Homo Sapiens; identical to SEQ ID NO: 255383

SEQ ID NO: 277457 - DNA, 392 bp, Homo Sapiens; identical to SEQ ID NO: 255384
  misc_feature (94)..(94): n is a, c, g, or t
  misc_feature (183)..(183): n is a, c, g, or t
  misc_feature (326)..(326): n is a, c, g, or t

SEQ ID NO: 277458 - DNA, 1036 bp, Homo Sapiens; identical to SEQ ID NO: 255389

SEQ ID NO: 277459 - DNA, 904 bp, Homo Sapiens; identical to SEQ ID NO: 255390

SEQ ID NO: 277460 - DNA, 1138 bp, Homo Sapiens; identical to SEQ ID NO: 255396
  misc_feature (59)..(59): n is a, c, g, or t
  misc_feature (308)..(331): n is a, c, g, or t
  misc_feature (400)..(400): n is a, c, g, or t
  misc_feature (1051)..(1073): n is a, c, g, or t

SEQ ID NO: 277461 - DNA, 1181 bp, Homo Sapiens; identical to SEQ ID NO: 255397
  misc_feature (158)..(158): n is a, c, g, or t
  misc_feature (161)..(180): n is a, c, g, or t
  misc_feature (990)..(998): n is a, c, g, or t

SEQ ID NO: 277462 - DNA, 620 bp, Homo Sapiens; identical to SEQ ID NO: 255401

SEQ ID NO: 277463 - DNA, 1854 bp, Homo Sapiens; identical to SEQ ID NO: 255402

SEQ ID NO: 277464 - DNA, 1407 bp, Homo Sapiens; identical to SEQ ID NO: 255414
  misc_feature (898)..(914): n is a, c, g, or t

SEQ ID NO: 277465 - DNA, 2222 bp, Homo Sapiens; identical to SEQ ID NO: 255415
  misc_feature (1304)..(1312): n is a, c, g, or t

SEQ ID NO: 277466 - DNA, 789 bp, Homo Sapiens; identical to SEQ ID NO: 255416

SEQ ID NO: 277467 - DNA, 1898 bp, Homo Sapiens; identical to SEQ ID NO: 255417
  misc_feature (452)..(468): n is a, c, g, or t
  misc_feature (637)..(638): n is a, c, g, or t
  misc_feature (930)..(942): n is a, c, g, or t

SEQ ID NO: 277468 - DNA, 1040 bp, Homo Sapiens; identical to SEQ ID NO: 255418
  misc_feature (183)..(286): n is a, c, g, or t
  misc_feature (298)..(429): n is a, c, g, or t

SEQ ID NO: 277469 - DNA, 861 bp, Homo Sapiens; identical to SEQ ID NO: 255419
  misc_feature (76)..(98): n is a, c, g, or t
  misc_feature (120)..(221): n is a, c, g, or t
  misc_feature (234)..(306): n is a, c, g, or t

SEQ ID NO: 277470 - DNA, 450 bp, Homo Sapiens; identical to SEQ ID NO: 255420
  misc_feature (25)..(25): n is a, c, g, or t
  misc_feature (65)..(196): n is a, c, g, or t
  misc_feature (208)..(272): n is a, c, g, or t

SEQ ID NO: 277471 - DNA, 1953 bp, Homo Sapiens; identical to SEQ ID NO: 255422
  misc_feature (1123)..(1144): n is a, c, g, or t
  misc_feature (1253)..(1310): n is a, c, g, or t
  misc_feature (1558)..(1558): n is a, c, g, or t
  misc_feature (1748)..(1748): n is a, c, g, or t
  misc_feature (1765)..(1865): n is a, c, g, or t
  misc_feature (1868)..(1868): n is a, c, g, or t

SEQ ID NO: 277472 - DNA, 942 bp, Homo Sapiens; identical to SEQ ID NO: 255423

SEQ ID NO: 277473 - DNA, 830 bp, Homo Sapiens; identical to SEQ ID NO: 255432

SEQ ID NO: 277474 - DNA, 952 bp, Homo Sapiens; identical to SEQ ID NO: 255433

SEQ ID NO: 277475 - DNA, 943 bp, Homo Sapiens; identical to SEQ ID NO: 255446
  misc_feature (14)..(14): n is a, c, g, or t
  misc_feature (42)..(42): n is a, c, g, or t
  misc_feature (55)..(55): n is a, c, g, or t
  misc_feature (96)..(96): n is a, c, g, or t
  misc_feature (113)..(148): n is a, c, g, or t
  misc_feature (197)..(197): n is a, c, g, or t

SEQ ID NO: 277476 - DNA, 765 bp, Homo Sapiens; identical to SEQ ID NO: 255447

SEQ ID NO: 277477 - DNA, 289 bp, Homo Sapiens; identical to SEQ ID NO: 255448
  misc_feature (172)..(172): n is a, c, g, or t
  misc_feature (177)..(177): n is a, c, g, or t
  misc_feature (213)..(213): n is a, c, g, or t
  misc_feature (235)..(235): n is a, c, g, or t
  misc_feature (250)..(250): n is a, c, g, or t

SEQ ID NO: 277478 - DNA, 1071 bp, Homo Sapiens; identical to SEQ ID NO: 255451
  misc_feature (35)..(35): n is a, c, g, or t
  misc_feature (136)..(136): n is a, c, g, or t
  misc_feature (216)..(216): n is a, c, g, or t
  misc_feature (940)..(940): n is a, c, g, or t
  misc_feature (966)..(966): n is a, c, g, or t
  misc_feature (1015)..(1015): n is a, c, g, or t
  misc_feature (1033)..(1033): n is a, c, g, or t
  misc_feature (1038)..(1038): n is a, c, g, or t
  misc_feature (1045)..(1045): n is a, c, g, or t

SEQ ID NO: 277479 - DNA, 1246 bp, Homo Sapiens; identical to SEQ ID NO: 255452

SEQ ID NO: 277480 - DNA, 735 bp, Homo Sapiens; identical to SEQ ID NO: 255453

SEQ ID NO: 277481 - DNA, 683 bp, Homo Sapiens; identical to SEQ ID NO: 255457

SEQ ID NO: 277482 - DNA, 753 bp, Homo Sapiens; identical to SEQ ID NO: 255458

SEQ ID NO: 277483 - DNA, 372 bp, Homo Sapiens; identical to SEQ ID NO: 255459

SEQ ID NO: 277484 - DNA, 926 bp, Homo Sapiens; identical to SEQ ID NO: 255460

SEQ ID NO: 277485 - DNA, 502 bp, Homo Sapiens; identical to SEQ ID NO: 255461
  misc_feature (12)..(12): n is a, c, g, or t
  misc_feature (52)..(52): n is a, c, g, or t
  misc_feature (57)..(57): n is a, c, g, or t
  misc_feature (80)..(80): n is a, c, g, or t
  misc_feature (113)..(113): n is a, c, g, or t
  misc_feature (118)..(118): n is a, c, g, or t
  misc_feature (155)..(155): n is a, c, g, or t
  misc_feature (192)..(192): n is a, c, g, or t

SEQ ID NO: 277486 - DNA, 672 bp, Homo Sapiens; identical to SEQ ID NO: 255463
  misc_feature (534)..(534): n is a, c, g, or t
  misc_feature (543)..(543): n is a, c, g, or t
  misc_feature (613)..(613): n is a, c, g, or t

SEQ ID NO: 277487 - DNA, 420 bp, Homo Sapiens; identical to SEQ ID NO: 255464

SEQ ID NO: 277488 - DNA, 939 bp, Homo Sapiens; identical to SEQ ID NO: 255465
  misc_feature (742)..(756): n is a, c, g, or t
  misc_feature (764)..(765): n is a, c, g, or t

SEQ ID NO: 277489 - DNA, 902 bp, Homo Sapiens; identical to SEQ ID NO: 255474
  misc_feature (577)..(696): n is a, c, g, or t
  misc_feature (705)..(759): n is a, c, g, or t
  misc_feature (764)..(771): n is a, c, g, or t
  misc_feature (773)..(773): n is a, c, g, or t
  misc_feature (781)..(782): n is a, c, g, or t
  misc_feature (784)..(787): n is a, c, g, or t
  misc_feature (789)..(790): n is a, c, g, or t

SEQ ID NO: 277490 - DNA, 481 bp, Homo Sapiens; identical to SEQ ID NO: 255475

SEQ ID NO: 277491 - DNA, 664 bp, Homo Sapiens; identical to SEQ ID NO: 255484
  misc_feature (356)..(373): n is a, c, g, or t

SEQ ID NO: 277492 - DNA, 703 bp, Homo Sapiens; identical to SEQ ID NO: 255485

SEQ ID NO: 277493 - DNA, 476 bp, Homo Sapiens; identical to SEQ ID NO: 255487
  misc_feature (247)..(311): n is a, c, g, or t
  misc_feature (399)..(399): n is a, c, g, or t

SEQ ID NO: 277494 - DNA, 618 bp, Homo Sapiens; identical to SEQ ID NO: 255488
  misc_feature (377)..(471): n is a, c, g, or t

SEQ ID NO: 277495 - DNA, 1310 bp, Homo Sapiens; identical to SEQ ID NO: 255491

SEQ ID NO: 277496 - DNA, 1432 bp, Homo Sapiens; identical to SEQ ID NO: 255492
  misc_feature (72)..(72): n is a, c, g, or t
  misc_feature (283)..(292): n is a, c, g, or t

SEQ ID NO: 277497 - DNA, 802 bp, Homo Sapiens; identical to SEQ ID NO: 255515

SEQ ID NO: 277498 - DNA, 407 bp, Homo Sapiens; identical to SEQ ID NO: 255516

SEQ ID NO: 277499 - DNA, 363 bp, Homo Sapiens; identical to SEQ ID NO: 255526

SEQ ID NO: 277500 - DNA, 1046 bp, Homo Sapiens; identical to SEQ ID NO: 255527

SEQ ID NO: 277501 - DNA, 699 bp, Homo Sapiens; identical to SEQ ID NO: 255528
  misc_feature (431)..(431): n is a, c, g, or t
  misc_feature (512)..(512): n is a, c, g, or t
  misc_feature (549)..(549): n is a, c, g, or t
  misc_feature (591)..(591): n is a, c, g, or t
  misc_feature (620)..(620): n is a, c, g, or t
  misc_feature (678)..(679): n is a, c, g, or t

SEQ ID NO: 277502 - DNA, 1390 bp, Homo Sapiens; identical to SEQ ID NO: 255529
  misc_feature (1313)..(1348): n is a, c, g, or t

SEQ ID NO: 277503 - DNA, 771 bp, Homo Sapiens; identical to SEQ ID NO: 255533

SEQ ID NO: 277504 - DNA, 619 bp, Homo Sapiens; identical to SEQ ID NO: 7124

SEQ ID NO: 277505 - DNA, 434 bp, Homo Sapiens; identical to SEQ ID NO: 255542

SEQ ID NO: 277506 - DNA, 566 bp, Homo Sapiens; identical to SEQ ID NO: 255543

SEQ ID NO: 277507 - DNA, 747 bp, Homo Sapiens; identical to SEQ ID NO: 255547

SEQ ID NO: 277508 - DNA, 744 bp, Homo Sapiens; identical to SEQ ID NO: 255548

SEQ ID NO: 277509 - DNA, 704 bp, Homo Sapiens; identical to SEQ ID NO: 255549

SEQ ID NO: 277510 - DNA, 373 bp, Homo Sapiens; identical to SEQ ID NO: 255550

SEQ ID NO: 277511 - DNA, 1434 bp, Homo Sapiens; identical to SEQ ID NO: 255551
  misc_feature (273)..(281): n is a, c, g, or t
  misc_feature (1372)..(1372): n is a, c, g, or t

SEQ ID NO: 277512 - DNA, 907 bp, Homo Sapiens; identical to SEQ ID NO: 255579

SEQ ID NO: 277513 - DNA, 431 bp, Homo Sapiens; identical to SEQ ID NO: 255580

SEQ ID NO: 277514 - DNA, 775 bp, Homo Sapiens; identical to SEQ ID NO: 255589

SEQ ID NO: 277515 - DNA, 1584 bp, Homo Sapiens; identical to SEQ ID NO: 255590
  misc_feature (80)..(80): n is a, c, g, or t
  misc_feature (1560)..(1560): n is a, c, g, or t

SEQ ID NO: 277516 - DNA, 1752 bp, Homo Sapiens; identical to SEQ ID NO: 255591
  misc_feature (1643)..(1652): n is a, c, g, or t

SEQ ID NO: 277517 - DNA, 473 bp, Homo Sapiens; identical to SEQ ID NO: 255592

SEQ ID NO: 277518 - DNA, 735 bp, Homo Sapiens; identical to SEQ ID NO: 255597
  misc_feature (36)..(36): n is a, c, g, or t

SEQ ID NO: 277519 - DNA, 1561 bp, Homo Sapiens; identical to SEQ ID NO: 255598
  misc_feature (1511)..(1519): n is a, c, g, or t

SEQ ID NO: 277520 - DNA, 441 bp, Homo Sapiens; identical to SEQ ID NO: 255599
  misc_feature (17)..(17): n is a, c, g, or t
  misc_feature (54)..(54): n is a, c, g, or t

SEQ ID NO: 277521 - DNA, 625 bp, Homo Sapiens; identical to SEQ ID NO: 255608
  misc_feature (303)..(323): n is a, c, g, or t

SEQ ID NO: 277522 - DNA, 2845 bp, Homo Sapiens; identical to SEQ ID NO: 255609
  misc_feature (57)..(57): n is a, c, g, or t
  misc_feature (2525)..(2618): n is a, c, g, or t

SEQ ID NO: 277523 - DNA, 670 bp, Homo Sapiens; identical to SEQ ID NO: 255629
  misc_feature (16)..(16): n is a, c, g, or t
  misc_feature (39)..(39): n is a, c, g, or t
  misc_feature (80)..(80): n is a, c, g, or t

SEQ ID NO: 277524 - DNA, 634 bp, Homo Sapiens; identical to SEQ ID NO: 255630
  misc_feature (64)..(64): n is a, c, g, or t
  misc_feature (260)..(260): n is a, c, g, or t

SEQ ID NO: 277525 - DNA, 882 bp, Homo Sapiens; identical to SEQ ID NO: 255633

SEQ ID NO: 277526 - DNA, 738 bp, Homo Sapiens; identical to SEQ ID NO: 255634

SEQ ID NO: 277527 - DNA, 1925 bp, Homo Sapiens; identical to SEQ ID NO: 255645
  misc_feature (76)..(128): n is a, c, g, or t

SEQ ID NO: 277528 - DNA, 972 bp, Homo Sapiens; identical to SEQ ID NO: 255646
  misc_feature (765)..(826): n is a, c, g, or t
  misc_feature (936)..(936): n is a, c, g, or t

SEQ ID NO: 277529 - DNA, 573 bp, Homo Sapiens; identical to SEQ ID NO: 255647

SEQ ID NO: 277530 - DNA, 381 bp, Homo Sapiens; identical to SEQ ID NO: 255648
  misc_feature (136)..(136): n is a, c, g, or t
  misc_feature (172)..(172): n is a, c, g, or t
  misc_feature (194)..(194): n is a, c, g, or t

SEQ ID NO: 277531 - DNA, 400 bp, Homo Sapiens; identical to SEQ ID NO: 255650
  misc_feature (340)..(340): n is a, c, g, or t
  misc_feature (382)..(382): n is a, c, g, or t

SEQ ID NO: 277532 - DNA, 444 bp, Homo Sapiens; identical to SEQ ID NO: 255651

SEQ ID NO: 277533 - DNA, 1217 bp, Homo Sapiens; identical to SEQ ID NO: 255656

SEQ ID NO: 277534 - DNA, 797 bp, Homo Sapiens; identical to SEQ ID NO: 255657
  misc_feature (730)..(730): n is a, c, g, or t
  misc_feature (746)..(746): n is a, c, g, or t

SEQ ID NO: 277535 - DNA, 653 bp, Homo Sapiens; identical to SEQ ID NO: 255659
  misc_feature (472)..(472): n is a, c, g, or t

SEQ ID NO: 277536 - DNA, 1249 bp, Homo Sapiens; identical to SEQ ID NO: 255660

SEQ ID NO: 277537 - DNA, 488 bp, Homo Sapiens; identical to SEQ ID NO: 255661
  misc_feature (51)..(51): n is a, c, g, or t
  misc_feature (84)..(84): n is a, c, g, or t
  misc_feature (232)..(232): n is a, c, g, or t

SEQ ID NO: 277538 - DNA, 1060 bp, Homo Sapiens; identical to SEQ ID NO: 255662
  misc_feature (1005)..(1016): n is a, c, g, or t
  misc_feature (1024)..(1024): n is a, c, g, or t

SEQ ID NO: 277539 - DNA, 1318 bp, Homo Sapiens; identical to SEQ ID NO: 255663
  misc_feature (12)..(12): n is a, c, g, or t

SEQ ID NO: 277540 - DNA, 1337 bp, Homo Sapiens; identical to SEQ ID NO: 255675
  misc_feature (19)..(19): n is a, c, g, or t
  misc_feature (25)..(25): n is a, c, g, or t

SEQ ID NO: 277541 - DNA, 461 bp, Homo Sapiens; identical to SEQ ID NO: 255676

SEQ ID NO: 277542 - DNA, 810 bp, Homo Sapiens; identical to SEQ ID NO: 255680
  misc_feature (759)..(759): n is a, c, g, or t
  misc_feature (770)..(770): n is a, c, g, or t

SEQ ID NO: 277543 - DNA, 1203 bp, Homo Sapiens; identical to SEQ ID NO: 255681

SEQ ID NO: 277544 - DNA, 630 bp, Homo Sapiens; identical to SEQ ID NO: 255682

SEQ ID NO: 277545 - DNA, 1367 bp, Homo Sapiens; identical to SEQ ID NO: 255683
  misc_feature (682)..(682): n is a, c, g, or t

SEQ ID NO: 277546 - DNA, 464 bp, Homo Sapiens; identical to SEQ ID NO: 255684
  misc_feature (118)..(118): n is a, c, g, or t
  misc_feature (387)..(387): n is a, c, g, or t

SEQ ID NO: 277547 - DNA, 1643 bp, Homo Sapiens; identical to SEQ ID NO: 255691

SEQ ID NO: 277548 - DNA, 1333 bp, Homo Sapiens; identical to SEQ ID NO: 255692
  misc_feature (1295)..(1295): n is a, c, g, or t

SEQ ID NO: 277549 - DNA, 854 bp, Homo Sapiens; identical to SEQ ID NO: 255693
  misc_feature (660)..(660): n is a, c, g, or t
  misc_feature (777)..(777): n is a, c, g, or t

SEQ ID NO: 277550 - DNA, 1236 bp, Homo Sapiens; identical to SEQ ID NO: 255698
  misc_feature (519)..(527): n is a, c, g, or t

SEQ ID NO: 277551 - DNA, 1014 bp, Homo Sapiens; identical to SEQ ID NO: 255699
  misc_feature (511)..(519): n is a, c, g, or t
  misc_feature (724)..(724): n is a, c, g, or t
  misc_feature (730)..(730): n is a, c, g, or t

SEQ ID NO: 277552 - DNA, 420 bp, Homo Sapiens; identical to SEQ ID NO: 255704
  misc_feature (400)..(400): n is a, c, g, or t

SEQ ID NO: 277553 - DNA, 1232 bp, Homo Sapiens; identical to SEQ ID NO: 255705

SEQ ID NO: 277554 - DNA, 584 bp, Homo Sapiens; identical to SEQ ID NO: 255713

SEQ ID NO: 277555 - DNA, 454 bp, Homo Sapiens; identical to SEQ ID NO: 255714

SEQ ID NO: 277556 - DNA, 940 bp, Homo Sapiens; identical to SEQ ID NO: 255715
  misc_feature (661)..(728): n is a, c, g, or t
  misc_feature (839)..(839): n is a, c, g, or t

SEQ ID NO: 277557 - DNA, 971 bp, Homo Sapiens; identical to SEQ ID NO: 255721
  misc_feature (4)..(4): n is a, c, g, or t
  misc_feature (11)..(11): n is a, c, g, or t
  misc_feature (14)..(14): n is a, c, g, or t
  misc_feature (18)..(18): n is a, c, g, or t
  misc_feature (26)..(26): n is a, c, g, or t
  misc_feature (32)..(32): n is a, c, g, or t
  misc_feature (43)..(43): n is a, c, g, or t
  misc_feature (47)..(48): n is a, c, g, or t
  misc_feature (50)..(50): n is a, c, g, or t
  misc_feature (61)..(61): n is a, c, g, or t
  misc_feature (73)..(73): n is a, c, g, or t
  misc_feature (77)..(77): n is a, c, g, or t
  misc_feature (93)..(93): n is a, c, g, or t
  misc_feature (114)..(114): n is a, c, g, or t
  misc_feature (118)..(118): n is a, c, g, or t
  misc_feature (128)..(128): n is a, c, g, or t
  misc_feature (142)..(142): n is a, c, g, or t
  misc_feature (168)..(168): n is a, c, g, or t
  misc_feature (184)..(184): n is a, c, g, or t
  misc_feature (218)..(218): n is a, c, g, or t
  misc_feature (251)..(251): n is a, c, g, or t
  misc_feature (447)..(447): n is a, c, g, or t
  misc_feature (462)..(462): n is a, c, g, or t
  misc_feature (503)..(503): n is a, c, g, or t
  misc_feature (506)..(506): n is a, c, g, or t
  misc_feature (550)..(550): n is a, c, g, or t

SEQ ID NO: 277558 - DNA, 430 bp, Homo Sapiens; identical to SEQ ID NO: 255722

SEQ ID NO: 277559 - DNA, 722 bp, Homo Sapiens; identical to SEQ ID NO: 255723
  misc_feature (100)..(100): n is a, c, g, or t
  misc_feature (110)..(110): n is a, c, g, or t

SEQ ID NO: 277560 - DNA, 2036 bp, Homo Sapiens; identical to SEQ ID NO: 255729

SEQ ID NO: 277561 - DNA, 964 bp, Homo Sapiens; identical to SEQ ID NO: 255730
  misc_feature (797)..(797): n is a, c, g, or t
  misc_feature (806)..(806): n is a, c, g, or t
  misc_feature (930)..(930): n is a, c, g, or t

SEQ ID NO: 277562 - DNA, 621 bp, Homo Sapiens; identical to SEQ ID NO: 255731

SEQ ID NO: 277563 - DNA, 432 bp, Homo Sapiens; identical to SEQ ID NO: 255732
  misc_feature (105)..(105): n is a, c, g, or t

SEQ ID NO: 277564 - DNA, 719 bp, Homo Sapiens; identical to SEQ ID NO: 255737
  misc_feature (599)..(599): n is a, c, g, or t
  misc_feature (657)..(657): n is a, c, g, or t
  misc_feature (691)..(691): n is a, c, g, or t

SEQ ID NO: 277565 - DNA, 357 bp, Homo Sapiens; identical to SEQ ID NO: 255738

SEQ ID NO: 277566 - DNA, 1042 bp, Homo Sapiens; identical to SEQ ID NO: 255739

SEQ ID NO: 277567 - DNA, 881 bp, Homo Sapiens; identical to SEQ ID NO: 255740
  misc_feature (376)..(412): n is a, c, g, or t

SEQ ID NO: 277568 - DNA, 896 bp, Homo Sapiens; identical to SEQ ID NO: 255741

SEQ ID NO: 277569 - DNA, 482 bp, Homo Sapiens; identical to SEQ ID NO: 255742

SEQ ID NO: 277570 - DNA, 617 bp, Homo Sapiens; identical to SEQ ID NO: 255743
  misc_feature (431)..(431): n is a, c, g, or t
  misc_feature (469)..(469): n is a, c, g, or t
  misc_feature (471)..(471): n is a, c, g, or t
  misc_feature (544)..(544): n is a, c, g, or t
  misc_feature (561)..(561): n is a, c, g, or t

SEQ ID NO: 277571 - DNA, 1453 bp, Homo Sapiens; identical to SEQ ID NO: 255744

SEQ ID NO: 277572 - DNA, 447 bp, Homo Sapiens; identical to SEQ ID NO: 255745
  misc_feature (420)..(420): n is a, c, g, or t

SEQ ID NO: 277573 - DNA, 387 bp, Homo Sapiens; identical to SEQ ID NO: 255746
  misc_feature (12)..(12): n is a, c, g, or t

SEQ ID NO: 277574 - DNA, 1355 bp, Homo Sapiens; identical to SEQ ID NO: 255748
  misc_feature (3)..(6): n is a, c, g, or t
  misc_feature (11)..(12): n is a, c, g, or t
  misc_feature (18)..(18): n is a, c, g, or t
  misc_feature (27)..(27): n is a, c, g, or t
  misc_feature (34)..(36): n is a, c, g, or t
  misc_feature (47)..(47): n is a, c, g, or t
  misc_feature (50)..(50): n is a, c, g, or t
  misc_feature (59)..(59): n is a, c, g, or t
  misc_feature (62)..(62): n is a, c, g, or t
  misc_feature (77)..(77): n is a, c, g, or t
  misc_feature (94)..(94): n is a, c, g, or t
  misc_feature (97)..(97): n is a, c, g, or t
  misc_feature (101)..(101): n is a, c, g, or t
  misc_feature (107)..(107): n is a, c, g, or t
  misc_feature (141)..(141): n is a, c, g, or t
  misc_feature (145)..(173): n is a, c, g, or t
  misc_feature (175)..(175): n is a, c, g, or t
  misc_feature (178)..(178): n is a, c, g, or t
  misc_feature (180)..(180): n is a, c, g, or t
  misc_feature (368)..(368): n is a, c, g, or t
  misc_feature (1049)..(1235): n is a, c, g, or t

SEQ ID NO: 277575 - DNA, 951 bp, Homo Sapiens; identical to SEQ ID NO: 255749
  misc_feature (74)..(406): n is a, c, g, or t
  misc_feature (599)..(777): n is a, c, g, or t
  misc_feature (802)..(867): n is a, c, g, or t

SEQ ID NO: 277576 - DNA, 708 bp, Homo Sapiens; identical to SEQ ID NO: 255760
  misc_feature (620)..(620): n is a, c, g, or t
  misc_feature (680)..(680): n is a, c, g, or t

SEQ ID NO: 277577 - DNA, 830 bp, Homo Sapiens; identical to SEQ ID NO: 255761
  misc_feature (384)..(384): n is a, c, g, or t
  misc_feature (791)..(791): n is a, c, g, or t

SEQ ID NO: 277578 - DNA, 384 bp, Homo Sapiens; identical to SEQ ID NO: 255762
  misc_feature (61)..(61): n is a, c, g, or t

SEQ ID NO: 277579 - DNA, 451 bp, Homo Sapiens; identical to SEQ ID NO: 255763
  misc_feature (43)..(43): n is a, c, g, or t
  misc_feature (74)..(74): n is a, c, g, or t
  misc_feature (89)..(89): n is a, c, g, or t
  misc_feature (115)..(115): n is a, c, g, or t
  misc_feature (121)..(121): n is a, c, g, or t
  misc_feature (135)..(135): n is a, c, g, or t

SEQ ID NO: 277580 - DNA, 1034 bp, Homo Sapiens; identical to SEQ ID NO: 255766
  misc_feature (746)..(746): n is a, c, g, or t
  misc_feature (882)..(882): n is a, c, g, or t

SEQ ID NO: 277581 - DNA, 1125 bp, Homo Sapiens; identical to SEQ ID NO: 255767

SEQ ID NO: 277582 - DNA, 1034 bp, Homo Sapiens; identical to SEQ ID NO: 255768

SEQ ID NO: 277583 - DNA, 930 bp, Homo Sapiens; identical to SEQ ID NO: 255769

SEQ ID NO: 277584 - DNA, 1853 bp, Homo Sapiens; identical to SEQ ID NO: 255770

SEQ ID NO: 277585 - DNA, 1852 bp, Homo Sapiens; identical to SEQ ID NO: 255771

SEQ ID NO: 277586 - DNA, 559 bp, Homo Sapiens; identical to SEQ ID NO: 255776
  misc_feature (357)..(370): n is a, c, g, or t

SEQ ID NO: 277587 - DNA, 616 bp, Homo Sapiens; identical to SEQ ID NO: 255777

SEQ ID NO: 277588 - DNA, 941 bp, Homo Sapiens; identical to SEQ ID NO: 255778
  misc_feature (26)..(26): n is a, c, g, or t

SEQ ID NO: 277589 - DNA, 1147 bp, Homo Sapiens; identical to SEQ ID NO: 255779
  misc_feature (712)..(732): n is a, c, g, or t
  misc_feature (943)..(953): n is a, c, g, or t
  misc_feature (955)..(955): n is a, c, g, or t
  misc_feature (957)..(958): n is a, c, g, or t
  misc_feature (966)..(966): n is a, c, g, or t
  misc_feature (970)..(974): n is a, c, g, or t

SEQ ID NO: 277590 - DNA, 1131 bp, Homo Sapiens; identical to SEQ ID NO: 255782
  misc_feature (14)..(14): n is a, c, g, or t
  misc_feature (17)..(17): n is a, c, g, or t
  misc_feature (23)..(23): n is a, c, g, or t
  misc_feature (48)..(48): n is a, c, g, or t
  misc_feature (50)..(50): n is a, c, g, or t
  misc_feature (64)..(64): n is a, c, g, or t
  misc_feature (67)..(67): n is a, c, g, or t
  misc_feature (78)..(78): n is a, c, g, or t
  misc_feature (89)..(89): n is a, c, g, or t
  misc_feature (96)..(96): n is a, c, g, or t
  misc_feature (100)..(100): n is a, c, g, or t

SEQ ID NO: 277591 - DNA, 1157 bp, Homo Sapiens; identical to SEQ ID NO: 255783
  misc_feature (8)..(8): n is a, c, g, or t
  misc_feature (22)..(22): n is a, c, g, or t
  misc_feature (41)..(41): n is a, c, g, or t
  misc_feature (55)..(55): n is a, c, g, or t
  misc_feature (63)..(63): n is a, c, g, or t
  misc_feature (76)..(76): n is a, c, g, or t
  misc_feature (86)..(86): n is a, c, g, or t
  misc_feature (97)..(97): n is a, c, g, or t
  misc_feature (103)..(103): n is a, c, g, or t
  misc_feature (107)..(108): n is a, c, g, or t
  misc_feature (115)..(115): n is a, c, g, or t
  misc_feature (131)..(131): n is a, c, g, or t
  misc_feature (136)..(136): n is a, c, g, or t
  misc_feature (188)..(188): n is a, c, g, or t
  misc_feature (210)..(210): n is a, c, g, or t

SEQ ID NO: 277592 - DNA, 1017 bp, Homo Sapiens; identical to SEQ ID NO: 255784
  misc_feature (304)..(304): n is a, c, g, or t
  misc_feature (309)..(309): n is a, c, g, or t
  misc_feature (328)..(328): n is a, c, g, or t
  misc_feature (342)..(342): n is a, c, g, or t
  misc_feature (351)..(351): n is a, c, g, or t
  misc_feature (789)..(789): n is a, c, g, or t
  misc_feature (832)..(832): n is a, c, g, or t
  misc_feature (840)..(840): n is a, c, g, or t
  misc_feature (844)..(844): n is a, c, g, or t
  misc_feature (860)..(860): n is a, c, g, or t
  misc_feature (863)..(863): n is a, c, g, or t
  misc_feature (867)..(867): n is a, c, g, or t
  misc_feature (875)..(875): n is a, c, g, or t
  misc_feature (878)..(878): n is a, c, g, or t
  misc_feature (880)..(880): n is a, c, g, or t
  misc_feature (896)..(896): n is a, c, g, or t
  misc_feature (903)..(903): n is a, c, g, or t
  misc_feature (926)..(926): n is a, c, g, or t
  misc_feature (933)..(933): n is a, c, g, or t
  misc_feature (935)..(936): n is a, c, g, or t
  misc_feature (938)..(938): n is a, c, g, or t
  misc_feature (950)..(950): n is a, c, g, or t
  misc_feature (972)..(973): n is a, c, g, or t
  misc_feature (975)..(975): n is a, c, g, or t
  misc_feature (1015)..(1015): n is a, c, g, or t

SEQ ID NO: 277593 - DNA, 914 bp, Homo Sapiens; identical to SEQ ID NO: 255785
  misc_feature (808)..(808): n is a, c, g, or t
  misc_feature (872)..(872): n is a, c, g, or t

SEQ ID NO: 277594 - DNA, 749 bp, Homo Sapiens; identical to SEQ ID NO: 255786
  misc_feature (23)..(23): n is a, c, g, or t
  misc_feature (60)..(60): n is a, c, g, or t

SEQ ID NO: 277595 - DNA, 682 bp, Homo Sapiens; identical to SEQ ID NO: 255792

SEQ ID NO: 277596 - DNA, 1559 bp, Homo Sapiens; identical to SEQ ID NO: 255793
  misc_feature (1326)..(1338): n is a, c, g, or t

SEQ ID NO: 277597 - DNA, 731 bp, Homo Sapiens; identical to SEQ ID NO: 255796
  misc_feature (49)..(49): n is a, c, g, or t

SEQ ID NO: 277598 - DNA, 1074 bp, Homo Sapiens; identical to SEQ ID NO: 255797

SEQ ID NO: 277599 - DNA, 1430 bp, Homo Sapiens; identical to SEQ ID NO: 255798
  misc_feature (570)..(570): n is a, c, g, or t

SEQ ID NO: 277600 - DNA, 1905 bp, Homo Sapiens; identical to SEQ ID NO: 255805
  misc_feature (1497)..(1497): n is a, c, g, or t
  misc_feature (1501)..(1501): n is a, c, g, or t
  misc_feature (1582)..(1656): n is a, c, g, or t
  misc_feature (1775)..(1775): n is a, c, g, or t
  misc_feature (1777)..(1777): n is a, c, g, or t
  misc_feature (1788)..(1788): n is a, c, g, or t
  misc_feature (1802)..(1802): n is a, c, g, or t
  misc_feature (1825)..(1825): n is a, c, g, or t
  misc_feature (1829)..(1829): n is a, c, g, or t
  misc_feature (1832)..(1832): n is a, c, g, or t
  misc_feature (1835)..(1835): n is a, c, g, or t
  misc_feature (1846)..(1846): n is a, c, g, or t
  misc_feature (1858)..(1858): n is a, c, g, or t

SEQ ID NO: 277601 - DNA, 539 bp, Homo Sapiens; identical to SEQ ID NO: 255806
  misc_feature (171)..(245): n is a, c, g, or t

SEQ ID NO: 277602 - DNA, 369 bp, Homo Sapiens; identical to SEQ ID NO: 255808

SEQ ID NO: 277603 - DNA, 1252 bp, Homo Sapiens; identical to SEQ ID NO: 255809
  misc_feature (52)..(52): n is a, c, g, or t
  misc_feature (59)..(59): n is a, c, g, or t
  misc_feature (1197)..(1208): n is a, c, g, or t

SEQ ID NO: 277604 - DNA, 358 bp, Homo Sapiens; identical to SEQ ID NO: 255818

SEQ ID NO: 277605 - DNA, 623 bp, Homo Sapiens; identical to SEQ ID NO: 255819
  misc_feature (595)..(595): n is a, c, g, or t
  misc_feature (599)..(599): n is a, c, g, or t

SEQ ID NO: 277606 - DNA, 680 bp, Homo Sapiens; identical to SEQ ID NO: 255824
  misc_feature (568)..(576): n is a, c, g, or t
  misc_feature (655)..(655): n is a, c, g, or t

SEQ ID NO: 277607 - DNA, 453 bp, Homo Sapiens; identical to SEQ ID NO: 255825
  misc_feature (436)..(436): n is a, c, g, or t

SEQ ID NO: 277608 - DNA, 637 bp, Homo Sapiens; identical to SEQ ID NO: 255829
  misc_feature (539)..(539): n is a, c, g, or t

SEQ ID NO: 277609 - DNA, 1206 bp, Homo Sapiens; identical to SEQ ID NO: 255830
  misc_feature (29)..(29): n is a, c, g, or t
  misc_feature (52)..(52): n is a, c, g, or t
  misc_feature (60)..(60): n is a, c, g, or t
  misc_feature (109)..(109): n is a, c, g, or t

SEQ ID NO: 277610 - DNA, 677 bp, Homo Sapiens; identical to SEQ ID NO: 255841
  misc_feature (508)..(508): n is a, c, g, or t
  misc_feature (543)..(543): n is a, c, g, or t
  misc_feature (549)..(549): n is a, c, g, or t
  misc_feature (578)..(578): n is a, c, g, or t
  misc_feature (659)..(659): n is a, c, g, or t

SEQ ID NO: 277611 - DNA, 934 bp, Homo Sapiens; identical to SEQ ID NO: 255842

SEQ ID NO: 277612 - DNA, 485 bp, Homo Sapiens; identical to SEQ ID NO: 255843
  misc_feature (331)..(331): n is a, c, g, or t
  misc_feature (426)..(426): n is a, c, g, or t
  misc_feature (439)..(439): n is a, c, g, or t
  misc_feature (449)..(449): n is a, c, g, or t
  misc_feature (458)..(458): n is a, c, g, or t

SEQ ID NO: 277613 - DNA, 1627 bp, Homo Sapiens; identical to SEQ ID NO: 255845
  misc_feature (530)..(538): n is a, c, g, or t

SEQ ID NO: 277614 - DNA, 490 bp, Homo Sapiens; identical to SEQ ID NO: 255846
  misc_feature (312)..(312): n is a, c, g, or t
  misc_feature (416)..(416): n is a, c, g, or t
  misc_feature (432)..(432): n is a, c, g, or t
  misc_feature (448)..(448): n is a, c, g, or t
  misc_feature (460)..(460): n is a, c, g, or t
  misc_feature (468)..(468): n is a, c, g, or t

SEQ ID NO: 277615 - DNA, 498 bp, Homo Sapiens; identical to SEQ ID NO: 255847
  misc_feature (17)..(17): n is a, c, g, or t
  misc_feature (394)..(394): n is a, c, g, or t
  misc_feature (453)..(453): n is a, c, g, or t

SEQ ID NO: 277616 - DNA, 473 bp, Homo Sapiens; identical to SEQ ID NO: 255848
  misc_feature (369)..(369): n is a, c, g, or t
  misc_feature (388)..(388): n is a, c, g, or t
  misc_feature (435)..(435): n is a, c, g, or t

SEQ ID NO: 277617 - DNA, 764 bp, Homo Sapiens; identical to SEQ ID NO: 255872

SEQ ID NO: 277618 - DNA, 577 bp, Homo Sapiens; identical to SEQ ID NO: 255873
  misc_feature (19)..(19): n is a, c, g, or t

SEQ ID NO: 277619 - DNA, 581 bp, Homo Sapiens; identical to SEQ ID NO: 255876

SEQ ID NO: 277620 - DNA, 882 bp, Homo Sapiens; identical to SEQ ID NO: 255877

SEQ ID NO: 277621 - DNA, 2531 bp, Homo Sapiens; identical to SEQ ID NO: 255878
  misc_feature (1740)..(1754): n is a, c, g, or t
  misc_feature (1843)..(1852): n is a, c, g, or t
  misc_feature (1926)..(1926): n is a, c, g, or t
  misc_feature (1956)..(1956): n is a, c, g, or t

SEQ ID NO: 277622 - DNA, 923 bp, Homo Sapiens; identical to SEQ ID NO: 255879
  misc_feature (889)..(889): n is a, c, g, or t

SEQ ID NO: 277623 - DNA, 1668 bp, Homo Sapiens; identical to SEQ ID NO: 255887
  misc_feature (140)..(165): n is a, c, g, or t
  misc_feature (511)..(511): n is a, c, g, or t
  misc_feature (524)..(524): n is a, c, g, or t

SEQ ID NO: 277624 - DNA, 570 bp, Homo Sapiens; identical to SEQ ID NO: 255888
  misc_feature (435)..(459): n is a, c, g, or t

SEQ ID NO: 277625 - DNA, 540 bp, Homo Sapiens; identical to SEQ ID NO: 255892

SEQ ID NO: 277626 - DNA, 383 bp, Homo Sapiens; identical to SEQ ID NO: 255893

SEQ ID NO: 277627 - DNA, 904 bp, Homo Sapiens; identical to SEQ ID NO: 255903

SEQ ID NO: 277628 - DNA, 536 bp, Homo Sapiens; identical to SEQ ID NO: 255904
  misc_feature (82)..(82): n is a, c, g, or t
  misc_feature (164)..(164): n is a, c, g, or t
  misc_feature (419)..(419): n is a, c, g, or t
  misc_feature (467)..(467): n is a, c, g, or t

SEQ ID NO: 277629 - DNA, 652 bp, Homo Sapiens; identical to SEQ ID NO: 255909
  misc_feature (585)..(585): n is a, c, g, or t

SEQ ID NO: 277630 - DNA, 1202 bp, Homo Sapiens; identical to SEQ ID NO: 255910
  misc_feature (318)..(318): n is a, c, g, or t

SEQ ID NO: 277631 - DNA, 950 bp, Homo Sapiens; identical to SEQ ID NO: 255911

SEQ ID NO: 277632 - DNA, 843 bp, Homo Sapiens; identical to SEQ ID NO: 255912

SEQ ID NO: 277633 - DNA, 1003 bp, Homo Sapiens; identical to SEQ ID NO: 255913

SEQ ID NO: 277634 - DNA, 1129 bp, Homo Sapiens; identical to SEQ ID NO: 255914
  misc_feature (861)..(861): n is a, c, g, or t

SEQ ID NO: 277635 - DNA, 373 bp, Homo Sapiens; identical to SEQ ID NO: 255918

SEQ ID NO: 277636 - DNA, 680 bp, Homo Sapiens; identical to SEQ ID NO: 255919
  misc_feature (516)..(516): n is a, c, g, or t

SEQ ID NO: 277637 - DNA, 354 bp, Homo Sapiens; identical to SEQ ID NO: 255930

SEQ ID NO: 277638 - DNA, 1175 bp, Homo Sapiens; identical to SEQ ID NO: 255931
  misc_feature (388)..(459): n is a, c, g, or t

SEQ ID NO: 277639 - DNA, 470 bp, Homo Sapiens; identical to SEQ ID NO: 255932
  misc_feature (54)..(54): n is a, c, g, or t
  misc_feature (79)..(79): n is a, c, g, or t
  misc_feature (86)..(86): n is a, c, g, or t
  misc_feature (111)..(111): n is a, c, g, or t
  misc_feature (123)..(123): n is a, c, g, or t

SEQ ID NO: 277640 - DNA, 629 bp, Homo Sapiens; identical to SEQ ID NO: 255938
  misc_feature (97)..(142): n is a, c, g, or t
  misc_feature (335)..(370): n is a, c, g, or t

SEQ ID NO: 277641 - DNA, 488 bp, Homo Sapiens; identical to SEQ ID NO: 255939
  misc_feature (255)..(300): n is a, c, g, or t

SEQ ID NO: 277642 - DNA, 559 bp, Homo Sapiens; identical to SEQ ID NO: 255942
  misc_feature (101)..(114): n is a, c, g, or t

SEQ ID NO: 277643 - DNA, 964 bp, Homo Sapiens; identical to SEQ ID NO: 255943
  misc_feature (26)..(27): n is a, c, g, or t
  misc_feature (29)..(29): n is a, c, g, or t
  misc_feature (31)..(31): n is a, c, g, or t
  misc_feature (38)..(38): n is a, c, g, or t
  misc_feature (40)..(40): n is a, c, g, or t
  misc_feature (53)..(53): n is a, c, g, or t
  misc_feature (55)..(56): n is a, c, g, or t
  misc_feature (62)..(62): n is a, c, g, or t
  misc_feature (64)..(66): n is a, c, g, or t
  misc_feature (78)..(78): n is a, c, g, or t
  misc_feature (85)..(85): n is a, c, g, or t
  misc_feature (100)..(101): n is a, c, g, or t
  misc_feature (111)..(111): n is a, c, g, or t
  misc_feature (119)..(119): n is a, c, g, or t
  misc_feature (133)..(133): n is a, c, g, or t
  misc_feature (135)..(135): n is a, c, g, or t
  misc_feature (143)..(143): n is a, c, g, or t
  misc_feature (192)..(193): n is a, c, g, or t
  misc_feature (196)..(196): n is a, c, g, or t
  misc_feature (213)..(214): n is a, c, g, or t
  misc_feature (220)..(220): n is a, c, g, or t
  misc_feature (225)..(225): n is a, c, g, or t
  misc_feature (234)..(234): n is a, c, g, or t
  misc_feature (244)..(244): n is a, c, g, or t
  misc_feature (258)..(258): n is a, c, g, or t
  misc_feature (271)..(271): n is a, c, g, or t
  misc_feature (274)..(275): n is a, c, g, or t
  misc_feature (280)..(280): n is a, c, g, or t
  misc_feature (287)..(287): n is a, c, g, or t
  misc_feature (294)..(296): n is a, c, g, or t
  misc_feature (325)..(325): n is a, c, g, or t
  misc_feature (337)..(337): n is a, c, g, or t
  misc_feature (352)..(352): n is a, c, g, or t
  misc_feature (354)..(354): n is a, c, g, or t
  misc_feature (356)..(357): n is a, c, g, or t
  misc_feature (362)..(362): n is a, c, g, or t
  misc_feature (369)..(418): n is a, c, g, or t
  misc_feature (420)..(420): n is a, c, g, or t
  misc_feature (422)..(422): n is a, c, g, or t

SEQ ID NO: 277644 - DNA, 417 bp, Homo Sapiens; identical to SEQ ID NO: 255947
  misc_feature (310)..(372): n is a, c, g, or t
  misc_feature (387)..(387): n is a, c, g, or t

SEQ ID NO: 277645 - DNA, 472 bp, Homo Sapiens; identical to SEQ ID NO: 255948
  misc_feature (164)..(222): n is a, c, g, or t

SEQ ID NO: 277646 - DNA, 1642 bp, Homo Sapiens; identical to SEQ ID NO: 255949
  misc_feature (176)..(203): n is a, c, g, or t
  misc_feature (212)..(212): n is a, c, g, or t
  misc_feature (941)..(949): n is a, c, g, or t
  misc_feature (1237)..(1304): n is a, c, g, or t
  misc_feature (1605)..(1605): n is a, c, g, or t

SEQ ID NO: 277647 - DNA, 664 bp, Homo Sapiens; identical to SEQ ID NO: 255950
  misc_feature (39)..(39): n is a, c, g, or t
  misc_feature (50)..(50): n is a, c, g, or t
  misc_feature (79)..(79): n is a, c, g, or t
  misc_feature (419)..(433): n is a, c, g, or t

SEQ ID NO: 277648 - DNA, 942 bp, Homo Sapiens; identical to SEQ ID NO: 255959
  misc_feature (699)..(786): n is a, c, g, or t
  misc_feature (791)..(818): n is a, c, g, or t
  misc_feature (829)..(843): n is a, c, g, or t

SEQ ID NO: 277649 - DNA, 362 bp, Homo Sapiens; identical to SEQ ID NO: 255960

SEQ ID NO: 277650 - DNA, 1521 bp, Homo Sapiens; identical to SEQ ID NO: 255961
  misc_feature (506)..(506): n is a, c, g, or t
  misc_feature (561)..(561): n is a, c, g, or t

SEQ ID NO: 277651 - DNA, 1019 bp, Homo Sapiens; identical to SEQ ID NO: 255962
  misc_feature (982)..(982): n is a, c, g, or t

SEQ ID NO: 277652 - DNA, 586 bp, Homo Sapiens; identical to SEQ ID NO: 255963
  misc_feature (464)..(464): n is a, c, g, or t

SEQ ID NO: 277653 - DNA, 2005 bp, Homo Sapiens; identical to SEQ ID NO: 255964

SEQ ID NO: 277654 - DNA, 974 bp, Homo Sapiens; identical to SEQ ID NO: 255966
  misc_feature (905)..(922): n is a, c, g, or t

SEQ ID NO: 277655 - DNA, 536 bp, Homo Sapiens; identical to SEQ ID NO: 255967

SEQ ID NO: 277656 - DNA, 938 bp, Homo Sapiens; identical to SEQ ID NO: 255973
  misc_feature (102)..(367): n is a, c, g, or t

SEQ ID NO: 277657 - DNA, 433 bp, Homo Sapiens; identical to SEQ ID NO: 255974
  misc_feature (343)..(343): n is a, c, g, or t
  misc_feature (353)..(353): n is a, c, g, or t

SEQ ID NO: 277658 - DNA, 1022 bp, Homo Sapiens; identical to SEQ ID NO: 255980
  misc_feature (67)..(67): n is a, c, g, or t
  misc_feature (74)..(74): n is a, c, g, or t
  misc_feature (968)..(968): n is a, c, g, or t
  misc_feature (975)..(975): n is a, c, g, or t

SEQ ID NO: 277659 - DNA, 2048 bp, Homo Sapiens; identical to SEQ ID NO: 255981
  misc_feature (1665)..(1748): n is a, c, g, or t

SEQ ID NO: 277660 - DNA, 437 bp, Homo Sapiens; identical to SEQ ID NO: 255988

SEQ ID NO: 277661 - DNA, 907 bp, Homo Sapiens; identical to SEQ ID NO: 255989
  misc_feature (45)..(55): n is a, c, g, or t
  misc_feature (58)..(59): n is a, c, g, or t
  misc_feature (66)..(66): n is a, c, g, or t
  misc_feature (89)..(98): n is a, c, g, or t
  misc_feature (104)..(104): n is a, c, g, or t

SEQ ID NO: 277662 - DNA, 699 bp, Homo Sapiens; identical to SEQ ID NO: 255992
  misc_feature (687)..(687): n is a, c, g, or t

SEQ ID NO: 277663 - DNA, 984 bp, Homo Sapiens; identical to SEQ ID NO: 255993
  misc_feature (547)..(556): n is a, c, g, or t

SEQ ID NO: 277664 - DNA, 597 bp, Homo Sapiens; identical to SEQ ID NO: 255995

SEQ ID NO: 277665 - DNA, 1672 bp, Homo Sapiens; identical to SEQ ID NO: 255996
  misc_feature (17)..(17): n is a, c, g, or t
  misc_feature (220)..(220): n is a, c, g, or t
  misc_feature (297)..(297): n is a, c, g, or t
  misc_feature (706)..(714): n is a, c, g, or t
  misc_feature (911)..(911): n is a, c, g, or t

SEQ ID NO: 277666 - DNA, 984 bp, Homo Sapiens; identical to SEQ ID NO: 255998

SEQ ID NO: 277667 - DNA, 419 bp, Homo Sapiens; identical to SEQ ID NO: 255999
  misc_feature (104)..(104): n is a, c, g, or t
  misc_feature (298)..(298): n is a, c, g, or t

SEQ ID NO: 277668 - DNA, 1239 bp, Homo Sapiens; identical to SEQ ID NO: 256000
  misc_feature (806)..(838): n is a, c, g, or t

SEQ ID NO: 277669 - DNA, 450 bp, Homo Sapiens; identical to SEQ ID NO: 256001

SEQ ID NO: 277670 - DNA, 742 bp, Homo Sapiens; identical to SEQ ID NO: 256002
  misc_feature (48)..(48): n is a, c, g, or t

SEQ ID NO: 277671 - DNA, 1952 bp, Homo Sapiens; identical to SEQ ID NO: 256021
  misc_feature (1716)..(1716): n is a, c, g, or t
  misc_feature (1718)..(1718): n is a, c, g, or t

SEQ ID NO: 277672 - DNA, 781 bp, Homo Sapiens; identical to SEQ ID NO: 256022

SEQ ID NO: 277673 - DNA, 447 bp, Homo Sapiens; identical to SEQ ID NO: 256023
  misc_feature (241)..(241): n is a, c, g, or t

SEQ ID NO: 277674 - DNA, 1134 bp, Homo Sapiens; identical to SEQ ID NO: 256024
  misc_feature (23)..(23): n is a, c, g, or t
  misc_feature (39)..(39): n is a, c, g, or t
  misc_feature (50)..(50): n is a, c, g, or t

SEQ ID NO: 277675 - DNA, 618 bp, Homo Sapiens; identical to SEQ ID NO: 256027
  misc_feature (34)..(34): n is a, c, g, or t
  misc_feature (62)..(62): n is a, c, g, or t
  misc_feature (202)..(202): n is a, c, g, or t
  misc_feature (221)..(221): n is a, c, g, or t

SEQ ID NO: 277676 - DNA, 514 bp, Homo Sapiens; identical to SEQ ID NO: 256028

SEQ ID NO: 277677 - DNA, 2440 bp, Homo Sapiens; identical to SEQ ID NO: 256043
  misc_feature (2074)..(2216): n is a, c, g, or t
  misc_feature (2233)..(2268): n is a, c, g, or t
  misc_feature (2280)..(2292): n is a, c, g, or t

SEQ ID NO: 277678 - DNA, 645 bp, Homo Sapiens; identical to SEQ ID NO: 256044

SEQ ID NO: 277679 - DNA, 396 bp, Homo Sapiens; identical to SEQ ID NO: 256045

SEQ ID NO: 277680 - DNA, 388 bp, Homo Sapiens; identical to SEQ ID NO: 256046

SEQ ID NO: 277681 - DNA, 677 bp, Homo Sapiens; identical to SEQ ID NO: 256050
  misc_feature (212)..(245): n is a, c, g, or t
  misc_feature (474)..(474): n is a, c, g, or t
  misc_feature (528)..(529): n is a, c, g, or t
  misc_feature (575)..(575): n is a, c, g, or t
  misc_feature (602)..(603): n is a, c, g, or t
  misc_feature (626)..(626): n is a, c, g, or t

SEQ ID NO: 277682 - DNA, 1152 bp, Homo Sapiens; identical to SEQ ID NO: 256051
  misc_feature (212)..(245): n is a, c, g, or t

SEQ ID NO: 277683 - DNA, 387 bp, Homo Sapiens; identical to SEQ ID NO: 256053

SEQ ID NO: 277684 - DNA, 636 bp, Homo Sapiens; identical to SEQ ID NO: 256054

SEQ ID NO: 277685 - DNA, 636 bp, Homo Sapiens; identical to SEQ ID NO: 256058
  misc_feature (331)..(347): n is a, c, g, or t
  misc_feature (575)..(575): n is a, c, g, or t

SEQ ID NO: 277686 - DNA, 885 bp, Homo Sapiens; identical to SEQ ID NO: 256059
  misc_feature (309)..(325): n is a, c, g, or t
  misc_feature (779)..(779): n is a, c, g, or t
  misc_feature (788)..(788): n is a, c, g, or t
  misc_feature (792)..(792): n is a, c, g, or t

SEQ ID NO: 277687 - DNA, 389 bp, Homo Sapiens; identical to SEQ ID NO: 256060

SEQ ID NO: 277688 - DNA, 846 bp, Homo Sapiens; identical to SEQ ID NO: 256061
  misc_feature (745)..(745): n is a, c, g, or t
  misc_feature (765)..(765): n is a, c, g, or t
  misc_feature (774)..(774): n is a, c, g, or t
  misc_feature (792)..(792): n is a, c, g, or t
  misc_feature (829)..(829): n is a, c, g, or t

SEQ ID NO: 277689 - DNA, 435 bp, Homo Sapiens; identical to SEQ ID NO: 256062
  misc_feature (27)..(27): n is a, c, g, or t
  misc_feature (45)..(45): n is a, c, g, or t
  misc_feature (52)..(52): n is a, c, g, or t
  misc_feature (92)..(92): n is a, c, g, or t
  misc_feature (113)..(113): n is a, c, g, or t
  misc_feature (131)..(131): n is a, c, g, or t

SEQ ID NO: 277690 - DNA, 658 bp, Homo Sapiens; identical to SEQ ID NO: 256070
  misc_feature (94)..(94): n is a, c, g, or t
  misc_feature (186)..(186): n is a, c, g, or t
  misc_feature (208)..(208): n is a, c, g, or t
  misc_feature (310)..(365): n is a, c, g, or t

SEQ ID NO: 277691 - DNA, 695 bp, Homo Sapiens; identical to SEQ ID NO: 256071
  misc_feature (129)..(129): n is a, c, g, or t
  misc_feature (133)..(133): n is a, c, g, or t
  misc_feature (208)..(208): n is a, c, g, or t
  misc_feature (347)..(402): n is a, c, g, or t

SEQ ID NO: 277692 - DNA, 1533 bp, Homo Sapiens; identical to SEQ ID NO: 256072
  misc_feature (822)..(830): n is a, c, g, or t
  misc_feature (968)..(994): n is a, c, g, or t
  misc_feature (1243)..(1264): n is a, c, g, or t

SEQ ID NO: 277693 - DNA, 484 bp, Homo Sapiens; identical to SEQ ID NO: 256073
  misc_feature (17)..(17): n is a, c, g, or t
  misc_feature (22)..(22): n is a, c, g, or t
  misc_feature (35)..(35): n is a, c, g, or t
  misc_feature (43)..(51): n is a, c, g, or t
  misc_feature (60)..(60): n is a, c, g, or t
  misc_feature (84)..(84): n is a, c, g, or t

SEQ ID NO: 277694 - DNA, 400 bp, Homo Sapiens; identical to SEQ ID NO: 256074
  misc_feature (31)..(31): n is a, c, g, or t
  misc_feature (66)..(66): n is a, c, g, or t
  misc_feature (243)..(251): n is a, c, g, or t

SEQ ID NO: 277695 - DNA, 395 bp, Homo Sapiens; identical to SEQ ID NO: 256082

SEQ ID NO: 277696 - DNA, 594 bp, Homo Sapiens; identical to SEQ ID NO: 256083

SEQ ID NO: 277697 - DNA, 666 bp, Homo Sapiens; identical to SEQ ID NO: 256085

SEQ ID NO: 277698 - DNA, 969 bp, Homo Sapiens; identical to SEQ ID NO: 256086

SEQ ID NO: 277699 - DNA, 939 bp, Homo Sapiens; identical to SEQ ID NO: 256087

SEQ ID NO: 277700 - DNA, 1137 bp, Homo Sapiens; identical to SEQ ID NO: 256092
  misc_feature (1073)..(1073): n is a, c, g, or t
  misc_feature (1137)..(1137): n is a, c, g, or t

SEQ ID NO: 277701 - DNA, 447 bp, Homo Sapiens; identical to SEQ ID NO: 256093
  misc_feature (11)..(11): n is a, c, g, or t
  misc_feature (25)..(25): n is a, c, g, or t
  misc_feature (403)..(403): n is a, c, g, or t

SEQ ID NO: 277702 - DNA, 756 bp, Homo Sapiens; identical to SEQ ID NO: 256094

SEQ ID NO: 277703 - DNA, 1111 bp, Homo Sapiens; identical to SEQ ID NO: 256095
  misc_feature (28)..(28): n is a, c, g, or t
  misc_feature (35)..(35): n is a, c, g, or t
  misc_feature (42)..(42): n is a, c, g, or t
  misc_feature (111)..(112): n is a, c, g, or t
  misc_feature (479)..(479): n is a, c, g, or t

SEQ ID NO: 277704 - DNA, 685 bp, Homo Sapiens; identical to SEQ ID NO: 256099
  misc_feature (584)..(584): n is a, c, g, or t
  misc_feature (642)..(642): n is a, c, g, or t

SEQ ID NO: 277705 - DNA, 982 bp, Homo Sapiens; identical to SEQ ID NO: 256100
  misc_feature (747)..(777): n is a, c, g, or t

SEQ ID NO: 277706 - DNA, 1163 bp, Homo Sapiens; identical to SEQ ID NO: 256101
  misc_feature (72)..(363): n is a, c, g, or t

SEQ ID NO: 277707 - DNA, 645 bp, Homo Sapiens; identical to SEQ ID NO: 256102

SEQ ID NO: 277708 - DNA, 1407 bp, Homo Sapiens; identical to SEQ ID NO: 256107
  misc_feature (358)..(377): n is a, c, g, or t

SEQ ID NO: 277709 - DNA, 413 bp, Homo Sapiens; identical to SEQ ID NO: 256108
  misc_feature (304)..(323): n is a, c, g, or t
  misc_feature (325)..(335): n is a, c, g, or t

SEQ ID NO: 277710 - DNA, 811 bp, Homo Sapiens; identical to SEQ ID NO: 256109
  misc_feature (780)..(780): n is a, c, g, or t
  misc_feature (786)..(786): n is a, c, g, or t

SEQ ID NO: 277711 - DNA, 1109 bp, Homo Sapiens; identical to SEQ ID NO: 256114
  misc_feature (617)..(634): n is a, c, g, or t
  misc_feature (911)..(924): n is a, c, g, or t
  misc_feature (1077)..(1077): n is a, c, g, or t

SEQ ID NO: 277712 - DNA, 644 bp, Homo Sapiens; identical to SEQ ID NO: 256115

SEQ ID NO: 277713 - DNA, 748 bp, Homo Sapiens; identical to SEQ ID NO: 256118
  misc_feature (577)..(585): n is a, c, g, or t
  misc_feature (596)..(597): n is a, c, g, or t
  misc_feature (609)..(609): n is a, c, g, or t
  misc_feature (666)..(666): n is a, c, g, or t

SEQ ID NO: 277714 - DNA, 420 bp, Homo Sapiens; identical to SEQ ID NO: 256119

SEQ ID NO: 277715 - DNA, 775 bp, Homo Sapiens; identical to SEQ ID NO: 256120
  misc_feature (366)..(616): n is a, c, g, or t
  misc_feature (628)..(654): n is a, c, g, or t

SEQ ID NO: 277716 - DNA, 716 bp, Homo Sapiens; identical to SEQ ID NO: 256121
  misc_feature (124)..(143): n is a, c, g, or t
  misc_feature (163)..(329): n is a, c, g, or t
  misc_feature (378)..(411): n is a, c, g, or t

SEQ ID NO: 277717 - DNA, 737 bp, Homo Sapiens; identical to SEQ ID NO: 256122
  misc_feature (122)..(148): n is a, c, g, or t
  misc_feature (160)..(410): n is a, c, g, or t
  misc_feature (527)..(527): n is a, c, g, or t
  misc_feature (556)..(557): n is a, c, g, or t
  misc_feature (596)..(596): n is a, c, g, or t
  misc_feature (659)..(659): n is a, c, g, or t
  misc_feature (700)..(700): n is a, c, g, or t
  misc_feature (712)..(712): n is a, c, g, or t

SEQ ID NO: 277718 - DNA, 718 bp, Homo Sapiens; identical to SEQ ID NO: 256124
  misc_feature (480)..(480): n is a, c, g, or t
  misc_feature (508)..(508): n is a, c, g, or t
  misc_feature (519)..(520): n is a, c, g, or t
  misc_feature (535)..(535): n is a, c, g, or t
  misc_feature (537)..(537): n is a, c, g, or t
  misc_feature (587)..(587): n is a, c, g, or t
  misc_feature (598)..(598): n is a, c, g, or t
  misc_feature (600)..(600): n is a, c, g, or t
  misc_feature (604)..(604): n is a, c, g, or t

SEQ ID NO: 277719 - DNA, 1520 bp, Homo Sapiens; identical to SEQ ID NO: 256125
  misc_feature (1131)..(1167): n is a, c, g, or t
  misc_feature (1169)..(1170): n is a, c, g, or t
  misc_feature (1175)..(1203): n is a, c, g, or t
  misc_feature (1440)..(1449): n is a, c, g, or t

SEQ ID NO: 277720 - DNA, 304 bp, Homo Sapiens; identical to SEQ ID NO: 256128

SEQ ID NO: 277721 - DNA, 722 bp, Homo Sapiens; identical to SEQ ID NO: 256129

SEQ ID NO: 277722 - DNA, 1066 bp, Homo Sapiens; identical to SEQ ID NO: 256136
  misc_feature (26)..(26): n is a, c, g, or t
  misc_feature (74)..(74): n is a, c, g, or t
  misc_feature (76)..(76): n is a, c, g, or t
  misc_feature (80)..(80): n is a, c, g, or t

SEQ ID NO: 277723 - DNA, 601 bp, Homo Sapiens; identical to SEQ ID NO: 256137
  misc_feature (396)..(426): n is a, c, g, or t

SEQ ID NO: 277724 - DNA, 1122 bp, Homo Sapiens; identical to SEQ ID NO: 256145

SEQ ID NO: 277725 - DNA, 302 bp, Homo Sapiens; identical to SEQ ID NO: 256146
  misc_feature (111)..(111): n is a, c, g, or t
  misc_feature (123)..(123): n is a, c, g, or t
  misc_feature (126)..(126): n is a, c, g, or t
  misc_feature (147)..(148): n is a, c, g, or t
  misc_feature (160)..(160): n is a, c, g, or t
  misc_feature (167)..(167): n is a, c, g, or t
  misc_feature (207)..(207): n is a, c, g, or t
  misc_feature (210)..(210): n is a, c, g, or t
  misc_feature (214)..(214): n is a, c, g, or t
  misc_feature (217)..(217): n is a, c, g, or t
  misc_feature (225)..(225): n is a, c, g, or t
  misc_feature (228)..(228): n is a, c, g, or t
  misc_feature (231)..(231): n is a, c, g, or t

SEQ ID NO: 277726 - DNA, 451 bp, Homo Sapiens; identical to SEQ ID NO: 256147

SEQ ID NO: 277727 - DNA, 628 bp, Homo Sapiens; identical to SEQ ID NO: 256150

SEQ ID NO: 277728 - DNA, 913 bp, Homo Sapiens; identical to SEQ ID NO: 256151
  misc_feature (274)..(274): n is a, c, g, or t

SEQ ID NO: 277729 - DNA, 938 bp, Homo Sapiens; identical to SEQ ID NO: 256152
  misc_feature (689)..(689): n is a, c, g, or t

SEQ ID NO: 277730 - DNA, 1128 bp, Homo Sapiens; identical to SEQ ID NO: 256166

SEQ ID NO: 277731 - DNA, 447 bp, Homo Sapiens; identical to SEQ ID NO: 256167

SEQ ID NO: 277732 - DNA, 605 bp, Homo Sapiens; identical to SEQ ID NO: 256168

SEQ ID NO: 277733 - DNA, 1684 bp, Homo Sapiens; identical to SEQ ID NO: 256169
  misc_feature (385)..(385): n is a, c, g, or t
  misc_feature (389)..(389): n is a, c, g, or t
  misc_feature (398)..(398): n is a, c, g, or t
  misc_feature (1071)..(1071): n is a, c, g, or t

SEQ ID NO: 277734 - DNA, 2089 bp, Homo Sapiens; identical to SEQ ID NO: 256174
  misc_feature (428)..(428): n is a, c, g, or t
  misc_feature (1740)..(1740): n is a, c, g, or t
  misc_feature (1774)..(1774): n is a, c, g, or t

SEQ ID NO: 277735 - DNA, 481 bp, Homo Sapiens; identical to SEQ ID NO: 256175
  misc_feature (19)..(19): n is a, c, g, or t
  misc_feature (106)..(106): n is a, c, g, or t

SEQ ID NO: 277736 - DNA, 424 bp, Homo Sapiens; identical to SEQ ID NO: 256178

SEQ ID NO: 277737 - DNA, 804 bp, Homo Sapiens; identical to SEQ ID NO: 256179

SEQ ID NO: 277738 - DNA, 444 bp, Homo Sapiens; identical to SEQ ID NO: 256180
  misc_feature (148)..(148): n is a, c, g, or t
  misc_feature (354)..(354): n is a, c, g, or t
  misc_feature (414)..(414): n is a, c, g, or t
  misc_feature (419)..(419): n is a, c, g, or t

SEQ ID NO: 277739 - DNA, 905 bp, Homo Sapiens; identical to SEQ ID NO: 256185
  misc_feature (436)..(450): n is a, c, g, or t

SEQ ID NO: 277740 - DNA, 377 bp, Homo Sapiens; identical to SEQ ID NO: 256186

SEQ ID NO: 277741 - DNA, 2116 bp, Homo Sapiens; identical to SEQ ID NO: 256187
  misc_feature (1880)..(1897): n is a, c, g, or t
  misc_feature (2066)..(2066): n is a, c, g, or t

SEQ ID NO: 277742 - DNA, 687 bp, Homo Sapiens; identical to SEQ ID NO: 256188
  misc_feature (32)..(32): n is a, c, g, or t
  misc_feature (65)..(65): n is a, c, g, or t

SEQ ID NO: 277743 - DNA, 384 bp, Homo Sapiens; identical to SEQ ID NO: 256189
  misc_feature (29)..(29): n is a, c, g, or t
  misc_feature (93)..(93): n is a, c, g, or t

SEQ ID NO: 277744 - DNA, 661 bp, Homo Sapiens; identical to SEQ ID NO: 256191
  misc_feature (556)..(556): n is a, c, g, or t
  misc_feature (601)..(601): n is a, c, g, or t
  misc_feature (604)..(604): n is a, c, g, or t
  misc_feature (610)..(610): n is a, c, g, or t
  misc_feature (622)..(622): n is a, c, g, or t
  misc_feature (632)..(632): n is a, c, g, or t
  misc_feature (645)..(645): n is a, c, g, or t

SEQ ID NO: 277745 - DNA, 1168 bp, Homo Sapiens; identical to SEQ ID NO: 256192

SEQ ID NO: 277746 - DNA, 1506 bp, Homo Sapiens; identical to SEQ ID NO: 256193
  misc_feature (1229)..(1229): n is a, c, g, or t
  misc_feature (1346)..(1346): n is a, c, g, or t
  misc_feature (1392)..(1448): n is a, c, g, or t
  misc_feature (1462)..(1462): n is a, c, g, or t
  misc_feature (1484)..(1484): n is a, c, g, or t

SEQ ID NO: 277747 - DNA, 501 bp, Homo Sapiens; identical to SEQ ID NO: 256194
  misc_feature (86)..(394): n is a, c, g, or t

SEQ ID NO: 277748 - DNA, 612 bp, Homo Sapiens; identical to SEQ ID NO: 256195
  misc_feature (18)..(18): n is a, c, g, or t

SEQ ID NO: 277749 - DNA, 793 bp, Homo Sapiens; identical to SEQ ID NO: 256196

SEQ ID NO: 277750 - DNA, 387 bp, Homo Sapiens; identical to SEQ ID NO: 256198

SEQ ID NO: 277751 - DNA, 806 bp, Homo Sapiens; identical to SEQ ID NO: 256199
  misc_feature (36)..(36): n is a, c, g, or t
  misc_feature (40)..(40): n is a, c, g, or t
  misc_feature (45)..(45): n is a, c, g, or t
  misc_feature (61)..(61): n is a, c, g, or t
  misc_feature (81)..(81): n is a, c, g, or t
  misc_feature (88)..(88): n is a, c, g, or t
  misc_feature (98)..(99): n is a, c, g, or t
  misc_feature (101)..(101): n is a, c, g, or t
  misc_feature (118)..(118): n is a, c, g, or t
  misc_feature (122)..(122): n is a, c, g, or t
  misc_feature (127)..(128): n is a, c, g, or t
  misc_feature (136)..(136): n is a, c, g, or t
  misc_feature (145)..(146): n is a, c, g, or t
  misc_feature (148)..(148): n is a, c, g, or t

SEQ ID NO: 277752 - DNA, 1694 bp, Homo Sapiens; identical to SEQ ID NO: 256203
  misc_feature (10)..(10): n is a, c, g, or t
  misc_feature (13)..(14): n is a, c, g, or t
  misc_feature (51)..(52): n is a, c, g, or t
  misc_feature (82)..(85): n is a, c, g, or t
  misc_feature (92)..(94): n is a, c, g, or t
  misc_feature (103)..(103): n is a, c, g, or t
  misc_feature (115)..(117): n is a, c, g, or t
  misc_feature (119)..(119): n is a, c, g, or t
  misc_feature (429)..(429): n is a, c, g, or t
  misc_feature (827)..(827): n is a, c, g, or t
  misc_feature (852)..(852): n is a, c, g, or t

SEQ ID NO: 277753 - DNA, 1015 bp, Homo Sapiens; identical to SEQ ID NO: 256204
  misc_feature (893)..(893): n is a, c, g, or t

SEQ ID NO: 277754 - DNA, 560 bp, Homo Sapiens; identical to SEQ ID NO: 256205

SEQ ID NO: 277755 - DNA, 643 bp, Homo Sapiens; identical to SEQ ID NO: 256209

SEQ ID NO: 277756 - DNA, 905 bp, Homo Sapiens; identical to SEQ ID NO: 256210

SEQ ID NO: 277757 - DNA, 1137 bp, Homo Sapiens; identical to SEQ ID NO: 256222
  misc_feature (1116)..(1116): n is a, c, g, or t

SEQ ID NO: 277758 - DNA, 1647 bp, Homo Sapiens; identical to SEQ ID NO: 256223
  misc_feature (661)..(730): n is a, c, g, or t
  misc_feature (781)..(781): n is a, c, g, or t

SEQ ID NO: 277759 - DNA, 880 bp, Homo Sapiens; identical to SEQ ID NO: 256227

SEQ ID NO: 277760 - DNA, 476 bp, Homo Sapiens; identical to SEQ ID NO: 256228
  misc_feature (215)..(215): n is a, c, g, or t
  misc_feature (217)..(217): n is a, c, g, or t
  misc_feature (362)..(362): n is a, c, g, or t
  misc_feature (413)..(413): n is a, c, g, or t
  misc_feature (424)..(424): n is a, c, g, or t
  misc_feature (439)..(439): n is a, c, g, or t
  misc_feature (444)..(444): n is a, c, g, or t
  misc_feature (459)..(459): n is a, c, g, or t

SEQ ID NO: 277761 - DNA, 1490 bp, Homo Sapiens; identical to SEQ ID NO: 256229
  misc_feature (1107)..(1185): n is a, c, g, or t
  misc_feature (1296)..(1296): n is a, c, g, or t
  misc_feature (1359)..(1360): n is a, c, g, or t
  misc_feature (1376)..(1377): n is a, c, g, or t
  misc_feature (1384)..(1384): n is a, c, g, or t
  misc_feature (1407)..(1407): n is a, c, g, or t
  misc_feature (1419)..(1419): n is a, c, g, or t
  misc_feature (1442)..(1442): n is a, c, g, or t
  misc_feature (1454)..(1454): n is a, c, g, or t
  misc_feature (1467)..(1467): n is a, c, g, or t
  misc_feature (1471)..(1471): n is a, c, g, or t

SEQ ID NO: 277762 - DNA, 940 bp, Homo Sapiens; identical to SEQ ID NO: 256230
  misc_feature (241)..(264): n is a, c, g, or t

SEQ ID NO: 277763 - DNA, 411 bp, Homo Sapiens; identical to SEQ ID NO: 256235

SEQ ID NO: 277764 - DNA, 2263 bp, Homo Sapiens; identical to SEQ ID NO: 256236

SEQ ID NO: 277765 - DNA, 816 bp, Homo Sapiens; identical to SEQ ID NO: 256237
  misc_feature (13)..(13): n is a, c, g, or t
  misc_feature (41)..(41): n is a, c, g, or t
  misc_feature (46)..(46): n is a, c, g, or t
  misc_feature (104)..(104): n is a, c, g, or t

SEQ ID NO: 277766 - DNA, 686 bp, Homo Sapiens; identical to SEQ ID NO: 256245
  misc_feature (244)..(244): n is a, c, g, or t

SEQ ID NO: 277767 - DNA, 662 bp, Homo Sapiens; identical to SEQ ID NO: 256246

SEQ ID NO: 277768 - DNA, 916 bp, Homo Sapiens; identical to SEQ ID NO: 256249

SEQ ID NO: 277769 - DNA, 918 bp, Homo Sapiens; identical to SEQ ID NO: 256250

SEQ ID NO: 277770 - DNA, 709 bp, Homo Sapiens; identical to SEQ ID NO: 256251

SEQ ID NO: 277771 - DNA, 429 bp, Homo Sapiens; identical to SEQ ID NO: 256252

SEQ ID NO: 277772 - DNA, 1494 bp, Homo Sapiens; identical to SEQ ID NO: 256253
  misc_feature (25)..(25): n is a, c, g, or t
  misc_feature (38)..(38): n is a, c, g, or t
  misc_feature (59)..(59): n is a, c, g, or t
  misc_feature (296)..(296): n is a, c, g, or t

SEQ ID NO: 277773 - DNA, 671 bp, Homo Sapiens; identical to SEQ ID NO: 256259

SEQ ID NO: 277774 - DNA, 558 bp, Homo Sapiens; identical to SEQ ID NO: 256260

SEQ ID NO: 277775 - DNA, 2553 bp, Homo Sapiens; identical to SEQ ID NO: 256279
  misc_feature (280)..(280): n is a, c, g, or t
  misc_feature (431)..(431): n is a, c, g, or t
  misc_feature (439)..(439): n is a, c, g, or t
  misc_feature (442)..(442): n is a, c, g, or t
  misc_feature (487)..(487): n is a, c, g, or t
  misc_feature (711)..(712): n is a, c, g, or t
  misc_feature (1163)..(1163): n is a, c, g, or t

SEQ ID NO: 277776 - DNA, 939 bp, Homo Sapiens; identical to SEQ ID NO: 256280

SEQ ID NO: 277777 - DNA, 389 bp, Homo Sapiens; identical to SEQ ID NO: 256283

SEQ ID NO: 277778 - DNA, 628 bp, Homo Sapiens; identical to SEQ ID NO: 256284

SEQ ID NO: 277779 - DNA, 635 bp, Homo Sapiens; identical to SEQ ID NO: 256293
  misc_feature (480)..(480): n is a, c, g, or t
  misc_feature (483)..(483): n is a, c, g, or t
  misc_feature (586)..(586): n is a, c, g, or t

SEQ ID NO: 277780 - DNA, 542 bp, Homo Sapiens; identical to SEQ ID NO: 256294

SEQ ID NO: 277781 - DNA, 418 bp, Homo Sapiens; identical to SEQ ID NO: 256311

SEQ ID NO: 277782 - DNA, 414 bp, Homo Sapiens; identical to SEQ ID NO: 256312

SEQ ID NO: 277783 - DNA, 1379 bp, Homo Sapiens; identical to SEQ ID NO: 256313

SEQ ID NO: 277784 - DNA, 447 bp, Homo Sapiens; identical to SEQ ID NO: 256314

SEQ ID NO: 277785 - DNA, 521 bp, Homo Sapiens; identical to SEQ ID NO: 256317

SEQ ID NO: 277786 - DNA, 377 bp, Homo Sapiens; identical to SEQ ID NO: 256318
  misc_feature (213)..(214): n is a, c, g, or t

SEQ ID NO: 277787 - DNA, 883 bp, Homo Sapiens; identical to SEQ ID NO: 256321

SEQ ID NO: 277788 - DNA, 330 bp, Homo Sapiens; identical to SEQ ID NO: 256322

SEQ ID NO: 277789 - DNA, 129 bp, Homo Sapiens; identical to SEQ ID NO: 256324

SEQ ID NO: 277790 - DNA, 955 bp, Homo Sapiens; identical to SEQ ID NO: 256325

SEQ ID NO: 277791 - DNA, 1918 bp, Homo Sapiens; identical to SEQ ID NO: 256326
  misc_feature (16)..(16): n is a, c, g, or t

SEQ ID NO: 277792 - DNA, 1012 bp, Homo Sapiens; identical to SEQ ID NO: 256327

SEQ ID NO: 277793 - DNA, 1484 bp, Homo Sapiens; identical to SEQ ID NO: 256332
  misc_feature (501)..(539): n is a, c, g, or t
  misc_feature (649)..(649): n is a, c, g, or t
  misc_feature (652)..(652): n is a, c, g, or t
  misc_feature (835)..(835): n is a, c, g, or t
  misc_feature (857)..(857): n is a, c, g, or t

SEQ ID NO: 277794 - DNA, 704 bp, Homo Sapiens; identical to SEQ ID NO: 256333
  misc_feature (50)..(50): n is a, c, g, or t
  misc_feature (55)..(55): n is a, c, g, or t
  misc_feature (61)..(61): n is a, c, g, or t
  misc_feature (66)..(66): n is a, c, g, or t

SEQ ID NO: 277795 - DNA, 977 bp, Homo Sapiens; identical to SEQ ID NO: 256334
  misc_feature (294)..(332): n is a, c, g, or t

SEQ ID NO: 277796 - DNA, 499 bp, Homo Sapiens; identical to SEQ ID NO: 256335
  misc_feature (340)..(340): n is a, c, g, or t

SEQ ID NO: 277797 - DNA, 989 bp, Homo Sapiens; identical to SEQ ID NO: 256340
  misc_feature (644)..(655): n is a, c, g, or t

SEQ ID NO: 277798 - DNA, 470 bp, Homo Sapiens; identical to SEQ ID NO: 256341

SEQ ID NO: 277799 - DNA, 1434 bp, Homo Sapiens; identical to SEQ ID NO: 256342

SEQ ID NO: 277800 - DNA, 528 bp, Homo Sapiens; identical to SEQ ID NO: 256343

SEQ ID NO: 277801 - DNA, 910 bp, Homo Sapiens; identical to SEQ ID NO: 256355

SEQ ID NO: 277802 - DNA, 1137 bp, Homo Sapiens; identical to SEQ ID NO: 256356

SEQ ID NO: 277803 - DNA, 666 bp, Homo Sapiens; identical to SEQ ID NO: 256359

SEQ ID NO: 277804 - DNA, 614 bp, Homo Sapiens; identical to SEQ ID NO: 256360

SEQ ID NO: 277805 - DNA, 1080 bp, Homo Sapiens; identical to SEQ ID NO: 256362
  misc_feature (998)..(998): n is a, c, g, or t
  misc_feature (1031)..(1031): n is a, c, g, or t
  misc_feature (1048)..(1048): n is a, c, g, or t
  misc_feature (1052)..(1052): n is a, c, g, or t

SEQ ID NO: 277806 - DNA, 734 bp, Homo Sapiens; identical to SEQ ID NO: 256363
  misc_feature (26)..(26): n is a, c, g, or t

SEQ ID NO: 277807 - DNA, 1639 bp, Homo Sapiens; identical to SEQ ID NO: 256364

SEQ ID NO: 277808 - DNA, 930 bp, Homo Sapiens; identical to SEQ ID NO: 256365

SEQ ID NO: 277809 - DNA, 673 bp, Homo Sapiens; identical to SEQ ID NO: 256366
  misc_feature (20)..(20): n is a, c, g, or t
  misc_feature (88)..(88): n is a, c, g, or t
  misc_feature (95)..(95): n is a, c, g, or t

SEQ ID NO: 277810 - DNA, 1757 bp, Homo Sapiens; identical to SEQ ID NO: 256367

SEQ ID NO: 277811 - DNA, 432 bp, Homo Sapiens; identical to SEQ ID NO: 256368

SEQ ID NO: 277812 - DNA, 1245 bp, Homo Sapiens; identical to SEQ ID NO: 256374
  misc_feature (451)..(451): n is a, c, g, or t
  misc_feature (1095)..(1095): n is a, c, g, or t

SEQ ID NO: 277813 - DNA, 1020 bp, Homo Sapiens; identical to SEQ ID NO: 256375
  misc_feature (856)..(856): n is a, c, g, or t
  misc_feature (906)..(906): n is a, c, g, or t
  misc_feature (966)..(966): n is a, c, g, or t
  misc_feature (987)..(987): n is a, c, g, or t
  misc_feature (992)..(992): n is a, c, g, or t

SEQ ID NO: 277814 - DNA, 573 bp, Homo Sapiens; identical to SEQ ID NO: 256384

SEQ ID NO: 277815 - DNA, 1573 bp, Homo Sapiens; identical to SEQ ID NO: 256385

SEQ ID NO: 277816 - DNA, 1000 bp, Homo Sapiens; identical to SEQ ID NO: 256386
  misc_feature (726)..(726): n is a, c, g, or t

SEQ ID NO: 277817 - DNA, 791 bp, Homo Sapiens; identical to SEQ ID NO: 256387
  misc_feature (727)..(727): n is a, c, g, or t
  misc_feature (747)..(747): n is a, c, g, or t
  misc_feature (762)..(762): n is a, c, g, or t
  misc_feature (770)..(770): n is a, c, g, or t

SEQ ID NO: 277818 - DNA, 399 bp, Homo Sapiens; identical to SEQ ID NO: 256388
  misc_feature (13)..(13): n is a, c, g, or t
  misc_feature (28)..(28): n is a, c, g, or t
  misc_feature (104)..(104): n is a, c, g, or t

SEQ ID NO: 277819 - DNA, 1064 bp, Homo Sapiens; identical to SEQ ID NO: 256392

SEQ ID NO: 277820 - DNA, 725 bp, Homo Sapiens; identical to SEQ ID NO: 256393

SEQ ID NO: 277821 - DNA, 679 bp, Homo Sapiens; identical to SEQ ID NO: 256394
  misc_feature (130)..(148): n is a, c, g, or t

SEQ ID NO: 277822 - DNA, 544 bp, Homo Sapiens; identical to SEQ ID NO: 256395
  misc_feature (269)..(286): n is a, c, g, or t

SEQ ID NO: 277823 - DNA, 536 bp, Homo Sapiens; identical to SEQ ID NO: 256409
  misc_feature (13)..(13): n is a, c, g, or t
  misc_feature (25)..(25): n is a, c, g, or t
  misc_feature (36)..(36): n is a, c, g, or t
  misc_feature (62)..(62): n is a, c, g, or t
  misc_feature (80)..(80): n is a, c, g, or t
  misc_feature (125)..(125): n is a, c, g, or t

SEQ ID NO: 277824 - DNA, 908 bp, Homo Sapiens; identical to SEQ ID NO: 256410
  misc_feature (328)..(328): n is a, c, g, or t
  misc_feature (384)..(384): n is a, c, g, or t
  misc_feature (389)..(389): n is a, c, g, or t

SEQ ID NO: 277825 - DNA, 1613 bp, Homo Sapiens; identical to SEQ ID NO: 256414

SEQ ID NO: 277826 - DNA, 780 bp, Homo Sapiens; identical to SEQ ID NO: 256415

SEQ ID NO: 277827 - DNA, 416 bp, Homo Sapiens; identical to SEQ ID NO: 256416
  misc_feature (43)..(43): n is a, c, g, or t
  misc_feature (73)..(73): n is a, c, g, or t
  misc_feature (102)..(102): n is a, c, g, or t

SEQ ID NO: 277828 - DNA, 339 bp, Homo Sapiens; identical to SEQ ID NO: 256418

SEQ ID NO: 277829 - DNA, 1908 bp, Homo Sapiens; identical to SEQ ID NO: 256419
  misc_feature (77)..(77): n is a, c, g, or t

SEQ ID NO: 277830 - DNA, 652 bp, Homo Sapiens; identical to SEQ ID NO: 256426

SEQ ID NO: 277831 - DNA, 890 bp, Homo Sapiens; identical to SEQ ID NO: 256427
  misc_feature (289)..(289): n is a, c, g, or t
  misc_feature (721)..(721): n is a, c, g, or t

SEQ ID NO: 277832 - DNA, 1015 bp, Homo Sapiens; identical to SEQ ID NO: 256428
  misc_feature (751)..(751): n is a, c, g, or t

SEQ ID NO: 277833 - DNA, 450 bp, Homo Sapiens; identical to SEQ ID NO: 256429
  misc_feature (424)..(424): n is a, c, g, or t

SEQ ID NO: 277834 - DNA, 1796 bp, Homo Sapiens; identical to SEQ ID NO: 256432
  misc_feature (8)..(8): n is a, c, g, or t
  misc_feature (32)..(32): n is a, c, g, or t
  misc_feature (69)..(69): n is a, c, g, or t
  misc_feature (1324)..(1324): n is a, c, g, or t
  misc_feature (1335)..(1335): n is a, c, g, or t

SEQ ID NO: 277835 - DNA, 910 bp, Homo Sapiens; identical to SEQ ID NO: 256433

SEQ ID NO: 277836 - DNA, 1062 bp, Homo Sapiens; identical to SEQ ID NO: 256442
  misc_feature (4)..(4): n is a, c, g, or t
  misc_feature (11)..(11): n is a, c, g, or t
  misc_feature (39)..(39): n is a, c, g, or t
  misc_feature (50)..(50): n is a, c, g, or t
  misc_feature (54)..(54): n is a, c, g, or t
  misc_feature (57)..(58): n is a, c, g, or t
  misc_feature (63)..(63): n is a, c, g, or t
  misc_feature (68)..(68): n is a, c, g, or t
  misc_feature (74)..(74): n is a, c, g, or t
  misc_feature (86)..(87): n is a, c, g, or t
  misc_feature (94)..(94): n is a, c, g, or t
  misc_feature (96)..(96): n is a, c, g, or t
  misc_feature (98)..(98): n is a, c, g, or t
  misc_feature (125)..(125): n is a, c, g, or t
  misc_feature (129)..(129): n is a, c, g, or t
  misc_feature (131)..(131): n is a, c, g, or t
  misc_feature (137)..(137): n is a, c, g, or t
  misc_feature (150)..(150): n is a, c, g, or t
  misc_feature (167)..(167): n is a, c, g, or t
  misc_feature (181)..(181): n is a, c, g, or t
  misc_feature (186)..(186): n is a, c, g, or t
  misc_feature (275)..(275): n is a, c, g, or t
  misc_feature (292)..(292): n is a, c, g, or t
  misc_feature (299)..(299): n is a, c, g, or t
  misc_feature (314)..(314): n is a, c, g, or t
  misc_feature (318)..(318): n is a, c, g, or t
  misc_feature (322)..(322): n is a, c, g, or t
  misc_feature (328)..(328): n is a, c, g, or t
  misc_feature (1040)..(1041): n is a, c, g, or t

SEQ ID NO: 277837 - DNA, 931 bp, Homo Sapiens; identical to SEQ ID NO: 256443
  misc_feature (753)..(783): n is a, c, g, or t
  misc_feature (843)..(843): n is a, c, g, or t
  misc_feature (894)..(894): n is a, c, g, or t

SEQ ID NO: 277838 - DNA, 773 bp, Homo Sapiens; identical to SEQ ID NO: 256444
  misc_feature (573)..(573): n is a, c, g, or t
  misc_feature (738)..(738): n is a, c, g, or t
  misc_feature (744)..(744): n is a, c, g, or t

SEQ ID NO: 277839 - DNA, 405 bp, Homo Sapiens; identical to SEQ ID NO: 256447

SEQ ID NO: 277840 - DNA, 1095 bp, Homo Sapiens; identical to SEQ ID NO: 256448

SEQ ID NO: 277841 - DNA, 1015 bp, Homo Sapiens; identical to SEQ ID NO: 256449

SEQ ID NO: 277842 - DNA, 1922 bp, Homo Sapiens; identical to SEQ ID NO: 256461
  misc_feature (411)..(411): n is a, c, g, or t

SEQ ID NO: 277843 - DNA, 1043 bp, Homo Sapiens; identical to SEQ ID NO: 256462
  misc_feature (985)..(985): n is a, c, g, or t
  misc_feature (1002)..(1003): n is a, c, g, or t
  misc_feature (1008)..(1008): n is a, c, g, or t
  misc_feature (1010)..(1010): n is a, c, g, or t
  misc_feature (1017)..(1017): n is a, c, g, or t
  misc_feature (1019)..(1019): n is a, c, g, or t
  misc_feature (1035)..(1036): n is a, c, g, or t

SEQ ID NO: 277844 - DNA, 894 bp, Homo Sapiens; identical to SEQ ID NO: 15040

SEQ ID NO: 277845 - DNA, 261 bp, Homo Sapiens; identical to SEQ ID NO: 256464

SEQ ID NO: 277846 - DNA, 714 bp, Homo Sapiens; identical to SEQ ID NO: 256471
  misc_feature (673)..(673): n is a, c, g, or t

SEQ ID NO: 277847 - DNA, 509 bp, Homo Sapiens; identical to SEQ ID NO: 256472
  misc_feature (75)..(75): n is a, c, g, or t
  misc_feature (155)..(155): n is a, c, g, or t
  misc_feature (295)..(295): n is a, c, g, or t
  misc_feature (308)..(308): n is a, c, g, or t
  misc_feature (324)..(324): n is a, c, g, or t

SEQ ID NO: 277848 - DNA, 424 bp, Homo Sapiens; identical to SEQ ID NO: 256473
  misc_feature (22)..(22): n is a, c, g, or t
  misc_feature (47)..(47): n is a, c, g, or t

SEQ ID NO: 277849 - DNA, 1751 bp, Homo Sapiens; identical to SEQ ID NO: 256477
  misc_feature (1023)..(1023): n is a, c, g, or t
  misc_feature (1102)..(1102): n is a, c, g, or t
  misc_feature (1195)..(1195): n is a, c, g, or t
  misc_feature (1378)..(1378): n is a, c, g, or t
  misc_feature (1395)..(1395): n is a, c, g, or t
  misc_feature (1615)..(1615): n is a, c, g, or t
  misc_feature (1687)..(1688): n is a, c, g, or t
  misc_feature (1727)..(1727): n is a, c, g, or t

SEQ ID NO: 277850 - DNA, 1002 bp, Homo Sapiens; identical to SEQ ID NO: 256478
  misc_feature (23)..(23): n is a, c, g, or t
  misc_feature (832)..(832): n is a, c, g, or t
  misc_feature (901)..(901): n is a, c, g, or t

SEQ ID NO: 277851 - DNA, 648 bp, Homo Sapiens; identical to SEQ ID NO: 256483

SEQ ID NO: 277852 - DNA, 399 bp, Homo Sapiens; identical to SEQ ID NO: 256484

SEQ ID NO: 277853 - DNA, 1019 bp, Homo Sapiens; identical to SEQ ID NO: 256488

SEQ ID NO: 277854 - DNA, 1716 bp, Homo Sapiens; identical to SEQ ID NO: 256489

SEQ ID NO: 277855 - DNA, 561 bp, Homo Sapiens; identical to SEQ ID NO: 256491

SEQ ID NO: 277856 - DNA, 821 bp, Homo Sapiens; identical to SEQ ID NO: 256492

SEQ ID NO: 277857 - DNA, 415 bp, Homo Sapiens; identical to SEQ ID NO: 256493

SEQ ID NO: 277858 - DNA, 488 bp, Homo Sapiens; identical to SEQ ID NO: 256494

SEQ ID NO: 277859 - DNA, 1936 bp, Homo Sapiens; identical to SEQ ID NO: 256495
  misc_feature (89)..(89): n is a, c, g, or t
  misc_feature (144)..(144): n is a, c, g, or t
  misc_feature (183)..(183): n is a, c, g, or t
  misc_feature (191)..(191): n is a, c, g, or t
  misc_feature (307)..(307): n is a, c, g, or t
  misc_feature (383)..(383): n is a, c, g, or t
  misc_feature (400)..(400): n is a, c, g, or t
  misc_feature (798)..(798): n is a, c, g, or t
  misc_feature (805)..(805): n is a, c, g, or t
  misc_feature (808)..(882): n is a, c, g, or t
  misc_feature (1569)..(1703): n is a, c, g, or t
  misc_feature (1723)..(1723): n is a, c, g, or t

SEQ ID NO: 277860 - DNA, 711 bp, Homo Sapiens; identical to SEQ ID NO: 256496

SEQ ID NO: 277861 - DNA, 1125 bp, Homo Sapiens; identical to SEQ ID NO: 256497
  misc_feature (881)..(972): n is a, c, g, or t
  misc_feature (1095)..(1095): n is a, c, g, or t

SEQ ID NO: 277862 - DNA, 670 bp, Homo Sapiens; identical to SEQ ID NO: 256498

SEQ ID NO: 277863 - DNA, 847 bp, Homo Sapiens; identical to SEQ ID NO: 256499
  misc_feature (31)..(31): n is a, c, g, or t
  misc_feature (45)..(45): n is a, c, g, or t
  misc_feature (53)..(53): n is a, c, g, or t
  misc_feature (58)..(58): n is a, c, g, or t
  misc_feature (77)..(77): n is a, c, g, or t
  misc_feature (82)..(82): n is a, c, g, or t
  misc_feature (105)..(105): n is a, c, g, or t
  misc_feature (150)..(150): n is a, c, g, or t
  misc_feature (362)..(370): n is a, c, g, or t
  misc_feature (383)..(383): n is a, c, g, or t
  misc_feature (391)..(391): n is a, c, g, or t
  misc_feature (408)..(416): n is a, c, g, or t
  misc_feature (622)..(672): n is a, c, g, or t

SEQ ID NO: 277864 - DNA, 786 bp, Homo Sapiens; identical to SEQ ID NO: 256500

SEQ ID NO: 277865 - DNA, 1879 bp, Homo Sapiens; identical to SEQ ID NO: 256505
  misc_feature (112)..(112): n is a, c, g, or t
  misc_feature (167)..(167): n is a, c, g, or t
  misc_feature (182)..(182): n is a, c, g, or t
  misc_feature (187)..(187): n is a, c, g, or t
  misc_feature (189)..(189): n is a, c, g, or t
  misc_feature (226)..(226): n is a, c, g, or t
  misc_feature (273)..(273): n is a, c, g, or t
  misc_feature (400)..(400): n is a, c, g, or t
  misc_feature (406)..(406): n is a, c, g, or t
  misc_feature (408)..(408): n is a, c, g, or t
  misc_feature (414)..(414): n is a, c, g, or t
  misc_feature (417)..(418): n is a, c, g, or t
  misc_feature (420)..(420): n is a, c, g, or t
  misc_feature (425)..(427): n is a, c, g, or t
  misc_feature (432)..(432): n is a, c, g, or t
  misc_feature (436)..(436): n is a, c, g, or t
  misc_feature (449)..(450): n is a, c, g, or t
  misc_feature (453)..(453): n is a, c, g, or t
  misc_feature (462)..(463): n is a, c, g, or t
  misc_feature (466)..(467): n is a, c, g, or t
  misc_feature (477)..(477): n is a, c, g, or t
  misc_feature (483)..(483): n is a, c, g, or t
  misc_feature (488)..(488): n is a, c, g, or t
  misc_feature (492)..(493): n is a, c, g, or t
  misc_feature (519)..(519): n is a, c, g, or t
  misc_feature (596)..(596): n is a, c, g, or t
  misc_feature (613)..(613): n is a, c, g, or t
  misc_feature (631)..(631): n is a, c, g, or t
  misc_feature (641)..(641): n is a, c, g, or t
  misc_feature (652)..(653): n is a, c, g, or t
  misc_feature (661)..(661): n is a, c, g, or t
  misc_feature (668)..(668): n is a, c, g, or t
  misc_feature (687)..(687): n is a, c, g, or t
  misc_feature (689)..(689): n is a, c, g, or t
  misc_feature (695)..(695): n is a, c, g, or t
  misc_feature (698)..(699): n is a, c, g, or t
  misc_feature (702)..(702): n is a, c, g, or t
  misc_feature (705)..(705): n is a, c, g, or t
  misc_feature (709)..(709): n is a, c, g, or t
  misc_feature (722)..(722): n is a, c, g, or t
  misc_feature (730)..(730): n is a, c, g, or t

SEQ ID NO: 277866 - DNA, 1038 bp, Homo Sapiens; identical to SEQ ID NO: 256506
  misc_feature (15)..(15): n is a, c, g, or t
  misc_feature (29)..(29): n is a, c, g, or t
  misc_feature (54)..(54): n is a, c, g, or t

SEQ ID NO: 277867 - DNA, 784 bp, Homo Sapiens; identical to SEQ ID NO: 256521

SEQ ID NO: 277868 - DNA, 466 bp, Homo Sapiens; identical to SEQ ID NO: 256522
  misc_feature (164)..(241): n is a, c, g, or t

SEQ ID NO: 277869 - DNA, 709 bp, Homo Sapiens; identical to SEQ ID NO: 256527
  misc_feature (60)..(69): n is a, c, g, or t
  misc_feature (395)..(412): n is a, c, g, or t
  misc_feature (680)..(680): n is a, c, g, or t

SEQ ID NO: 277870 - DNA, 473 bp, Homo Sapiens; identical to SEQ ID NO: 256528
  misc_feature (11)..(11): n is a, c, g, or t
  misc_feature (29)..(29): n is a, c, g, or t
  misc_feature (43)..(43): n is a, c, g, or t
  misc_feature (50)..(50): n is a, c, g, or t
  misc_feature (62)..(62): n is a, c, g, or t
  misc_feature (68)..(68): n is a, c, g, or t
  misc_feature (275)..(292): n is a, c, g, or t

SEQ ID NO: 277871 - DNA, 1550 bp, Homo Sapiens; identical to SEQ ID NO: 256531
  misc_feature (1213)..(1213): n is a, c, g, or t
  misc_feature (1216)..(1216): n is a, c, g, or t
  misc_feature (1221)..(1326): n is a, c, g, or t
  misc_feature (1337)..(1347): n is a, c, g, or t
  misc_feature (1369)..(1369): n is a, c, g, or t
  misc_feature (1378)..(1378): n is a, c, g, or t

SEQ ID NO: 277872 - DNA, 652 bp, Homo Sapiens; identical to SEQ ID NO: 256532

SEQ ID NO: 277873 - DNA, 353 bp, Homo Sapiens; identical to SEQ ID NO: 256535

SEQ ID NO: 277874 - DNA, 821 bp, Homo Sapiens; identical to SEQ ID NO: 256536
  misc_feature (262)..(262): n is a, c, g, or t
  misc_feature (291)..(291): n is a, c, g, or t

SEQ ID NO: 277875 - DNA, 2015 bp, Homo Sapiens; identical to SEQ ID NO: 256540
  misc_feature (1825)..(1909): n is a, c, g, or t

SEQ ID NO: 277876 - DNA, 584 bp, Homo Sapiens; identical to SEQ ID NO: 256541

SEQ ID NO: 277877 - DNA, 1433 bp, Homo Sapiens; identical to SEQ ID NO: 256546
  misc_feature (155)..(191): n is a, c, g, or t
  misc_feature (885)..(885): n is a, c, g, or t

SEQ ID NO: 277878 - DNA, 814 bp, Homo Sapiens; identical to SEQ ID NO: 256547
  misc_feature (24)..(24): n is a, c, g, or t
  misc_feature (161)..(161): n is a, c, g, or t

SEQ ID NO: 277879 - DNA, 1352 bp, Homo Sapiens; identical to SEQ ID NO: 256551
  misc_feature (1332)..(1332): n is a, c, g, or t

SEQ ID NO: 277880 - DNA, 1196 bp, Homo Sapiens; identical to SEQ ID NO: 256552
  misc_feature (1112)..(1120): n is a, c, g, or t

SEQ ID NO: 277881 - DNA, 928 bp, Homo Sapiens; identical to SEQ ID NO: 256553
  misc_feature (286)..(294): n is a, c, g, or t
  misc_feature (362)..(392): n is a, c, g, or t
  misc_feature (634)..(634): n is a, c, g, or t
  misc_feature (780)..(788): n is a, c, g, or t

SEQ ID NO: 277882 - DNA, 794 bp, Homo Sapiens; identical to SEQ ID NO: 256565
  misc_feature (226)..(295): n is a, c, g, or t
  misc_feature (518)..(526): n is a, c, g, or t
  misc_feature (764)..(764): n is a, c, g, or t

SEQ ID NO: 277883 - DNA, 1328 bp, Homo Sapiens; identical to SEQ ID NO: 256566
  misc_feature (1315)..(1315): n is a, c, g, or t

SEQ ID NO: 277884 - DNA, 510 bp, Homo Sapiens; identical to SEQ ID NO: 256567
  misc_feature (40)..(40): n is a, c, g, or t

SEQ ID NO: 277885 - DNA, 607 bp, Homo Sapiens; identical to SEQ ID NO: 256571
  misc_feature (77)..(77): n is a, c, g, or t

SEQ ID NO: 277886 - DNA, 1112 bp, Homo Sapiens; identical to SEQ ID NO: 256572
  misc_feature (118)..(118): n is a, c, g, or t
  misc_feature (897)..(897): n is a, c, g, or t
  misc_feature (911)..(912): n is a, c, g, or t
  misc_feature (936)..(936): n is a, c, g, or t
  misc_feature (938)..(938): n is a, c, g, or t
  misc_feature (946)..(946): n is a, c, g, or t
  misc_feature (952)..(952): n is a, c, g, or t
  misc_feature (958)..(958): n is a, c, g, or t
  misc_feature (960)..(960): n is a, c, g, or t
  misc_feature (962)..(962): n is a, c, g, or t
  misc_feature (968)..(968): n is a, c, g, or t
  misc_feature (981)..(982): n is a, c, g, or t
  misc_feature (990)..(990): n is a, c, g, or t
  misc_feature (994)..(994): n is a, c, g, or t
  misc_feature (998)..(998): n is a, c, g, or t
  misc_feature (1017)..(1017): n is a, c, g, or t
  misc_feature (1028)..(1029): n is a, c, g, or t
  misc_feature (1036)..(1036): n is a, c, g, or t
  misc_feature (1047)..(1047): n is a, c, g, or t
  misc_feature (1052)..(1052): n is a, c, g, or t
  misc_feature (1060)..(1062): n is a, c, g, or t
  misc_feature (1064)..(1064): n is a, c, g, or t
  misc_feature (1067)..(1068): n is a, c, g, or t
  misc_feature (1081)..(1081): n is a, c, g, or t
  misc_feature (1089)..(1089): n is a, c, g, or t
  misc_feature (1091)..(1091): n is a, c, g, or t
  misc_feature (1098)..(1098): n is a, c, g, or t
  misc_feature (1103)..(1104): n is a, c, g, or t
  misc_feature (1110)..(1110): n is a, c, g, or t

SEQ ID NO: 277887 - DNA, 788 bp, Homo Sapiens; identical to SEQ ID NO: 256580

SEQ ID NO: 277888 - DNA, 724 bp, Homo Sapiens; identical to SEQ ID NO: 256581

SEQ ID NO: 277889 - DNA, 974 bp, Homo Sapiens; identical to SEQ ID NO: 256586
  misc_feature (196)..(196): n is a, c, g, or t
  misc_feature (417)..(454): n is a, c, g, or t

SEQ ID NO: 277890 - DNA, 519 bp, Homo Sapiens; identical to SEQ ID NO: 256587
  misc_feature (33)..(33): n is a, c, g, or t

SEQ ID NO: 277891 - DNA, 585 bp, Homo Sapiens; identical to SEQ ID NO: 256602

SEQ ID NO: 277892 - DNA, 1562 bp, Homo Sapiens; identical to SEQ ID NO: 256603
  misc_feature (1129)..(1137): n is a, c, g, or t
  misc_feature (1519)..(1519): n is a, c, g, or t
  misc_feature (1528)..(1528): n is a, c, g, or t
  misc_feature (1545)..(1545): n is a, c, g, or t

SEQ ID NO: 277893 - DNA, 853 bp, Homo Sapiens; identical to SEQ ID NO: 256605

SEQ ID NO: 277894 - DNA, 565 bp, Homo Sapiens; identical to SEQ ID NO: 256606
  misc_feature (518)..(518): n is a, c, g, or t

SEQ ID NO: 277895 - DNA, 1212 bp, Homo Sapiens; identical to SEQ ID NO: 256612

SEQ ID NO: 277896 - DNA, 475 bp, Homo Sapiens; identical to SEQ ID NO: 256613

SEQ ID NO: 277897 - DNA, 922 bp, Homo Sapiens; identical to SEQ ID NO: 256618
  misc_feature (345)..(365): n is a, c, g, or t

SEQ ID NO: 277898 - DNA, 687 bp, Homo Sapiens; identical to SEQ ID NO: 256619
  misc_feature (581)..(601): n is a, c, g, or t

SEQ ID NO: 277899 - DNA, 2039 bp, Homo Sapiens; identical to SEQ ID NO: 256620
  misc_feature (72)..(90): n is a, c, g, or t
  misc_feature (1755)..(1811): n is a, c, g, or t
  misc_feature (1883)..(1891): n is a, c, g, or t

SEQ ID NO: 277900 - DNA, 1306 bp, Homo Sapiens; identical to SEQ ID NO: 256621
  misc_feature (284)..(303): n is a, c, g, or t
  misc_feature (830)..(840): n is a, c, g, or t

SEQ ID NO: 277901 - DNA, 1012 bp, Homo Sapiens; identical to SEQ ID NO: 256629
  misc_feature (763)..(763): n is a, c, g, or t
  misc_feature (780)..(780): n is a, c, g, or t
  misc_feature (799)..(799): n is a, c, g, or t
  misc_feature (835)..(835): n is a, c, g, or t
  misc_feature (846)..(846): n is a, c, g, or t
  misc_feature (849)..(849): n is a, c, g, or t
  misc_feature (852)..(852): n is a, c, g, or t
  misc_feature (864)..(864): n is a, c, g, or t
  misc_feature (883)..(883): n is a, c, g, or t
  misc_feature (908)..(908): n is a, c, g, or t
  misc_feature (913)..(913): n is a, c, g, or t
  misc_feature (919)..(919): n is a, c, g, or t
  misc_feature (922)..(922): n is a, c, g, or t
  misc_feature (933)..(934): n is a, c, g, or t
  misc_feature (938)..(938): n is a, c, g, or t
  misc_feature (948)..(948): n is a, c, g, or t
  misc_feature (952)..(952): n is a, c, g, or t
  misc_feature (958)..(958): n is a, c, g, or t
  misc_feature (964)..(965): n is a, c, g, or t
  misc_feature (976)..(976): n is a, c, g, or t
  misc_feature (982)..(982): n is a, c, g, or t
  misc_feature (991)..(991): n is a, c, g, or t
  misc_feature (996)..(996): n is a, c, g, or t
  misc_feature (1002)..(1003): n is a, c, g, or t

SEQ ID NO: 277902 - DNA, 1133 bp, Homo Sapiens; identical to SEQ ID NO: 256630

SEQ ID NO: 277903 - DNA, 849 bp, Homo Sapiens; identical to SEQ ID NO: 15347
  misc_feature (635)..(635): n is a, c, g, or t
  misc_feature (637)..(638): n is a, c, g, or t
  misc_feature (641)..(642): n is a, c, g, or t
  misc_feature (663)..(665): n is a, c, g, or t

SEQ ID NO: 277904 - DNA, 755 bp, Homo Sapiens; identical to SEQ ID NO: 15348
  misc_feature (688)..(688): n is a, c, g, or t

SEQ ID NO: 277905 - DNA, 816 bp, Homo Sapiens; identical to SEQ ID NO: 256640

SEQ ID NO: 277906 - DNA, 877 bp, Homo Sapiens; identical to SEQ ID NO: 256646

SEQ ID NO: 277907 - DNA, 500 bp, Homo Sapiens; identical to SEQ ID NO: 256647

SEQ ID NO: 277908 - DNA, 462 bp, Homo Sapiens; identical to SEQ ID NO: 256648

SEQ ID NO: 277909 - DNA, 1683 bp, Homo Sapiens; identical to SEQ ID NO: 256649
  misc_feature (44)..(44): n is a, c, g, or t
  misc_feature (70)..(73): n is a, c, g, or t
  misc_feature (76)..(76): n is a, c, g, or t
  misc_feature (147)..(147): n is a, c, g, or t
  misc_feature (385)..(385): n is a, c, g, or t
  misc_feature (537)..(537): n is a, c, g, or t
  misc_feature (711)..(712): n is a, c, g, or t

SEQ ID NO: 277910 - DNA, 965 bp, Homo Sapiens; identical to SEQ ID NO: 74845

SEQ ID NO: 277911 - DNA, 944 bp, Homo Sapiens; identical to SEQ ID NO: 256652
  misc_feature (914)..(914): n is a, c, g, or t

SEQ ID NO: 277912 - DNA, 524 bp, Homo Sapiens; identical to SEQ ID NO: 256653
  misc_feature (426)..(426): n is a, c, g, or t
  misc_feature (437)..(437): n is a, c, g, or t
  misc_feature (458)..(458): n is a, c, g, or t
  misc_feature (480)..(480): n is a, c, g, or t
  misc_feature (490)..(490): n is a, c, g, or t
  misc_feature (504)..(504): n is a, c, g, or t

SEQ ID NO: 277913 - DNA, 2301 bp, Homo Sapiens; identical to SEQ ID NO: 256659
  misc_feature (621)..(621): n is a, c, g, or t
  misc_feature (1520)..(1520): n is a, c, g, or t
  misc_feature (1530)..(1530): n is a, c, g, or t

SEQ ID NO: 277914 - DNA, 894 bp, Homo Sapiens; identical to SEQ ID NO: 256660

SEQ ID NO: 277915 - DNA, 395 bp, Homo Sapiens; identical to SEQ ID NO: 256661
  misc_feature (352)..(352): n is a, c, g, or t

SEQ ID NO: 277916 - DNA, 1821 bp, Homo Sapiens; identical to SEQ ID NO: 256670

SEQ ID NO: 277917 - DNA, 1020 bp, Homo Sapiens; identical to SEQ ID NO: 256671
  misc_feature (825)..(854): n is a, c, g, or t

SEQ ID NO: 277918 - DNA, 1522 bp, Homo Sapiens; identical to SEQ ID NO: 256678
  misc_feature (116)..(124): n is a, c, g, or t
  misc_feature (131)..(162): n is a, c, g, or t
  misc_feature (182)..(196): n is a, c, g, or t
  misc_feature (279)..(310): n is a, c, g, or t
  misc_feature (357)..(449): n is a, c, g, or t
  misc_feature (492)..(504): n is a, c, g, or t
  misc_feature (515)..(516): n is a, c, g, or t
  misc_feature (519)..(676): n is a, c, g, or t
  misc_feature (1034)..(1034): n is a, c, g, or t

SEQ ID NO: 277919 - DNA, 440 bp, Homo Sapiens; identical to SEQ ID NO: 256679
  misc_feature (76)..(76): n is a, c, g, or t
  misc_feature (83)..(83): n is a, c, g, or t
  misc_feature (88)..(88): n is a, c, g, or t
  misc_feature (352)..(352): n is a, c, g, or t

SEQ ID NO: 277920 - DNA, 447 bp, Homo Sapiens; identical to SEQ ID NO: 256681
  misc_feature (434)..(434): n is a, c, g, or t

SEQ ID NO: 277921 - DNA, 1753 bp, Homo Sapiens; identical to SEQ ID NO: 256682
  misc_feature (1501)..(1551): n is a, c, g, or t

SEQ ID NO: 277922 - DNA, 456 bp, Homo Sapiens; identical to SEQ ID NO: 256683
  misc_feature (326)..(326): n is a, c, g, or t
  misc_feature (392)..(392): n is a, c, g, or t

SEQ ID NO: 277923 - DNA, 510 bp, Homo Sapiens; identical to SEQ ID NO: 256686

SEQ ID NO: 277924 - DNA, 902 bp, Homo Sapiens; identical to SEQ ID NO: 77165
  misc_feature (600)..(609): n is a, c, g, or t
  misc_feature (623)..(623): n is a, c, g, or t

SEQ ID NO: 277925 - DNA, 367 bp, Homo Sapiens; identical to SEQ ID NO: 256692

SEQ ID NO: 277926 - DNA, 1042 bp, Homo Sapiens; identical to SEQ ID NO: 256693

SEQ ID NO: 277927 - DNA, 913 bp, Homo Sapiens; identical to SEQ ID NO: 256699

SEQ ID NO: 277928 - DNA, 2956 bp, Homo Sapiens; identical to SEQ ID NO: 256700
  misc_feature (19)..(19): n is a, c, g, or t

SEQ ID NO: 277929 - DNA, 463 bp, Homo Sapiens; identical to SEQ ID NO: 256704
  misc_feature (338)..(396): n is a, c, g, or t

SEQ ID NO: 277930 - DNA, 447 bp, Homo Sapiens; identical to SEQ ID NO: 256705

SEQ ID NO: 277931 - DNA, 637 bp, Homo Sapiens; identical to SEQ ID NO: 256712

SEQ ID NO: 277932 - DNA, 1529 bp, Homo Sapiens; identical to SEQ ID NO: 256713
  misc_feature (682)..(696): n is a, c, g, or t
  misc_feature (1256)..(1256): n is a, c, g, or t
  misc_feature (1262)..(1262): n is a, c, g, or t
  misc_feature (1274)..(1274): n is a, c, g, or t
  misc_feature (1338)..(1338): n is a, c, g, or t
  misc_feature (1378)..(1378): n is a, c, g, or t
  misc_feature (1401)..(1401): n is a, c, g, or t
  misc_feature (1409)..(1411): n is a, c, g, or t
  misc_feature (1413)..(1413): n is a, c, g, or t
  misc_feature (1416)..(1416): n is a, c, g, or t
  misc_feature (1425)..(1441): n is a, c, g, or t
  misc_feature (1446)..(1446): n is a, c, g, or t
  misc_feature (1453)..(1453): n is a, c, g, or t
  misc_feature (1460)..(1460): n is a, c, g, or t
  misc_feature (1491)..(1491): n is a, c, g, or t

SEQ ID NO: 277933 - DNA, 837 bp, Homo Sapiens; identical to SEQ ID NO: 256717
  misc_feature (541)..(541): n is a, c, g, or t
  misc_feature (550)..(550): n is a, c, g, or t

SEQ ID NO: 277934 - DNA, 1881 bp, Homo Sapiens; identical to SEQ ID NO: 256718
  misc_feature (323)..(323): n is a, c, g, or t
  misc_feature (354)..(458): n is a, c, g, or t
  misc_feature (1430)..(1438): n is a, c, g, or t
  misc_feature (1690)..(1696): n is a, c, g, or t
  misc_feature (1716)..(1716): n is a, c, g, or t

SEQ ID NO: 277935 - DNA, 660 bp, Homo Sapiens; identical to SEQ ID NO: 256719

SEQ ID NO: 277936 - DNA, 861 bp, Homo Sapiens; identical to SEQ ID NO: 256720

SEQ ID NO: 277937 - DNA, 1228 bp, Homo Sapiens; identical to SEQ ID NO: 256723

SEQ ID NO: 277938 - DNA, 1805 bp, Homo Sapiens; identical to SEQ ID NO: 256724
  misc_feature (189)..(189): n is a, c, g, or t
  misc_feature (1737)..(1737): n is a, c, g, or t
  misc_feature (1744)..(1744): n is a, c, g, or t
  misc_feature (1756)..(1756): n is a, c, g, or t
  misc_feature (1775)..(1775): n is a, c, g, or t
  misc_feature (1781)..(1781): n is a, c, g, or t

SEQ ID NO: 277939 - DNA, 1167 bp, Homo Sapiens; identical to SEQ ID NO: 256728

SEQ ID NO: 277940 - DNA, 564 bp, Homo Sapiens; identical to SEQ ID NO: 256729
  misc_feature (14)..(14): n is a, c, g, or t
  misc_feature (30)..(30): n is a, c, g, or t
  misc_feature (52)..(52): n is a, c, g, or t
  misc_feature (117)..(117): n is a, c, g, or t
  misc_feature (132)..(132): n is a, c, g, or t

SEQ ID NO: 277941 - DNA, 933 bp, Homo Sapiens; identical to SEQ ID NO: 256741
  misc_feature (69)..(78): n is a, c, g, or t
  misc_feature (198)..(232): n is a, c, g, or t

SEQ ID NO: 277942 - DNA, 771 bp, Homo Sapiens; identical to SEQ ID NO: 256742

SEQ ID NO: 277943 - DNA, 714 bp, Homo Sapiens; identical to SEQ ID NO: 256743
  misc_feature (87)..(121): n is a, c, g, or t
  misc_feature (241)..(250): n is a, c, g, or t
  misc_feature (667)..(667): n is a, c, g, or t
  misc_feature (680)..(680): n is a, c, g, or t
  misc_feature (703)..(703): n is a, c, g, or t

SEQ ID NO: 277944 - DNA, 917 bp, Homo Sapiens; identical to SEQ ID NO: 256745
  misc_feature (317)..(327): n is a, c, g, or t
  misc_feature (843)..(851): n is a, c, g, or t

SEQ ID NO: 277945 - DNA, 430 bp, Homo Sapiens; identical to SEQ ID NO: 256746

SEQ ID NO: 277946 - DNA, 1998 bp, Homo Sapiens; identical to SEQ ID NO: 256748
  misc_feature (957)..(957): n is a, c, g, or t
  misc_feature (1154)..(1154): n is a, c, g, or t

SEQ ID NO: 277947 - DNA, 344 bp, Homo Sapiens; identical to SEQ ID NO: 256749
  misc_feature (314)..(314): n is a, c, g, or t

SEQ ID NO: 277948 - DNA, 842 bp, Homo Sapiens; identical to SEQ ID NO: 256751
  misc_feature (514)..(514): n is a, c, g, or t
  misc_feature (682)..(682): n is a, c, g, or t

SEQ ID NO: 277949 - DNA, 428 bp, Homo Sapiens; identical to SEQ ID NO: 256752
  misc_feature (418)..(418): n is a, c, g, or t

SEQ ID NO: 277950 - DNA, 1138 bp, Homo Sapiens; identical to SEQ ID NO: 256760
  misc_feature (43)..(43): n is a, c, g, or t
  misc_feature (589)..(612): n is a, c, g, or t
  misc_feature (1005)..(1005): n is a, c, g, or t
  misc_feature (1072)..(1072): n is a, c, g, or t
  misc_feature (1080)..(1080): n is a, c, g, or t
  misc_feature (1110)..(1110): n is a, c, g, or t

SEQ ID NO: 277951 - DNA, 423 bp, Homo Sapiens; identical to SEQ ID NO: 256761
  misc_feature (254)..(254): n is a, c, g, or t
  misc_feature (338)..(338): n is a, c, g, or t

SEQ ID NO: 277952 - DNA, 921 bp, Homo Sapiens; identical to SEQ ID NO: 256762
  misc_feature (267)..(267): n is a, c, g, or t
  misc_feature (884)..(884): n is a, c, g, or t
  misc_feature (896)..(896): n is a, c, g, or t

SEQ ID NO: 277953 - DNA, 1137 bp, Homo Sapiens; identical to SEQ ID NO: 256763

SEQ ID NO: 277954 - DNA, 1240 bp, Homo Sapiens; identical to SEQ ID NO: 256764

SEQ ID NO: 277955 - DNA, 579 bp, Homo Sapiens; identical to SEQ ID NO: 256789
  misc_feature (204)..(204): n is a, c, g, or t
  misc_feature (343)..(343): n is a, c, g, or t

SEQ ID NO: 277956 - DNA, 518 bp, Homo Sapiens; identical to SEQ ID NO: 256790
  misc_feature (28)..(28): n is a, c, g, or t
  misc_feature (104)..(104): n is a, c, g, or t
  misc_feature (404)..(404): n is a, c, g, or t
  misc_feature (480)..(480): n is a, c, g, or t
  misc_feature (485)..(485): n is a, c, g, or t
  misc_feature (497)..(497): n is a, c, g, or t

SEQ ID NO: 277957 - DNA, 401 bp, Homo Sapiens; identical to SEQ ID NO: 256792
  misc_feature (35)..(35): n is a, c, g, or t

SEQ ID NO: 277958 - DNA, 931 bp, Homo Sapiens; identical to SEQ ID NO: 256793
  misc_feature (10)..(10): n is a, c, g, or t
  misc_feature (872)..(872): n is a, c, g, or t

SEQ ID NO: 277959 - DNA, 1473 bp, Homo Sapiens; identical to SEQ ID NO: 256802

SEQ ID NO: 277960 - DNA, 561 bp, Homo Sapiens; identical to SEQ ID NO: 256803
  misc_feature (467)..(467): n is a, c, g, or t
  misc_feature (523)..(523): n is a, c, g, or t
  misc_feature (540)..(540): n is a, c, g, or t

SEQ ID NO: 277961 - DNA, 1706 bp, Homo Sapiens; identical to SEQ ID NO: 256810
  misc_feature (1561)..(1561): n is a, c, g, or t
  misc_feature (1631)..(1632): n is a, c, g, or t
  misc_feature (1691)..(1691): n is a, c, g, or t

SEQ ID NO: 277962 - DNA, 1053 bp, Homo Sapiens; identical to SEQ ID NO: 256811
  misc_feature (921)..(921): n is a, c, g, or t
  misc_feature (932)..(932): n is a, c, g, or t

SEQ ID NO: 277963 - DNA, 1405 bp, Homo Sapiens; identical to SEQ ID NO: 256812
  misc_feature (939)..(939): n is a, c, g, or t

SEQ ID NO: 277964 - DNA, 1946 bp, Homo Sapiens; identical to SEQ ID NO: 256813
  misc_feature (732)..(732): n is a, c, g, or t
  misc_feature (836)..(836): n is a, c, g, or t
  misc_feature (1836)..(1836): n is a, c, g, or t

SEQ ID NO: 277965 - DNA, 1762 bp, Homo Sapiens; identical to SEQ ID NO: 256815
  misc_feature (23)..(23): n is a, c, g, or t

SEQ ID NO: 277966 - DNA, 481 bp, Homo Sapiens; identical to SEQ ID NO: 256816

SEQ ID NO: 277967 - DNA, 607 bp, Homo Sapiens; identical to SEQ ID NO: 256820
  misc_feature (519)..(519): n is a, c, g, or t

SEQ ID NO: 277968 - DNA, 782 bp, Homo Sapiens; identical to SEQ ID NO: 256821
  misc_feature (26)..(26): n is a, c, g, or t
  misc_feature (315)..(315): n is a, c, g, or t

SEQ ID NO: 277969 - DNA, 835 bp, Homo Sapiens; identical to SEQ ID NO: 256823
  misc_feature (740)..(740): n is a, c, g, or t
  misc_feature (768)..(768): n is a, c, g, or t
  misc_feature (823)..(823): n is a, c, g, or t

SEQ ID NO: 277970 - DNA, 442 bp, Homo Sapiens; identical to SEQ ID NO: 256824

SEQ ID NO: 277971 - DNA, 1115 bp, Homo Sapiens; identical to SEQ ID NO: 256833
  misc_feature (851)..(851): n is a, c, g, or t

SEQ ID NO: 277972 - DNA, 679 bp, Homo Sapiens; identical to SEQ ID NO: 256834
  misc_feature (274)..(285): n is a, c, g, or t
  misc_feature (543)..(543): n is a, c, g, or t
  misc_feature (614)..(614): n is a, c, g, or t
  misc_feature (619)..(619): n is a, c, g, or t
  misc_feature (640)..(640): n is a, c, g, or t
  misc_feature (647)..(647): n is a, c, g, or t

SEQ ID NO: 277973 - DNA, 806 bp, Homo Sapiens; identical to SEQ ID NO: 256835
  misc_feature (160)..(269): n is a, c, g, or t

SEQ ID NO: 277974 - DNA, 702 bp, Homo Sapiens; identical to SEQ ID NO: 256839
  misc_feature (187)..(188): n is a, c, g, or t
  misc_feature (215)..(215): n is a, c, g, or t
  misc_feature (229)..(229): n is a, c, g, or t
  misc_feature (290)..(290): n is a, c, g, or t
  misc_feature (313)..(313): n is a, c, g, or t
  misc_feature (344)..(344): n is a, c, g, or t
  misc_feature (355)..(355): n is a, c, g, or t
  misc_feature (364)..(364): n is a, c, g, or t

SEQ ID NO: 277975 - DNA, 1119 bp, Homo Sapiens; identical to SEQ ID NO: 256840
  misc_feature (7)..(7): n is a, c, g, or t
  misc_feature (10)..(10): n is a, c, g, or t
  misc_feature (52)..(52): n is a, c, g, or t
  misc_feature (63)..(63): n is a, c, g, or t
  misc_feature (75)..(75): n is a, c, g, or t
  misc_feature (82)..(82): n is a, c, g, or t

SEQ ID NO: 277976 - DNA, 995 bp, Homo Sapiens; identical to SEQ ID NO: 256841
  misc_feature (799)..(799): n is a, c, g, or t

SEQ ID NO: 277977 - DNA, 1332 bp, Homo Sapiens; identical to SEQ ID NO: 256842

SEQ ID NO: 277978 - DNA, 934 bp, Homo Sapiens; identical to SEQ ID NO: 256843

SEQ ID NO: 277979 - DNA, 427 bp, Homo Sapiens; identical to SEQ ID NO: 256847

SEQ ID NO: 277980 - DNA, 1349 bp, Homo Sapiens; identical to SEQ ID NO: 256848
  misc_feature (1235)..(1280): n is a, c, g, or t

SEQ ID NO: 277981 - DNA, 2710 bp, Homo Sapiens; identical to SEQ ID NO: 256853
  misc_feature (2587)..(2629): n is a, c, g, or t

SEQ ID NO: 277982 - DNA, 471 bp, Homo Sapiens; identical to SEQ ID NO: 256854
  misc_feature (32)..(32): n is a, c, g, or t
  misc_feature (55)..(55): n is a, c, g, or t
  misc_feature (81)..(81): n is a, c, g, or t
  misc_feature (122)..(122): n is a, c, g, or t
  misc_feature (130)..(130): n is a, c, g, or t
  misc_feature (151)..(151): n is a, c, g, or t
  misc_feature (193)..(193): n is a, c, g, or t
  misc_feature (199)..(199): n is a, c, g, or t
  misc_feature (267)..(267): n is a, c, g, or t
  misc_feature (353)..(353): n is a, c, g, or t
  misc_feature (356)..(356): n is a, c, g, or t
  misc_feature (395)..(395): n is a, c, g, or t
  misc_feature (418)..(418): n is a, c, g, or t
  misc_feature (440)..(440): n is a, c, g, or t
  misc_feature (446)..(446): n is a, c, g, or t

SEQ ID NO: 277983 - DNA, 916 bp, Homo Sapiens; identical to SEQ ID NO: 256856
  misc_feature (647)..(736): n is a, c, g, or t

SEQ ID NO: 277984 - DNA, 444 bp, Homo Sapiens; identical to SEQ ID NO: 256857

SEQ ID NO: 277985 - DNA, 964 bp, Homo Sapiens; identical to SEQ ID NO: 256872
  misc_feature (766)..(766): n is a, c, g, or t

SEQ ID NO: 277986 - DNA, 914 bp, Homo Sapiens; identical to SEQ ID NO: 256873

SEQ ID NO: 277987 - DNA, 1044 bp, Homo Sapiens; identical to SEQ ID NO: 256874
  misc_feature (917)..(917): n is a, c, g, or t
  misc_feature (931)..(931): n is a, c, g, or t

SEQ ID NO: 277988 - DNA, 400 bp, Homo Sapiens; identical to SEQ ID NO: 256875
  misc_feature (27)..(27): n is a, c, g, or t
  misc_feature (34)..(34): n is a, c, g, or t
  misc_feature (48)..(48): n is a, c, g, or t
  misc_feature (55)..(55): n is a, c, g, or t

SEQ ID NO: 277989 - DNA, 1704 bp, Homo Sapiens; identical to SEQ ID NO: 256876
  misc_feature (1188)..(1188): n is a, c, g, or t

SEQ ID NO: 277990 - DNA, 494 bp, Homo Sapiens; identical to SEQ ID NO: 256877
  misc_feature (55)..(55): n is a, c, g, or t
  misc_feature (58)..(58): n is a, c, g, or t
  misc_feature (310)..(310): n is a, c, g, or t
  misc_feature (387)..(387): n is a, c, g, or t
  misc_feature (403)..(403): n is a, c, g, or t
  misc_feature (478)..(478): n is a, c, g, or t

SEQ ID NO: 277991 - DNA, 603 bp, Homo Sapiens; identical to SEQ ID NO: 256879

SEQ ID NO: 277992 - DNA, 863 bp, Homo Sapiens; identical to SEQ ID NO: 256880
  misc_feature (805)..(806): n is a, c, g, or t
  misc_feature (809)..(810): n is a, c, g, or t
  misc_feature (814)..(815): n is a, c, g, or t
  misc_feature (821)..(822): n is a, c, g, or t

SEQ ID NO: 277993 - DNA, 921 bp, Homo Sapiens; identical to SEQ ID NO: 256881
  misc_feature (826)..(826): n is a, c, g, or t

SEQ ID NO: 277994 - DNA, 777 bp, Homo Sapiens; identical to SEQ ID NO: 256884

SEQ ID NO: 277995 - DNA, 1158 bp, Homo Sapiens; identical to SEQ ID NO: 256885
  misc_feature (797)..(797): n is a, c, g, or t

SEQ ID NO: 277996 - DNA, 1000 bp, Homo Sapiens; identical to SEQ ID NO: 256900

SEQ ID NO: 277997 - DNA, 1001 bp, Homo Sapiens; identical to SEQ ID NO: 256901

SEQ ID NO: 277998 - DNA, 1043 bp, Homo Sapiens; identical to SEQ ID NO: 256902
  misc_feature (43)..(43): n is a, c, g, or t
  misc_feature (106)..(106): n is a, c, g, or t
  misc_feature (109)..(109): n is a, c, g, or t
  misc_feature (167)..(167): n is a, c, g, or t
  misc_feature (790)..(880): n is a, c, g, or t

SEQ ID NO: 277999 - DNA, 682 bp, Homo Sapiens; identical to SEQ ID NO: 256903

SEQ ID NO: 278000 - DNA, 583 bp, Homo Sapiens; identical to SEQ ID NO: 256904

SEQ ID NO: 278001 - DNA, 872 bp, Homo Sapiens; identical to SEQ ID NO: 256905
  misc_feature (638)..(638): n is a, c, g, or t

SEQ ID NO: 278002 - DNA, 454 bp, Homo Sapiens; identical to SEQ ID NO: 256906
  misc_feature (342)..(351): n is a, c, g, or t

SEQ ID NO: 278003 - DNA, 455 bp, Homo Sapiens; identical to SEQ ID NO: 256911

SEQ ID NO: 278004 - DNA, 639 bp, Homo Sapiens; identical to SEQ ID NO: 256912

SEQ ID NO: 278005 - DNA, 675 bp, Homo Sapiens; identical to SEQ ID NO: 256913

SEQ ID NO: 278006 - DNA, 769 bp, Homo Sapiens; identical to SEQ ID NO: 256914
  misc_feature (713)..(713): n is a, c, g, or t
  misc_feature (727)..(727): n is a, c, g, or t

SEQ ID NO: 278007 - DNA, 477 bp, Homo Sapiens; identical to SEQ ID NO: 256915

SEQ ID NO: 278008 - DNA, 614 bp, Homo Sapiens; identical to SEQ ID NO: 256917
  misc_feature (17)..(17): n is a, c, g, or t

SEQ ID NO: 278009 - DNA, 1048 bp, Homo Sapiens; identical to SEQ ID NO: 256918
  misc_feature (861)..(877): n is a, c, g, or t
  misc_feature (891)..(985): n is a, c, g, or t

SEQ ID NO: 278010 - DNA, 509 bp, Homo Sapiens; identical to SEQ ID NO: 256930

SEQ ID NO: 278011 - DNA, 486 bp, Homo Sapiens; identical to SEQ ID NO: 256931

SEQ ID NO: 278012 - DNA, 632 bp, Homo Sapiens; identical to SEQ ID NO: 256932

SEQ ID NO: 278013 - DNA, 440 bp, Homo Sapiens; identical to SEQ ID NO: 256933

SEQ ID NO: 278014 - DNA, 1026 bp, Homo Sapiens; identical to SEQ ID NO: 256934
  misc_feature (614)..(670): n is a, c, g, or t

SEQ ID NO: 278015 - DNA, 734 bp, Homo Sapiens; identical to SEQ ID NO: 256938

SEQ ID NO: 278016 - DNA, 787 bp, Homo Sapiens; identical to SEQ ID NO: 256939
  misc_feature (759)..(759): n is a, c, g, or t

SEQ ID NO: 278017 - DNA, 1754 bp, Homo Sapiens; identical to SEQ ID NO: 256940

SEQ ID NO: 278018 - DNA, 397 bp, Homo Sapiens; identical to SEQ ID NO: 256941
  misc_feature (40)..(40): n is a, c, g, or t

SEQ ID NO: 278019 - DNA, 2311 bp, Homo Sapiens; identical to SEQ ID NO: 256943
  misc_feature (5)..(5): n is a, c, g, or t
  misc_feature (27)..(27): n is a, c, g, or t
  misc_feature (30)..(30): n is a, c, g, or t
  misc_feature (41)..(41): n is a, c, g, or t
  misc_feature (60)..(60): n is a, c, g, or t
  misc_feature (62)..(63): n is a, c, g, or t
  misc_feature (65)..(65): n is a, c, g, or t
  misc_feature (67)..(67): n is a, c, g, or t
  misc_feature (103)..(105): n is a, c, g, or t
  misc_feature (114)..(114): n is a, c, g, or t
  misc_feature (124)..(124): n is a, c, g, or t
  misc_feature (150)..(150): n is a, c, g, or t
  misc_feature (159)..(159): n is a, c, g, or t
  misc_feature (161)..(162): n is a, c, g, or t
  misc_feature (183)..(183): n is a, c, g, or t
  misc_feature (188)..(188): n is a, c, g, or t
  misc_feature (192)..(192): n is a, c, g, or t
  misc_feature (196)..(196): n is a, c, g, or t
  misc_feature (205)..(205): n is a, c, g, or t
  misc_feature (207)..(207): n is a, c, g, or t
  misc_feature (224)..(224): n is a, c, g, or t
  misc_feature (228)..(228): n is a, c, g, or t
  misc_feature (247)..(247): n is a, c, g, or t
  misc_feature (268)..(268): n is a, c, g, or t
  misc_feature (275)..(275): n is a, c, g, or t
  misc_feature (291)..(291): n is a, c, g, or t
  misc_feature (294)..(294): n is a, c, g, or t
  misc_feature (308)..(371): n is a, c, g, or t
  misc_feature (393)..(393): n is a, c, g, or t
  misc_feature (434)..(434): n is a, c, g, or t
  misc_feature (442)..(442): n is a, c, g, or t
  misc_feature (980)..(993): n is a, c, g, or t

SEQ ID NO: 278020 - DNA, 936 bp, Homo Sapiens; identical to SEQ ID NO: 256944
  misc_feature (155)..(155): n is a, c, g, or t
  misc_feature (341)..(403): n is a, c, g, or t

SEQ ID NO: 278021 - DNA, 879 bp, Homo Sapiens; identical to SEQ ID NO: 256949
  misc_feature (48)..(82): n is a, c, g, or t

SEQ ID NO: 278022 - DNA, 467 bp, Homo Sapiens; identical to SEQ ID NO: 256950
  misc_feature (18)..(18): n is a, c, g, or t
  misc_feature (24)..(24): n is a, c, g, or t

SEQ ID NO: 278023 - DNA, 1009 bp, Homo Sapiens; identical to SEQ ID NO: 256952

SEQ ID NO: 278024 - DNA, 845 bp, Homo Sapiens; identical to SEQ ID NO: 256953

SEQ ID NO: 278025 - DNA, 479 bp, Homo Sapiens; identical to SEQ ID NO: 256954
  misc_feature (428)..(428): n is a, c, g, or t
  misc_feature (464)..(464): n is a, c, g, or t

SEQ ID NO: 278026 - DNA, 785 bp, Homo Sapiens; identical to SEQ ID NO: 256955
  misc_feature (101)..(160): n is a, c, g, or t

SEQ ID NO: 278027 - DNA, 1940 bp, Homo Sapiens; identical to SEQ ID NO: 256956
  misc_feature (1602)..(1627): n is a, c, g, or t
  misc_feature (1645)..(1755): n is a, c, g, or t
  misc_feature (1757)..(1757): n is a, c, g, or t
  misc_feature (1764)..(1765): n is a, c, g, or t
  misc_feature (1773)..(1776): n is a, c, g, or t
  misc_feature (1779)..(1805): n is a, c, g, or t
  misc_feature (1834)..(1849): n is a, c, g, or t

SEQ ID NO: 278028 - DNA, 1444 bp, Homo Sapiens; identical to SEQ ID NO: 256974
  misc_feature (1034)..(1089): n is a, c, g, or t

SEQ ID NO: 278029 - DNA, 1144 bp, Homo Sapiens; identical to SEQ ID NO: 256975
  misc_feature (1029)..(1029): n is a, c, g, or t

SEQ ID NO: 278030 - DNA, 874 bp, Homo Sapiens; identical to SEQ ID NO: 256976
  misc_feature (542)..(596): n is a, c, g, or t
  misc_feature (667)..(667): n is a, c, g, or t
  misc_feature (763)..(763): n is a, c, g, or t
  misc_feature (822)..(822): n is a, c, g, or t

SEQ ID NO: 278031 - DNA, 584 bp, Homo Sapiens; identical to SEQ ID NO: 256977
  misc_feature (14)..(14): n is a, c, g, or t
  misc_feature (21)..(21): n is a, c, g, or t
  misc_feature (45)..(45): n is a, c, g, or t
  misc_feature (51)..(51): n is a, c, g, or t
  misc_feature (56)..(56): n is a, c, g, or t
  misc_feature (448)..(460): n is a, c, g, or t

SEQ ID NO: 278032 - DNA, 712 bp, Homo Sapiens; identical to SEQ ID NO: 256978
  misc_feature (29)..(29): n is a, c, g, or t
  misc_feature (64)..(64): n is a, c, g, or t
  misc_feature (83)..(83): n is a, c, g, or t
  misc_feature (147)..(147): n is a, c, g, or t
  misc_feature (213)..(213): n is a, c, g, or t
  misc_feature (277)..(277): n is a, c, g, or t
  misc_feature (319)..(319): n is a, c, g, or t
  misc_feature (412)..(412): n is a, c, g, or t

SEQ ID NO: 278033 - DNA, 683 bp, Homo Sapiens; identical to SEQ ID NO: 256979
  misc_feature (217)..(217): n is a, c, g, or t

SEQ ID NO: 278034 - DNA, 1665 bp, Homo Sapiens; identical to SEQ ID NO: 15407
  misc_feature (577)..(587): n is a, c, g, or t
  misc_feature (645)..(665): n is a, c, g, or t
  misc_feature (1341)..(1341): n is a, c, g, or t

SEQ ID NO: 278035 - DNA, 914 bp, Homo Sapiens; identical to SEQ ID NO: 15408
  misc_feature (38)..(38): n is a, c, g, or t

SEQ ID NO: 278036 - DNA, 1594 bp, Homo Sapiens; identical to SEQ ID NO: 256985

SEQ ID NO: 278037 - DNA, 1104 bp, Homo Sapiens; identical to SEQ ID NO: 256986
  misc_feature (782)..(782): n is a, c, g, or t
  misc_feature (820)..(820): n is a, c, g, or t
  misc_feature (928)..(928): n is a, c, g, or t
  misc_feature (1009)..(1047): n is a, c, g, or t

SEQ ID NO: 278038 - DNA, 1803 bp, Homo Sapiens; identical to SEQ ID NO: 256987
  misc_feature (1584)..(1650): n is a, c, g, or t

SEQ ID NO: 278039 - DNA, 713 bp, Homo Sapiens; identical to SEQ ID NO: 256988

SEQ ID NO: 278040 - DNA, 456 bp, Homo Sapiens; identical to SEQ ID NO: 256989
  misc_feature (265)..(276): n is a, c, g, or t
  misc_feature (438)..(438): n is a, c, g, or t

SEQ ID NO: 278041 - DNA, 483 bp, Homo Sapiens; identical to SEQ ID NO: 256998

SEQ ID NO: 278042 - DNA, 462 bp, Homo Sapiens; identical to SEQ ID NO: 256999

SEQ ID NO: 278043 - DNA, 524 bp, Homo Sapiens; identical to SEQ ID NO: 257009

SEQ ID NO: 278044 - DNA, 433 bp, Homo Sapiens; identical to SEQ ID NO: 257010
  misc_feature (103)..(175): n is a, c, g, or t

SEQ ID NO: 278045 - DNA, 1071 bp, Homo Sapiens; identical to SEQ ID NO: 257016
  misc_feature (948)..(957): n is a, c, g, or t

SEQ ID NO: 278046 - DNA, 705 bp, Homo Sapiens; identical to SEQ ID NO: 257017
  misc_feature (673)..(673): n is a, c, g, or t

SEQ ID NO: 278047 - DNA, 362 bp, Homo Sapiens; identical to SEQ ID NO: 257042

SEQ ID NO: 278048 - DNA, 747 bp, Homo Sapiens; identical to SEQ ID NO: 257043

SEQ ID NO: 278049 - DNA, 1618 bp, Homo Sapiens; identical to SEQ ID NO: 257045
  misc_feature (1381)..(1381): n is a, c, g, or t

SEQ ID NO: 278050 - DNA, 419 bp, Homo Sapiens; identical to SEQ ID NO: 257046
  misc_feature (55)..(55): n is a, c, g, or t

SEQ ID NO: 278051 - DNA, 514 bp, Homo Sapiens; identical to SEQ ID NO: 257047
  misc_feature (94)..(94): n is a, c, g, or t
  misc_feature (440)..(440): n is a, c, g, or t
  misc_feature (449)..(449): n is a, c, g, or t
  misc_feature (461)..(461): n is a, c, g, or t
  misc_feature (472)..(472): n is a, c, g, or t

SEQ ID NO: 278052 - DNA, 412 bp, Homo Sapiens; identical to SEQ ID NO: 257048

SEQ ID NO: 278053 - DNA, 1048 bp, Homo Sapiens; identical to SEQ ID NO: 257050
  misc_feature (259)..(259): n is a, c, g, or t
  misc_feature (262)..(263): n is a, c, g, or t
  misc_feature (268)..(268): n is a, c, g, or t

SEQ ID NO: 278054 - DNA, 431 bp, Homo Sapiens; identical to SEQ ID NO: 257051

SEQ ID NO: 278055 - DNA, 644 bp, Homo Sapiens; identical to SEQ ID NO: 257056

SEQ ID NO: 278056 - DNA, 1403 bp, Homo Sapiens; identical to SEQ ID NO: 257057
  misc_feature (185)..(279): n is a, c, g, or t
  misc_feature (1073)..(1341): n is a, c, g, or t
  misc_feature (1346)..(1346): n is a, c, g, or t
  misc_feature (1353)..(1353): n is a, c, g, or t
  misc_feature (1355)..(1355): n is a, c, g, or t
  misc_feature (1358)..(1358): n is a, c, g, or t
  misc_feature (1361)..(1361): n is a, c, g, or t
  misc_feature (1367)..(1367): n is a, c, g, or t
  misc_feature (1382)..(1382): n is a, c, g, or t
  misc_feature (1398)..(1398): n is a, c, g, or t

SEQ ID NO: 278057 - DNA, 652 bp, Homo Sapiens; identical to SEQ ID NO: 257058
  misc_feature (116)..(116): n is a, c, g, or t
  misc_feature (184)..(270): n is a, c, g, or t

SEQ ID NO: 278058 - DNA, 431 bp, Homo Sapiens; identical to SEQ ID NO: 257059

SEQ ID NO: 278059 - DNA, 860 bp, Homo Sapiens; identical to SEQ ID NO: 257060
  misc_feature (581)..(668): n is a, c, g, or t
  misc_feature (838)..(838): n is a, c, g, or t

SEQ ID NO: 278060 - DNA, 522 bp, Homo Sapiens; identical to SEQ ID NO: 257061

SEQ ID NO: 278061 - DNA, 719 bp, Homo Sapiens; identical to SEQ ID NO: 257062

SEQ ID NO: 278062 - DNA, 832 bp, Homo Sapiens; identical to SEQ ID NO: 257063
  misc_feature (15)..(15): n is a, c, g, or t
  misc_feature (41)..(41): n is a, c, g, or t

SEQ ID NO: 278063 - DNA, 764 bp, Homo Sapiens; identical to SEQ ID NO: 257064
  misc_feature (197)..(197): n is a, c, g, or t
  misc_feature (462)..(626): n is a, c, g, or t

SEQ ID NO: 278064 - DNA, 426 bp, Homo Sapiens; identical to SEQ ID NO: 257075
  misc_feature (109)..(109): n is a, c, g, or t

SEQ ID NO: 278065 - DNA, 2445 bp, Homo Sapiens; identical to SEQ ID NO: 257076
  misc_feature (1013)..(1049): n is a, c, g, or t
  misc_feature (1427)..(1427): n is a, c, g, or t
  misc_feature (1808)..(1834): n is a, c, g, or t
  misc_feature (1847)..(1847): n is a, c, g, or t
  misc_feature (1903)..(1903): n is a, c, g, or t
  misc_feature (2180)..(2180): n is a, c, g, or t

SEQ ID NO: 278066 - DNA, 2086 bp, Homo Sapiens; identical to SEQ ID NO: 257081
  misc_feature (1659)..(1659): n is a, c, g, or t
  misc_feature (2030)..(2030): n is a, c, g, or t

SEQ ID NO: 278067 - DNA, 405 bp, Homo Sapiens; identical to SEQ ID NO: 257082
  misc_feature (385)..(385): n is a, c, g, or t

SEQ ID NO: 278068 - DNA, 861 bp, Homo Sapiens; identical to SEQ ID NO: 257083
  misc_feature (188)..(188): n is a, c, g, or t

SEQ ID NO: 278069 - DNA, 1269 bp, Homo Sapiens; identical to SEQ ID NO: 257084
  misc_feature (142)..(142): n is a, c, g, or t
  misc_feature (169)..(180): n is a, c, g, or t

SEQ ID NO: 278070 - DNA, 677 bp, Homo Sapiens; identical to SEQ ID NO: 257085
  misc_feature (440)..(450): n is a, c, g, or t

SEQ ID NO: 278071 - DNA, 400 bp, Homo Sapiens; identical to SEQ ID NO: 257086
  misc_feature (55)..(55): n is a, c, g, or t
  misc_feature (64)..(64): n is a, c, g, or t
  misc_feature (241)..(243): n is a, c, g, or t
  misc_feature (245)..(245): n is a, c, g, or t
  misc_feature (335)..(335): n is a, c, g, or t
  misc_feature (376)..(376): n is a, c, g, or t
  misc_feature (386)..(386): n is a, c, g, or t

SEQ ID NO: 278072 - DNA, 635 bp, Homo Sapiens; identical to SEQ ID NO: 257087
  misc_feature (57)..(57): n is a, c, g, or t
  misc_feature (548)..(548): n is a, c, g, or t

SEQ ID NO: 278073 - DNA, 1058 bp, Homo Sapiens; identical to SEQ ID NO: 257094
  misc_feature (303)..(320): n is a, c, g, or t
  misc_feature (323)..(351): n is a, c, g, or t
  misc_feature (370)..(381): n is a, c, g, or t

SEQ ID NO: 278074 - DNA, 674 bp, Homo Sapiens; identical to SEQ ID NO: 257095
  misc_feature (92)..(92): n is a, c, g, or t
  misc_feature (395)..(395): n is a, c, g, or t

SEQ ID NO: 278075 - DNA, 366 bp, Homo Sapiens; identical to SEQ ID NO: 257096
  misc_feature (122)..(139): n is a, c, g, or t
  misc_feature (142)..(170): n is a, c, g, or t
  misc_feature (189)..(200): n is a, c, g, or t

SEQ ID NO: 278076 - DNA, 1135 bp, Homo Sapiens; identical to SEQ ID NO: 257105
  misc_feature (549)..(582): n is a, c, g, or t
  misc_feature (1060)..(1074): n is a, c, g, or t

SEQ ID NO: 278077 - DNA, 862 bp, Homo Sapiens; identical to SEQ ID NO: 257106
  misc_feature (743)..(743): n is a, c, g, or t
  misc_feature (752)..(752): n is a, c, g, or t
  misc_feature (783)..(783): n is a, c, g, or t
  misc_feature (789)..(789): n is a, c, g, or t
  misc_feature (800)..(800): n is a, c, g, or t
  misc_feature (822)..(822): n is a, c, g, or t
  misc_feature (829)..(829): n is a, c, g, or t

SEQ ID NO: 278078 - DNA, 785 bp, Homo Sapiens; identical to SEQ ID NO: 257108

SEQ ID NO: 278079 - DNA, 942 bp, Homo Sapiens; identical to SEQ ID NO: 257109

SEQ ID NO: 278080 - DNA, 2248 bp, Homo Sapiens; identical to SEQ ID NO: 257119
  misc_feature (1835)..(1835): n is a, c, g, or t
  misc_feature (1840)..(1840): n is a, c, g, or t
  misc_feature (1845)..(1845): n is a, c, g, or t
  misc_feature (1849)..(1850): n is a, c, g, or t
  misc_feature (1916)..(1916): n is a, c, g, or t
  misc_feature (1937)..(1970): n is a, c, g, or t
  misc_feature (1972)..(1972): n is a, c, g, or t
  misc_feature (1992)..(1992): n is a, c, g, or t
  misc_feature (1996)..(1996): n is a, c, g, or t
  misc_feature (1998)..(1998): n is a, c, g, or t
  misc_feature (2009)..(2009): n is a, c, g, or t
  misc_feature (2029)..(2029): n is a, c, g, or t
  misc_feature (2057)..(2057): n is a, c, g, or t
  misc_feature (2131)..(2131): n is a, c, g, or t
  misc_feature (2135)..(2135): n is a, c, g, or t
  misc_feature (2232)..(2232): n is a, c, g, or t
  misc_feature (2245)..(2245): n is a, c, g, or t
  misc_feature (2247)..(2247): n is a, c, g, or t

SEQ ID NO: 278081 - DNA, 916 bp, Homo Sapiens; identical to SEQ ID NO: 257120
  misc_feature (102)..(102): n is a, c, g, or t

SEQ ID NO: 278082 - DNA, 486 bp, Homo Sapiens; identical to SEQ ID NO: 257121
  misc_feature (11)..(11): n is a, c, g, or t
  misc_feature (299)..(332): n is a, c, g, or t
  misc_feature (416)..(428): n is a, c, g, or t

SEQ ID NO: 278083 - DNA, 2025 bp, Homo Sapiens; identical to SEQ ID NO: 257135
  misc_feature (286)..(310): n is a, c, g, or t

SEQ ID NO: 278084 - DNA, 426 bp, Homo Sapiens; identical to SEQ ID NO: 257136
  misc_feature (147)..(171): n is a, c, g, or t
  misc_feature (382)..(382): n is a, c, g, or t

SEQ ID NO: 278085 - DNA, 741 bp, Homo Sapiens; identical to SEQ ID NO: 257145
  misc_feature (679)..(679): n is a, c, g, or t

SEQ ID NO: 278086 - DNA, 611 bp, Homo Sapiens; identical to SEQ ID NO: 257146
  misc_feature (433)..(474): n is a, c, g, or t

SEQ ID NO: 278087 - DNA, 1108 bp, Homo Sapiens; identical to SEQ ID NO: 257147
  misc_feature (158)..(189): n is a, c, g, or t

SEQ ID NO: 278088 - DNA, 590 bp, Homo Sapiens; identical to SEQ ID NO: 257148
  misc_feature (166)..(166): n is a, c, g, or t
  misc_feature (393)..(424): n is a, c, g, or t

SEQ ID NO: 278089 - DNA, 365 bp, Homo Sapiens; identical to SEQ ID NO: 257150

SEQ ID NO: 278090 - DNA, 772 bp, Homo Sapiens; identical to SEQ ID NO: 257151
  misc_feature (370)..(370): n is a, c, g, or t
  misc_feature (422)..(422): n is a, c, g, or t
  misc_feature (690)..(690): n is a, c, g, or t

SEQ ID NO: 278091 - DNA, 1159 bp, Homo Sapiens; identical to SEQ ID NO: 257167

SEQ ID NO: 278092 - DNA, 718 bp, Homo Sapiens; identical to SEQ ID NO: 257168

SEQ ID NO: 278093 - DNA, 1073 bp, Homo Sapiens; identical to SEQ ID NO: 257171
  misc_feature (979)..(979): n is a, c, g, or t

SEQ ID NO: 278094 - DNA, 1366 bp, Homo Sapiens; identical to SEQ ID NO: 257172

SEQ ID NO: 278095 - DNA, 584 bp, Homo Sapiens; identical to SEQ ID NO: 257179

SEQ ID NO: 278096 - DNA, 1414 bp, Homo Sapiens; identical to SEQ ID NO: 257180

SEQ ID NO: 278097 - DNA, 1224 bp, Homo Sapiens; identical to SEQ ID NO: 257187

SEQ ID NO: 278098 - DNA, 826 bp, Homo Sapiens; identical to SEQ ID NO: 166216

SEQ ID NO: 278099 - DNA, 146 bp, Homo Sapiens; identical to SEQ ID NO: 257199

SEQ ID NO: 278100 - DNA, 554 bp, Homo Sapiens; identical to SEQ ID NO: 257200

SEQ ID NO: 278101 - DNA, 564 bp, Homo Sapiens; identical to SEQ ID NO: 257201
  misc_feature (488)..(488): n is a, c, g, or t

SEQ ID NO: 278102 - DNA, 371 bp, Homo Sapiens; identical to SEQ ID NO: 257208

SEQ ID NO: 278103 - DNA, 463 bp, Homo Sapiens; identical to SEQ ID NO: 257209
  misc_feature (13)..(13): n is a, c, g, or t
  misc_feature (37)..(37): n is a, c, g, or t
  misc_feature (48)..(48): n is a, c, g, or t
  misc_feature (75)..(75): n is a, c, g, or t
  misc_feature (92)..(92): n is a, c, g, or t
  misc_feature (117)..(117): n is a, c, g, or t
  misc_feature (150)..(150): n is a, c, g, or t
  misc_feature (447)..(447): n is a, c, g, or t

SEQ ID NO: 278104 - DNA, 399 bp, Homo Sapiens; identical to SEQ ID NO: 257210
  misc_feature (17)..(17): n is a, c, g, or t
  misc_feature (24)..(24): n is a, c, g, or t
  misc_feature (36)..(36): n is a, c, g, or t
  misc_feature (44)..(44): n is a, c, g, or t

SEQ ID NO: 278105 - DNA, 1540 bp, Homo Sapiens; identical to SEQ ID NO: 257214
  misc_feature (1304)..(1317): n is a, c, g, or t

SEQ ID NO: 278106 - DNA, 586 bp, Homo Sapiens; identical to SEQ ID NO: 257215

SEQ ID NO: 278107 - DNA, 910 bp, Homo Sapiens; identical to SEQ ID NO: 257216

SEQ ID NO: 278108 - DNA, 476 bp, Homo Sapiens; identical to SEQ ID NO: 257217

SEQ ID NO: 278109 - DNA, 386 bp, Homo Sapiens; identical to SEQ ID NO: 257222

SEQ ID NO: 278110 - DNA, 508 bp, Homo Sapiens; identical to SEQ ID NO: 257223

SEQ ID NO: 278111 - DNA, 1257 bp, Homo Sapiens; identical to SEQ ID NO: 257226
  misc_feature (1198)..(1198): n is a, c, g, or t
  misc_feature (1225)..(1225): n is a, c, g, or t
  misc_feature (1247)..(1247): n is a, c, g, or t

SEQ ID NO: 278112 - DNA, 529 bp, Homo Sapiens; identical to SEQ ID NO: 257227

SEQ ID NO: 278113 - DNA, 1645 bp, Homo Sapiens; identical to SEQ ID NO: 257236
  misc_feature (413)..(422): n is a, c, g, or t
  misc_feature (477)..(502): n is a, c, g, or t
  misc_feature (549)..(549): n is a, c, g, or t
  misc_feature (570)..(570): n is a, c, g, or t
  misc_feature (574)..(574): n is a, c, g, or t
  misc_feature (591)..(591): n is a, c, g, or t
  misc_feature (614)..(614): n is a, c, g, or t
  misc_feature (618)..(618): n is a, c, g, or t
  misc_feature (620)..(620): n is a, c, g, or t
  misc_feature (622)..(624): n is a, c, g, or t
  misc_feature (630)..(630): n is a, c, g, or t
  misc_feature (663)..(664): n is a, c, g, or t
  misc_feature (1548)..(1548): n is a, c, g, or t

SEQ ID NO: 278114 - DNA, 677 bp, Homo Sapiens; identical to SEQ ID NO: 257237
  misc_feature (131)..(157): n is a, c, g, or t
  misc_feature (212)..(223): n is a, c, g, or t

SEQ ID NO: 278115 - DNA, 1345 bp, Homo Sapiens; identical to SEQ ID NO: 257242

SEQ ID NO: 278116 - DNA, 1287 bp, Homo Sapiens; identical to SEQ ID NO: 257243

SEQ ID NO: 278117 - DNA, 488 bp, Homo Sapiens; identical to SEQ ID NO: 257244
  misc_feature (21)..(21): n is a, c, g, or t
  misc_feature (62)..(62): n is a, c, g, or t
  misc_feature (84)..(84): n is a, c, g, or t

SEQ ID NO: 278118 - DNA, 482 bp, Homo Sapiens; identical to SEQ ID NO: 257245
  misc_feature (47)..(47): n is a, c, g, or t
  misc_feature (49)..(49): n is a, c, g, or t
  misc_feature (316)..(316): n is a, c, g, or t
  misc_feature (382)..(382): n is a, c, g, or t
  misc_feature (387)..(387): n is a, c, g, or t
  misc_feature (393)..(393): n is a, c, g, or t
  misc_feature (428)..(428): n is a, c, g, or t
  misc_feature (435)..(435): n is a, c, g, or t
  misc_feature (448)..(448): n is a, c, g, or t

SEQ ID NO: 278119 - DNA, 1022 bp, Homo Sapiens; identical to SEQ ID NO: 257248
  misc_feature (199)..(199): n is a, c, g, or t
  misc_feature (664)..(664): n is a, c, g, or t
  misc_feature (671)..(671): n is a, c, g, or t
  misc_feature (683)..(683): n is a, c, g, or t
  misc_feature (736)..(736): n is a, c, g, or t
  misc_feature (761)..(761): n is a, c, g, or t

SEQ ID NO: 278120 - DNA, 480 bp, Homo Sapiens; identical to SEQ ID NO: 257249

SEQ ID NO: 278121 - DNA, 422 bp, Homo Sapiens; identical to SEQ ID NO: 257255

SEQ ID NO: 278122 - DNA, 1011 bp, Homo Sapiens; identical to SEQ ID NO: 257256
  misc_feature (754)..(754): n is a, c, g, or t
  misc_feature (774)..(931): n is a, c, g, or t
  misc_feature (946)..(946): n is a, c, g, or t

SEQ ID NO: 278123 - DNA, 796 bp, Homo Sapiens; identical to SEQ ID NO: 257268
  misc_feature (36)..(36): n is a, c, g, or t
  misc_feature (66)..(66): n is a, c, g, or t
  misc_feature (78)..(78): n is a, c, g, or t
  misc_feature (87)..(87): n is a, c, g, or t

SEQ ID NO: 278124 - DNA, 860 bp, Homo Sapiens; identical to SEQ ID NO: 257269
  misc_feature (78)..(78): n is a, c, g, or t
  misc_feature (185)..(185): n is a, c, g, or t
  misc_feature (472)..(489): n is a, c, g, or t

SEQ ID NO: 278125 - DNA, 375 bp, Homo Sapiens; identical to SEQ ID NO: 257270

SEQ ID NO: 278126 - DNA, 819 bp, Homo Sapiens; identical to SEQ ID NO: 257271

SEQ ID NO: 278127 - DNA, 1033 bp, Homo Sapiens; identical to SEQ ID NO: 257274

SEQ ID NO: 278128 - DNA, 831 bp, Homo Sapiens; identical to SEQ ID NO: 257275

SEQ ID NO: 278129 - DNA, 385 bp, Homo Sapiens; identical to SEQ ID NO: 257276

SEQ ID NO: 278130 - DNA, 488 bp, Homo Sapiens; identical to SEQ ID NO: 257277
  misc_feature (16)..(16): n is a, c, g, or t
  misc_feature (51)..(51): n is a, c, g, or t
  misc_feature (57)..(57): n is a, c, g, or t
  misc_feature (67)..(67): n is a, c, g, or t
  misc_feature (78)..(78): n is a, c, g, or t
  misc_feature (96)..(96): n is a, c, g, or t
  misc_feature (102)..(102): n is a, c, g, or t
  misc_feature (122)..(122): n is a, c, g, or t
  misc_feature (350)..(373): n is a, c, g, or t

SEQ ID NO: 278131 - DNA, 363 bp, Homo Sapiens; identical to SEQ ID NO: 257279

SEQ ID NO: 278132 - DNA, 1717 bp, Homo Sapiens; identical to SEQ ID NO: 257280

SEQ ID NO: 278133 - DNA, 636 bp, Homo Sapiens; identical to SEQ ID NO: 257287

SEQ ID NO: 278134 - DNA, 1422 bp, Homo Sapiens; identical to SEQ ID NO: 257288
  misc_feature (1086)..(1087): n is a, c, g, or t
  misc_feature (1260)..(1260): n is a, c, g, or t

SEQ ID NO: 278135 - DNA, 1002 bp, Homo Sapiens; identical to SEQ ID NO: 257289

SEQ ID NO: 278136 - DNA, 956 bp, Homo Sapiens; identical to SEQ ID NO: 257299

SEQ ID NO: 278137 - DNA, 1439 bp, Homo Sapiens; identical to SEQ ID NO: 257300
  misc_feature (49)..(49): n is a, c, g, or t

SEQ ID NO: 278138 - DNA, 958 bp, Homo Sapiens; identical to SEQ ID NO: 257308
  misc_feature (940)..(940): n is a, c, g, or t
  misc_feature (956)..(956): n is a, c, g, or t

SEQ ID NO: 278139 - DNA, 1631 bp, Homo Sapiens; identical to SEQ ID NO: 257309
  misc_feature (1604)..(1604): n is a, c, g, or t

SEQ ID NO: 278140 - DNA, 1041 bp, Homo Sapiens; identical to SEQ ID NO: 257310
  misc_feature (889)..(889): n is a, c, g, or t
  misc_feature (945)..(945): n is a, c, g, or t
  misc_feature (959)..(959): n is a, c, g, or t
  misc_feature (992)..(992): n is a, c, g, or t
  misc_feature (1017)..(1018): n is a, c, g, or t
  misc_feature (1023)..(1023): n is a, c, g, or t
  misc_feature (1026)..(1026): n is a, c, g, or t

SEQ ID NO: 278141 - DNA, 1756 bp, Homo Sapiens; identical to SEQ ID NO: 257311
  misc_feature (1506)..(1656): n is a, c, g, or t
  misc_feature (1661)..(1661): n is a, c, g, or t
  misc_feature (1664)..(1664): n is a, c, g, or t
  misc_feature (1667)..(1684): n is a, c, g, or t
  misc_feature (1692)..(1710): n is a, c, g, or t

SEQ ID NO: 278142 - DNA, 440 bp, Homo Sapiens; identical to SEQ ID NO: 257315

SEQ ID NO: 278143 - DNA, 897 bp, Homo Sapiens; identical to SEQ ID NO: 257316

SEQ ID NO: 278144 - DNA, 426 bp, Homo Sapiens; identical to SEQ ID NO: 257319
  misc_feature (22)..(22): n is a, c, g, or t
  misc_feature (41)..(41): n is a, c, g, or t
  misc_feature (64)..(64): n is a, c, g, or t
  misc_feature (72)..(72): n is a, c, g, or t

SEQ ID NO: 278145 - DNA, 500 bp, Homo Sapiens; identical to SEQ ID NO: 257320

SEQ ID NO: 278146 - DNA, 455 bp, Homo Sapiens; identical to SEQ ID NO: 257328

SEQ ID NO: 278147 - DNA, 1779 bp, Homo Sapiens; identical to SEQ ID NO: 257329
  misc_feature (94)..(102): n is a, c, g, or t
  misc_feature (112)..(112): n is a, c, g, or t
  misc_feature (122)..(122): n is a, c, g, or t
  misc_feature (222)..(247): n is a, c, g, or t
  misc_feature (530)..(578): n is a, c, g, or t
  misc_feature (626)..(688): n is a, c, g, or t
  misc_feature (970)..(1008): n is a, c, g, or t

SEQ ID NO: 278148 - DNA, 396 bp, Homo Sapiens; identical to SEQ ID NO: 257336

SEQ ID NO: 278149 - DNA, 1328 bp, Homo Sapiens; identical to SEQ ID NO: 257337
  misc_feature (18)..(18): n is a, c, g, or t
  misc_feature (21)..(21): n is a, c, g, or t
  misc_feature (25)..(25): n is a, c, g, or t
  misc_feature (28)..(28): n is a, c, g, or t
  misc_feature (32)..(32): n is a, c, g, or t
  misc_feature (34)..(34): n is a, c, g, or t
  misc_feature (42)..(42): n is a, c, g, or t
  misc_feature (45)..(45): n is a, c, g, or t
  misc_feature (47)..(49): n is a, c, g, or t
  misc_feature (57)..(57): n is a, c, g, or t
  misc_feature (59)..(68): n is a, c, g, or t
  misc_feature (79)..(79): n is a, c, g, or t
  misc_feature (82)..(82): n is a, c, g, or t
  misc_feature (84)..(84): n is a, c, g, or t
  misc_feature (88)..(89): n is a, c, g, or t
  misc_feature (118)..(118): n is a, c, g, or t
  misc_feature (120)..(121): n is a, c, g, or t
  misc_feature (529)..(529): n is a, c, g, or t

SEQ ID NO: 278150 - DNA, 505 bp, Homo Sapiens; identical to SEQ ID NO: 257338

SEQ ID NO: 278151 - DNA, 353 bp, Homo Sapiens; identical to SEQ ID NO: 257340
  misc_feature (226)..(239): n is a, c, g, or t

SEQ ID NO: 278152 - DNA, 670 bp, Homo Sapiens; identical to SEQ ID NO: 257341
  misc_feature (56)..(69): n is a, c, g, or t
  misc_feature (115)..(123): n is a, c, g, or t

SEQ ID NO: 278153 - DNA, 991 bp, Homo Sapiens; identical to SEQ ID NO: 257342
  misc_feature (47)..(47): n is a, c, g, or t
  misc_feature (64)..(64): n is a, c, g, or t

SEQ ID NO: 278154 - DNA, 479 bp, Homo Sapiens; identical to SEQ ID NO: 257343

SEQ ID NO: 278155 - DNA, 1077 bp, Homo Sapiens; identical to SEQ ID NO: 257344

SEQ ID NO: 278156 - DNA, 1134 bp, Homo Sapiens; identical to SEQ ID NO: 257345

SEQ ID NO: 278157 - DNA, 445 bp, Homo Sapiens; identical to SEQ ID NO: 257350
  misc_feature (378)..(378): n is a, c, g, or t
  misc_feature (413)..(413): n is a, c, g, or t
  misc_feature (418)..(418): n is a, c, g, or t
  misc_feature (426)..(426): n is a, c, g, or t

SEQ ID NO: 278158 - DNA, 735 bp, Homo Sapiens; identical to SEQ ID NO: 257351
  misc_feature (324)..(374): n is a, c, g, or t
  misc_feature (395)..(395): n is a, c, g, or t
  misc_feature (426)..(426): n is a, c, g, or t

SEQ ID NO: 278159 - DNA, 820 bp, Homo Sapiens; identical to SEQ ID NO: 257365

SEQ ID NO: 278160 - DNA, 1463 bp, Homo Sapiens; identical to SEQ ID NO: 257366

SEQ ID NO: 278161 - DNA, 622 bp, Homo Sapiens; identical to SEQ ID NO: 257372
  misc_feature (314)..(314): n is a, c, g, or t
  misc_feature (521)..(521): n is a, c, g, or t
  misc_feature (523)..(523): n is a, c, g, or t
  misc_feature (565)..(565): n is a, c, g, or t

SEQ ID NO: 278162 - DNA, 368 bp, Homo Sapiens; identical to SEQ ID NO: 257373
  misc_feature (350)..(350): n is a, c, g, or t

SEQ ID NO: 278163 - DNA, 741 bp, Homo Sapiens; identical to SEQ ID NO: 257379

SEQ ID NO: 278164 - DNA, 622 bp, Homo Sapiens; identical to SEQ ID NO: 257380
  misc_feature (117)..(117): n is a, c, g, or t
  misc_feature (119)..(119): n is a, c, g, or t
  misc_feature (121)..(121): n is a, c, g, or t

SEQ ID NO: 278165 - DNA, 563 bp, Homo Sapiens; identical to SEQ ID NO: 257384
  misc_feature (405)..(405): n is a, c, g, or t

SEQ ID NO: 278166 - DNA, 169 bp, Homo Sapiens; identical to SEQ ID NO: 257385

SEQ ID NO: 278167 - DNA, 687 bp, Homo Sapiens; identical to SEQ ID NO: 257400

SEQ ID NO: 278168 - DNA, 937 bp, Homo Sapiens; identical to SEQ ID NO: 257401

SEQ ID NO: 278169 - DNA, 489 bp, Homo Sapiens; identical to SEQ ID NO: 257408
  misc_feature (14)..(14): n is a, c, g, or t
  misc_feature (48)..(48): n is a, c, g, or t
  misc_feature (63)..(63): n is a, c, g, or t
  misc_feature (73)..(73): n is a, c, g, or t
  misc_feature (104)..(104): n is a, c, g, or t

SEQ ID NO: 278170 - DNA, 3003 bp, Homo Sapiens; identical to SEQ ID NO: 257409

SEQ ID NO: 278171 - DNA, 980 bp, Homo Sapiens; identical to SEQ ID NO: 257424

SEQ ID NO: 278172 - DNA, 1563 bp, Homo Sapiens; identical to SEQ ID NO: 257425
  misc_feature (1284)..(1441): n is a, c, g, or t

SEQ ID NO: 278173 - DNA, 808 bp, Homo Sapiens; identical to SEQ ID NO: 257431

SEQ ID NO: 278174 - DNA, 765 bp, Homo Sapiens; identical to SEQ ID NO: 257432
  misc_feature (182)..(215): n is a, c, g, or t
  misc_feature (635)..(697): n is a, c, g, or t

SEQ ID NO: 278175 - DNA, 1034 bp, Homo Sapiens; identical to SEQ ID NO: 257433

SEQ ID NO: 278176 - DNA, 1022 bp, Homo Sapiens; identical to SEQ ID NO: 257434

SEQ ID NO: 278177 - DNA, 648 bp, Homo Sapiens; identical to SEQ ID NO: 257449

SEQ ID NO: 278178 - DNA, 486 bp, Homo Sapiens; identical to SEQ ID NO: 257450

SEQ ID NO: 278179 - DNA, 919 bp, Homo Sapiens; identical to SEQ ID NO: 257451
  misc_feature (17)..(17): n is a, c, g, or t

SEQ ID NO: 278180 - DNA, 454 bp, Homo Sapiens; identical to SEQ ID NO: 257453

SEQ ID NO: 278181 - DNA, 559 bp, Homo Sapiens; identical to SEQ ID NO: 257454
  misc_feature (240)..(295): n is a, c, g, or t

SEQ ID NO: 278182 - DNA, 1219 bp, Homo Sapiens; identical to SEQ ID NO: 257455
  misc_feature (571)..(628): n is a, c, g, or t

SEQ ID NO: 278183 - DNA, 981 bp, Homo Sapiens; identical to SEQ ID NO: 257456
  misc_feature (339)..(403): n is a, c, g, or t

SEQ ID NO: 278184 - DNA, 378 bp, Homo Sapiens; identical to SEQ ID NO: 257457

SEQ ID NO: 278185 - DNA, 1836 bp, Homo Sapiens; identical to SEQ ID NO: 257458
  misc_feature (327)..(370): n is a, c, g, or t

SEQ ID NO: 278186 - DNA, 1823 bp, Homo Sapiens; identical to SEQ ID NO: 257461
  misc_feature (1758)..(1758): n is a, c, g, or t

SEQ ID NO: 278187 - DNA, 1386 bp, Homo Sapiens; identical to SEQ ID NO: 257462
  misc_feature (12)..(12): n is a, c, g, or t
  misc_feature (39)..(39): n is a, c, g, or t
  misc_feature (43)..(43): n is a, c, g, or t
  misc_feature (824)..(824): n is a, c, g, or t
  misc_feature (1065)..(1078): n is a, c, g, or t
  misc_feature (1203)..(1211): n is a, c, g, or t
  misc_feature (1338)..(1338): n is a, c, g, or t

SEQ ID NO: 278188 - DNA, 420 bp, Homo Sapiens; identical to SEQ ID NO: 257463
  misc_feature (119)..(119): n is a, c, g, or t
  misc_feature (400)..(400): n is a, c, g, or t

SEQ ID NO: 278189 - DNA, 509 bp, Homo Sapiens; identical to SEQ ID NO: 257464

SEQ ID NO: 278190 - DNA, 449 bp, Homo Sapiens; identical to SEQ ID NO: 257465
  misc_feature (276)..(290): n is a, c, g, or t
  misc_feature (377)..(377): n is a, c, g, or t

SEQ ID NO: 278191 - DNA, 1506 bp, Homo Sapiens; identical to SEQ ID NO: 257471

SEQ ID NO: 278192 - DNA, 418 bp, Homo Sapiens; identical to SEQ ID NO: 257472
  misc_feature (59)..(59): n is a, c, g, or t
  misc_feature (324)..(324): n is a, c, g, or t
  misc_feature (387)..(387): n is a, c, g, or t
  misc_feature (403)..(403): n is a, c, g, or t

SEQ ID NO: 278193 - DNA, 604 bp, Homo Sapiens; identical to SEQ ID NO: 257476

SEQ ID NO: 278194 - DNA, 691 bp, Homo Sapiens; identical to SEQ ID NO: 257477
  misc_feature (588)..(588): n is a, c, g, or t

SEQ ID NO: 278195 - DNA, 350 bp, Homo Sapiens; identical to SEQ ID NO: 257486

SEQ ID NO: 278196 - DNA, 515 bp, Homo Sapiens; identical to SEQ ID NO: 257487

SEQ ID NO: 278197 - DNA, 534 bp, Homo Sapiens; identical to SEQ ID NO: 257492
  misc_feature (395)..(395): n is a, c, g, or t
  misc_feature (446)..(446): n is a, c, g, or t
  misc_feature (508)..(508): n is a, c, g, or t

SEQ ID NO: 278198 - DNA, 492 bp, Homo Sapiens; identical to SEQ ID NO: 257493

SEQ ID NO: 278199 - DNA, 544 bp, Homo Sapiens; identical to SEQ ID NO: 257495
  misc_feature (172)..(203): n is a, c, g, or t

SEQ ID NO: 278200 - DNA, 1325 bp, Homo Sapiens; identical to SEQ ID NO: 257496
  misc_feature (1159)..(1159): n is a, c, g, or t
  misc_feature (1161)..(1191): n is a, c, g, or t
  misc_feature (1280)..(1280): n is a, c, g, or t
  misc_feature (1301)..(1301): n is a, c, g, or t

SEQ ID NO: 278201 - DNA, 2226 bp, Homo Sapiens; identical to SEQ ID NO: 257498

SEQ ID NO: 278202 - DNA, 514 bp, Homo Sapiens; identical to SEQ ID NO: 257499
  misc_feature (374)..(374): n is a, c, g, or t
  misc_feature (400)..(400): n is a, c, g, or t
  misc_feature (416)..(416): n is a, c, g, or t
  misc_feature (425)..(425): n is a, c, g, or t
  misc_feature (441)..(441): n is a, c, g, or t
  misc_feature (481)..(481): n is a, c, g, or t
  misc_feature (489)..(489): n is a, c, g, or t

SEQ ID NO: 278203 - DNA, 1149 bp, Homo Sapiens; identical to SEQ ID NO: 257504
  misc_feature (31)..(31): n is a, c, g, or t
  misc_feature (1074)..(1075): n is a, c, g, or t
  misc_feature (1079)..(1079): n is a, c, g, or t
  misc_feature (1094)..(1095): n is a, c, g, or t
  misc_feature (1099)..(1099): n is a, c, g, or t
  misc_feature (1106)..(1106): n is a, c, g, or t
  misc_feature (1110)..(1110): n is a, c, g, or t
  misc_feature (1114)..(1114): n is a, c, g, or t
  misc_feature (1116)..(1116): n is a, c, g, or t
  misc_feature (1122)..(1122): n is a, c, g, or t
  misc_feature (1124)..(1124): n is a, c, g, or t
  misc_feature (1129)..(1129): n is a, c, g, or t

SEQ ID NO: 278204 - DNA, 488 bp, Homo Sapiens; identical to SEQ ID NO: 257505
  misc_feature (25)..(25): n is a, c, g, or t
  misc_feature (42)..(42): n is a, c, g, or t

SEQ ID NO: 278205 - DNA, 479 bp, Homo Sapiens; identical to SEQ ID NO: 257506
  misc_feature (15)..(15): n is a, c, g, or t
  misc_feature (77)..(77): n is a, c, g, or t

SEQ ID NO: 278206 - DNA, 447 bp, Homo Sapiens; identical to SEQ ID NO: 257507
  misc_feature (18)..(18): n is a, c, g, or t

SEQ ID NO: 278207 - DNA, 340 bp, Homo Sapiens; identical to SEQ ID NO: 257508
  misc_feature (15)..(15): n is a, c, g, or t
  misc_feature (22)..(22): n is a, c, g, or t

SEQ ID NO: 278208 - DNA, 1139 bp, Homo Sapiens; identical to SEQ ID NO: 257518
  misc_feature (858)..(859): n is a, c, g, or t
  misc_feature (866)..(876): n is a, c, g, or t

SEQ ID NO: 278209 - DNA, 823 bp, Homo Sapiens; identical to SEQ ID NO: 97933
  misc_feature (622)..(622): n is a, c, g, or t
  misc_feature (714)..(764): n is a, c, g, or t

SEQ ID NO: 278210 - DNA, 1533 bp, Homo Sapiens; identical to SEQ ID NO: 257525

SEQ ID NO: 278211 - DNA, 1062 bp, Homo Sapiens; identical to SEQ ID NO: 257526

SEQ ID NO: 278212 - DNA, 872 bp, Homo Sapiens; identical to SEQ ID NO: 257527

SEQ ID NO: 278213 - DNA, 948 bp, Homo Sapiens; identical to SEQ ID NO: 257528

SEQ ID NO: 278214 - DNA, 423 bp, Homo Sapiens; identical to SEQ ID NO: 257529
  misc_feature (35)..(35): n is a, c, g, or t
  misc_feature (42)..(42): n is a, c, g, or t
  misc_feature (54)..(54): n is a, c, g, or t

SEQ ID NO: 278215 - DNA, 1165 bp, Homo Sapiens; identical to SEQ ID NO: 257530
  misc_feature (54)..(54): n is a, c, g, or t
  misc_feature (57)..(57): n is a, c, g, or t
  misc_feature (59)..(59): n is a, c, g, or t
  misc_feature (71)..(71): n is a, c, g, or t
  misc_feature (79)..(79): n is a, c, g, or t
  misc_feature (94)..(94): n is a, c, g, or t
  misc_feature (142)..(142): n is a, c, g, or t
  misc_feature (1116)..(1116): n is a, c, g, or t

SEQ ID NO: 278216 - DNA, 659 bp, Homo Sapiens; identical to SEQ ID NO: 257531

SEQ ID NO: 278217 - DNA, 576 bp, Homo Sapiens; identical to SEQ ID NO: 257539
  misc_feature (23)..(23): n is a, c, g, or t
  misc_feature (75)..(75): n is a, c, g, or t
  misc_feature (107)..(107): n is a, c, g, or t

SEQ ID NO: 278218 - DNA, 462 bp, Homo Sapiens; identical to SEQ ID NO: 257540
  misc_feature (33)..(33): n is a, c, g, or t
  misc_feature (67)..(67): n is a, c, g, or t
  misc_feature (75)..(75): n is a, c, g, or t
  misc_feature (96)..(96): n is a, c, g, or t
  misc_feature (137)..(137): n is a, c, g, or t
  misc_feature (199)..(199): n is a, c, g, or t

SEQ ID NO: 278219 - DNA, 1467 bp, Homo Sapiens; identical to SEQ ID NO: 257559

SEQ ID NO: 278220 - DNA, 711 bp, Homo Sapiens; identical to SEQ ID NO: 257560

SEQ ID NO: 278221 - DNA, 1198 bp, Homo Sapiens; identical to SEQ ID NO: 257563
  misc_feature (609)..(697): n is a, c, g, or t

SEQ ID NO: 278222 - DNA, 352 bp, Homo Sapiens; identical to SEQ ID NO: 257564
  misc_feature (50)..(50): n is a, c, g, or t
  misc_feature (67)..(67): n is a, c, g, or t
  misc_feature (74)..(74): n is a, c, g, or t
  misc_feature (117)..(117): n is a, c, g, or t
  misc_feature (161)..(161): n is a, c, g, or t

SEQ ID NO: 278223 - DNA, 874 bp, Homo Sapiens; identical to SEQ ID NO: 257569
  misc_feature (427)..(427): n is a, c, g, or t

SEQ ID NO: 278224 - DNA, 580 bp, Homo Sapiens; identical to SEQ ID NO: 257570
  misc_feature (465)..(465): n is a, c, g, or t
  misc_feature (516)..(516): n is a, c, g, or t
  misc_feature (521)..(521): n is a, c, g, or t
  misc_feature (559)..(559): n is a, c, g, or t

SEQ ID NO: 278225 - DNA, 1001 bp, Homo Sapiens; identical to SEQ ID NO: 257579

SEQ ID NO: 278226 - DNA, 579 bp, Homo Sapiens; identical to SEQ ID NO: 257580

SEQ ID NO: 278227 - DNA, 1250 bp, Homo Sapiens; identical to SEQ ID NO: 257618
  misc_feature (45)..(57): n is a, c, g, or t

SEQ ID NO: 278228 - DNA, 1006 bp, Homo Sapiens; identical to SEQ ID NO: 257619
  misc_feature (19)..(19): n is a, c, g, or t

SEQ ID NO: 278229 - DNA, 1449 bp, Homo Sapiens; identical to SEQ ID NO: 257642
  misc_feature (1407)..(1407): n is a, c, g, or t
  misc_feature (1409)..(1409): n is a, c, g, or t
  misc_feature (1422)..(1422): n is a, c, g, or t

SEQ ID NO: 278230 - DNA, 523 bp, Homo Sapiens; identical to SEQ ID NO: 257643

SEQ ID NO: 278231 - DNA, 605 bp, Homo Sapiens; identical to SEQ ID NO: 257694
  misc_feature (28)..(28): n is a, c, g, or t
  misc_feature (94)..(103): n is a, c, g, or t
  misc_feature (116)..(116): n is a, c, g, or t

SEQ ID NO: 278232 - DNA, 1252 bp, Homo Sapiens; identical to SEQ ID NO: 257695
  misc_feature (23)..(23): n is a, c, g, or t
  misc_feature (35)..(35): n is a, c, g, or t
  misc_feature (85)..(85): n is a, c, g, or t
  misc_feature (91)..(91): n is a, c, g, or t
  misc_feature (115)..(115): n is a, c, g, or t
  misc_feature (192)..(243): n is a, c, g, or t
  misc_feature (898)..(898): n is a, c, g, or t

SEQ ID NO: 278233 - DNA, 506 bp, Homo Sapiens; identical to SEQ ID NO: 257696
  misc_feature (28)..(28): n is a, c, g, or t
  misc_feature (41)..(41): n is a, c, g, or t
  misc_feature (52)..(52): n is a, c, g, or t

SEQ ID NO: 278234 - DNA, 605 bp, Homo Sapiens; identical to SEQ ID NO: 257724
  misc_feature (202)..(202): n is a, c, g, or t
  misc_feature (229)..(229): n is a, c, g, or t
  misc_feature (245)..(245): n is a, c, g, or t
  misc_feature (482)..(558): n is a, c, g, or t

SEQ ID NO: 278235 - DNA, 572 bp, Homo Sapiens; identical to SEQ ID NO: 257725
  misc_feature (508)..(508): n is a, c, g, or t
  misc_feature (543)..(543): n is a, c, g, or t
  misc_feature (556)..(556): n is a, c, g, or t

SEQ ID NO: 278236 - DNA, 474 bp, Homo Sapiens; identical to SEQ ID NO: 257733

SEQ ID NO: 278237 - DNA, 887 bp, Homo Sapiens; identical to SEQ ID NO: 257734

SEQ ID NO: 278238 - DNA, 987 bp, Homo Sapiens; identical to SEQ ID NO: 257744

SEQ ID NO: 278239 - DNA, 405 bp, Homo Sapiens; identical to SEQ ID NO: 257745

SEQ ID NO: 278240 - DNA, 1281 bp, Homo Sapiens; identical to SEQ ID NO: 257806
  misc_feature (9)..(9): n is a, c, g, or t
  misc_feature (31)..(31): n is a, c, g, or t
  misc_feature (36)..(36): n is a, c, g, or t
  misc_feature (38)..(38): n is a, c, g, or t
  misc_feature (45)..(45): n is a, c, g, or t
  misc_feature (47)..(47): n is a, c, g, or t
  misc_feature (51)..(51): n is a, c, g, or t
  misc_feature (53)..(53): n is a, c, g, or t
  misc_feature (73)..(73): n is a, c, g, or t
  misc_feature (86)..(86): n is a, c, g, or t
  misc_feature (90)..(90): n is a, c, g, or t
  misc_feature (137)..(137): n is a, c, g, or t
  misc_feature (1051)..(1051): n is a, c, g, or t
  misc_feature (1058)..(1058): n is a, c, g, or t

SEQ ID NO: 278241 - DNA, 1065 bp, Homo Sapiens; identical to SEQ ID NO: 257807
  misc_feature (9)..(9): n is a, c, g, or t
  misc_feature (14)..(14): n is a, c, g, or t
  misc_feature (29)..(29): n is a, c, g, or t
  misc_feature (38)..(38): n is a, c, g, or t
  misc_feature (40)..(40): n is a, c, g, or t
  misc_feature (42)..(42): n is a, c, g, or t
  misc_feature (44)..(44): n is a, c, g, or t
  misc_feature (48)..(48): n is a, c, g, or t
  misc_feature (54)..(54): n is a, c, g, or t
  misc_feature (60)..(60): n is a, c, g, or t
  misc_feature (75)..(75): n is a, c, g, or t
  misc_feature (83)..(83): n is a, c, g, or t
  misc_feature (107)..(107): n is a, c, g, or t
  misc_feature (109)..(109): n is a, c, g, or t
  misc_feature (112)..(112): n is a, c, g, or t
  misc_feature (114)..(114): n is a, c, g, or t
  misc_feature (119)..(119): n is a, c, g, or t
  misc_feature (127)..(127): n is a, c, g, or t
  misc_feature (133)..(133): n is a, c, g, or t
  misc_feature (141)..(141): n is a, c, g, or t
  misc_feature (155)..(155): n is a, c, g, or t
  misc_feature (157)..(157): n is a, c, g, or t

SEQ ID NO: 278242 - DNA, 1019 bp, Homo Sapiens; identical to SEQ ID NO: 257812

SEQ ID NO: 278243 - DNA, 2104 bp, Homo Sapiens; identical to SEQ ID NO: 257813

SEQ ID NO: 278244 - DNA, 1298 bp, Homo Sapiens; identical to SEQ ID NO: 257818
  misc_feature (13)..(13): n is a, c, g, or t
  misc_feature (352)..(360): n is a, c, g, or t
  misc_feature (665)..(692): n is a, c, g, or t

SEQ ID NO: 278245 - DNA, 1543 bp, Homo Sapiens; identical to SEQ ID NO: 257819
  misc_feature (124)..(124): n is a, c, g, or t
  misc_feature (144)..(152): n is a, c, g, or t
  misc_feature (333)..(333): n is a, c, g, or t
  misc_feature (339)..(339): n is a, c, g, or t
  misc_feature (411)..(411): n is a, c, g, or t
  misc_feature (413)..(413): n is a, c, g, or t
  misc_feature (434)..(434): n is a, c, g, or t
  misc_feature (436)..(436): n is a, c, g, or t
  misc_feature (441)..(441): n is a, c, g, or t
  misc_feature (451)..(451): n is a, c, g, or t
  misc_feature (454)..(485): n is a, c, g, or t
  misc_feature (543)..(543): n is a, c, g, or t
  misc_feature (549)..(549): n is a, c, g, or t
  misc_feature (553)..(554): n is a, c, g, or t
  misc_feature (600)..(600): n is a, c, g, or t
  misc_feature (633)..(633): n is a, c, g, or t
  misc_feature (644)..(644): n is a, c, g, or t
  misc_feature (646)..(646): n is a, c, g, or t
  misc_feature (661)..(661): n is a, c, g, or t
  misc_feature (664)..(665): n is a, c, g, or t
  misc_feature (680)..(680): n is a, c, g, or t
  misc_feature (688)..(688): n is a, c, g, or t
  misc_feature (691)..(691): n is a, c, g, or t
  misc_feature (928)..(929): n is a, c, g, or t
  misc_feature (1075)..(1075): n is a, c, g, or t
  misc_feature (1112)..(1112): n is a, c, g, or t
  misc_feature (1119)..(1119): n is a, c, g, or t
  misc_feature (1129)..(1129): n is a, c, g, or t
  misc_feature (1254)..(1254): n is a, c, g, or t
  misc_feature (1256)..(1256): n is a, c, g, or t

SEQ ID NO: 278246 - DNA, 993 bp, Homo Sapiens; identical to SEQ ID NO: 257827
  misc_feature (44)..(44): n is a, c, g, or t
  misc_feature (763)..(804): n is a, c, g, or t

SEQ ID NO: 278247 - DNA, 1087 bp, Homo Sapiens; identical to SEQ ID NO: 257828
  misc_feature (970)..(971): n is a, c, g, or t
  misc_feature (982)..(982): n is a, c, g, or t
  misc_feature (997)..(997): n is a, c, g, or t
  misc_feature (1006)..(1006): n is a, c, g, or t
  misc_feature (1012)..(1012): n is a, c, g, or t
  misc_feature (1015)..(1015): n is a, c, g, or t
  misc_feature (1028)..(1028): n is a, c, g, or t
  misc_feature (1033)..(1033): n is a, c, g, or t
  misc_feature (1039)..(1039): n is a, c, g, or t
  misc_feature (1044)..(1045): n is a, c, g, or t
  misc_feature (1049)..(1050): n is a, c, g, or t
  misc_feature (1053)..(1053): n is a, c, g, or t
  misc_feature (1055)..(1055): n is a, c, g, or t
  misc_feature (1057)..(1057): n is a, c, g, or t

SEQ ID NO: 278248 - DNA, 1692 bp, Homo Sapiens; identical to SEQ ID NO: 257839
  misc_feature (499)..(499): n is a, c, g, or t
  misc_feature (1177)..(1192): n is a, c, g, or t
  misc_feature (1263)..(1312): n is a, c, g, or t
  misc_feature (1602)..(1602): n is a, c, g, or t
  misc_feature (1674)..(1674): n is a, c, g, or t

SEQ ID NO: 278249 - DNA, 300 bp, Homo Sapiens; identical to SEQ ID NO: 257840

SEQ ID NO: 278250 - DNA, 1645 bp, Homo Sapiens; identical to SEQ ID NO: 257842
  misc_feature (447)..(447): n is a, c, g, or t
  misc_feature (541)..(541): n is a, c, g, or t
  misc_feature (1021)..(1021): n is a, c, g, or t
  misc_feature (1109)..(1109): n is a, c, g, or t
  misc_feature (1334)..(1342): n is a, c, g, or t

SEQ ID NO: 278251 - DNA, 886 bp, Homo Sapiens; identical to SEQ ID NO: 257843
  misc_feature (711)..(711): n is a, c, g, or t
  misc_feature (862)..(862): n is a, c, g, or t

SEQ ID NO: 278252 - DNA, 963 bp, Homo Sapiens; identical to SEQ ID NO: 257844
  misc_feature (812)..(828): n is a, c, g, or t

SEQ ID NO: 278253 - DNA, 1569 bp, Homo Sapiens; identical to SEQ ID NO: 257845
  misc_feature (39)..(39): n is a, c, g, or t
  misc_feature (61)..(71): n is a, c, g, or t
  misc_feature (122)..(122): n is a, c, g, or t
  misc_feature (1456)..(1456): n is a, c, g, or t
  misc_feature (1458)..(1458): n is a, c, g, or t

SEQ ID NO: 278254 - DNA, 1024 bp, Homo Sapiens; identical to SEQ ID NO: 257846
  misc_feature (14)..(14): n is a, c, g, or t
  misc_feature (24)..(24): n is a, c, g, or t
  misc_feature (29)..(30): n is a, c, g, or t
  misc_feature (35)..(35): n is a, c, g, or t
  misc_feature (38)..(38): n is a, c, g, or t
  misc_feature (50)..(50): n is a, c, g, or t
  misc_feature (68)..(68): n is a, c, g, or t
  misc_feature (71)..(71): n is a, c, g, or t
  misc_feature (85)..(85): n is a, c, g, or t
  misc_feature (91)..(91): n is a, c, g, or t
  misc_feature (143)..(143): n is a, c, g, or t
  misc_feature (185)..(185): n is a, c, g, or t
  misc_feature (355)..(386): n is a, c, g, or t
  misc_feature (654)..(707): n is a, c, g, or t
  misc_feature (767)..(767): n is a, c, g, or t

SEQ ID NO: 278255 - DNA, 2786 bp, Homo Sapiens; identical to SEQ ID NO: 257847
  misc_feature (2491)..(2556): n is a, c, g, or t

SEQ ID NO: 278256 - DNA, 430 bp, Homo Sapiens; identical to SEQ ID NO: 257848

SEQ ID NO: 278257 - DNA, 1499 bp, Homo Sapiens; identical to SEQ ID NO: 257850
  misc_feature (84)..(144): n is a, c, g, or t
  misc_feature (441)..(449): n is a, c, g, or t

SEQ ID NO: 278258 - DNA, 952 bp, Homo Sapiens; identical to SEQ ID NO: 257851

SEQ ID NO: 278259 - DNA, 1051 bp, Homo Sapiens; identical to SEQ ID NO: 257852
  misc_feature (967)..(975): n is a, c, g, or t

SEQ ID NO: 278260 - DNA, 852 bp, Homo Sapiens; identical to SEQ ID NO: 257853
  misc_feature (722)..(722): n is a, c, g, or t
  misc_feature (765)..(765): n is a, c, g, or t
  misc_feature (775)..(775): n is a, c, g, or t
  misc_feature (820)..(820): n is a, c, g, or t
  misc_feature (837)..(837): n is a, c, g, or t

SEQ ID NO: 278261 - DNA, 1109 bp, Homo Sapiens; identical to SEQ ID NO: 257854
  misc_feature (187)..(260): n is a, c, g, or t
  misc_feature (268)..(386): n is a, c, g, or t
  misc_feature (452)..(503): n is a, c, g, or t
  misc_feature (578)..(586): n is a, c, g, or t
  misc_feature (753)..(803): n is a, c, g, or t

SEQ ID NO: 278262 - DNA, 437 bp, Homo Sapiens; identical to SEQ ID NO: 257855
  misc_feature (72)..(122): n is a, c, g, or t
  misc_feature (239)..(239): n is a, c, g, or t
  misc_feature (254)..(315): n is a, c, g, or t

SEQ ID NO: 278263 - DNA, 1523 bp, Homo Sapiens; identical to SEQ ID NO: 257859
  misc_feature (1410)..(1410): n is a, c, g, or t
  misc_feature (1439)..(1439): n is a, c, g, or t
  misc_feature (1444)..(1444): n is a, c, g, or t
  misc_feature (1452)..(1452): n is a, c, g, or t
  misc_feature (1455)..(1455): n is a, c, g, or t

SEQ ID NO: 278264 - DNA, 932 bp, Homo Sapiens; identical to SEQ ID NO: 257860

SEQ ID NO: 278265 - DNA, 949 bp, Homo Sapiens; identical to SEQ ID NO: 257861

SEQ ID NO: 278266 - DNA, 1424 bp, Homo Sapiens; identical to SEQ ID NO: 257862
  misc_feature (1322)..(1322): n is a, c, g, or t
  misc_feature (1373)..(1373): n is a, c, g, or t

SEQ ID NO: 278267 - DNA, 1309 bp, Homo Sapiens; identical to SEQ ID NO: 257863

SEQ ID NO: 278268 - DNA, 1249 bp, Homo Sapiens; identical to SEQ ID NO: 257864

SEQ ID NO: 278269 - DNA, 460 bp, Homo Sapiens; identical to SEQ ID NO: 257865
  misc_feature (29)..(29): n is a, c, g, or t
  misc_feature (284)..(284): n is a, c, g, or t
  misc_feature (434)..(434): n is a, c, g, or t

SEQ ID NO: 278270 - DNA, 1849 bp, Homo Sapiens; identical to SEQ ID NO: 257866

SEQ ID NO: 278271 - DNA, 712 bp, Homo Sapiens; identical to SEQ ID NO: 257867
  misc_feature (13)..(13): n is a, c, g, or t

SEQ ID NO: 278272 - DNA, 2536 bp, Homo Sapiens; identical to SEQ ID NO: 257868
  misc_feature (15)..(15): n is a, c, g, or t
  misc_feature (1760)..(1760): n is a, c, g, or t
  misc_feature (1983)..(2082): n is a, c, g, or t
  misc_feature (2495)..(2495): n is a, c, g, or t

SEQ ID NO: 278273 - DNA, 1039 bp, Homo Sapiens; identical to SEQ ID NO: 257873
  misc_feature (441)..(474): n is a, c, g, or t
  misc_feature (990)..(990): n is a, c, g, or t
  misc_feature (994)..(994): n is a, c, g, or t
  misc_feature (1027)..(1028): n is a, c, g, or t

SEQ ID NO: 278274 - DNA, 1083 bp, Homo Sapiens; identical to SEQ ID NO: 257874
  misc_feature (475)..(508): n is a, c, g, or t

SEQ ID NO: 278275 - DNA, 1015 bp, Homo Sapiens; identical to SEQ ID NO: 257875
  misc_feature (764)..(765): n is a, c, g, or t
  misc_feature (774)..(774): n is a, c, g, or t
  misc_feature (786)..(787): n is a, c, g, or t
  misc_feature (796)..(796): n is a, c, g, or t
  misc_feature (801)..(802): n is a, c, g, or t
  misc_feature (827)..(827): n is a, c, g, or t
  misc_feature (855)..(855): n is a, c, g, or t
  misc_feature (858)..(859): n is a, c, g, or t
  misc_feature (911)..(911): n is a, c, g, or t
  misc_feature (943)..(943): n is a, c, g, or t
  misc_feature (957)..(957): n is a, c, g, or t
  misc_feature (971)..(971): n is a, c, g, or t

SEQ ID NO: 278276 - DNA, 1873 bp, Homo Sapiens; identical to SEQ ID NO: 257876
  misc_feature (1839)..(1839): n is a, c, g, or t

SEQ ID NO: 278277 - DNA, 1038 bp, Homo Sapiens; identical to SEQ ID NO: 257877
  misc_feature (30)..(30): n is a, c, g, or t

SEQ ID NO: 278278 - DNA, 3281 bp, Homo Sapiens; identical to SEQ ID NO: 257878
  misc_feature (457)..(473): n is a, c, g, or t
  misc_feature (1049)..(1049): n is a, c, g, or t
  misc_feature (1221)..(1221): n is a, c, g, or t
  misc_feature (1251)..(1251): n is a, c, g, or t
  misc_feature (1575)..(1575): n is a, c, g, or t
  misc_feature (1856)..(1856): n is a, c, g, or t

SEQ ID NO: 278279 - DNA, 537 bp, Homo Sapiens; identical to SEQ ID NO: 257879
  misc_feature (120)..(120): n is a, c, g, or t
  misc_feature (387)..(387): n is a, c, g, or t
  misc_feature (419)..(419): n is a, c, g, or t
  misc_feature (441)..(441): n is a, c, g, or t
  misc_feature (452)..(452): n is a, c, g, or t
  misc_feature (463)..(463): n is a, c, g, or t
  misc_feature (470)..(470): n is a, c, g, or t
  misc_feature (486)..(486): n is a, c, g, or t
  misc_feature (493)..(493): n is a, c, g, or t
  misc_feature (506)..(506): n is a, c, g, or t

SEQ ID NO: 278280 - DNA, 1858 bp, Homo Sapiens; identical to SEQ ID NO: 257880
  misc_feature (1354)..(1401): n is a, c, g, or t

SEQ ID NO: 278281 - DNA, 886 bp, Homo Sapiens; identical to SEQ ID NO: 15378

SEQ ID NO: 278282 - DNA, 1486 bp, Homo Sapiens; identical to SEQ ID NO: 257883
  misc_feature (9)..(9): n is a, c, g, or t
  misc_feature (15)..(15): n is a, c, g, or t
  misc_feature (18)..(18): n is a, c, g, or t
  misc_feature (21)..(21): n is a, c, g, or t
  misc_feature (25)..(25): n is a, c, g, or t
  misc_feature (30)..(30): n is a, c, g, or t
  misc_feature (35)..(36): n is a, c, g, or t
  misc_feature (41)..(41): n is a, c, g, or t
  misc_feature (44)..(44): n is a, c, g, or t
  misc_feature (59)..(59): n is a, c, g, or t
  misc_feature (64)..(64): n is a, c, g, or t
  misc_feature (66)..(66): n is a, c, g, or t
  misc_feature (74)..(75): n is a, c, g, or t
  misc_feature (91)..(91): n is a, c, g, or t
  misc_feature (130)..(130): n is a, c, g, or t
  misc_feature (146)..(146): n is a, c, g, or t
  misc_feature (166)..(166): n is a, c, g, or t
  misc_feature (170)..(186): n is a, c, g, or t
  misc_feature (221)..(221): n is a, c, g, or t
  misc_feature (238)..(238): n is a, c, g, or t
  misc_feature (257)..(257): n is a, c, g, or t
  misc_feature (263)..(263): n is a, c, g, or t
  misc_feature (294)..(294): n is a, c, g, or t
  misc_feature (1331)..(1331): n is a, c, g, or t

SEQ ID NO: 278283 - DNA, 2733 bp, Homo Sapiens; identical to SEQ ID NO: 257884
  misc_feature (468)..(499): n is a, c, g, or t
  misc_feature (728)..(728): n is a, c, g, or t
  misc_feature (878)..(921): n is a, c, g, or t
  misc_feature (2039)..(2055): n is a, c, g, or t

SEQ ID NO: 278284 - DNA, 1840 bp, Homo Sapiens; identical to SEQ ID NO: 257885
  misc_feature (1478)..(1481): n is a, c, g, or t
  misc_feature (1802)..(1802): n is a, c, g, or t
  misc_feature (1806)..(1806): n is a, c, g, or t

SEQ ID NO: 278285 - DNA, 2105 bp, Homo Sapiens; identical to SEQ ID NO: 257886
  misc_feature (1119)..(1127): n is a, c, g, or t
  misc_feature (1151)..(1385): n is a, c, g, or t
  misc_feature (1831)..(1839): n is a, c, g, or t
  misc_feature (1890)..(1890): n is a, c, g, or t

SEQ ID NO: 278286 - DNA, 918 bp, Homo Sapiens; identical to SEQ ID NO: 257887
  misc_feature (757)..(760): n is a, c, g, or t
  misc_feature (763)..(771): n is a, c, g, or t
  misc_feature (773)..(776): n is a, c, g, or t

SEQ ID NO: 278287 - DNA, 770 bp, Homo Sapiens; identical to SEQ ID NO: 257889
  misc_feature (757)..(757): n is a, c, g, or t

SEQ ID NO: 278288 - DNA, 741 bp, Homo Sapiens; identical to SEQ ID NO: 257890

SEQ ID NO: 278289 - DNA, 1544 bp, Homo Sapiens; identical to SEQ ID NO: 257891

SEQ ID NO: 278290 - DNA, 1707 bp, Homo Sapiens; identical to SEQ ID NO: 257892
  misc_feature (179)..(179): n is a, c, g, or t
  misc_feature (188)..(190): n is a, c, g, or t
  misc_feature (1473)..(1473): n is a, c, g, or t
  misc_feature (1485)..(1485): n is a, c, g, or t

SEQ ID NO: 278291 - DNA, 1096 bp, Homo Sapiens; identical to SEQ ID NO: 257893
  misc_feature (10)..(10): n is a, c, g, or t
  misc_feature (16)..(16): n is a, c, g, or t
  misc_feature (20)..(20): n is a, c, g, or t
  misc_feature (30)..(31): n is a, c, g, or t
  misc_feature (40)..(40): n is a, c, g, or t
  misc_feature (490)..(490): n is a, c, g, or t
  misc_feature (507)..(507): n is a, c, g, or t

SEQ ID NO: 278292 - DNA, 2142 bp, Homo Sapiens; identical to SEQ ID NO: 257896
  misc_feature (48)..(98): n is a, c, g, or t
  misc_feature (1838)..(1838): n is a, c, g, or t
  misc_feature (1849)..(1849): n is a, c, g, or t
  misc_feature (1887)..(1928): n is a, c, g, or t

SEQ ID NO: 278293 - DNA, 488 bp, Homo Sapiens; identical to SEQ ID NO: 257897
  misc_feature (18)..(18): n is a, c, g, or t
  misc_feature (103)..(103): n is a, c, g, or t
  misc_feature (180)..(180): n is a, c, g, or t
  misc_feature (206)..(206): n is a, c, g, or t

SEQ ID NO: 278294 - DNA, 1862 bp, Homo Sapiens; identical to SEQ ID NO: 257899

SEQ ID NO: 278295 - DNA, 373 bp, Homo Sapiens; identical to SEQ ID NO: 257900
  misc_feature (107)..(107): n is a, c, g, or t

SEQ ID NO: 278296 - DNA, 1531 bp, Homo Sapiens; identical to SEQ ID NO: 257912
  misc_feature (3)..(3): n is a, c, g, or t
  misc_feature (19)..(20): n is a, c, g, or t
  misc_feature (25)..(25): n is a, c, g, or t
  misc_feature (34)..(34): n is a, c, g, or t
  misc_feature (54)..(54): n is a, c, g, or t
  misc_feature (86)..(86): n is a, c, g, or t
  misc_feature (108)..(108): n is a, c, g, or t
  misc_feature (139)..(139): n is a, c, g, or t
  misc_feature (338)..(338): n is a, c, g, or t
  misc_feature (469)..(520): n is a, c, g, or t

SEQ ID NO: 278297 - DNA, 1007 bp, Homo Sapiens; identical to SEQ ID NO: 257913

SEQ ID NO: 278298 - DNA, 940 bp, Homo Sapiens; identical to SEQ ID NO: 257914
  misc_feature (748)..(748): n is a, c, g, or t
  misc_feature (753)..(753): n is a, c, g, or t
  misc_feature (811)..(811): n is a, c, g, or t
  misc_feature (824)..(824): n is a, c, g, or t
  misc_feature (827)..(827): n is a, c, g, or t
  misc_feature (834)..(834): n is a, c, g, or t
  misc_feature (840)..(840): n is a, c, g, or t
  misc_feature (847)..(847): n is a, c, g, or t
  misc_feature (849)..(849): n is a, c, g, or t
  misc_feature (851)..(851): n is a, c, g, or t
  misc_feature (853)..(853): n is a, c, g, or t
  misc_feature (856)..(856): n is a, c, g, or t
  misc_feature (866)..(866): n is a, c, g, or t
  misc_feature (869)..(869): n is a, c, g, or t
  misc_feature (891)..(891): n is a, c, g, or t
  misc_feature (900)..(900): n is a, c, g, or t
  misc_feature (902)..(902): n is a, c, g, or t
  misc_feature (905)..(905): n is a, c, g, or t
  misc_feature (907)..(907): n is a, c, g, or t
  misc_feature (909)..(909): n is a, c, g, or t
  misc_feature (915)..(916): n is a, c, g, or t
  misc_feature (920)..(920): n is a, c, g, or t
  misc_feature (923)..(926): n is a, c, g, or t
  misc_feature (934)..(934): n is a, c, g, or t
  misc_feature (936)..(936): n is a, c, g, or t

SEQ ID NO: 278299 - DNA, 1691 bp, Homo Sapiens; identical to SEQ ID NO: 257915

SEQ ID NO: 278300 - DNA, 1592 bp, Homo Sapiens; identical to SEQ ID NO: 257916
  misc_feature (950)..(950): n is a, c, g, or t
  misc_feature (953)..(953): n is a, c, g, or t
  misc_feature (1020)..(1020): n is a, c, g, or t
  misc_feature (1034)..(1034): n is a, c, g, or t
  misc_feature (1039)..(1039): n is a, c, g, or t
  misc_feature (1052)..(1052): n is a, c, g, or t

SEQ ID NO: 278301 - DNA, 985 bp, Homo Sapiens; identical to SEQ ID NO: 257919
  misc_feature (898)..(898): n is a, c, g, or t
  misc_feature (944)..(944): n is a, c, g, or t
  misc_feature (952)..(952): n is a, c, g, or t

SEQ ID NO: 278302 - DNA, 956 bp, Homo Sapiens; identical to SEQ ID NO: 257920
  misc_feature (622)..(668): n is a, c, g, or t
  misc_feature (722)..(811): n is a, c, g, or t

SEQ ID NO: 278303 - DNA, 1256 bp, Homo Sapiens; identical to SEQ ID NO: 257921
  misc_feature (1094)..(1094): n is a, c, g, or t

SEQ ID NO: 278304 - DNA, 1772 bp, Homo Sapiens; identical to SEQ ID NO: 257924
  misc_feature (54)..(126): n is a, c, g, or t
  misc_feature (173)..(211): n is a, c, g, or t
  misc_feature (220)..(237): n is a, c, g, or t

SEQ ID NO: 278305 - DNA, 859 bp, Homo Sapiens; identical to SEQ ID NO: 257925
  misc_feature (204)..(204): n is a, c, g, or t
  misc_feature (217)..(218): n is a, c, g, or t

SEQ ID NO: 278306 - DNA, 2041 bp, Homo Sapiens; identical to SEQ ID NO: 257928
  misc_feature (2004)..(2004): n is a, c, g, or t
  misc_feature (2029)..(2029): n is a, c, g, or t
  misc_feature (2031)..(2031): n is a, c, g, or t

SEQ ID NO: 278307 - DNA, 949 bp, Homo Sapiens; identical to SEQ ID NO: 257929

SEQ ID NO: 278308 - DNA, 988 bp, Homo Sapiens; identical to SEQ ID NO: 257931
  misc_feature (42)..(101): n is a, c, g, or t

SEQ ID NO: 278309 - DNA, 1418 bp, Homo Sapiens; identical to SEQ ID NO: 257932
  misc_feature (1071)..(1071): n is a, c, g, or t
  misc_feature (1113)..(1113): n is a, c, g, or t

SEQ ID NO: 278310 - DNA, 1543 bp, Homo Sapiens; identical to SEQ ID NO: 257933
  misc_feature (402)..(447): n is a, c, g, or t
  misc_feature (1133)..(1265): n is a, c, g, or t
  misc_feature (1276)..(1287): n is a, c, g, or t
  misc_feature (1312)..(1322): n is a, c, g, or t
  misc_feature (1347)..(1482): n is a, c, g, or t

SEQ ID NO: 278311 - DNA, 534 bp, Homo Sapiens; identical to SEQ ID NO: 257934
  misc_feature (355)..(367): n is a, c, g, or t

SEQ ID NO: 278312 - DNA, 1840 bp, Homo Sapiens; identical to SEQ ID NO: 257939
  misc_feature (213)..(213): n is a, c, g, or t
  misc_feature (1647)..(1685): n is a, c, g, or t
  misc_feature (1687)..(1692): n is a, c, g, or t
  misc_feature (1695)..(1723): n is a, c, g, or t

SEQ ID NO: 278313 - DNA, 462 bp, Homo Sapiens; identical to SEQ ID NO: 257940
  misc_feature (388)..(388): n is a, c, g, or t
  misc_feature (416)..(416): n is a, c, g, or t
  misc_feature (423)..(423): n is a, c, g, or t
  misc_feature (446)..(446): n is a, c, g, or t

SEQ ID NO: 278314 - DNA, 502 bp, Homo Sapiens; identical to SEQ ID NO: 257941

SEQ ID NO: 278315 - DNA, 925 bp, Homo Sapiens; identical to SEQ ID NO: 257942
  misc_feature (231)..(286): n is a, c, g, or t

SEQ ID NO: 278316 - DNA, 1112 bp, Homo Sapiens; identical to SEQ ID NO: 257943

SEQ ID NO: 278317 - DNA, 1355 bp, Homo Sapiens; identical to SEQ ID NO: 257946
  misc_feature (1235)..(1235): n is a, c, g, or t
  misc_feature (1252)..(1252): n is a, c, g, or t
  misc_feature (1267)..(1267): n is a, c, g, or t
  misc_feature (1275)..(1275): n is a, c, g, or t
  misc_feature (1283)..(1285): n is a, c, g, or t
  misc_feature (1292)..(1292): n is a, c, g, or t
  misc_feature (1305)..(1305): n is a, c, g, or t
  misc_feature (1322)..(1322): n is a, c, g, or t
  misc_feature (1329)..(1329): n is a, c, g, or t
  misc_feature (1335)..(1335): n is a, c, g, or t
  misc_feature (1337)..(1337): n is a, c, g, or t
  misc_feature (1344)..(1344): n is a, c, g, or t
  misc_feature (1348)..(1348): n is a, c, g, or t

SEQ ID NO: 278318 - DNA, 1131 bp, Homo Sapiens; identical to SEQ ID NO: 257947
  misc_feature (7)..(7): n is a, c, g, or t
  misc_feature (11)..(11): n is a, c, g, or t
  misc_feature (24)..(24): n is a, c, g, or t
  misc_feature (28)..(28): n is a, c, g, or t
  misc_feature (46)..(46): n is a, c, g, or t
  misc_feature (48)..(49): n is a, c, g, or t
  misc_feature (58)..(58): n is a, c, g, or t
  misc_feature (64)..(64): n is a, c, g, or t
  misc_feature (69)..(69): n is a, c, g, or t
  misc_feature (71)..(71): n is a, c, g, or t
  misc_feature (78)..(78): n is a, c, g, or t
  misc_feature (81)..(81): n is a, c, g, or t
  misc_feature (84)..(84): n is a, c, g, or t
  misc_feature (86)..(86): n is a, c, g, or t
  misc_feature (89)..(89): n is a, c, g, or t
  misc_feature (94)..(94): n is a, c, g, or t
  misc_feature (99)..(99): n is a, c, g, or t
  misc_feature (111)..(111): n is a, c, g, or t
  misc_feature (122)..(122): n is a, c, g, or t
  misc_feature (127)..(127): n is a, c, g, or t
  misc_feature (131)..(131): n is a, c, g, or t
  misc_feature (136)..(136): n is a, c, g, or t
  misc_feature (235)..(293): n is a, c, g, or t
  misc_feature (382)..(433): n is a, c, g, or t

SEQ ID NO: 278319 - DNA, 1072 bp, Homo Sapiens; identical to SEQ ID NO: 257952
  misc_feature (922)..(922): n is a, c, g, or t
  misc_feature (980)..(980): n is a, c, g, or t
  misc_feature (990)..(990): n is a, c, g, or t
  misc_feature (1000)..(1000): n is a, c, g, or t
  misc_feature (1011)..(1011): n is a, c, g, or t
  misc_feature (1018)..(1018): n is a, c, g, or t
  misc_feature (1026)..(1027): n is a, c, g, or t
  misc_feature (1032)..(1032): n is a, c, g, or t
  misc_feature (1037)..(1037): n is a, c, g, or t
  misc_feature (1039)..(1039): n is a, c, g, or t
  misc_feature (1043)..(1043): n is a, c, g, or t
  misc_feature (1045)..(1045): n is a, c, g, or t
  misc_feature (1050)..(1050): n is a, c, g, or t
  misc_feature (1056)..(1056): n is a, c, g, or t
  misc_feature (1058)..(1058): n is a, c, g, or t
  misc_feature (1064)..(1064): n is a, c, g, or t

SEQ ID NO: 278320 - DNA, 1001 bp, Homo Sapiens; identical to SEQ ID NO: 257953

SEQ ID NO: 278321 - DNA, 1004 bp, Homo Sapiens; identical to SEQ ID NO: 257954
  misc_feature (893)..(951): n is a, c, g, or t

SEQ ID NO: 278322 - DNA, 394 bp, Homo Sapiens; identical to SEQ ID NO: 257955
  misc_feature (40)..(40): n is a, c, g, or t
  misc_feature (66)..(66): n is a, c, g, or t

SEQ ID NO: 278323 - DNA, 1916 bp, Homo Sapiens; identical to SEQ ID NO: 257957
  misc_feature (38)..(38): n is a, c, g, or t

SEQ ID NO: 278324 - DNA, 512 bp, Homo Sapiens; identical to SEQ ID NO: 257958
  misc_feature (67)..(67): n is a, c, g, or t
  misc_feature (84)..(84): n is a, c, g, or t

SEQ ID NO: 278325 - DNA, 468 bp, Homo Sapiens; identical to SEQ ID NO: 257959

SEQ ID NO: 278326 - DNA, 441 bp, Homo Sapiens; identical to SEQ ID NO: 257960

SEQ ID NO: 278327 - DNA, 1034 bp, Homo Sapiens; identical to SEQ ID NO: 257962

SEQ ID NO: 278328 - DNA, 1036 bp, Homo Sapiens; identical to SEQ ID NO: 257963

SEQ ID NO: 278329 - DNA, 1324 bp, Homo Sapiens; identical to SEQ ID NO: 257966
  misc_feature (946)..(946): n is a, c, g, or t

SEQ ID NO: 278330 - DNA, 917 bp, Homo Sapiens; identical to SEQ ID NO: 257967
  misc_feature (3)..(3): n is a, c, g, or t
  misc_feature (10)..(10): n is a, c, g, or t
  misc_feature (14)..(14): n is a, c, g, or t
  misc_feature (27)..(27): n is a, c, g, or t
  misc_feature (34)..(34): n is a, c, g, or t
  misc_feature (37)..(37): n is a, c, g, or t
  misc_feature (99)..(99): n is a, c, g, or t
  misc_feature (102)..(102): n is a, c, g, or t
  misc_feature (203)..(203): n is a, c, g, or t
  misc_feature (287)..(287): n is a, c, g, or t
  misc_feature (315)..(315): n is a, c, g, or t
  misc_feature (322)..(322): n is a, c, g, or t
  misc_feature (331)..(331): n is a, c, g, or t
  misc_feature (340)..(340): n is a, c, g, or t
  misc_feature (346)..(346): n is a, c, g, or t
  misc_feature (348)..(348): n is a, c, g, or t
  misc_feature (351)..(351): n is a, c, g, or t
  misc_feature (354)..(354): n is a, c, g, or t
  misc_feature (367)..(367): n is a, c, g, or t
  misc_feature (398)..(398): n is a, c, g, or t
  misc_feature (440)..(440): n is a, c, g, or t
  misc_feature (450)..(450): n is a, c, g, or t
  misc_feature (456)..(456): n is a, c, g, or t
  misc_feature (458)..(458): n is a, c, g, or t
  misc_feature (461)..(461): n is a, c, g, or t
  misc_feature (476)..(477): n is a, c, g, or t
  misc_feature (487)..(487): n is a, c, g, or t
  misc_feature (493)..(493): n is a, c, g, or t

SEQ ID NO: 278331 - DNA, 973 bp, Homo Sapiens; identical to SEQ ID NO: 257968
  misc_feature (882)..(882): n is a, c, g, or t
  misc_feature (888)..(888): n is a, c, g, or t
  misc_feature (891)..(891): n is a, c, g, or t
  misc_feature (905)..(905): n is a, c, g, or t
  misc_feature (910)..(910): n is a, c, g, or t
  misc_feature (918)..(918): n is a, c, g, or t
  misc_feature (921)..(921): n is a, c, g, or t
  misc_feature (924)..(924): n is a, c, g, or t
  misc_feature (951)..(951): n is a, c, g, or t
  misc_feature (962)..(962): n is a, c, g, or t

SEQ ID NO: 278332 - DNA, 1801 bp, Homo Sapiens; identical to SEQ ID NO: 257969

SEQ ID NO: 278333 - DNA, 1029 bp, Homo Sapiens; identical to SEQ ID NO: 257970
  misc_feature (872)..(872): n is a, c, g, or t
  misc_feature (889)..(889): n is a, c, g, or t
  misc_feature (923)..(923): n is a, c, g, or t
  misc_feature (928)..(928): n is a, c, g, or t
  misc_feature (935)..(935): n is a, c, g, or t
  misc_feature (961)..(961): n is a, c, g, or t
  misc_feature (973)..(973): n is a, c, g, or t
  misc_feature (977)..(977): n is a, c, g, or t
  misc_feature (980)..(980): n is a, c, g, or t
  misc_feature (988)..(988): n is a, c, g, or t
  misc_feature (1004)..(1004): n is a, c, g, or t
  misc_feature (1009)..(1010): n is a, c, g, or t
  misc_feature (1021)..(1021): n is a, c, g, or t

SEQ ID NO: 278334 - DNA, 2773 bp, Homo Sapiens; identical to SEQ ID NO: 257971
  misc_feature (2270)..(2287): n is a, c, g, or t
  misc_feature (2665)..(2665): n is a, c, g, or t

SEQ ID NO: 278335 - DNA, 1464 bp, Homo Sapiens; identical to SEQ ID NO: 257974
  misc_feature (37)..(37): n is a, c, g, or t
  misc_feature (53)..(55): n is a, c, g, or t
  misc_feature (132)..(132): n is a, c, g, or t
  misc_feature (1441)..(1441): n is a, c, g, or t

SEQ ID NO: 278336 - DNA, 1036 bp, Homo Sapiens; identical to SEQ ID NO: 257975
  misc_feature (897)..(897): n is a, c, g, or t
  misc_feature (965)..(965): n is a, c, g, or t
  misc_feature (982)..(982): n is a, c, g, or t
  misc_feature (985)..(985): n is a, c, g, or t
  misc_feature (993)..(993): n is a, c, g, or t
  misc_feature (995)..(995): n is a, c, g, or t
  misc_feature (998)..(998): n is a, c, g, or t
  misc_feature (1007)..(1008): n is a, c, g, or t
  misc_feature (1020)..(1020): n is a, c, g, or t
  misc_feature (1031)..(1031): n is a, c, g, or t

SEQ ID NO: 278337 - DNA, 1341 bp, Homo Sapiens; identical to SEQ ID NO: 257980
  misc_feature (188)..(188): n is a, c, g, or t
  misc_feature (1140)..(1223): n is a, c, g, or t

SEQ ID NO: 278338 - DNA, 991 bp, Homo Sapiens; identical to SEQ ID NO: 257981

SEQ ID NO: 278339 - DNA, 602 bp, Homo Sapiens; identical to SEQ ID NO: 257985
  misc_feature (64)..(83): n is a, c, g, or t

SEQ ID NO: 278340 - DNA, 1467 bp, Homo Sapiens; identical to SEQ ID NO: 257986

SEQ ID NO: 278341 - DNA, 991 bp, Homo Sapiens; identical to SEQ ID NO: 257987
  misc_feature (20)..(20): n is a, c, g, or t
  misc_feature (968)..(968): n is a, c, g, or t
  misc_feature (975)..(975): n is a, c, g, or t

SEQ ID NO: 278342 - DNA, 478 bp, Homo Sapiens; identical to SEQ ID NO: 257988

SEQ ID NO: 278343 - DNA, 866 bp, Homo Sapiens; identical to SEQ ID NO: 257990
  misc_feature (6)..(6): n is a, c, g, or t
  misc_feature (9)..(9): n is a, c, g, or t
  misc_feature (12)..(12): n is a, c, g, or t
  misc_feature (18)..(18): n is a, c, g, or t
  misc_feature (22)..(22): n is a, c, g, or t
  misc_feature (42)..(42): n is a, c, g, or t
  misc_feature (46)..(47): n is a, c, g, or t
  misc_feature (49)..(49): n is a, c, g, or t
  misc_feature (56)..(56): n is a, c, g, or t
  misc_feature (58)..(58): n is a, c, g, or t
  misc_feature (62)..(62): n is a, c, g, or t
  misc_feature (64)..(64): n is a, c, g, or t
  misc_feature (76)..(76): n is a, c, g, or t
  misc_feature (88)..(90): n is a, c, g, or t
  misc_feature (128)..(128): n is a, c, g, or t
  misc_feature (131)..(131): n is a, c, g, or t
  misc_feature (539)..(539): n is a, c, g, or t

SEQ ID NO: 278344 - DNA, 947 bp, Homo Sapiens; identical to SEQ ID NO: 257991
  misc_feature (19)..(19): n is a, c, g, or t

SEQ ID NO: 278345 - DNA, 996 bp, Homo Sapiens; identical to SEQ ID NO: 257992
  misc_feature (8)..(8): n is a, c, g, or t
  misc_feature (17)..(17): n is a, c, g, or t
  misc_feature (347)..(355): n is a, c, g, or t
  misc_feature (982)..(982): n is a, c, g, or t

SEQ ID NO: 278346 - DNA, 807 bp, Homo Sapiens; identical to SEQ ID NO: 257993

SEQ ID NO: 278347 - DNA, 801 bp, Homo Sapiens; identical to SEQ ID NO: 257994
  misc_feature (189)..(203): n is a, c, g, or t
  misc_feature (671)..(681): n is a, c, g, or t

SEQ ID NO: 278348 - DNA, 897 bp, Homo Sapiens; identical to SEQ ID NO: 257997
  misc_feature (54)..(54): n is a, c, g, or t
  misc_feature (56)..(56): n is a, c, g, or t
  misc_feature (843)..(843): n is a, c, g, or t
  misc_feature (853)..(854): n is a, c, g, or t
  misc_feature (879)..(879): n is a, c, g, or t
  misc_feature (890)..(890): n is a, c, g, or t

SEQ ID NO: 278349 - DNA, 1331 bp, Homo Sapiens; identical to SEQ ID NO: 257998
  misc_feature (1085)..(1085): n is a, c, g, or t
  misc_feature (1088)..(1088): n is a, c, g, or t
  misc_feature (1098)..(1098): n is a, c, g, or t
  misc_feature (1146)..(1146): n is a, c, g, or t
  misc_feature (1151)..(1151): n is a, c, g, or t
  misc_feature (1186)..(1186): n is a, c, g, or t
  misc_feature (1210)..(1210): n is a, c, g, or t
  misc_feature (1230)..(1230): n is a, c, g, or t
  misc_feature (1250)..(1250): n is a, c, g, or t
  misc_feature (1254)..(1254): n is a, c, g, or t

SEQ ID NO: 278350 - DNA, 889 bp, Homo Sapiens; identical to SEQ ID NO: 258000
  misc_feature (7)..(7): n is a, c, g, or t
  misc_feature (19)..(19): n is a, c, g, or t
  misc_feature (25)..(25): n is a, c, g, or t
  misc_feature (38)..(38): n is a, c, g, or t
  misc_feature (48)..(48): n is a, c, g, or t
  misc_feature (50)..(50): n is a, c, g, or t
  misc_feature (56)..(57): n is a, c, g, or t
  misc_feature (63)..(63): n is a, c, g, or t
  misc_feature (65)..(65): n is a, c, g, or t
  misc_feature (76)..(77): n is a, c, g, or t
  misc_feature (79)..(79): n is a, c, g, or t
  misc_feature (85)..(85): n is a, c, g, or t
  misc_feature (101)..(101): n is a, c, g, or t
  misc_feature (104)..(104): n is a, c, g, or t
  misc_feature (106)..(106): n is a, c, g, or t
  misc_feature (108)..(108): n is a, c, g, or t
  misc_feature (122)..(122): n is a, c, g, or t
  misc_feature (126)..(127): n is a, c, g, or t
  misc_feature (129)..(129): n is a, c, g, or t
  misc_feature (134)..(134): n is a, c, g, or t
  misc_feature (140)..(141): n is a, c, g, or t
  misc_feature (144)..(144): n is a, c, g, or t
  misc_feature (149)..(149): n is a, c, g, or t
  misc_feature (158)..(158): n is a, c, g, or t
  misc_feature (162)..(162): n is a, c, g, or t
  misc_feature (165)..(165): n is a, c, g, or t
  misc_feature (180)..(236): n is a, c, g, or t
  misc_feature (252)..(254): n is a, c, g, or t
  misc_feature (268)..(268): n is a, c, g, or t
  misc_feature (270)..(271): n is a, c, g, or t
  misc_feature (275)..(277): n is a, c, g, or t
  misc_feature (282)..(282): n is a, c, g, or t
  misc_feature (284)..(286): n is a, c, g, or t
  misc_feature (290)..(290): n is a, c, g, or t
  misc_feature (295)..(295): n is a, c, g, or t
  misc_feature (299)..(303): n is a, c, g, or t
  misc_feature (305)..(307): n is a, c, g, or t
  misc_feature (311)..(314): n is a, c, g, or t
  misc_feature (318)..(321): n is a, c, g, or t
  misc_feature (323)..(326): n is a, c, g, or t
  misc_feature (328)..(328): n is a, c, g, or t
  misc_feature (332)..(333): n is a, c, g, or t
  misc_feature (335)..(336): n is a, c, g, or t
  misc_feature (338)..(340): n is a, c, g, or t
  misc_feature (344)..(345): n is a, c, g, or t
  misc_feature (348)..(350): n is a, c, g, or t
  misc_feature (353)..(357): n is a, c, g, or t
  misc_feature (360)..(361): n is a, c, g, or t
  misc_feature (365)..(365): n is a, c, g, or t
  misc_feature (378)..(378): n is a, c, g, or t
  misc_feature (385)..(385): n is a, c, g, or t
  misc_feature (388)..(388): n is a, c, g, or t
  misc_feature (392)..(393): n is a, c, g, or t
  misc_feature (396)..(396): n is a, c, g, or t
  misc_feature (398)..(398): n is a, c, g, or t
  misc_feature (400)..(400): n is a, c, g, or t
  misc_feature (404)..(405): n is a, c, g, or t
  misc_feature (411)..(413): n is a, c, g, or t
  misc_feature (419)..(419): n is a, c, g, or t
  misc_feature (440)..(440): n is a, c, g, or t
  misc_feature (442)..(442): n is a, c, g, or t
  misc_feature (468)..(468): n is a, c, g, or t
  misc_feature (476)..(476): n is a, c, g, or t
  misc_feature (481)..(481): n is a, c, g, or t
  misc_feature (827)..(844): n is a, c, g, or t

SEQ ID NO: 278351 - DNA, 2138 bp, Homo Sapiens; identical to SEQ ID NO: 258001
  misc_feature (89)..(89): n is a, c, g, or t
  misc_feature (205)..(205): n is a, c, g, or t
  misc_feature (278)..(278): n is a, c, g, or t
  misc_feature (322)..(322): n is a, c, g, or t
  misc_feature (347)..(347): n is a, c, g, or t
  misc_feature (393)..(393): n is a, c, g, or t
  misc_feature (398)..(398): n is a, c, g, or t
  misc_feature (402)..(402): n is a, c, g, or t
  misc_feature (422)..(422): n is a, c, g, or t
  misc_feature (561)..(561): n is a, c, g, or t
  misc_feature (574)..(574): n is a, c, g, or t
  misc_feature (576)..(577): n is a, c, g, or t
  misc_feature (580)..(580): n is a, c, g, or t
  misc_feature (583)..(583): n is a, c, g, or t
  misc_feature (599)..(599): n is a, c, g, or t
  misc_feature (632)..(632): n is a, c, g, or t
  misc_feature (635)..(635): n is a, c, g, or t
  misc_feature (637)..(637): n is a, c, g, or t
  misc_feature (640)..(640): n is a, c, g, or t
  misc_feature (646)..(646): n is a, c, g, or t
  misc_feature (684)..(685): n is a, c, g, or t
  misc_feature (707)..(707): n is a, c, g, or t
  misc_feature (1768)..(1768): n is a, c, g, or t
  misc_feature (2037)..(2072): n is a, c, g, or t

SEQ ID NO: 278352 - DNA, 1108 bp, Homo Sapiens; identical to SEQ ID NO: 258002
  misc_feature (724)..(724): n is a, c, g, or t

SEQ ID NO: 278353 - DNA, 1470 bp, Homo Sapiens; identical to SEQ ID NO: 258003
  misc_feature (1238)..(1238): n is a, c, g, or t

SEQ ID NO: 278354 - DNA, 1598 bp, Homo Sapiens; identical to SEQ ID NO: 258005
  misc_feature (1569)..(1569): n is a, c, g, or t

SEQ ID NO: 278355 - DNA, 971 bp, Homo Sapiens; identical to SEQ ID NO: 258006

SEQ ID NO: 278356 - DNA, 777 bp, Homo Sapiens; identical to SEQ ID NO: 258008
  misc_feature (24)..(24): n is a, c, g, or t
  misc_feature (155)..(155): n is a, c, g, or t

SEQ ID NO: 278357 - DNA, 1511 bp, Homo Sapiens; identical to SEQ ID NO: 258009

SEQ ID NO: 278358 - DNA, 475 bp, Homo Sapiens; identical to SEQ ID NO: 258010
  misc_feature (24)..(24): n is a, c, g, or t
  misc_feature (30)..(30): n is a, c, g, or t
  misc_feature (46)..(46): n is a, c, g, or t
  misc_feature (69)..(69): n is a, c, g, or t
  misc_feature (79)..(79): n is a, c, g, or t
  misc_feature (107)..(107): n is a, c, g, or t

SEQ ID NO: 278359 - DNA, 477 bp, Homo Sapiens; identical to SEQ ID NO: 258011
  misc_feature (22)..(22): n is a, c, g, or t
  misc_feature (64)..(64): n is a, c, g, or t

SEQ ID NO: 278360 - DNA, 940 bp, Homo Sapiens; identical to SEQ ID NO: 258014

SEQ ID NO: 278361 - DNA, 1022 bp, Homo Sapiens; identical to SEQ ID NO: 258015
  misc_feature (226)..(327): n is a, c, g, or t
  misc_feature (333)..(343): n is a, c, g, or t
  misc_feature (483)..(494): n is a, c, g, or t
  misc_feature (520)..(530): n is a, c, g, or t
  misc_feature (567)..(578): n is a, c, g, or t

SEQ ID NO: 278362 - DNA, 1536 bp, Homo Sapiens; identical to SEQ ID NO: 258016
  misc_feature (656)..(656): n is a, c, g, or t
  misc_feature (664)..(664): n is a, c, g, or t
  misc_feature (674)..(675): n is a, c, g, or t
  misc_feature (678)..(678): n is a, c, g, or t
  misc_feature (683)..(684): n is a, c, g, or t
  misc_feature (686)..(687): n is a, c, g, or t
  misc_feature (693)..(693): n is a, c, g, or t
  misc_feature (696)..(697): n is a, c, g, or t
  misc_feature (700)..(700): n is a, c, g, or t
  misc_feature (702)..(702): n is a, c, g, or t
  misc_feature (705)..(705): n is a, c, g, or t
  misc_feature (707)..(707): n is a, c, g, or t
  misc_feature (712)..(712): n is a, c, g, or t

SEQ ID NO: 278363 - DNA, 1044 bp, Homo Sapiens; identical to SEQ ID NO: 258017
  misc_feature (982)..(982): n is a, c, g, or t
  misc_feature (1018)..(1018): n is a, c, g, or t
  misc_feature (1025)..(1025): n is a, c, g, or t
  misc_feature (1028)..(1028): n is a, c, g, or t
  misc_feature (1042)..(1042): n is a, c, g, or t

SEQ ID NO: 278364 - DNA, 1510 bp, Homo Sapiens; identical to SEQ ID NO: 258030

SEQ ID NO: 278365 - DNA, 420 bp, Homo Sapiens; identical to SEQ ID NO: 258031

SEQ ID NO: 278366 - DNA, 1527 bp, Homo Sapiens; identical to SEQ ID NO: 258033

SEQ ID NO: 278367 - DNA, 1505 bp, Homo Sapiens; identical to SEQ ID NO: 258034
  misc_feature (205)..(205): n is a, c, g, or t

SEQ ID NO: 278368 - DNA, 410 bp, Homo Sapiens; identical to SEQ ID NO: 258035
  misc_feature (19)..(19): n is a, c, g, or t

SEQ ID NO: 278369 - DNA, 1650 bp, Homo Sapiens; identical to SEQ ID NO: 258037
  misc_feature (11)..(11): n is a, c, g, or t
  misc_feature (46)..(46): n is a, c, g, or t
  misc_feature (57)..(57): n is a, c, g, or t
  misc_feature (62)..(62): n is a, c, g, or t
  misc_feature (69)..(69): n is a, c, g, or t
  misc_feature (126)..(126): n is a, c, g, or t
  misc_feature (163)..(163): n is a, c, g, or t
  misc_feature (195)..(195): n is a, c, g, or t
  misc_feature (594)..(594): n is a, c, g, or t
  misc_feature (596)..(596): n is a, c, g, or t
  misc_feature (695)..(695): n is a, c, g, or t
  misc_feature (761)..(761): n is a, c, g, or t
  misc_feature (766)..(766): n is a, c, g, or t
  misc_feature (770)..(770): n is a, c, g, or t
  misc_feature (773)..(775): n is a, c, g, or t
  misc_feature (777)..(778): n is a, c, g, or t
  misc_feature (780)..(780): n is a, c, g, or t
  misc_feature (782)..(782): n is a, c, g, or t
  misc_feature (786)..(786): n is a, c, g, or t
  misc_feature (795)..(795): n is a, c, g, or t
  misc_feature (801)..(801): n is a, c, g, or t
  misc_feature (809)..(809): n is a, c, g, or t
  misc_feature (854)..(854): n is a, c, g, or t
  misc_feature (1580)..(1580): n is a, c, g, or t

SEQ ID NO: 278370 - DNA, 1190 bp, Homo Sapiens; identical to SEQ ID NO: 258038
  misc_feature (957)..(957): n is a, c, g, or t
  misc_feature (964)..(965): n is a, c, g, or t
  misc_feature (979)..(979): n is a, c, g, or t
  misc_feature (981)..(981): n is a, c, g, or t
  misc_feature (998)..(998): n is a, c, g, or t
  misc_feature (1001)..(1001): n is a, c, g, or t
  misc_feature (1026)..(1026): n is a, c, g, or t
  misc_feature (1032)..(1032): n is a, c, g, or t
  misc_feature (1035)..(1035): n is a, c, g, or t
  misc_feature (1048)..(1049): n is a, c, g, or t
  misc_feature (1053)..(1053): n is a, c, g, or t
  misc_feature (1078)..(1078): n is a, c, g, or t
  misc_feature (1087)..(1087): n is a, c, g, or t
  misc_feature (1091)..(1091): n is a, c, g, or t
  misc_feature (1094)..(1094): n is a, c, g, or t
  misc_feature (1096)..(1096): n is a, c, g, or t
  misc_feature (1098)..(1099): n is a, c, g, or t
  misc_feature (1113)..(1113): n is a, c, g, or t
  misc_feature (1115)..(1116): n is a, c, g, or t
  misc_feature (1123)..(1123): n is a, c, g, or t
  misc_feature (1128)..(1128): n is a, c, g, or t
  misc_feature (1133)..(1133): n is a, c, g, or t
  misc_feature (1144)..(1144): n is a, c, g, or t
  misc_feature (1155)..(1155): n is a, c, g, or t
  misc_feature (1166)..(1166): n is a, c, g, or t
  misc_feature (1168)..(1168): n is a, c, g, or t
  misc_feature (1176)..(1176): n is a, c, g, or t

SEQ ID NO: 278371 - DNA, 1842 bp, Homo Sapiens; identical to SEQ ID NO: 258042
  misc_feature (1038)..(1038): n is a, c, g, or t
  misc_feature (1461)..(1461): n is a, c, g, or t

SEQ ID NO: 278372 - DNA, 877 bp, Homo Sapiens; identical to SEQ ID NO: 258043
  misc_feature (5)..(5): n is a, c, g, or t
  misc_feature (11)..(11): n is a, c, g, or t
  misc_feature (13)..(13): n is a, c, g, or t
  misc_feature (15)..(16): n is a, c, g, or t
  misc_feature (18)..(18): n is a, c, g, or t
  misc_feature (20)..(20): n is a, c, g, or t
  misc_feature (30)..(30): n is a, c, g, or t
  misc_feature (56)..(56): n is a, c, g, or t
  misc_feature (58)..(59): n is a, c, g, or t
  misc_feature (66)..(67): n is a, c, g, or t
  misc_feature (74)..(74): n is a, c, g, or t
  misc_feature (76)..(76): n is a, c, g, or t
  misc_feature (79)..(79): n is a, c, g, or t
  misc_feature (86)..(86): n is a, c, g, or t

SEQ ID NO: 278373 - DNA, 629 bp, Homo Sapiens; identical to SEQ ID NO: 258047

SEQ ID NO: 278374 - DNA, 2463 bp, Homo Sapiens; identical to SEQ ID NO: 258048

SEQ ID NO: 278375 - DNA, 923 bp, Homo Sapiens; identical to SEQ ID NO: 258049

SEQ ID NO: 278376 - DNA, 592 bp, Homo Sapiens; identical to SEQ ID NO: 258050
  misc_feature (25)..(25): n is a, c, g, or t
  misc_feature (47)..(47): n is a, c, g, or t
  misc_feature (56)..(56): n is a, c, g, or t
  misc_feature (93)..(127): n is a, c, g, or t
  misc_feature (408)..(418): n is a, c, g, or t

SEQ ID NO: 278377 - DNA, 603 bp, Homo Sapiens; identical to SEQ ID NO: 258051

SEQ ID NO: 278378 - DNA, 1065 bp, Homo Sapiens; identical to SEQ ID NO: 258052

SEQ ID NO: 278379 - DNA, 273 bp, Homo Sapiens; identical to SEQ ID NO: 258053
  misc_feature (206)..(206): n is a, c, g, or t

SEQ ID NO: 278380 - DNA, 720 bp, Homo Sapiens; identical to SEQ ID NO: 258056

SEQ ID NO: 278381 - DNA, 939 bp, Homo Sapiens; identical to SEQ ID NO: 258057

SEQ ID NO: 278382 - DNA, 333 bp, Homo Sapiens; identical to SEQ ID NO: 258058
  misc_feature (312)..(312): n is a, c, g, or t

SEQ ID NO: 278383 - DNA, 668 bp, Homo Sapiens; identical to SEQ ID NO: 258059
  misc_feature (41)..(41): n is a, c, g, or t
  misc_feature (79)..(81): n is a, c, g, or t
  misc_feature (83)..(85): n is a, c, g, or t
  misc_feature (87)..(87): n is a, c, g, or t
  misc_feature (357)..(357): n is a, c, g, or t

SEQ ID NO: 278384 - DNA, 1137 bp, Homo Sapiens; identical to SEQ ID NO: 258066

SEQ ID NO: 278385 - DNA, 1184 bp, Homo Sapiens; identical to SEQ ID NO: 258067

SEQ ID NO: 278386 - DNA, 994 bp, Homo Sapiens; identical to SEQ ID NO: 258068
  misc_feature (776)..(776): n is a, c, g, or t

SEQ ID NO: 278387 - DNA, 3276 bp, Homo Sapiens; identical to SEQ ID NO: 258069
  misc_feature (1957)..(1957): n is a, c, g, or t
  misc_feature (2665)..(2832): n is a, c, g, or t
  misc_feature (2843)..(2858): n is a, c, g, or t
  misc_feature (2893)..(2949): n is a, c, g, or t
  misc_feature (2966)..(3014): n is a, c, g, or t
  misc_feature (3126)..(3147): n is a, c, g, or t
  misc_feature (3172)..(3221): n is a, c, g, or t

SEQ ID NO: 278388 - DNA, 550 bp, Homo Sapiens; identical to SEQ ID NO: 258070

SEQ ID NO: 278389 - DNA, 793 bp, Homo Sapiens; identical to SEQ ID NO: 258075

SEQ ID NO: 278390 - DNA, 615 bp, Homo Sapiens; identical to SEQ ID NO: 258076
  misc_feature (11)..(11): n is a, c, g, or t
  misc_feature (194)..(194): n is a, c, g, or t

SEQ ID NO: 278391 - DNA, 438 bp, Homo Sapiens; identical to SEQ ID NO: 258077
  misc_feature (43)..(43): n is a, c, g, or t
  misc_feature (50)..(50): n is a, c, g, or t
  misc_feature (93)..(93): n is a, c, g, or t

SEQ ID NO: 278392 - DNA, 448 bp, Homo Sapiens; identical to SEQ ID NO: 258078
  misc_feature (392)..(392): n is a, c, g, or t
  misc_feature (400)..(400): n is a, c, g, or t

SEQ ID NO: 278393 - DNA, 985 bp, Homo Sapiens; identical to SEQ ID NO: 258082
  misc_feature (50)..(67): n is a, c, g, or t

SEQ ID NO: 278394 - DNA, 489 bp, Homo Sapiens; identical to SEQ ID NO: 258083
  misc_feature (45)..(45): n is a, c, g, or t
  misc_feature (185)..(185): n is a, c, g, or t

SEQ ID NO: 278395 - DNA, 1131 bp, Homo Sapiens; identical to SEQ ID NO: 258086
  misc_feature (251)..(277): n is a, c, g, or t

SEQ ID NO: 278396 - DNA, 2082 bp, Homo Sapiens; identical to SEQ ID NO: 258087

SEQ ID NO: 278397 - DNA, 1807 bp, Homo Sapiens; identical to SEQ ID NO: 258089
  misc_feature (31)..(31): n is a, c, g, or t

SEQ ID NO: 278398 - DNA, 908 bp, Homo Sapiens; identical to SEQ ID NO: 258090

SEQ ID NO: 278399 - DNA, 978 bp, Homo Sapiens; identical to SEQ ID NO: 258093
  misc_feature (283)..(283): n is a, c, g, or t
  misc_feature (399)..(399): n is a, c, g, or t

SEQ ID NO: 278400 - DNA, 399 bp, Homo Sapiens; identical to SEQ ID NO: 258094
  misc_feature (328)..(328): n is a, c, g, or t
  misc_feature (362)..(362): n is a, c, g, or t

SEQ ID NO: 278401 - DNA, 1051 bp, Homo Sapiens; identical to SEQ ID NO: 258104
  misc_feature (262)..(262): n is a, c, g, or t
  misc_feature (577)..(577): n is a, c, g, or t
  misc_feature (624)..(624): n is a, c, g, or t
  misc_feature (825)..(825): n is a, c, g, or t
  misc_feature (829)..(829): n is a, c, g, or t
  misc_feature (851)..(851): n is a, c, g, or t
  misc_feature (861)..(861): n is a, c, g, or t
  misc_feature (866)..(866): n is a, c, g, or t
  misc_feature (869)..(869): n is a, c, g, or t
  misc_feature (871)..(871): n is a, c, g, or t
  misc_feature (889)..(889): n is a, c, g, or t
  misc_feature (893)..(893): n is a, c, g, or t
  misc_feature (897)..(897): n is a, c, g, or t
  misc_feature (899)..(899): n is a, c, g, or t
  misc_feature (902)..(902): n is a, c, g, or t
  misc_feature (906)..(906): n is a, c, g, or t
  misc_feature (920)..(920): n is a, c, g, or t
  misc_feature (926)..(927): n is a, c, g, or t
  misc_feature (937)..(938): n is a, c, g, or t
  misc_feature (957)..(957): n is a, c, g, or t
  misc_feature (959)..(959): n is a, c, g, or t
  misc_feature (961)..(962): n is a, c, g, or t
  misc_feature (975)..(977): n is a, c, g, or t
  misc_feature (983)..(983): n is a, c, g, or t
  misc_feature (986)..(986): n is a, c, g, or t
  misc_feature (992)..(992): n is a, c, g, or t
  misc_feature (1002)..(1002): n is a, c, g, or t
  misc_feature (1017)..(1017): n is a, c, g, or t
  misc_feature (1030)..(1030): n is a, c, g, or t
  misc_feature (1044)..(1044): n is a, c, g, or t

SEQ ID NO: 278402 - DNA, 1071 bp, Homo Sapiens; identical to SEQ ID NO: 258105

SEQ ID NO: 278403 - DNA, 1246 bp, Homo Sapiens; identical to SEQ ID NO: 258107

SEQ ID NO: 278404 - DNA, 572 bp, Homo Sapiens; identical to SEQ ID NO: 258108
  misc_feature (27)..(27): n is a, c, g, or t
  misc_feature (52)..(52): n is a, c, g, or t
  misc_feature (552)..(552): n is a, c, g, or t

SEQ ID NO: 278405 - DNA, 1882 bp, Homo Sapiens; identical to SEQ ID NO: 258109
  misc_feature (70)..(70): n is a, c, g, or t
  misc_feature (97)..(97): n is a, c, g, or t
  misc_feature (106)..(106): n is a, c, g, or t

SEQ ID NO: 278406 - DNA, 432 bp, Homo Sapiens; identical to SEQ ID NO: 258110
  misc_feature (334)..(334): n is a, c, g, or t
  misc_feature (350)..(350): n is a, c, g, or t
  misc_feature (413)..(413): n is a, c, g, or t

SEQ ID NO: 278407 - DNA, 1207 bp, Homo Sapiens; identical to SEQ ID NO: 258111

SEQ ID NO: 278408 - DNA, 2160 bp, Homo Sapiens; identical to SEQ ID NO: 258112
  misc_feature (1978)..(1978): n is a, c, g, or t
  misc_feature (2038)..(2096): n is a, c, g, or t

SEQ ID NO: 278409 - DNA, 932 bp, Homo Sapiens; identical to SEQ ID NO: 258113
  misc_feature (3)..(3): n is a, c, g, or t
  misc_feature (6)..(6): n is a, c, g, or t
  misc_feature (11)..(11): n is a, c, g, or t
  misc_feature (14)..(14): n is a, c, g, or t
  misc_feature (20)..(20): n is a, c, g, or t
  misc_feature (25)..(25): n is a, c, g, or t
  misc_feature (67)..(67): n is a, c, g, or t
  misc_feature (79)..(79): n is a, c, g, or t
  misc_feature (123)..(123): n is a, c, g, or t
  misc_feature (271)..(271): n is a, c, g, or t
  misc_feature (436)..(436): n is a, c, g, or t
  misc_feature (821)..(821): n is a, c, g, or t
  misc_feature (904)..(904): n is a, c, g, or t

SEQ ID NO: 278410 - DNA, 1503 bp, Homo Sapiens; identical to SEQ ID NO: 258114
  misc_feature (1198)..(1198): n is a, c, g, or t
  misc_feature (1285)..(1285): n is a, c, g, or t

SEQ ID NO: 278411 - DNA, 766 bp, Homo Sapiens; identical to SEQ ID NO: 258115

SEQ ID NO: 278412 - DNA, 1916 bp, Homo Sapiens; identical to SEQ ID NO: 258116
  misc_feature (1000)..(1000): n is a, c, g, or t
  misc_feature (1162)..(1162): n is a, c, g, or t
  misc_feature (1195)..(1195): n is a, c, g, or t
  misc_feature (1208)..(1208): n is a, c, g, or t
  misc_feature (1214)..(1214): n is a, c, g, or t
  misc_feature (1298)..(1298): n is a, c, g, or t
  misc_feature (1337)..(1337): n is a, c, g, or t

SEQ ID NO: 278413 - DNA, 571 bp, Homo Sapiens; identical to SEQ ID NO: 258117
  misc_feature (63)..(63): n is a, c, g, or t
  misc_feature (300)..(300): n is a, c, g, or t
  misc_feature (378)..(378): n is a, c, g, or t
  misc_feature (389)..(448): n is a, c, g, or t
  misc_feature (534)..(534): n is a, c, g, or t
  misc_feature (542)..(542): n is a, c, g, or t

SEQ ID NO: 278414 - DNA, 2084 bp, Homo Sapiens; identical to SEQ ID NO: 258123
  misc_feature (863)..(863): n is a, c, g, or t
  misc_feature (1232)..(1240): n is a, c, g, or t
  misc_feature (1894)..(1894): n is a, c, g, or t

SEQ ID NO: 278415 - DNA, 501 bp, Homo Sapiens; identical to SEQ ID NO: 258124
  misc_feature (54)..(54): n is a, c, g, or t
  misc_feature (60)..(61): n is a, c, g, or t
  misc_feature (482)..(482): n is a, c, g, or t

SEQ ID NO: 278416 - DNA, 1623 bp, Homo Sapiens; identical to SEQ ID NO: 258127
  misc_feature (200)..(200): n is a, c, g, or t
  misc_feature (569)..(582): n is a, c, g, or t
  misc_feature (977)..(977): n is a, c, g, or t
  misc_feature (998)..(998): n is a, c, g, or t
  misc_feature (1161)..(1161): n is a, c, g, or t
  misc_feature (1164)..(1164): n is a, c, g, or t
  misc_feature (1193)..(1193): n is a, c, g, or t
  misc_feature (1228)..(1228): n is a, c, g, or t
  misc_feature (1231)..(1231): n is a, c, g, or t
  misc_feature (1258)..(1258): n is a, c, g, or t
  misc_feature (1260)..(1260): n is a, c, g, or t
  misc_feature (1262)..(1262): n is a, c, g, or t
  misc_feature (1264)..(1264): n is a, c, g, or t
  misc_feature (1277)..(1277): n is a, c, g, or t
  misc_feature (1281)..(1281): n is a, c, g, or t
  misc_feature (1284)..(1284): n is a, c, g, or t
  misc_feature (1287)..(1288): n is a, c, g, or t
  misc_feature (1291)..(1291): n is a, c, g, or t
  misc_feature (1294)..(1294): n is a, c, g, or t
  misc_feature (1299)..(1301): n is a, c, g, or t
  misc_feature (1305)..(1305): n is a, c, g, or t
  misc_feature (1310)..(1310): n is a, c, g, or t
  misc_feature (1314)..(1315): n is a, c, g, or t
  misc_feature (1352)..(1352): n is a, c, g, or t
  misc_feature (1356)..(1356): n is a, c, g, or t
  misc_feature (1449)..(1449): n is a, c, g, or t
  misc_feature (1452)..(1453): n is a, c, g, or t
  misc_feature (1610)..(1613): n is a, c, g, or t

SEQ ID NO: 278417 - DNA, 658 bp, Homo Sapiens; identical to SEQ ID NO: 258128

SEQ ID NO: 278418 - DNA, 1007 bp, Homo Sapiens; identical to SEQ ID NO: 258129
  misc_feature (31)..(31): n is a, c, g, or t
  misc_feature (70)..(70): n is a, c, g, or t
  misc_feature (94)..(94): n is a, c, g, or t
  misc_feature (103)..(103): n is a, c, g, or t
  misc_feature (121)..(121): n is a, c, g, or t
  misc_feature (156)..(156): n is a, c, g, or t
  misc_feature (762)..(774): n is a, c, g, or t
  misc_feature (783)..(848): n is a, c, g, or t
  misc_feature (850)..(850): n is a, c, g, or t
  misc_feature (856)..(856): n is a, c, g, or t
  misc_feature (858)..(858): n is a, c, g, or t
  misc_feature (864)..(864): n is a, c, g, or t
  misc_feature (871)..(871): n is a, c, g, or t
  misc_feature (883)..(883): n is a, c, g, or t
  misc_feature (890)..(890): n is a, c, g, or t
  misc_feature (895)..(895): n is a, c, g, or t
  misc_feature (904)..(904): n is a, c, g, or t
  misc_feature (907)..(907): n is a, c, g, or t
  misc_feature (911)..(911): n is a, c, g, or t
  misc_feature (913)..(914): n is a, c, g, or t
  misc_feature (916)..(941): n is a, c, g, or t
  misc_feature (944)..(944): n is a, c, g, or t
  misc_feature (946)..(947): n is a, c, g, or t
  misc_feature (953)..(954): n is a, c, g, or t
  misc_feature (958)..(958): n is a, c, g, or t
  misc_feature (961)..(961): n is a, c, g, or t
  misc_feature (967)..(967): n is a, c, g, or t
  misc_feature (971)..(972): n is a, c, g, or t
  misc_feature (974)..(974): n is a, c, g, or t
  misc_feature (979)..(979): n is a, c, g, or t
  misc_feature (991)..(991): n is a, c, g, or t
  misc_feature (993)..(993): n is a, c, g, or t

SEQ ID NO: 278419 - DNA, 395 bp, Homo Sapiens; identical to SEQ ID NO: 258130
  misc_feature (341)..(341): n is a, c, g, or t
  misc_feature (361)..(361): n is a, c, g, or t
  misc_feature (380)..(380): n is a, c, g, or t

SEQ ID NO: 278420 - DNA, 1054 bp, Homo Sapiens; identical to SEQ ID NO: 258134
  misc_feature (43)..(43): n is a, c, g, or t
  misc_feature (1017)..(1017): n is a, c, g, or t
  misc_feature (1035)..(1035): n is a, c, g, or t
  misc_feature (1049)..(1049): n is a, c, g, or t

SEQ ID NO: 278421 - DNA, 1446 bp, Homo Sapiens; identical to SEQ ID NO: 258135
  misc_feature (1305)..(1305): n is a, c, g, or t

SEQ ID NO: 278422 - DNA, 942 bp, Homo Sapiens; identical to SEQ ID NO: 258136

SEQ ID NO: 278423 - DNA, 1553 bp, Homo Sapiens; identical to SEQ ID NO: 258137
  misc_feature (1271)..(1324): n is a, c, g, or t
  misc_feature (1337)..(1375): n is a, c, g, or t

SEQ ID NO: 278424 - DNA, 1484 bp, Homo Sapiens; identical to SEQ ID NO: 258141
  misc_feature (929)..(929): n is a, c, g, or t
  misc_feature (939)..(939): n is a, c, g, or t
  misc_feature (945)..(945): n is a, c, g, or t
  misc_feature (984)..(984): n is a, c, g, or t
  misc_feature (1006)..(1006): n is a, c, g, or t
  misc_feature (1110)..(1110): n is a, c, g, or t
  misc_feature (1164)..(1164): n is a, c, g, or t
  misc_feature (1167)..(1167): n is a, c, g, or t
  misc_feature (1234)..(1234): n is a, c, g, or t
  misc_feature (1248)..(1248): n is a, c, g, or t
  misc_feature (1277)..(1277): n is a, c, g, or t
  misc_feature (1315)..(1315): n is a, c, g, or t
  misc_feature (1388)..(1388): n is a, c, g, or t
  misc_feature (1404)..(1404): n is a, c, g, or t

SEQ ID NO: 278425 - DNA, 1556 bp, Homo Sapiens; identical to SEQ ID NO: 258142
  misc_feature (7)..(7): n is a, c, g, or t
  misc_feature (11)..(11): n is a, c, g, or t
  misc_feature (14)..(19): n is a, c, g, or t

SEQ ID NO: 278426 - DNA, 1483 bp, Homo Sapiens; identical to SEQ ID NO: 258143
  misc_feature (1426)..(1426): n is a, c, g, or t

SEQ ID NO: 278427 - DNA, 1660 bp, Homo Sapiens; identical to SEQ ID NO: 258144
  misc_feature (51)..(60): n is a, c, g, or t
  misc_feature (96)..(105): n is a, c, g, or t
  misc_feature (145)..(163): n is a, c, g, or t
  misc_feature (263)..(263): n is a, c, g, or t
  misc_feature (339)..(351): n is a, c, g, or t
  misc_feature (355)..(355): n is a, c, g, or t
  misc_feature (381)..(396): n is a, c, g, or t
  misc_feature (399)..(451): n is a, c, g, or t

SEQ ID NO: 278428 - DNA, 1070 bp, Homo Sapiens; identical to SEQ ID NO: 258146
  misc_feature (43)..(61): n is a, c, g, or t
  misc_feature (834)..(834): n is a, c, g, or t
  misc_feature (845)..(845): n is a, c, g, or t

SEQ ID NO: 278429 - DNA, 2203 bp, Homo Sapiens; identical to SEQ ID NO: 258147

SEQ ID NO: 278430 - DNA, 859 bp, Homo Sapiens; identical to SEQ ID NO: 258154
  misc_feature (15)..(15): n is a, c, g, or t
  misc_feature (33)..(33): n is a, c, g, or t
  misc_feature (38)..(38): n is a, c, g, or t
  misc_feature (41)..(41): n is a, c, g, or t
  misc_feature (73)..(73): n is a, c, g, or t
  misc_feature (101)..(101): n is a, c, g, or t
  misc_feature (120)..(120): n is a, c, g, or t
  misc_feature (122)..(122): n is a, c, g, or t
  misc_feature (143)..(143): n is a, c, g, or t
  misc_feature (147)..(147): n is a, c, g, or t
  misc_feature (149)..(149): n is a, c, g, or t
  misc_feature (155)..(155): n is a, c, g, or t
  misc_feature (157)..(157): n is a, c, g, or t
  misc_feature (159)..(159): n is a, c, g, or t
  misc_feature (163)..(163): n is a, c, g, or t
  misc_feature (179)..(179): n is a, c, g, or t
  misc_feature (186)..(194): n is a, c, g, or t
  misc_feature (232)..(233): n is a, c, g, or t
  misc_feature (235)..(235): n is a, c, g, or t
  misc_feature (240)..(241): n is a, c, g, or t
  misc_feature (243)..(243): n is a, c, g, or t
  misc_feature (251)..(251): n is a, c, g, or t
  misc_feature (254)..(254): n is a, c, g, or t
  misc_feature (257)..(257): n is a, c, g, or t
  misc_feature (261)..(261): n is a, c, g, or t
  misc_feature (265)..(265): n is a, c, g, or t
  misc_feature (272)..(272): n is a, c, g, or t
  misc_feature (275)..(275): n is a, c, g, or t
  misc_feature (279)..(279): n is a, c, g, or t
  misc_feature (301)..(301): n is a, c, g, or t
  misc_feature (309)..(309): n is a, c, g, or t
  misc_feature (315)..(315): n is a, c, g, or t
  misc_feature (318)..(318): n is a, c, g, or t
  misc_feature (324)..(324): n is a, c, g, or t
  misc_feature (335)..(335): n is a, c, g, or t
  misc_feature (349)..(350): n is a, c, g, or t
  misc_feature (388)..(388): n is a, c, g, or t
  misc_feature (405)..(405): n is a, c, g, or t
  misc_feature (477)..(477): n is a, c, g, or t
  misc_feature (497)..(497): n is a, c, g, or t
  misc_feature (521)..(536): n is a, c, g, or t
  misc_feature (574)..(594): n is a, c, g, or t
  misc_feature (718)..(756): n is a, c, g, or t

SEQ ID NO: 278431 - DNA, 734 bp, Homo Sapiens; identical to SEQ ID NO: 258155
  misc_feature (717)..(717): n is a, c, g, or t

SEQ ID NO: 278432 - DNA, 1136 bp, Homo Sapiens; identical to SEQ ID NO: 258157
  misc_feature (1019)..(1019): n is a, c, g, or t
  misc_feature (1035)..(1035): n is a, c, g, or t
  misc_feature (1045)..(1046): n is a, c, g, or t
  misc_feature (1064)..(1064): n is a, c, g, or t
  misc_feature (1068)..(1069): n is a, c, g, or t
  misc_feature (1083)..(1084): n is a, c, g, or t
  misc_feature (1087)..(1087): n is a, c, g, or t
  misc_feature (1100)..(1100): n is a, c, g, or t
  misc_feature (1102)..(1102): n is a, c, g, or t
  misc_feature (1119)..(1119): n is a, c, g, or t
  misc_feature (1123)..(1123): n is a, c, g, or t
  misc_feature (1127)..(1127): n is a, c, g, or t
  misc_feature (1132)..(1132): n is a, c, g, or t

SEQ ID NO: 278433 - DNA, 1214 bp, Homo Sapiens; identical to SEQ ID NO: 258158

SEQ ID NO: 278434 - DNA, 1100 bp, Homo Sapiens; identical to SEQ ID NO: 258161

SEQ ID NO: 278435 - DNA, 891 bp, Homo Sapiens; identical to SEQ ID NO: 258162

SEQ ID NO: 278436 - DNA, 1630 bp, Homo Sapiens; identical to SEQ ID NO: 258163
  misc_feature (1593)..(1593): n is a, c, g, or t

SEQ ID NO: 278437 - DNA, 1044 bp, Homo Sapiens; identical to SEQ ID NO: 258164
  misc_feature (242)..(285): n is a, c, g, or t

SEQ ID NO: 278438 - DNA, 1530 bp, Homo Sapiens; identical to SEQ ID NO: 258170
  misc_feature (1366)..(1396): n is a, c, g, or t
  misc_feature (1433)..(1468): n is a, c, g, or t
  misc_feature (1504)..(1504): n is a, c, g, or t

SEQ ID NO: 278439 - DNA, 861 bp, Homo Sapiens; identical to SEQ ID NO: 258171

SEQ ID NO: 278440 - DNA, 140 bp, Homo Sapiens; identical to SEQ ID NO: 258172

SEQ ID NO: 278441 - DNA, 1096 bp, Homo Sapiens; identical to SEQ ID NO: 258173
  misc_feature (8)..(8): n is a, c, g, or t
  misc_feature (15)..(15): n is a, c, g, or t
  misc_feature (20)..(20): n is a, c, g, or t
  misc_feature (22)..(23): n is a, c, g, or t
  misc_feature (28)..(28): n is a, c, g, or t
  misc_feature (33)..(33): n is a, c, g, or t
  misc_feature (38)..(39): n is a, c, g, or t
  misc_feature (48)..(48): n is a, c, g, or t
  misc_feature (53)..(53): n is a, c, g, or t
  misc_feature (61)..(61): n is a, c, g, or t
  misc_feature (68)..(68): n is a, c, g, or t
  misc_feature (75)..(75): n is a, c, g, or t
  misc_feature (82)..(82): n is a, c, g, or t
  misc_feature (88)..(88): n is a, c, g, or t
  misc_feature (101)..(101): n is a, c, g, or t
  misc_feature (104)..(104): n is a, c, g, or t
  misc_feature (108)..(108): n is a, c, g, or t
  misc_feature (121)..(121): n is a, c, g, or t
  misc_feature (161)..(161): n is a, c, g, or t
  misc_feature (214)..(214): n is a, c, g, or t
  misc_feature (222)..(222): n is a, c, g, or t
  misc_feature (241)..(241): n is a, c, g, or t
  misc_feature (272)..(272): n is a, c, g, or t
  misc_feature (287)..(287): n is a, c, g, or t
  misc_feature (305)..(346): n is a, c, g, or t
  misc_feature (398)..(398): n is a, c, g, or t
  misc_feature (425)..(425): n is a, c, g, or t
  misc_feature (592)..(592): n is a, c, g, or t
  misc_feature (1051)..(1051): n is a, c, g, or t

SEQ ID NO: 278442 - DNA, 867 bp, Homo Sapiens; identical to SEQ ID NO: 258174
  misc_feature (281)..(281): n is a, c, g, or t
  misc_feature (831)..(831): n is a, c, g, or t

SEQ ID NO: 278443 - DNA, 2059 bp, Homo Sapiens; identical to SEQ ID NO: 258175
  misc_feature (185)..(185): n is a, c, g, or t
  misc_feature (539)..(539): n is a, c, g, or t
  misc_feature (1671)..(1671): n is a, c, g, or t

SEQ ID NO: 278444 - DNA, 961 bp, Homo Sapiens; identical to SEQ ID NO: 258176
  misc_feature (12)..(12): n is a, c, g, or t
  misc_feature (44)..(44): n is a, c, g, or t
  misc_feature (51)..(51): n is a, c, g, or t
  misc_feature (56)..(56): n is a, c, g, or t
  misc_feature (726)..(786): n is a, c, g, or t

SEQ ID NO: 278445 - DNA, 1669 bp, Homo Sapiens; identical to SEQ ID NO: 258181

SEQ ID NO: 278446 - DNA, 1083 bp, Homo Sapiens; identical to SEQ ID NO: 258182

SEQ ID NO: 278447 - DNA, 1128 bp, Homo Sapiens; identical to SEQ ID NO: 258184
  misc_feature (13)..(13): n is a, c, g, or t
  misc_feature (18)..(18): n is a, c, g, or t
  misc_feature (25)..(25): n is a, c, g, or t
  misc_feature (33)..(33): n is a, c, g, or t
  misc_feature (44)..(45): n is a, c, g, or t
  misc_feature (56)..(56): n is a, c, g, or t
  misc_feature (58)..(59): n is a, c, g, or t
  misc_feature (74)..(74): n is a, c, g, or t
  misc_feature (79)..(79): n is a, c, g, or t
  misc_feature (82)..(83): n is a, c, g, or t
  misc_feature (93)..(93): n is a, c, g, or t
  misc_feature (98)..(98): n is a, c, g, or t
  misc_feature (105)..(105): n is a, c, g, or t
  misc_feature (132)..(132): n is a, c, g, or t
  misc_feature (148)..(148): n is a, c, g, or t
  misc_feature (225)..(225): n is a, c, g, or t
  misc_feature (459)..(459): n is a, c, g, or t
  misc_feature (528)..(528): n is a, c, g, or t
  misc_feature (1090)..(1090): n is a, c, g, or t
  misc_feature (1102)..(1102): n is a, c, g, or t

SEQ ID NO: 278448 - DNA, 1080 bp, Homo Sapiens; identical to SEQ ID NO: 258185

SEQ ID NO: 278449 - DNA, 1796 bp, Homo Sapiens; identical to SEQ ID NO: 258186
  misc_feature (1480)..(1480): n is a, c, g, or t
  misc_feature (1747)..(1747): n is a, c, g, or t

SEQ ID NO: 278450 - DNA, 464 bp, Homo Sapiens; identical to SEQ ID NO: 258187
  misc_feature (28)..(28): n is a, c, g, or t
  misc_feature (390)..(390): n is a, c, g, or t

SEQ ID NO: 278451 - DNA, 1832 bp, Homo Sapiens; identical to SEQ ID NO: 258188
  misc_feature (403)..(403): n is a, c, g, or t
  misc_feature (669)..(669): n is a, c, g, or t
  misc_feature (778)..(778): n is a, c, g, or t
  misc_feature (1747)..(1747): n is a, c, g, or t
  misc_feature (1750)..(1750): n is a, c, g, or t
  misc_feature (1753)..(1756): n is a, c, g, or t
  misc_feature (1760)..(1760): n is a, c, g, or t
  misc_feature (1764)..(1769): n is a, c, g, or t

SEQ ID NO: 278452 - DNA, 915 bp, Homo Sapiens; identical to SEQ ID NO: 258189
  misc_feature (808)..(870): n is a, c, g, or t

SEQ ID NO: 278453 - DNA, 362 bp, Homo Sapiens; identical to SEQ ID NO: 258190

SEQ ID NO: 278454 - DNA, 1093 bp, Homo Sapiens; identical to SEQ ID NO: 258200

SEQ ID NO: 278455 - DNA, 436 bp, Homo Sapiens; identical to SEQ ID NO: 258201
  misc_feature (425)..(425): n is a, c, g, or t

SEQ ID NO: 278456 - DNA, 1028 bp, Homo Sapiens; identical to SEQ ID NO: 258205
  misc_feature (757)..(757): n is a, c, g, or t
  misc_feature (772)..(772): n is a, c, g, or t
  misc_feature (813)..(813): n is a, c, g, or t
  misc_feature (817)..(817): n is a, c, g, or t
  misc_feature (829)..(829): n is a, c, g, or t
  misc_feature (841)..(841): n is a, c, g, or t
  misc_feature (844)..(844): n is a, c, g, or t
  misc_feature (846)..(846): n is a, c, g, or t
  misc_feature (857)..(857): n is a, c, g, or t
  misc_feature (867)..(867): n is a, c, g, or t
  misc_feature (870)..(870): n is a, c, g, or t
  misc_feature (886)..(886): n is a, c, g, or t
  misc_feature (891)..(891): n is a, c, g, or t
  misc_feature (899)..(899): n is a, c, g, or t
  misc_feature (914)..(914): n is a, c, g, or t
  misc_feature (934)..(934): n is a, c, g, or t
  misc_feature (938)..(938): n is a, c, g, or t
  misc_feature (942)..(942): n is a, c, g, or t
  misc_feature (951)..(951): n is a, c, g, or t
  misc_feature (955)..(956): n is a, c, g, or t
  misc_feature (968)..(968): n is a, c, g, or t
  misc_feature (973)..(973): n is a, c, g, or t
  misc_feature (976)..(976): n is a, c, g, or t
  misc_feature (981)..(981): n is a, c, g, or t
  misc_feature (1003)..(1004): n is a, c, g, or t
  misc_feature (1010)..(1010): n is a, c, g, or t
  misc_feature (1018)..(1020): n is a, c, g, or t

SEQ ID NO: 278457 - DNA, 1718 bp, Homo Sapiens; identical to SEQ ID NO: 258206

SEQ ID NO: 278458 - DNA, 421 bp, Homo Sapiens; identical to SEQ ID NO: 258207
  misc_feature (287)..(287): n is a, c, g, or t
  misc_feature (340)..(340): n is a, c, g, or t

SEQ ID NO: 278459 - DNA, 397 bp, Homo Sapiens; identical to SEQ ID NO: 258208
  misc_feature (105)..(105): n is a, c, g, or t
  misc_feature (122)..(122): n is a, c, g, or t
  misc_feature (263)..(263): n is a, c, g, or t

SEQ ID NO: 278460 - DNA, 996 bp, Homo Sapiens; identical to SEQ ID NO: 258215
  misc_feature (955)..(955): n is a, c, g, or t

SEQ ID NO: 278461 - DNA, 1252 bp, Homo Sapiens; identical to SEQ ID NO: 258216

SEQ ID NO: 278462 - DNA, 1771 bp, Homo Sapiens; identical to SEQ ID NO: 258221

SEQ ID NO: 278463 - DNA, 526 bp, Homo Sapiens; identical to SEQ ID NO: 258222

SEQ ID NO: 278464 - DNA, 1977 bp, Homo Sapiens; identical to SEQ ID NO: 258224
  misc_feature (1551)..(1560): n is a, c, g, or t
  misc_feature (1952)..(1952): n is a, c, g, or t

SEQ ID NO: 278465 - DNA, 735 bp, Homo Sapiens; identical to SEQ ID NO: 258225

SEQ ID NO: 278466 - DNA, 1023 bp, Homo Sapiens; identical to SEQ ID NO: 258231
  misc_feature (14)..(14): n is a, c, g, or t
  misc_feature (16)..(16): n is a, c, g, or t
  misc_feature (23)..(23): n is a, c, g, or t
  misc_feature (26)..(26): n is a, c, g, or t
  misc_feature (28)..(28): n is a, c, g, or t
  misc_feature (38)..(38): n is a, c, g, or t
  misc_feature (41)..(41): n is a, c, g, or t
  misc_feature (43)..(44): n is a, c, g, or t
  misc_feature (47)..(47): n is a, c, g, or t
  misc_feature (53)..(53): n is a, c, g, or t
  misc_feature (62)..(62): n is a, c, g, or t
  misc_feature (66)..(66): n is a, c, g, or t
  misc_feature (71)..(74): n is a, c, g, or t
  misc_feature (76)..(77): n is a, c, g, or t
  misc_feature (100)..(100): n is a, c, g, or t
  misc_feature (153)..(153): n is a, c, g, or t
  misc_feature (161)..(161): n is a, c, g, or t
  misc_feature (346)..(346): n is a, c, g, or t

SEQ ID NO: 278467 - DNA, 746 bp, Homo Sapiens; identical to SEQ ID NO: 258232
  misc_feature (617)..(631): n is a, c, g, or t

SEQ ID NO: 278468 - DNA, 2187 bp, Homo Sapiens; identical to SEQ ID NO: 258242
  misc_feature (19)..(19): n is a, c, g, or t
  misc_feature (21)..(21): n is a, c, g, or t
  misc_feature (67)..(67): n is a, c, g, or t

SEQ ID NO: 278469 - DNA, 910 bp, Homo Sapiens; identical to SEQ ID NO: 258243
  misc_feature (481)..(481): n is a, c, g, or t
  misc_feature (822)..(822): n is a, c, g, or t
  misc_feature (834)..(834): n is a, c, g, or t

SEQ ID NO: 278470 - DNA, 968 bp, Homo Sapiens; identical to SEQ ID NO: 258244

SEQ ID NO: 278471 - DNA, 1135 bp, Homo Sapiens; identical to SEQ ID NO: 258245
  misc_feature (98)..(98): n is a, c, g, or t
  misc_feature (362)..(371): n is a, c, g, or t

SEQ ID NO: 278472 - DNA, 1042 bp, Homo Sapiens; identical to SEQ ID NO: 258246
  misc_feature (51)..(52): n is a, c, g, or t
  misc_feature (67)..(67): n is a, c, g, or t
  misc_feature (83)..(83): n is a, c, g, or t
  misc_feature (90)..(90): n is a, c, g, or t
  misc_feature (93)..(93): n is a, c, g, or t
  misc_feature (450)..(450): n is a, c, g, or t
  misc_feature (946)..(946): n is a, c, g, or t
  misc_feature (964)..(964): n is a, c, g, or t
  misc_feature (966)..(966): n is a, c, g, or t
  misc_feature (968)..(968): n is a, c, g, or t
  misc_feature (972)..(972): n is a, c, g, or t
  misc_feature (980)..(980): n is a, c, g, or t
  misc_feature (990)..(990): n is a, c, g, or t
  misc_feature (992)..(992): n is a, c, g, or t
  misc_feature (996)..(996): n is a, c, g, or t
  misc_feature (1001)..(1002): n is a, c, g, or t
  misc_feature (1013)..(1013): n is a, c, g, or t
  misc_feature (1022)..(1022): n is a, c, g, or t
  misc_feature (1031)..(1031): n is a, c, g, or t
  misc_feature (1034)..(1034): n is a, c, g, or t

SEQ ID NO: 278473 - DNA, 713 bp, Homo Sapiens; identical to SEQ ID NO: 258247
  misc_feature (11)..(11): n is a, c, g, or t
  misc_feature (26)..(27): n is a, c, g, or t
  misc_feature (42)..(43): n is a, c, g, or t
  misc_feature (60)..(60): n is a, c, g, or t
  misc_feature (65)..(65): n is a, c, g, or t
  misc_feature (150)..(150): n is a, c, g, or t
  misc_feature (162)..(163): n is a, c, g, or t
  misc_feature (170)..(170): n is a, c, g, or t
  misc_feature (175)..(176): n is a, c, g, or t
  misc_feature (188)..(188): n is a, c, g, or t
  misc_feature (192)..(192): n is a, c, g, or t
  misc_feature (202)..(202): n is a, c, g, or t
  misc_feature (206)..(209): n is a, c, g, or t

SEQ ID NO: 278474 - DNA, 1150 bp, Homo Sapiens; identical to SEQ ID NO: 258248
  misc_feature (975)..(998): n is a, c, g, or t

SEQ ID NO: 278475 - DNA, 1130 bp, Homo Sapiens; identical to SEQ ID NO: 258249

SEQ ID NO: 278476 - DNA, 936 bp, Homo Sapiens; identical to SEQ ID NO: 258250
  misc_feature (803)..(812): n is a, c, g, or t

SEQ ID NO: 278477 - DNA, 1657 bp, Homo Sapiens; identical to SEQ ID NO: 258253
  misc_feature (15)..(15): n is a, c, g, or t
  misc_feature (21)..(21): n is a, c, g, or t
  misc_feature (23)..(23): n is a, c, g, or t
  misc_feature (265)..(265): n is a, c, g, or t
  misc_feature (1493)..(1493): n is a, c, g, or t
  misc_feature (1501)..(1501): n is a, c, g, or t
  misc_feature (1529)..(1529): n is a, c, g, or t
  misc_feature (1566)..(1566): n is a, c, g, or t
  misc_feature (1574)..(1574): n is a, c, g, or t
  misc_feature (1581)..(1581): n is a, c, g, or t
  misc_feature (1583)..(1583): n is a, c, g, or t
  misc_feature (1599)..(1599): n is a, c, g, or t
  misc_feature (1622)..(1622): n is a, c, g, or t
  misc_feature (1630)..(1630): n is a, c, g, or t
  misc_feature (1650)..(1650): n is a, c, g, or t
  misc_feature (1655)..(1655): n is a, c, g, or t

SEQ ID NO: 278478 - DNA, 1582 bp, Homo Sapiens; identical to SEQ ID NO: 258254

SEQ ID NO: 278479 - DNA, 1163 bp, Homo Sapiens; identical to SEQ ID NO: 258262

SEQ ID NO: 278480 - DNA, 1009 bp, Homo Sapiens; identical to SEQ ID NO: 258263
  misc_feature (707)..(707): n is a, c, g, or t
  misc_feature (718)..(718): n is a, c, g, or t
  misc_feature (925)..(925): n is a, c, g, or t

SEQ ID NO: 278481 - DNA, 988 bp, Homo Sapiens; identical to SEQ ID NO: 258264
  misc_feature (642)..(642): n is a, c, g, or t
  misc_feature (790)..(790): n is a, c, g, or t

SEQ ID NO: 278482 - DNA, 1028 bp, Homo Sapiens; identical to SEQ ID NO: 258265
  misc_feature (970)..(970): n is a, c, g, or t

SEQ ID NO: 278483 - DNA, 1082 bp, Homo Sapiens; identical to SEQ ID NO: 258266

SEQ ID NO: 278484 - DNA, 466 bp, Homo Sapiens; identical to SEQ ID NO: 258267
  misc_feature (20)..(20): n is a, c, g, or t
  misc_feature (32)..(32): n is a, c, g, or t

SEQ ID NO: 278485 - DNA, 1014 bp, Homo Sapiens; identical to SEQ ID NO: 258271
  misc_feature (4)..(4): n is a, c, g, or t
  misc_feature (7)..(7): n is a, c, g, or t
  misc_feature (16)..(16): n is a, c, g, or t
  misc_feature (21)..(21): n is a, c, g, or t
  misc_feature (23)..(23): n is a, c, g, or t
  misc_feature (33)..(34): n is a, c, g, or t
  misc_feature (40)..(40): n is a, c, g, or t
  misc_feature (49)..(49): n is a, c, g, or t
  misc_feature (76)..(76): n is a, c, g, or t
  misc_feature (82)..(82): n is a, c, g, or t
  misc_feature (85)..(85): n is a, c, g, or t
  misc_feature (113)..(113): n is a, c, g, or t
  misc_feature (135)..(135): n is a, c, g, or t
  misc_feature (147)..(149): n is a, c, g, or t
  misc_feature (161)..(161): n is a, c, g, or t
  misc_feature (173)..(173): n is a, c, g, or t
  misc_feature (176)..(176): n is a, c, g, or t
  misc_feature (179)..(179): n is a, c, g, or t
  misc_feature (471)..(589): n is a, c, g, or t

SEQ ID NO: 278486 - DNA, 980 bp, Homo Sapiens; identical to SEQ ID NO: 258272
  misc_feature (180)..(224): n is a, c, g, or t
  misc_feature (865)..(873): n is a, c, g, or t

SEQ ID NO: 278487 - DNA, 994 bp, Homo Sapiens; identical to SEQ ID NO: 258273
  misc_feature (97)..(156): n is a, c, g, or t
  misc_feature (182)..(207): n is a, c, g, or t
  misc_feature (905)..(913): n is a, c, g, or t

SEQ ID NO: 278488 - DNA, 937 bp, Homo Sapiens; identical to SEQ ID NO: 258276

SEQ ID NO: 278489 - DNA, 1077 bp, Homo Sapiens; identical to SEQ ID NO: 258277

SEQ ID NO: 278490 - DNA, 924 bp, Homo Sapiens; identical to SEQ ID NO: 258278

SEQ ID NO: 278491 - DNA, 1539 bp, Homo Sapiens; identical to SEQ ID NO: 258285
  misc_feature (54)..(54): n is a, c, g, or t
  misc_feature (1524)..(1524): n is a, c, g, or t

SEQ ID NO: 278492 - DNA, 550 bp, Homo Sapiens; identical to SEQ ID NO: 258286

SEQ ID NO: 278493 - DNA, 969 bp, Homo Sapiens; identical to SEQ ID NO: 258295
  misc_feature (8)..(8): n is a, c, g, or t
  misc_feature (10)..(10): n is a, c, g, or t
  misc_feature (17)..(17): n is a, c, g, or t
  misc_feature (22)..(22): n is a, c, g, or t
  misc_feature (25)..(25): n is a, c, g, or t
  misc_feature (28)..(28): n is a, c, g, or t
  misc_feature (31)..(31): n is a, c, g, or t
  misc_feature (39)..(40): n is a, c, g, or t
  misc_feature (47)..(48): n is a, c, g, or t
  misc_feature (56)..(56): n is a, c, g, or t
  misc_feature (71)..(72): n is a, c, g, or t
  misc_feature (76)..(76): n is a, c, g, or t
  misc_feature (83)..(83): n is a, c, g, or t
  misc_feature (86)..(86): n is a, c, g, or t
  misc_feature (103)..(104): n is a, c, g, or t
  misc_feature (115)..(115): n is a, c, g, or t
  misc_feature (131)..(131): n is a, c, g, or t
  misc_feature (133)..(133): n is a, c, g, or t
  misc_feature (141)..(141): n is a, c, g, or t
  misc_feature (284)..(284): n is a, c, g, or t
  misc_feature (950)..(950): n is a, c, g, or t
  misc_feature (967)..(967): n is a, c, g, or t

SEQ ID NO: 278494 - DNA, 1044 bp, Homo Sapiens; identical to SEQ ID NO: 258296
  misc_feature (834)..(834): n is a, c, g, or t
  misc_feature (845)..(846): n is a, c, g, or t
  misc_feature (896)..(896): n is a, c, g, or t
  misc_feature (907)..(907): n is a, c, g, or t
  misc_feature (910)..(913): n is a, c, g, or t
  misc_feature (917)..(917): n is a, c, g, or t
  misc_feature (925)..(925): n is a, c, g, or t
  misc_feature (927)..(927): n is a, c, g, or t
  misc_feature (929)..(929): n is a, c, g, or t
  misc_feature (937)..(938): n is a, c, g, or t
  misc_feature (942)..(942): n is a, c, g, or t
  misc_feature (944)..(944): n is a, c, g, or t
  misc_feature (947)..(947): n is a, c, g, or t
  misc_feature (965)..(967): n is a, c, g, or t
  misc_feature (973)..(973): n is a, c, g, or t
  misc_feature (979)..(979): n is a, c, g, or t
  misc_feature (985)..(986): n is a, c, g, or t
  misc_feature (992)..(992): n is a, c, g, or t
  misc_feature (997)..(997): n is a, c, g, or t
  misc_feature (1001)..(1001): n is a, c, g, or t
  misc_feature (1008)..(1008): n is a, c, g, or t
  misc_feature (1010)..(1010): n is a, c, g, or t
  misc_feature (1014)..(1014): n is a, c, g, or t
  misc_feature (1017)..(1018): n is a, c, g, or t
  misc_feature (1032)..(1032): n is a, c, g, or t
  misc_feature (1039)..(1039): n is a, c, g, or t

SEQ ID NO: 278495 - DNA, 437 bp, Homo Sapiens; identical to SEQ ID NO: 258297

SEQ ID NO: 278496 - DNA, 1186 bp, Homo Sapiens; identical to SEQ ID NO: 258298
  misc_feature (878)..(910): n is a, c, g, or t
  misc_feature (921)..(972): n is a, c, g, or t

SEQ ID NO: 278497 - DNA, 783 bp, Homo Sapiens; identical to SEQ ID NO: 258299

SEQ ID NO: 278498 - DNA, 398 bp, Homo Sapiens; identical to SEQ ID NO: 258300
  misc_feature (328)..(328): n is a, c, g, or t
  misc_feature (388)..(388): n is a, c, g, or t

SEQ ID NO: 278499 - DNA, 502 bp, Homo Sapiens; identical to SEQ ID NO: 258301
  misc_feature (13)..(13): n is a, c, g, or t
  misc_feature (54)..(54): n is a, c, g, or t
  misc_feature (77)..(77): n is a, c, g, or t
  misc_feature (436)..(436): n is a, c, g, or t

SEQ ID NO: 278500 - DNA, 724 bp, Homo Sapiens; identical to SEQ ID NO: 258302
  misc_feature (722)..(722): n is a, c, g, or t

SEQ ID NO: 278501 - DNA, 739 bp, Homo Sapiens; identical to SEQ ID NO: 258303
  misc_feature (129)..(138): n is a, c, g, or t
  misc_feature (166)..(339): n is a, c, g, or t
  misc_feature (351)..(410): n is a, c, g, or t
  misc_feature (426)..(440): n is a, c, g, or t

SEQ ID NO: 278502 - DNA, 405 bp, Homo Sapiens; identical to SEQ ID NO: 258304
  misc_feature (30)..(30): n is a, c, g, or t
  misc_feature (76)..(76): n is a, c, g, or t
  misc_feature (97)..(97): n is a, c, g, or t
  misc_feature (138)..(138): n is a, c, g, or t

SEQ ID NO: 278503 - DNA, 1069 bp, Homo Sapiens; identical to SEQ ID NO: 258305
  misc_feature (26)..(26): n is a, c, g, or t
  misc_feature (30)..(31): n is a, c, g, or t
  misc_feature (34)..(34): n is a, c, g, or t
  misc_feature (56)..(56): n is a, c, g, or t
  misc_feature (64)..(64): n is a, c, g, or t
  misc_feature (66)..(66): n is a, c, g, or t
  misc_feature (93)..(93): n is a, c, g, or t

SEQ ID NO: 278504 - DNA, 1108 bp, Homo Sapiens; identical to SEQ ID NO: 258306

SEQ ID NO: 278505 - DNA, 802 bp, Homo Sapiens; identical to SEQ ID NO: 258307
  misc_feature (356)..(384): n is a, c, g, or t

SEQ ID NO: 278506 - DNA, 960 bp, Homo Sapiens; identical to SEQ ID NO: 258311
  misc_feature (10)..(11): n is a, c, g, or t
  misc_feature (16)..(16): n is a, c, g, or t
  misc_feature (27)..(28): n is a, c, g, or t
  misc_feature (33)..(33): n is a, c, g, or t
  misc_feature (37)..(37): n is a, c, g, or t
  misc_feature (42)..(42): n is a, c, g, or t
  misc_feature (56)..(56): n is a, c, g, or t
  misc_feature (64)..(64): n is a, c, g, or t
  misc_feature (74)..(74): n is a, c, g, or t
  misc_feature (78)..(78): n is a, c, g, or t
  misc_feature (100)..(100): n is a, c, g, or t
  misc_feature (115)..(115): n is a, c, g, or t
  misc_feature (143)..(143): n is a, c, g, or t
  misc_feature (157)..(157): n is a, c, g, or t
  misc_feature (163)..(163): n is a, c, g, or t
  misc_feature (175)..(175): n is a, c, g, or t
  misc_feature (178)..(178): n is a, c, g, or t

SEQ ID NO: 278507 - DNA, 871 bp, Homo Sapiens; identical to SEQ ID NO: 258312

SEQ ID NO: 278508 - DNA, 1052 bp, Homo Sapiens; identical to SEQ ID NO: 258315
  misc_feature (92)..(92): n is a, c, g, or t
  misc_feature (243)..(243): n is a, c, g, or t
  misc_feature (809)..(810): n is a, c, g, or t
  misc_feature (823)..(823): n is a, c, g, or t
  misc_feature (838)..(839): n is a, c, g, or t
  misc_feature (847)..(847): n is a, c, g, or t
  misc_feature (905)..(905): n is a, c, g, or t
  misc_feature (933)..(933): n is a, c, g, or t
  misc_feature (949)..(949): n is a, c, g, or t
  misc_feature (969)..(969): n is a, c, g, or t
  misc_feature (972)..(973): n is a, c, g, or t
  misc_feature (983)..(984): n is a, c, g, or t
  misc_feature (999)..(999): n is a, c, g, or t
  misc_feature (1002)..(1002): n is a, c, g, or t
  misc_feature (1005)..(1005): n is a, c, g, or t
  misc_feature (1007)..(1007): n is a, c, g, or t
  misc_feature (1015)..(1015): n is a, c, g, or t
  misc_feature (1035)..(1035): n is a, c, g, or t

SEQ ID NO: 278509 - DNA, 618 bp, Homo Sapiens; identical to SEQ ID NO: 258316

SEQ ID NO: 278510 - DNA, 438 bp, Homo Sapiens; identical to SEQ ID NO: 258318

SEQ ID NO: 278511 - DNA, 670 bp, Homo Sapiens; identical to SEQ ID NO: 258319
  misc_feature (275)..(275): n is a, c, g, or t
  misc_feature (284)..(284): n is a, c, g, or t
  misc_feature (446)..(446): n is a, c, g, or t
  misc_feature (451)..(451): n is a, c, g, or t
  misc_feature (461)..(461): n is a, c, g, or t
  misc_feature (473)..(489): n is a, c, g, or t
  misc_feature (497)..(497): n is a, c, g, or t
  misc_feature (538)..(538): n is a, c, g, or t
  misc_feature (569)..(569): n is a, c, g, or t
  misc_feature (579)..(579): n is a, c, g, or t
  misc_feature (591)..(591): n is a, c, g, or t
  misc_feature (615)..(615): n is a, c, g, or t
  misc_feature (649)..(649): n is a, c, g, or t

SEQ ID NO: 278512 - DNA, 712 bp, Homo Sapiens; identical to SEQ ID NO: 258322

SEQ ID NO: 278513 - DNA, 500 bp, Homo Sapiens; identical to SEQ ID NO: 258323
  misc_feature (32)..(32): n is a, c, g, or t
  misc_feature (43)..(43): n is a, c, g, or t
  misc_feature (71)..(71): n is a, c, g, or t
  misc_feature (95)..(95): n is a, c, g, or t
  misc_feature (176)..(176): n is a, c, g, or t

SEQ ID NO: 278514 - DNA, 1288 bp, Homo Sapiens; identical to SEQ ID NO: 258328

SEQ ID NO: 278515 - DNA, 538 bp, Homo Sapiens; identical to SEQ ID NO: 258329
  misc_feature (235)..(235): n is a, c, g, or t
  misc_feature (242)..(242): n is a, c, g, or t
  misc_feature (245)..(245): n is a, c, g, or t
  misc_feature (302)..(302): n is a, c, g, or t
  misc_feature (388)..(388): n is a, c, g, or t
  misc_feature (423)..(423): n is a, c, g, or t
  misc_feature (479)..(479): n is a, c, g, or t
  misc_feature (506)..(506): n is a, c, g, or t
  misc_feature (511)..(511): n is a, c, g, or t

SEQ ID NO: 278516 - DNA, 2944 bp, Homo Sapiens; identical to SEQ ID NO: 258333
  misc_feature (361)..(413): n is a, c, g, or t
  misc_feature (2680)..(2802): n is a, c, g, or t
  misc_feature (2804)..(2810): n is a, c, g, or t
  misc_feature (2818)..(2832): n is a, c, g, or t
  misc_feature (2857)..(2866): n is a, c, g, or t

SEQ ID NO: 278517 - DNA, 454 bp, Homo Sapiens; identical to SEQ ID NO: 258334

SEQ ID NO: 278518 - DNA, 1346 bp, Homo Sapiens; identical to SEQ ID NO: 258351
  misc_feature (1225)..(1234): n is a, c, g, or t

SEQ ID NO: 278519 - DNA, 1074 bp, Homo Sapiens; identical to SEQ ID NO: 258352
  misc_feature (891)..(891): n is a, c, g, or t

SEQ ID NO: 278520 - DNA, 373 bp, Homo Sapiens; identical to SEQ ID NO: 178191

SEQ ID NO: 278521 - DNA, 1260 bp, Homo Sapiens; identical to SEQ ID NO: 258356

SEQ ID NO: 278522 - DNA, 1603 bp, Homo Sapiens; identical to SEQ ID NO: 258357
  misc_feature (1303)..(1324): n is a, c, g, or t
  misc_feature (1333)..(1371): n is a, c, g, or t
  misc_feature (1418)..(1490): n is a, c, g, or t
  misc_feature (1531)..(1540): n is a, c, g, or t

SEQ ID NO: 278523 - DNA, 898 bp, Homo Sapiens; identical to SEQ ID NO: 258359
  misc_feature (8)..(8): n is a, c, g, or t

SEQ ID NO: 278524 - DNA, 2842 bp, Homo Sapiens; identical to SEQ ID NO: 258360
  misc_feature (647)..(647): n is a, c, g, or t
  misc_feature (654)..(654): n is a, c, g, or t
  misc_feature (666)..(666): n is a, c, g, or t
  misc_feature (679)..(679): n is a, c, g, or t
  misc_feature (823)..(841): n is a, c, g, or t
  misc_feature (1187)..(1198): n is a, c, g, or t
  misc_feature (2357)..(2357): n is a, c, g, or t
  misc_feature (2447)..(2447): n is a, c, g, or t
  misc_feature (2510)..(2510): n is a, c, g, or t
  misc_feature (2512)..(2512): n is a, c, g, or t
  misc_feature (2519)..(2519): n is a, c, g, or t
  misc_feature (2687)..(2778): n is a, c, g, or t

SEQ ID NO: 278525 - DNA, 1057 bp, Homo Sapiens; identical to SEQ ID NO: 258361

SEQ ID NO: 278526 - DNA, 942 bp, Homo Sapiens; identical to SEQ ID NO: 258364
  misc_feature (5)..(5): n is a, c, g, or t
  misc_feature (8)..(8): n is a, c, g, or t
  misc_feature (11)..(11): n is a, c, g, or t
  misc_feature (15)..(15): n is a, c, g, or t
  misc_feature (17)..(17): n is a, c, g, or t
  misc_feature (21)..(21): n is a, c, g, or t
  misc_feature (45)..(45): n is a, c, g, or t
  misc_feature (48)..(48): n is a, c, g, or t
  misc_feature (57)..(57): n is a, c, g, or t
  misc_feature (78)..(78): n is a, c, g, or t
  misc_feature (90)..(93): n is a, c, g, or t
  misc_feature (103)..(103): n is a, c, g, or t
  misc_feature (108)..(108): n is a, c, g, or t
  misc_feature (114)..(114): n is a, c, g, or t
  misc_feature (118)..(118): n is a, c, g, or t
  misc_feature (123)..(123): n is a, c, g, or t
  misc_feature (125)..(125): n is a, c, g, or t
  misc_feature (127)..(127): n is a, c, g, or t
  misc_feature (131)..(131): n is a, c, g, or t
  misc_feature (157)..(157): n is a, c, g, or t
  misc_feature (171)..(171): n is a, c, g, or t
  misc_feature (209)..(209): n is a, c, g, or t
  misc_feature (216)..(216): n is a, c, g, or t
  misc_feature (222)..(222): n is a, c, g, or t
  misc_feature (249)..(249): n is a, c, g, or t
  misc_feature (254)..(254): n is a, c, g, or t
  misc_feature (258)..(258): n is a, c, g, or t
  misc_feature (263)..(263): n is a, c, g, or t
  misc_feature (265)..(265): n is a, c, g, or t
  misc_feature (300)..(300): n is a, c, g, or t
  misc_feature (313)..(313): n is a, c, g, or t
  misc_feature (343)..(343): n is a, c, g, or t
  misc_feature (345)..(345): n is a, c, g, or t

SEQ ID NO: 278527 - DNA, 1144 bp, Homo Sapiens; identical to SEQ ID NO: 258365
  misc_feature (537)..(620): n is a, c, g, or t
  misc_feature (807)..(807): n is a, c, g, or t
  misc_feature (1016)..(1016): n is a, c, g, or t

SEQ ID NO: 278528 - DNA, 738 bp, Homo Sapiens; identical to SEQ ID NO: 258366
  misc_feature (116)..(116): n is a, c, g, or t
  misc_feature (141)..(224): n is a, c, g, or t
  misc_feature (254)..(254): n is a, c, g, or t
  misc_feature (299)..(299): n is a, c, g, or t
  misc_feature (470)..(513): n is a, c, g, or t
  misc_feature (515)..(516): n is a, c, g, or t
  misc_feature (522)..(524): n is a, c, g, or t
  misc_feature (551)..(551): n is a, c, g, or t
  misc_feature (616)..(616): n is a, c, g, or t
  misc_feature (620)..(620): n is a, c, g, or t
  misc_feature (634)..(634): n is a, c, g, or t

SEQ ID NO: 278529 - DNA, 1798 bp, Homo Sapiens; identical to SEQ ID NO: 258369
  misc_feature (649)..(649): n is a, c, g, or t
  misc_feature (654)..(673): n is a, c, g, or t
  misc_feature (676)..(705): n is a, c, g, or t

SEQ ID NO: 278530 - DNA, 970 bp, Homo Sapiens; identical to SEQ ID NO: 258370

SEQ ID NO: 278531 - DNA, 954 bp, Homo Sapiens; identical to SEQ ID NO: 258371
  misc_feature (237)..(237): n is a, c, g, or t
  misc_feature (242)..(242): n is a, c, g, or t
  misc_feature (249)..(250): n is a, c, g, or t
  misc_feature (253)..(254): n is a, c, g, or t
  misc_feature (262)..(264): n is a, c, g, or t
  misc_feature (278)..(295): n is a, c, g, or t

SEQ ID NO: 278532 - DNA, 354 bp, Homo Sapiens; identical to SEQ ID NO: 258372
  misc_feature (17)..(17): n is a, c, g, or t
  misc_feature (27)..(27): n is a, c, g, or t
  misc_feature (42)..(42): n is a, c, g, or t
  misc_feature (51)..(51): n is a, c, g, or t
  misc_feature (63)..(63): n is a, c, g, or t
  misc_feature (329)..(329): n is a, c, g, or t

SEQ ID NO: 278533 - DNA, 489 bp, Homo Sapiens; identical to SEQ ID NO: 258373
  misc_feature (295)..(295): n is a, c, g, or t
  misc_feature (364)..(424): n is a, c, g, or t

SEQ ID NO: 278534 - DNA, 500 bp, Homo Sapiens; identical to SEQ ID NO: 258381
  misc_feature (463)..(463): n is a, c, g, or t
  misc_feature (477)..(477): n is a, c, g, or t

SEQ ID NO: 278535 - DNA, 555 bp, Homo Sapiens; identical to SEQ ID NO: 258382

SEQ ID NO: 278536 - DNA, 802 bp, Homo Sapiens; identical to SEQ ID NO: 258390

SEQ ID NO: 278537 - DNA, 2332 bp, Homo Sapiens; identical to SEQ ID NO: 258391

SEQ ID NO: 278538 - DNA, 1052 bp, Homo Sapiens; identical to SEQ ID NO: 258405
  misc_feature (4)..(4): n is a, c, g, or t
  misc_feature (70)..(201): n is a, c, g, or t
  misc_feature (212)..(214): n is a, c, g, or t
  misc_feature (216)..(216): n is a, c, g, or t
  misc_feature (218)..(218): n is a, c, g, or t
  misc_feature (838)..(838): n is a, c, g, or t
  misc_feature (859)..(859): n is a, c, g, or t
  misc_feature (864)..(864): n is a, c, g, or t
  misc_feature (911)..(911): n is a, c, g, or t
  misc_feature (928)..(928): n is a, c, g, or t
  misc_feature (934)..(934): n is a, c, g, or t
  misc_feature (952)..(952): n is a, c, g, or t
  misc_feature (955)..(955): n is a, c, g, or t
  misc_feature (973)..(973): n is a, c, g, or t
  misc_feature (976)..(976): n is a, c, g, or t
  misc_feature (984)..(986): n is a, c, g, or t
  misc_feature (995)..(995): n is a, c, g, or t
  misc_feature (997)..(997): n is a, c, g, or t
  misc_feature (1001)..(1001): n is a, c, g, or t
  misc_feature (1007)..(1007): n is a, c, g, or t
  misc_feature (1015)..(1015): n is a, c, g, or t
  misc_feature (1033)..(1033): n is a, c, g, or t
  misc_feature (1036)..(1036): n is a, c, g, or t

SEQ ID NO: 278539 - DNA, 845 bp, Homo Sapiens; identical to SEQ ID NO: 258406

SEQ ID NO: 278540 - DNA, 1098 bp, Homo Sapiens; identical to SEQ ID NO: 258409
  misc_feature (14)..(14): n is a, c, g, or t
  misc_feature (16)..(16): n is a, c, g, or t
  misc_feature (18)..(18): n is a, c, g, or t
  misc_feature (37)..(38): n is a, c, g, or t
  misc_feature (49)..(49): n is a, c, g, or t
  misc_feature (60)..(60): n is a, c, g, or t

SEQ ID NO: 278541 - DNA, 431 bp, Homo Sapiens; identical to SEQ ID NO: 258410
  misc_feature (22)..(22): n is a, c, g, or t
  misc_feature (32)..(32): n is a, c, g, or t

SEQ ID NO: 278542 - DNA, 1039 bp, Homo Sapiens; identical to SEQ ID NO: 258417
  misc_feature (740)..(798): n is a, c, g, or t
  misc_feature (878)..(910): n is a, c, g, or t
  misc_feature (944)..(944): n is a, c, g, or t
  misc_feature (986)..(986): n is a, c, g, or t
  misc_feature (1006)..(1006): n is a, c, g, or t
  misc_feature (1010)..(1010): n is a, c, g, or t
  misc_feature (1015)..(1015): n is a, c, g, or t
  misc_feature (1024)..(1024): n is a, c, g, or t

SEQ ID NO: 278543 - DNA, 1114 bp, Homo Sapiens; identical to SEQ ID NO: 258418
  misc_feature (7)..(7): n is a, c, g, or t
  misc_feature (12)..(12): n is a, c, g, or t
  misc_feature (21)..(22): n is a, c, g, or t
  misc_feature (24)..(26): n is a, c, g, or t
  misc_feature (29)..(29): n is a, c, g, or t
  misc_feature (31)..(31): n is a, c, g, or t
  misc_feature (35)..(35): n is a, c, g, or t
  misc_feature (42)..(42): n is a, c, g, or t
  misc_feature (48)..(48): n is a, c, g, or t
  misc_feature (51)..(51): n is a, c, g, or t
  misc_feature (55)..(55): n is a, c, g, or t
  misc_feature (76)..(77): n is a, c, g, or t
  misc_feature (106)..(106): n is a, c, g, or t
  misc_feature (175)..(175): n is a, c, g, or t
  misc_feature (197)..(197): n is a, c, g, or t
  misc_feature (212)..(212): n is a, c, g, or t
  misc_feature (231)..(231): n is a, c, g, or t
  misc_feature (265)..(320): n is a, c, g, or t
  misc_feature (397)..(429): n is a, c, g, or t

SEQ ID NO: 278544 - DNA, 1257 bp, Homo Sapiens; identical to SEQ ID NO: 258419
  misc_feature (610)..(647): n is a, c, g, or t
  misc_feature (1194)..(1194): n is a, c, g, or t

SEQ ID NO: 278545 - DNA, 2123 bp, Homo Sapiens; identical to SEQ ID NO: 258422
  misc_feature (1390)..(1535): n is a, c, g, or t
  misc_feature (1544)..(1544): n is a, c, g, or t
  misc_feature (1565)..(1578): n is a, c, g, or t

SEQ ID NO: 278546 - DNA, 834 bp, Homo Sapiens; identical to SEQ ID NO: 258423
  misc_feature (583)..(583): n is a, c, g, or t

SEQ ID NO: 278547 - DNA, 1016 bp, Homo Sapiens; identical to SEQ ID NO: 258429
  misc_feature (67)..(79): n is a, c, g, or t
  misc_feature (86)..(202): n is a, c, g, or t
  misc_feature (224)..(359): n is a, c, g, or t

SEQ ID NO: 278548 - DNA, 875 bp, Homo Sapiens; identical to SEQ ID NO: 258430
  misc_feature (358)..(358): n is a, c, g, or t

SEQ ID NO: 278549 - DNA, 459 bp, Homo Sapiens; identical to SEQ ID NO: 258437
  misc_feature (20)..(20): n is a, c, g, or t
  misc_feature (30)..(30): n is a, c, g, or t
  misc_feature (60)..(60): n is a, c, g, or t
  misc_feature (70)..(70): n is a, c, g, or t
  misc_feature (77)..(77): n is a, c, g, or t
  misc_feature (99)..(99): n is a, c, g, or t
  misc_feature (129)..(129): n is a, c, g, or t

SEQ ID NO: 278550 - DNA, 433 bp, Homo Sapiens; identical to SEQ ID NO: 258438
  misc_feature (34)..(34): n is a, c, g, or t

SEQ ID NO: 278551 - DNA, 1066 bp, Homo Sapiens; identical to SEQ ID NO: 258444
  misc_feature (38)..(38): n is a, c, g, or t
  misc_feature (43)..(43): n is a, c, g, or t
  misc_feature (64)..(64): n is a, c, g, or t
  misc_feature (68)..(68): n is a, c, g, or t
  misc_feature (72)..(72): n is a, c, g, or t
  misc_feature (100)..(100): n is a, c, g, or t
  misc_feature (107)..(108): n is a, c, g, or t
  misc_feature (114)..(114): n is a, c, g, or t
  misc_feature (128)..(128): n is a, c, g, or t
  misc_feature (142)..(142): n is a, c, g, or t
  misc_feature (149)..(149): n is a, c, g, or t
  misc_feature (164)..(164): n is a, c, g, or t
  misc_feature (189)..(189): n is a, c, g, or t
  misc_feature (239)..(239): n is a, c, g, or t
  misc_feature (248)..(248): n is a, c, g, or t
  misc_feature (267)..(267): n is a, c, g, or t
  misc_feature (282)..(282): n is a, c, g, or t
  misc_feature (326)..(326): n is a, c, g, or t

SEQ ID NO: 278552 - DNA, 784 bp, Homo Sapiens; identical to SEQ ID NO: 258445
  misc_feature (14)..(14): n is a, c, g, or t
  misc_feature (479)..(514): n is a, c, g, or t
  misc_feature (570)..(588): n is a, c, g, or t
  misc_feature (731)..(740): n is a, c, g, or t

SEQ ID NO: 278553 - DNA, 1325 bp, Homo Sapiens; identical to SEQ ID NO: 258447
  misc_feature (118)..(118): n is a, c, g, or t
  misc_feature (120)..(121): n is a, c, g, or t
  misc_feature (141)..(141): n is a, c, g, or t
  misc_feature (223)..(223): n is a, c, g, or t
  misc_feature (239)..(240): n is a, c, g, or t
  misc_feature (556)..(604): n is a, c, g, or t

SEQ ID NO: 278554 - DNA, 1519 bp, Homo Sapiens; identical to SEQ ID NO: 258448

SEQ ID NO: 278555 - DNA, 1065 bp, Homo Sapiens; identical to SEQ ID NO: 258449
  misc_feature (142)..(142): n is a, c, g, or t
  misc_feature (144)..(144): n is a, c, g, or t

SEQ ID NO: 278556 - DNA, 904 bp, Homo Sapiens; identical to SEQ ID NO: 258450
  misc_feature (791)..(805): n is a, c, g, or t

SEQ ID NO: 278557 - DNA, 1371 bp, Homo Sapiens; identical to SEQ ID NO: 258452
  misc_feature (1063)..(1063): n is a, c, g, or t

SEQ ID NO: 278558 - DNA, 590 bp, Homo Sapiens; identical to SEQ ID NO: 258453

SEQ ID NO: 278559 - DNA, 1147 bp, Homo Sapiens; identical to SEQ ID NO: 258454

SEQ ID NO: 278560 - DNA, 484 bp, Homo Sapiens; identical to SEQ ID NO: 258455
  misc_feature (421)..(433): n is a, c, g, or t
  misc_feature (460)..(460): n is a, c, g, or t
  misc_feature (473)..(473): n is a, c, g, or t

SEQ ID NO: 278561 - DNA, 1596 bp, Homo Sapiens; identical to SEQ ID NO: 258456
  misc_feature (434)..(482): n is a, c, g, or t
  misc_feature (614)..(654): n is a, c, g, or t

SEQ ID NO: 278562 - DNA, 651 bp, Homo Sapiens; identical to SEQ ID NO: 258457
  misc_feature (75)..(75): n is a, c, g, or t
  misc_feature (85)..(85): n is a, c, g, or t
  misc_feature (109)..(109): n is a, c, g, or t
  misc_feature (123)..(123): n is a, c, g, or t
  misc_feature (148)..(148): n is a, c, g, or t
  misc_feature (202)..(202): n is a, c, g, or t
  misc_feature (490)..(490): n is a, c, g, or t
  misc_feature (529)..(529): n is a, c, g, or t
  misc_feature (586)..(586): n is a, c, g, or t
  misc_feature (621)..(621): n is a, c, g, or t
  misc_feature (629)..(629): n is a, c, g, or t

SEQ ID NO: 278563 - DNA, 712 bp, Homo Sapiens; identical to SEQ ID NO: 258473
  misc_feature (139)..(139): n is a, c, g, or t

SEQ ID NO: 278564 - DNA, 371 bp, Homo Sapiens; identical to SEQ ID NO: 258474
  misc_feature (341)..(341): n is a, c, g, or t

SEQ ID NO: 278565 - DNA, 904 bp, Homo Sapiens; identical to SEQ ID NO: 258477
  misc_feature (841)..(841): n is a, c, g, or t
  misc_feature (885)..(885): n is a, c, g, or t

SEQ ID NO: 278566 - DNA, 800 bp, Homo Sapiens; identical to SEQ ID NO: 15515
  misc_feature (579)..(579): n is a, c, g, or t
  misc_feature (582)..(582): n is a, c, g, or t
  misc_feature (586)..(639): n is a, c, g, or t
  misc_feature (647)..(647): n is a, c, g, or t

SEQ ID NO: 278567 - DNA, 390 bp, Homo Sapiens; identical to SEQ ID NO: 258479
  misc_feature (42)..(42): n is a, c, g, or t

SEQ ID NO: 278568 - DNA, 459 bp, Homo Sapiens; identical to SEQ ID NO: 258480

SEQ ID NO: 278569 - DNA, 1619 bp, Homo Sapiens; identical to SEQ ID NO: 258484
  misc_feature (11)..(11): n is a, c, g, or t

SEQ ID NO: 278570 - DNA, 1540 bp, Homo Sapiens; identical to SEQ ID NO: 258485
  misc_feature (9)..(9): n is a, c, g, or t
  misc_feature (23)..(23): n is a, c, g, or t
  misc_feature (1451)..(1451): n is a, c, g, or t
  misc_feature (1474)..(1474): n is a, c, g, or t
  misc_feature (1476)..(1476): n is a, c, g, or t
  misc_feature (1478)..(1478): n is a, c, g, or t
  misc_feature (1511)..(1511): n is a, c, g, or t
  misc_feature (1513)..(1513): n is a, c, g, or t
  misc_feature (1540)..(1540): n is a, c, g, or t

SEQ ID NO: 278571 - DNA, 873 bp, Homo Sapiens; identical to SEQ ID NO: 258486
  misc_feature (745)..(745): n is a, c, g, or t
  misc_feature (825)..(825): n is a, c, g, or t
  misc_feature (844)..(844): n is a, c, g, or t

SEQ ID NO: 278572 - DNA, 1217 bp, Homo Sapiens; identical to SEQ ID NO: 258487
  misc_feature (1002)..(1020): n is a, c, g, or t

SEQ ID NO: 278573 - DNA, 1734 bp, Homo Sapiens; identical to SEQ ID NO: 258498
  misc_feature (127)..(127): n is a, c, g, or t

SEQ ID NO: 278574 - DNA, 958 bp, Homo Sapiens; identical to SEQ ID NO: 258499

SEQ ID NO: 278575 - DNA, 2002 bp, Homo Sapiens; identical to SEQ ID NO: 258502

SEQ ID NO: 278576 - DNA, 977 bp, Homo Sapiens; identical to SEQ ID NO: 258503

SEQ ID NO: 278577 - DNA, 336 bp, Homo Sapiens; identical to SEQ ID NO: 258504
  misc_feature (27)..(27): n is a, c, g, or t
  misc_feature (305)..(305): n is a, c, g, or t
  misc_feature (323)..(323): n is a, c, g, or t

SEQ ID NO: 278578 - DNA, 2676 bp, Homo Sapiens; identical to SEQ ID NO: 258509
  misc_feature (1164)..(1164): n is a, c, g, or t
  misc_feature (1954)..(1954): n is a, c, g, or t
  misc_feature (2001)..(2001): n is a, c, g, or t
  misc_feature (2003)..(2003): n is a, c, g, or t
  misc_feature (2008)..(2008): n is a, c, g, or t
  misc_feature (2024)..(2024): n is a, c, g, or t
  misc_feature (2062)..(2062): n is a, c, g, or t
  misc_feature (2064)..(2065): n is a, c, g, or t
  misc_feature (2074)..(2074): n is a, c, g, or t
  misc_feature (2084)..(2084): n is a, c, g, or t
  misc_feature (2090)..(2090): n is a, c, g, or t
  misc_feature (2093)..(2093): n is a, c, g, or t
  misc_feature (2105)..(2105): n is a, c, g, or t
  misc_feature (2110)..(2110): n is a, c, g, or t
  misc_feature (2112)..(2113): n is a, c, g, or t
  misc_feature (2115)..(2115): n is a, c, g, or t
  misc_feature (2118)..(2118): n is a, c, g, or t
  misc_feature (2121)..(2123): n is a, c, g, or t
  misc_feature (2125)..(2125): n is a, c, g, or t
  misc_feature (2127)..(2127): n is a, c, g, or t
  misc_feature (2129)..(2129): n is a, c, g, or t
  misc_feature (2131)..(2131): n is a, c, g, or t
  misc_feature (2135)..(2135): n is a, c, g, or t
  misc_feature (2137)..(2138): n is a, c, g, or t
  misc_feature (2145)..(2145): n is a, c, g, or t
  misc_feature (2152)..(2152): n is a, c, g, or t
  misc_feature (2154)..(2154): n is a, c, g, or t
  misc_feature (2163)..(2163): n is a, c, g, or t
  misc_feature (2178)..(2178): n is a, c, g, or t
  misc_feature (2183)..(2183): n is a, c, g, or t
  misc_feature (2205)..(2208): n is a, c, g, or t
  misc_feature (2210)..(2212): n is a, c, g, or t
  misc_feature (2214)..(2214): n is a, c, g, or t
  misc_feature (2221)..(2222): n is a, c, g, or t
  misc_feature (2273)..(2273): n is a, c, g, or t
  misc_feature (2283)..(2283): n is a, c, g, or t
  misc_feature (2291)..(2291): n is a, c, g, or t
  misc_feature (2295)..(2295): n is a, c, g, or t
  misc_feature (2301)..(2301): n is a, c, g, or t
  misc_feature (2310)..(2310): n is a, c, g, or t
  misc_feature (2314)..(2314): n is a, c, g, or t
  misc_feature (2316)..(2316): n is a, c, g, or t
  misc_feature (2318)..(2318): n is a, c, g, or t
  misc_feature (2322)..(2323): n is a, c, g, or t
  misc_feature (2325)..(2326): n is a, c, g, or t
  misc_feature (2328)..(2328): n is a, c, g, or t
  misc_feature (2330)..(2330): n is a, c, g, or t
  misc_feature (2333)..(2334): n is a, c, g, or t
  misc_feature (2340)..(2340): n is a, c, g, or t
  misc_feature (2343)..(2344): n is a, c, g, or t
  misc_feature (2351)..(2351): n is a, c, g, or t
  misc_feature (2353)..(2353): n is a, c, g, or t
  misc_feature (2358)..(2359): n is a, c, g, or t
  misc_feature (2373)..(2373): n is a, c, g, or t
  misc_feature (2380)..(2380): n is a, c, g, or t
  misc_feature (2397)..(2397): n is a, c, g, or t
  misc_feature (2406)..(2406): n is a, c, g, or t
  misc_feature (2421)..(2421): n is a, c, g, or t
  misc_feature (2454)..(2454): n is a, c, g, or t
  misc_feature (2456)..(2456): n is a, c, g, or t
  misc_feature (2463)..(2463): n is a, c, g, or t
  misc_feature (2468)..(2469): n is a, c, g, or t
  misc_feature (2484)..(2484): n is a, c, g, or t
  misc_feature (2556)..(2557): n is a, c, g, or t
  misc_feature (2583)..(2583): n is a, c, g, or t
  misc_feature (2621)..(2621): n is a, c, g, or t
  misc_feature (2632)..(2632): n is a, c, g, or t
  misc_feature (2638)..(2639): n is a, c, g, or t
  misc_feature (2647)..(2647): n is a, c, g, or t
  misc_feature (2651)..(2652): n is a, c, g, or t

SEQ ID NO: 278579 - DNA, 496 bp, Homo Sapiens; identical to SEQ ID NO: 258510
  misc_feature (450)..(450): n is a, c, g, or t

SEQ ID NO: 278580 - DNA, 413 bp, Homo Sapiens; identical to SEQ ID NO: 258511

SEQ ID NO: 278581 - DNA, 442 bp, Homo Sapiens; identical to SEQ ID NO: 258512
  misc_feature (15)..(15): n is a, c, g, or t
  misc_feature (33)..(33): n is a, c, g, or t
  misc_feature (389)..(389): n is a, c, g, or t

SEQ ID NO: 278582 - DNA, 2049 bp, Homo Sapiens; identical to SEQ ID NO: 258518
  misc_feature (110)..(110): n is a, c, g, or t
  misc_feature (930)..(930): n is a, c, g, or t
  misc_feature (1988)..(1988): n is a, c, g, or t

SEQ ID NO: 278583 - DNA, 1067 bp, Homo Sapiens; identical to SEQ ID NO: 258519
  misc_feature (48)..(49): n is a, c, g, or t
  misc_feature (58)..(59): n is a, c, g, or t
  misc_feature (67)..(67): n is a, c, g, or t
  misc_feature (926)..(926): n is a, c, g, or t
  misc_feature (937)..(937): n is a, c, g, or t
  misc_feature (951)..(951): n is a, c, g, or t
  misc_feature (974)..(974): n is a, c, g, or t
  misc_feature (976)..(976): n is a, c, g, or t

SEQ ID NO: 278584 - DNA, 1304 bp, Homo Sapiens; identical to SEQ ID NO: 258520

SEQ ID NO: 278585 - DNA, 951 bp, Homo Sapiens; identical to SEQ ID NO: 258522
  misc_feature (779)..(814): n is a, c, g, or t

SEQ ID NO: 278586 - DNA, 1274 bp, Homo Sapiens; identical to SEQ ID NO: 258523
  misc_feature (196)..(196): n is a, c, g, or t
  misc_feature (975)..(991): n is a, c, g, or t
  misc_feature (1035)..(1035): n is a, c, g, or t
  misc_feature (1111)..(1112): n is a, c, g, or t

SEQ ID NO: 278587 - DNA, 990 bp, Homo Sapiens; identical to SEQ ID NO: 258538
  misc_feature (815)..(815): n is a, c, g, or t
  misc_feature (888)..(888): n is a, c, g, or t
  misc_feature (906)..(906): n is a, c, g, or t
  misc_feature (918)..(918): n is a, c, g, or t
  misc_feature (920)..(920): n is a, c, g, or t
  misc_feature (926)..(926): n is a, c, g, or t
  misc_feature (935)..(935): n is a, c, g, or t
  misc_feature (952)..(952): n is a, c, g, or t
  misc_feature (956)..(956): n is a, c, g, or t
  misc_feature (968)..(968): n is a, c, g, or t
  misc_feature (974)..(974): n is a, c, g, or t
  misc_feature (981)..(983): n is a, c, g, or t

SEQ ID NO: 278588 - DNA, 1302 bp, Homo Sapiens; identical to SEQ ID NO: 258539

SEQ ID NO: 278589 - DNA, 386 bp, Homo Sapiens; identical to SEQ ID NO: 258540

SEQ ID NO: 278590 - DNA, 515 bp, Homo Sapiens; identical to SEQ ID NO: 258545
  misc_feature (440)..(473): n is a, c, g, or t

SEQ ID NO: 278591 - DNA, 930 bp, Homo Sapiens; identical to SEQ ID NO: 258546

SEQ ID NO: 278592 - DNA, 1275 bp, Homo Sapiens; identical to SEQ ID NO: 258547

SEQ ID NO: 278593 - DNA, 1562 bp, Homo Sapiens; identical to SEQ ID NO: 258548
  misc_feature (486)..(486): n is a, c, g, or t
  misc_feature (1213)..(1213): n is a, c, g, or t
  misc_feature (1274)..(1302): n is a, c, g, or t
  misc_feature (1540)..(1540): n is a, c, g, or t

SEQ ID NO: 278594 - DNA, 348 bp, Homo Sapiens; identical to SEQ ID NO: 258549
  misc_feature (307)..(307): n is a, c, g, or t
  misc_feature (334)..(334): n is a, c, g, or t

SEQ ID NO: 278595 - DNA, 1436 bp, Homo Sapiens; identical to SEQ ID NO: 258551
  misc_feature (929)..(929): n is a, c, g, or t
  misc_feature (1001)..(1001): n is a, c, g, or t
  misc_feature (1432)..(1432): n is a, c, g, or t

SEQ ID NO: 278596 - DNA, 1031 bp, Homo Sapiens; identical to SEQ ID NO: 258552
  misc_feature (68)..(68): n is a, c, g, or t
  misc_feature (181)..(181): n is a, c, g, or t

SEQ ID NO: 278597 - DNA, 2343 bp, Homo Sapiens; identical to SEQ ID NO: 258561
  misc_feature (2144)..(2294): n is a, c, g, or t

SEQ ID NO: 278598 - DNA, 1049 bp, Homo Sapiens; identical to SEQ ID NO: 258562
  misc_feature (925)..(925): n is a, c, g, or t
  misc_feature (933)..(933): n is a, c, g, or t
  misc_feature (952)..(952): n is a, c, g, or t
  misc_feature (1002)..(1002): n is a, c, g, or t
  misc_feature (1007)..(1007): n is a, c, g, or t
  misc_feature (1012)..(1012): n is a, c, g, or t
  misc_feature (1023)..(1023): n is a, c, g, or t
  misc_feature (1032)..(1032): n is a, c, g, or t

SEQ ID NO: 278599 - DNA, 525 bp, Homo Sapiens; identical to SEQ ID NO: 258563
  misc_feature (22)..(22): n is a, c, g, or t
  misc_feature (32)..(32): n is a, c, g, or t
  misc_feature (39)..(39): n is a, c, g, or t
  misc_feature (65)..(65): n is a, c, g, or t
  misc_feature (167)..(167): n is a, c, g, or t

SEQ ID NO: 278600 - DNA, 665 bp, Homo Sapiens; identical to SEQ ID NO: 258564
  misc_feature (48)..(48): n is a, c, g, or t
  misc_feature (88)..(88): n is a, c, g, or t
  misc_feature (570)..(570): n is a, c, g, or t
  misc_feature (578)..(578): n is a, c, g, or t
  misc_feature (637)..(637): n is a, c, g, or t

SEQ ID NO: 278601 - DNA, 511 bp, Homo Sapiens; identical to SEQ ID NO: 258565
  misc_feature (52)..(52): n is a, c, g, or t
  misc_feature (79)..(79): n is a, c, g, or t
  misc_feature (117)..(117): n is a, c, g, or t

SEQ ID NO: 278602 - DNA, 1780 bp, Homo Sapiens; identical to SEQ ID NO: 258566
  misc_feature (710)..(710): n is a, c, g, or t
  misc_feature (1082)..(1082): n is a, c, g, or t
  misc_feature (1084)..(1084): n is a, c, g, or t
  misc_feature (1726)..(1726): n is a, c, g, or t
  misc_feature (1729)..(1729): n is a, c, g, or t

SEQ ID NO: 278603 - DNA, 996 bp, Homo Sapiens; identical to SEQ ID NO: 258567

SEQ ID NO: 278604 - DNA, 1367 bp, Homo Sapiens; identical to SEQ ID NO: 258568
  misc_feature (333)..(333): n is a, c, g, or t
  misc_feature (1357)..(1357): n is a, c, g, or t

SEQ ID NO: 278605 - DNA, 905 bp, Homo Sapiens; identical to SEQ ID NO: 258569

SEQ ID NO: 278606 - DNA, 1755 bp, Homo Sapiens; identical to SEQ ID NO: 258575
  misc_feature (640)..(640): n is a, c, g, or t
  misc_feature (871)..(871): n is a, c, g, or t

SEQ ID NO: 278607 - DNA, 741 bp, Homo Sapiens; identical to SEQ ID NO: 258576
  misc_feature (566)..(566): n is a, c, g, or t

SEQ ID NO: 278608 - DNA, 431 bp, Homo Sapiens; identical to SEQ ID NO: 258577
  misc_feature (49)..(49): n is a, c, g, or t

SEQ ID NO: 278609 - DNA, 1611 bp, Homo Sapiens; identical to SEQ ID NO: 258578
  misc_feature (5)..(5): n is a, c, g, or t
  misc_feature (9)..(9): n is a, c, g, or t
  misc_feature (163)..(241): n is a, c, g, or t

SEQ ID NO: 278610 - DNA, 336 bp, Homo Sapiens; identical to SEQ ID NO: 258579
  misc_feature (97)..(97): n is a, c, g, or t
  misc_feature (305)..(305): n is a, c, g, or t

SEQ ID NO: 278611 - DNA, 1063 bp, Homo Sapiens; identical to SEQ ID NO: 258605
  misc_feature (3)..(3): n is a, c, g, or t
  misc_feature (10)..(11): n is a, c, g, or t
  misc_feature (39)..(40): n is a, c, g, or t
  misc_feature (50)..(50): n is a, c, g, or t
  misc_feature (71)..(71): n is a, c, g, or t
  misc_feature (127)..(127): n is a, c, g, or t
  misc_feature (755)..(755): n is a, c, g, or t
  misc_feature (1000)..(1000): n is a, c, g, or t
  misc_feature (1003)..(1003): n is a, c, g, or t
  misc_feature (1006)..(1006): n is a, c, g, or t
  misc_feature (1025)..(1025): n is a, c, g, or t
  misc_feature (1044)..(1044): n is a, c, g, or t

SEQ ID NO: 278612 - DNA, 699 bp, Homo Sapiens; identical to SEQ ID NO: 258606
  misc_feature (176)..(184): n is a, c, g, or t

SEQ ID NO: 278613 - DNA, 595 bp, Homo Sapiens; identical to SEQ ID NO: 258617

SEQ ID NO: 278614 - DNA, 1261 bp, Homo Sapiens; identical to SEQ ID NO: 258618

SEQ ID NO: 278615 - DNA, 1058 bp, Homo Sapiens; identical to SEQ ID NO: 258619
  misc_feature (5)..(5): n is a, c, g, or t
  misc_feature (9)..(9): n is a, c, g, or t
  misc_feature (14)..(14): n is a, c, g, or t
  misc_feature (26)..(27): n is a, c, g, or t
  misc_feature (30)..(30): n is a, c, g, or t
  misc_feature (39)..(39): n is a, c, g, or t
  misc_feature (46)..(46): n is a, c, g, or t
  misc_feature (50)..(50): n is a, c, g, or t
  misc_feature (53)..(53): n is a, c, g, or t
  misc_feature (62)..(212): n is a, c, g, or t
  misc_feature (550)..(550): n is a, c, g, or t
  misc_feature (648)..(648): n is a, c, g, or t

SEQ ID NO: 278616 - DNA, 1084 bp, Homo Sapiens; identical to SEQ ID NO: 258620
  misc_feature (4)..(4): n is a, c, g, or t
  misc_feature (12)..(12): n is a, c, g, or t
  misc_feature (16)..(16): n is a, c, g, or t
  misc_feature (22)..(22): n is a, c, g, or t
  misc_feature (71)..(71): n is a, c, g, or t
  misc_feature (76)..(76): n is a, c, g, or t
  misc_feature (86)..(86): n is a, c, g, or t
  misc_feature (91)..(91): n is a, c, g, or t
  misc_feature (116)..(116): n is a, c, g, or t
  misc_feature (181)..(181): n is a, c, g, or t
  misc_feature (187)..(187): n is a, c, g, or t
  misc_feature (190)..(190): n is a, c, g, or t
  misc_feature (419)..(474): n is a, c, g, or t
  misc_feature (524)..(575): n is a, c, g, or t

SEQ ID NO: 278617 - DNA, 2328 bp, Homo Sapiens; identical to SEQ ID NO: 258623
  misc_feature (2120)..(2120): n is a, c, g, or t

SEQ ID NO: 278618 - DNA, 630 bp, Homo Sapiens; identical to SEQ ID NO: 258624

SEQ ID NO: 278619 - DNA, 980 bp, Homo Sapiens; identical to SEQ ID NO: 258626
  misc_feature (722)..(722): n is a, c, g, or t
  misc_feature (771)..(771): n is a, c, g, or t
  misc_feature (786)..(786): n is a, c, g, or t
  misc_feature (813)..(813): n is a, c, g, or t
  misc_feature (907)..(907): n is a, c, g, or t

SEQ ID NO: 278620 - DNA, 1077 bp, Homo Sapiens; identical to SEQ ID NO: 258627
  misc_feature (5)..(5): n is a, c, g, or t
  misc_feature (7)..(7): n is a, c, g, or t
  misc_feature (11)..(11): n is a, c, g, or t
  misc_feature (18)..(18): n is a, c, g, or t
  misc_feature (35)..(35): n is a, c, g, or t
  misc_feature (39)..(39): n is a, c, g, or t
  misc_feature (43)..(43): n is a, c, g, or t
  misc_feature (55)..(55): n is a, c, g, or t
  misc_feature (64)..(65): n is a, c, g, or t
  misc_feature (68)..(68): n is a, c, g, or t
  misc_feature (71)..(71): n is a, c, g, or t
  misc_feature (83)..(83): n is a, c, g, or t
  misc_feature (98)..(99): n is a, c, g, or t
  misc_feature (117)..(117): n is a, c, g, or t
  misc_feature (130)..(130): n is a, c, g, or t
  misc_feature (143)..(143): n is a, c, g, or t
  misc_feature (195)..(195): n is a, c, g, or t
  misc_feature (262)..(262): n is a, c, g, or t
  misc_feature (315)..(315): n is a, c, g, or t
  misc_feature (385)..(385): n is a, c, g, or t
  misc_feature (390)..(390): n is a, c, g, or t
  misc_feature (433)..(433): n is a, c, g, or t
  misc_feature (480)..(480): n is a, c, g, or t
  misc_feature (485)..(485): n is a, c, g, or t
  misc_feature (535)..(535): n is a, c, g, or t
  misc_feature (541)..(541): n is a, c, g, or t
  misc_feature (550)..(550): n is a, c, g, or t
  misc_feature (567)..(567): n is a, c, g, or t
  misc_feature (592)..(592): n is a, c, g, or t
  misc_feature (646)..(646): n is a, c, g, or t
  misc_feature (663)..(663): n is a, c, g, or t
  misc_feature (688)..(688): n is a, c, g, or t
  misc_feature (690)..(690): n is a, c, g, or t

SEQ ID NO: 278621 - DNA, 2018 bp, Homo Sapiens; identical to SEQ ID NO: 258631
  misc_feature (487)..(487): n is a, c, g, or t
  misc_feature (618)..(618): n is a, c, g, or t
  misc_feature (1675)..(1717): n is a, c, g, or t

SEQ ID NO: 278622 - DNA, 855 bp, Homo Sapiens; identical to SEQ ID NO: 258632
  misc_feature (149)..(149): n is a, c, g, or t
  misc_feature (302)..(351): n is a, c, g, or t
  misc_feature (382)..(538): n is a, c, g, or t

SEQ ID NO: 278623 - DNA, 846 bp, Homo Sapiens; identical to SEQ ID NO: 258633
  misc_feature (309)..(465): n is a, c, g, or t
  misc_feature (497)..(545): n is a, c, g, or t

SEQ ID NO: 278624 - DNA, 1378 bp, Homo Sapiens; identical to SEQ ID NO: 258638
  misc_feature (25)..(25): n is a, c, g, or t
  misc_feature (27)..(27): n is a, c, g, or t
  misc_feature (29)..(29): n is a, c, g, or t
  misc_feature (33)..(33): n is a, c, g, or t
  misc_feature (38)..(38): n is a, c, g, or t
  misc_feature (40)..(40): n is a, c, g, or t
  misc_feature (46)..(46): n is a, c, g, or t
  misc_feature (48)..(48): n is a, c, g, or t
  misc_feature (50)..(51): n is a, c, g, or t
  misc_feature (55)..(55): n is a, c, g, or t
  misc_feature (57)..(57): n is a, c, g, or t
  misc_feature (79)..(79): n is a, c, g, or t
  misc_feature (88)..(89): n is a, c, g, or t
  misc_feature (93)..(93): n is a, c, g, or t
  misc_feature (98)..(98): n is a, c, g, or t
  misc_feature (106)..(106): n is a, c, g, or t
  misc_feature (113)..(113): n is a, c, g, or t
  misc_feature (147)..(147): n is a, c, g, or t
  misc_feature (178)..(178): n is a, c, g, or t
  misc_feature (288)..(288): n is a, c, g, or t
  misc_feature (646)..(690): n is a, c, g, or t
  misc_feature (771)..(801): n is a, c, g, or t
  misc_feature (1049)..(1049): n is a, c, g, or t
  misc_feature (1247)..(1247): n is a, c, g, or t
  misc_feature (1291)..(1291): n is a, c, g, or t
  misc_feature (1312)..(1312): n is a, c, g, or t
  misc_feature (1321)..(1321): n is a, c, g, or t
  misc_feature (1333)..(1333): n is a, c, g, or t
  misc_feature (1353)..(1353): n is a, c, g, or t
  misc_feature (1363)..(1363): n is a, c, g, or t

SEQ ID NO: 278625 - DNA, 673 bp, Homo Sapiens; identical to SEQ ID NO: 258639
  misc_feature (181)..(181): n is a, c, g, or t
  misc_feature (233)..(264): n is a, c, g, or t
  misc_feature (309)..(353): n is a, c, g, or t
  misc_feature (434)..(464): n is a, c, g, or t
  misc_feature (490)..(603): n is a, c, g, or t

SEQ ID NO: 278626 - DNA, 1747 bp, Homo Sapiens; identical to SEQ ID NO: 258641
  misc_feature (824)..(824): n is a, c, g, or t
  misc_feature (1028)..(1053): n is a, c, g, or t

SEQ ID NO: 278627 - DNA, 1065 bp, Homo Sapiens; identical to SEQ ID NO: 258642
  misc_feature (129)..(185): n is a, c, g, or t
  misc_feature (916)..(916): n is a, c, g, or t
  misc_feature (954)..(954): n is a, c, g, or t
  misc_feature (1012)..(1012): n is a, c, g, or t

SEQ ID NO: 278628 - DNA, 720 bp, Homo Sapiens; identical to SEQ ID NO: 258644
  misc_feature (19)..(19): n is a, c, g, or t
  misc_feature (45)..(45): n is a, c, g, or t

SEQ ID NO: 278629 - DNA, 909 bp, Homo Sapiens; identical to SEQ ID NO: 258645
  misc_feature (773)..(773): n is a, c, g, or t

SEQ ID NO: 278630 - DNA, 1252 bp, Homo Sapiens; identical to SEQ ID NO: 258647

SEQ ID NO: 278631 - DNA, 789 bp, Homo Sapiens; identical to SEQ ID NO: 258648
  misc_feature (736)..(736): n is a, c, g, or t

SEQ ID NO: 278632 - DNA, 896 bp, Homo Sapiens; identical to SEQ ID NO: 258649
  misc_feature (7)..(8): n is a, c, g, or t
  misc_feature (44)..(44): n is a, c, g, or t
  misc_feature (61)..(61): n is a, c, g, or t
  misc_feature (173)..(173): n is a, c, g, or t
  misc_feature (178)..(178): n is a, c, g, or t
  misc_feature (197)..(197): n is a, c, g, or t
  misc_feature (203)..(203): n is a, c, g, or t
  misc_feature (205)..(205): n is a, c, g, or t
  misc_feature (221)..(221): n is a, c, g, or t
  misc_feature (226)..(249): n is a, c, g, or t
  misc_feature (252)..(253): n is a, c, g, or t
  misc_feature (265)..(265): n is a, c, g, or t
  misc_feature (270)..(270): n is a, c, g, or t
  misc_feature (272)..(272): n is a, c, g, or t
  misc_feature (275)..(275): n is a, c, g, or t
  misc_feature (305)..(305): n is a, c, g, or t
  misc_feature (309)..(309): n is a, c, g, or t
  misc_feature (313)..(313): n is a, c, g, or t
  misc_feature (317)..(318): n is a, c, g, or t
  misc_feature (322)..(322): n is a, c, g, or t
  misc_feature (324)..(401): n is a, c, g, or t
  misc_feature (421)..(445): n is a, c, g, or t

SEQ ID NO: 278633 - DNA, 518 bp, Homo Sapiens; identical to SEQ ID NO: 258650
  misc_feature (370)..(370): n is a, c, g, or t

SEQ ID NO: 278634 - DNA, 564 bp, Homo Sapiens; identical to SEQ ID NO: 258652

SEQ ID NO: 278635 - DNA, 456 bp, Homo Sapiens; identical to SEQ ID NO: 258653
  misc_feature (31)..(31): n is a, c, g, or t

SEQ ID NO: 278636 - DNA, 2562 bp, Homo Sapiens; identical to SEQ ID NO: 258654

SEQ ID NO: 278637 - DNA, 912 bp, Homo Sapiens; identical to SEQ ID NO: 258655

SEQ ID NO: 278638 - DNA, 548 bp, Homo Sapiens; identical to SEQ ID NO: 258656

SEQ ID NO: 278639 - DNA, 1086 bp, Homo Sapiens; identical to SEQ ID NO: 258657
  misc_feature (1018)..(1029): n is a, c, g, or t

SEQ ID NO: 278640 - DNA, 987 bp, Homo Sapiens; identical to SEQ ID NO: 258658

SEQ ID NO: 278641 - DNA, 993 bp, Homo Sapiens; identical to SEQ ID NO: 258659

SEQ ID NO: 278642 - DNA, 994 bp, Homo Sapiens; identical to SEQ ID NO: 258670

SEQ ID NO: 278643 - DNA, 1108 bp, Homo Sapiens; identical to SEQ ID NO: 258671
  misc_feature (1064)..(1064): n is a, c, g, or t

SEQ ID NO: 278644 - DNA, 446 bp, Homo Sapiens; identical to SEQ ID NO: 258681

SEQ ID NO: 278645 - DNA, 2087 bp, Homo Sapiens; identical to SEQ ID NO: 258682

SEQ ID NO: 278646 - DNA, 1292 bp, Homo Sapiens; identical to SEQ ID NO: 258684
  misc_feature (5)..(5): n is a, c, g, or t
  misc_feature (43)..(43): n is a, c, g, or t
  misc_feature (362)..(362): n is a, c, g, or t
  misc_feature (436)..(436): n is a, c, g, or t
  misc_feature (1148)..(1148): n is a, c, g, or t

SEQ ID NO: 278647 - DNA, 405 bp, Homo Sapiens; identical to SEQ ID NO: 258685

SEQ ID NO: 278648 - DNA, 1234 bp, Homo Sapiens; identical to SEQ ID NO: 258693
  misc_feature (711)..(711): n is a, c, g, or t

SEQ ID NO: 278649 - DNA, 942 bp, Homo Sapiens; identical to SEQ ID NO: 258694
  misc_feature (10)..(10): n is a, c, g, or t
  misc_feature (13)..(13): n is a, c, g, or t
  misc_feature (18)..(19): n is a, c, g, or t
  misc_feature (22)..(22): n is a, c, g, or t
  misc_feature (25)..(26): n is a, c, g, or t
  misc_feature (34)..(34): n is a, c, g, or t
  misc_feature (50)..(50): n is a, c, g, or t
  misc_feature (62)..(62): n is a, c, g, or t
  misc_feature (74)..(74): n is a, c, g, or t
  misc_feature (109)..(109): n is a, c, g, or t

SEQ ID NO: 278650 - DNA, 1547 bp, Homo Sapiens; identical to SEQ ID NO: 258696
  misc_feature (1480)..(1480): n is a, c, g, or t

SEQ ID NO: 278651 - DNA, 414 bp, Homo Sapiens; identical to SEQ ID NO: 258697
  misc_feature (17)..(17): n is a, c, g, or t
  misc_feature (342)..(350): n is a, c, g, or t
  misc_feature (359)..(359): n is a, c, g, or t

SEQ ID NO: 278652 - DNA, 2124 bp, Homo Sapiens; identical to SEQ ID NO: 258711
  misc_feature (1475)..(1475): n is a, c, g, or t
  misc_feature (1483)..(1483): n is a, c, g, or t
  misc_feature (1545)..(1545): n is a, c, g, or t
  misc_feature (1562)..(1562): n is a, c, g, or t
  misc_feature (1680)..(1680): n is a, c, g, or t
  misc_feature (1689)..(1690): n is a, c, g, or t
  misc_feature (1694)..(1694): n is a, c, g, or t
  misc_feature (1698)..(1699): n is a, c, g, or t
  misc_feature (1711)..(1711): n is a, c, g, or t
  misc_feature (1719)..(1719): n is a, c, g, or t
  misc_feature (1746)..(1746): n is a, c, g, or t
  misc_feature (1805)..(1805): n is a, c, g, or t
  misc_feature (1807)..(1807): n is a, c, g, or t

SEQ ID NO: 278653 - DNA, 1415 bp, Homo Sapiens; identical to SEQ ID NO: 258712
  misc_feature (1258)..(1269): n is a, c, g, or t

SEQ ID NO: 278654 - DNA, 1098 bp, Homo Sapiens; identical to SEQ ID NO: 258713
  misc_feature (814)..(823): n is a, c, g, or t
  misc_feature (925)..(946): n is a, c, g, or t

SEQ ID NO: 278655 - DNA, 1030 bp, Homo Sapiens; identical to SEQ ID NO: 258714
  misc_feature (908)..(908): n is a, c, g, or t
  misc_feature (937)..(937): n is a, c, g, or t
  misc_feature (941)..(941): n is a, c, g, or t
  misc_feature (944)..(944): n is a, c, g, or t
  misc_feature (981)..(981): n is a, c, g, or t
  misc_feature (984)..(985): n is a, c, g, or t
  misc_feature (992)..(992): n is a, c, g, or t
  misc_feature (994)..(994): n is a, c, g, or t
  misc_feature (998)..(998): n is a, c, g, or t
  misc_feature (1015)..(1015): n is a, c, g, or t
  misc_feature (1023)..(1023): n is a, c, g, or t

SEQ ID NO: 278656 - DNA, 1808 bp, Homo Sapiens; identical to SEQ ID NO: 258715

SEQ ID NO: 278657 - DNA, 1322 bp, Homo Sapiens; identical to SEQ ID NO: 258716
  misc_feature (1174)..(1174): n is a, c, g, or t

SEQ ID NO: 278658 - DNA, 423 bp, Homo Sapiens; identical to SEQ ID NO: 258717

SEQ ID NO: 278659 - DNA, 397 bp, Homo Sapiens; identical to SEQ ID NO: 258720

SEQ ID NO: 278660 - DNA, 1250 bp, Homo Sapiens; identical to SEQ ID NO: 258721

SEQ ID NO: 278661 - DNA, 851 bp, Homo Sapiens; identical to SEQ ID NO: 258722

SEQ ID NO: 278662 - DNA, 1353 bp, Homo Sapiens; identical to SEQ ID NO: 258723
  misc_feature (25)..(25): n is a, c, g, or t
  misc_feature (72)..(72): n is a, c, g, or t
  misc_feature (340)..(341): n is a, c, g, or t
  misc_feature (410)..(767): n is a, c, g, or t
  misc_feature (1286)..(1286): n is a, c, g, or t

SEQ ID NO: 278663 - DNA, 1051 bp, Homo Sapiens; identical to SEQ ID NO: 258724
  misc_feature (10)..(10): n is a, c, g, or t
  misc_feature (18)..(18): n is a, c, g, or t
  misc_feature (21)..(21): n is a, c, g, or t
  misc_feature (25)..(25): n is a, c, g, or t
  misc_feature (34)..(34): n is a, c, g, or t
  misc_feature (42)..(42): n is a, c, g, or t
  misc_feature (45)..(45): n is a, c, g, or t
  misc_feature (57)..(58): n is a, c, g, or t
  misc_feature (69)..(69): n is a, c, g, or t
  misc_feature (85)..(85): n is a, c, g, or t
  misc_feature (102)..(102): n is a, c, g, or t
  misc_feature (106)..(106): n is a, c, g, or t
  misc_feature (109)..(109): n is a, c, g, or t
  misc_feature (111)..(111): n is a, c, g, or t
  misc_feature (114)..(115): n is a, c, g, or t
  misc_feature (119)..(119): n is a, c, g, or t
  misc_feature (130)..(130): n is a, c, g, or t
  misc_feature (198)..(198): n is a, c, g, or t
  misc_feature (209)..(209): n is a, c, g, or t
  misc_feature (214)..(214): n is a, c, g, or t
  misc_feature (224)..(224): n is a, c, g, or t
  misc_feature (229)..(230): n is a, c, g, or t
  misc_feature (232)..(232): n is a, c, g, or t
  misc_feature (239)..(239): n is a, c, g, or t
  misc_feature (242)..(599): n is a, c, g, or t

SEQ ID NO: 278664 - DNA, 152 bp, Homo Sapiens; identical to SEQ ID NO: 258725

SEQ ID NO: 278665 - DNA, 542 bp, Homo Sapiens; identical to SEQ ID NO: 258732

SEQ ID NO: 278666 - DNA, 1364 bp, Homo Sapiens; identical to SEQ ID NO: 258733
  misc_feature (1329)..(1329): n is a, c, g, or t

SEQ ID NO: 278667 - DNA, 1427 bp, Homo Sapiens; identical to SEQ ID NO: 258734
  misc_feature (1005)..(1005): n is a, c, g, or t
  misc_feature (1198)..(1246): n is a, c, g, or t

SEQ ID NO: 278668 - DNA, 924 bp, Homo Sapiens; identical to SEQ ID NO: 258735
  misc_feature (836)..(846): n is a, c, g, or t

SEQ ID NO: 278669 - DNA, 508 bp, Homo Sapiens; identical to SEQ ID NO: 258736
  misc_feature (408)..(408): n is a, c, g, or t
  misc_feature (426)..(426): n is a, c, g, or t
  misc_feature (433)..(433): n is a, c, g, or t
  misc_feature (464)..(464): n is a, c, g, or t
  misc_feature (472)..(472): n is a, c, g, or t
  misc_feature (477)..(477): n is a, c, g, or t

SEQ ID NO: 278670 - DNA, 865 bp, Homo Sapiens; identical to SEQ ID NO: 258739
  misc_feature (853)..(853): n is a, c, g, or t

SEQ ID NO: 278671 - DNA, 370 bp, Homo Sapiens; identical to SEQ ID NO: 258740
  misc_feature (22)..(22): n is a, c, g, or t
  misc_feature (190)..(272): n is a, c, g, or t

SEQ ID NO: 278672 - DNA, 1344 bp, Homo Sapiens; identical to SEQ ID NO: 258748
  misc_feature (958)..(958): n is a, c, g, or t

SEQ ID NO: 278673 - DNA, 782 bp, Homo Sapiens; identical to SEQ ID NO: 258749

SEQ ID NO: 278674 - DNA, 1425 bp, Homo Sapiens; identical to SEQ ID NO: 258751
  misc_feature (561)..(561): n is a, c, g, or t

SEQ ID NO: 278675 - DNA, 2073 bp, Homo Sapiens; identical to SEQ ID NO: 258752
  misc_feature (1166)..(1166): n is a, c, g, or t
  misc_feature (1337)..(1337): n is a, c, g, or t
  misc_feature (1389)..(1389): n is a, c, g, or t
  misc_feature (1395)..(1395): n is a, c, g, or t

SEQ ID NO: 278676 - DNA, 482 bp, Homo Sapiens; identical to SEQ ID NO: 258758
  misc_feature (29)..(29): n is a, c, g, or t
  misc_feature (31)..(31): n is a, c, g, or t

SEQ ID NO: 278677 - DNA, 301 bp, Homo Sapiens; identical to SEQ ID NO: 258759
  misc_feature (23)..(23): n is a, c, g, or t
  misc_feature (52)..(52): n is a, c, g, or t
  misc_feature (250)..(250): n is a, c, g, or t

SEQ ID NO: 278678 - DNA, 1195 bp, Homo Sapiens; identical to SEQ ID NO: 258760
  misc_feature (13)..(13): n is a, c, g, or t
  misc_feature (378)..(405): n is a, c, g, or t
  misc_feature (902)..(902): n is a, c, g, or t
  misc_feature (907)..(907): n is a, c, g, or t
  misc_feature (1082)..(1082): n is a, c, g, or t

SEQ ID NO: 278679 - DNA, 542 bp, Homo Sapiens; identical to SEQ ID NO: 258761

SEQ ID NO: 278680 - DNA, 466 bp, Homo Sapiens; identical to SEQ ID NO: 258762
  misc_feature (264)..(264): n is a, c, g, or t
  misc_feature (329)..(329): n is a, c, g, or t
  misc_feature (385)..(414): n is a, c, g, or t
  misc_feature (416)..(416): n is a, c, g, or t

SEQ ID NO: 278681 - DNA, 1061 bp, Homo Sapiens; identical to SEQ ID NO: 258766
  misc_feature (217)..(217): n is a, c, g, or t
  misc_feature (229)..(232): n is a, c, g, or t
  misc_feature (640)..(902): n is a, c, g, or t
  misc_feature (932)..(932): n is a, c, g, or t
  misc_feature (962)..(962): n is a, c, g, or t
  misc_feature (971)..(971): n is a, c, g, or t
  misc_feature (1002)..(1002): n is a, c, g, or t
  misc_feature (1017)..(1017): n is a, c, g, or t
  misc_feature (1019)..(1019): n is a, c, g, or t
  misc_feature (1023)..(1023): n is a, c, g, or t
  misc_feature (1034)..(1034): n is a, c, g, or t
  misc_feature (1037)..(1037): n is a, c, g, or t
  misc_feature (1045)..(1045): n is a, c, g, or t
  misc_feature (1054)..(1054): n is a, c, g, or t
  misc_feature (1058)..(1058): n is a, c, g, or t
  misc_feature (1060)..(1061): n is a, c, g, or t

SEQ ID NO: 278682 - DNA, 373 bp, Homo Sapiens; identical to SEQ ID NO: 258767
  misc_feature (12)..(12): n is a, c, g, or t
  misc_feature (21)..(21): n is a, c, g, or t
  misc_feature (46)..(46): n is a, c, g, or t
  misc_feature (172)..(172): n is a, c, g, or t

SEQ ID NO: 278683 - DNA, 1096 bp, Homo Sapiens; identical to SEQ ID NO: 258773

SEQ ID NO: 278684 - DNA, 1750 bp, Homo Sapiens; identical to SEQ ID NO: 258774
  misc_feature (963)..(1057): n is a, c, g, or t
  misc_feature (1061)..(1062): n is a, c, g, or t
  misc_feature (1064)..(1065): n is a, c, g, or t
  misc_feature (1076)..(1084): n is a, c, g, or t
  misc_feature (1171)..(1183): n is a, c, g, or t
  misc_feature (1264)..(1272): n is a, c, g, or t
  misc_feature (1300)..(1313): n is a, c, g, or t
  misc_feature (1426)..(1440): n is a, c, g, or t
  misc_feature (1442)..(1454): n is a, c, g, or t
  misc_feature (1456)..(1470): n is a, c, g, or t
  misc_feature (1472)..(1474): n is a, c, g, or t
  misc_feature (1476)..(1481): n is a, c, g, or t
  misc_feature (1483)..(1483): n is a, c, g, or t
  misc_feature (1485)..(1493): n is a, c, g, or t
  misc_feature (1495)..(1495): n is a, c, g, or t
  misc_feature (1497)..(1497): n is a, c, g, or t
  misc_feature (1499)..(1501): n is a, c, g, or t
  misc_feature (1503)..(1504): n is a, c, g, or t
  misc_feature (1506)..(1507): n is a, c, g, or t
  misc_feature (1512)..(1512): n is a, c, g, or t
  misc_feature (1519)..(1534): n is a, c, g, or t
  misc_feature (1541)..(1541): n is a, c, g, or t
  misc_feature (1551)..(1655): n is a, c, g, or t
  misc_feature (1680)..(1680): n is a, c, g, or t
  misc_feature (1706)..(1706): n is a, c, g, or t

SEQ ID NO: 278685 - DNA, 858 bp, Homo Sapiens; identical to SEQ ID NO: 165569

SEQ ID NO: 278686 - DNA, 792 bp, Homo Sapiens; identical to SEQ ID NO: 258776

SEQ ID NO: 278687 - DNA, 995 bp, Homo Sapiens; identical to SEQ ID NO: 258783

SEQ ID NO: 278688 - DNA, 1009 bp, Homo Sapiens; identical to SEQ ID NO: 258784
  misc_feature (796)..(796): n is a, c, g, or t
  misc_feature (957)..(957): n is a, c, g, or t
  misc_feature (973)..(973): n is a, c, g, or t

SEQ ID NO: 278689 - DNA, 814 bp, Homo Sapiens; identical to SEQ ID NO: 258786

SEQ ID NO: 278690 - DNA, 1510 bp, Homo Sapiens; identical to SEQ ID NO: 258787

SEQ ID NO: 278691 - DNA, 971 bp, Homo Sapiens; identical to SEQ ID NO: 258788
  misc_feature (843)..(843): n is a, c, g, or t

SEQ ID NO: 278692 - DNA, 1387 bp, Homo Sapiens; identical to SEQ ID NO: 258794
  misc_feature (603)..(603): n is a, c, g, or t
  misc_feature (1029)..(1029): n is a, c, g, or t
  misc_feature (1056)..(1056): n is a, c, g, or t
  misc_feature (1071)..(1071): n is a, c, g, or t
  misc_feature (1100)..(1100): n is a, c, g, or t
  misc_feature (1285)..(1325): n is a, c, g, or t

SEQ ID NO: 278693 - DNA, 436 bp, Homo Sapiens; identical to SEQ ID NO: 258795
  misc_feature (42)..(42): n is a, c, g, or t

SEQ ID NO: 278694 - DNA, 1156 bp, Homo Sapiens; identical to SEQ ID NO: 258796
  misc_feature (91)..(91): n is a, c, g, or t
  misc_feature (478)..(478): n is a, c, g, or t
  misc_feature (573)..(573): n is a, c, g, or t

SEQ ID NO: 278695 - DNA, 914 bp, Homo Sapiens; identical to SEQ ID NO: 73314

SEQ ID NO: 278696 - DNA, 878 bp, Homo Sapiens; identical to SEQ ID NO: 258798

SEQ ID NO: 278697 - DNA, 442 bp, Homo Sapiens; identical to SEQ ID NO: 258799
  misc_feature (352)..(352): n is a, c, g, or t
  misc_feature (381)..(381): n is a, c, g, or t
  misc_feature (391)..(391): n is a, c, g, or t
  misc_feature (421)..(421): n is a, c, g, or t
  misc_feature (429)..(429): n is a, c, g, or t

SEQ ID NO: 278698 - DNA, 716 bp, Homo Sapiens; identical to SEQ ID NO: 15544
  misc_feature (473)..(482): n is a, c, g, or t
  misc_feature (485)..(485): n is a, c, g, or t
  misc_feature (488)..(491): n is a, c, g, or t
  misc_feature (495)..(553): n is a, c, g, or t
  misc_feature (626)..(626): n is a, c, g, or t

SEQ ID NO: 278699 - DNA, 467 bp, Homo Sapiens; identical to SEQ ID NO: 258804
  misc_feature (302)..(302): n is a, c, g, or t
  misc_feature (454)..(454): n is a, c, g, or t

SEQ ID NO: 278700 - DNA, 588 bp, Homo Sapiens; identical to SEQ ID NO: 258805

SEQ ID NO: 278701 - DNA, 1589 bp, Homo Sapiens; identical to SEQ ID NO: 258806
  misc_feature (43)..(43): n is a, c, g, or t
  misc_feature (86)..(86): n is a, c, g, or t
  misc_feature (93)..(93): n is a, c, g, or t
  misc_feature (216)..(216): n is a, c, g, or t
  misc_feature (222)..(222): n is a, c, g, or t
  misc_feature (235)..(235): n is a, c, g, or t
  misc_feature (238)..(238): n is a, c, g, or t
  misc_feature (260)..(260): n is a, c, g, or t
  misc_feature (280)..(280): n is a, c, g, or t
  misc_feature (306)..(306): n is a, c, g, or t
  misc_feature (595)..(595): n is a, c, g, or t

SEQ ID NO: 278702 - DNA, 1062 bp, Homo Sapiens; identical to SEQ ID NO: 258807

SEQ ID NO: 278703 - DNA, 956 bp, Homo Sapiens; identical to SEQ ID NO: 258808
  misc_feature (636)..(636): n is a, c, g, or t

SEQ ID NO: 278704 - DNA, 1315 bp, Homo Sapiens; identical to SEQ ID NO: 258811
  misc_feature (1024)..(1033): n is a, c, g, or t
  misc_feature (1047)..(1047): n is a, c, g, or t

SEQ ID NO: 278705 - DNA, 990 bp, Homo Sapiens; identical to SEQ ID NO: 258812

SEQ ID NO: 278706 - DNA, 1491 bp, Homo Sapiens; identical to SEQ ID NO: 258823
  misc_feature (227)..(227): n is a, c, g, or t
  misc_feature (545)..(545): n is a, c, g, or t

SEQ ID NO: 278707 - DNA, 534 bp, Homo Sapiens; identical to SEQ ID NO: 258824

SEQ ID NO: 278708 - DNA, 379 bp, Homo Sapiens; identical to SEQ ID NO: 258828

SEQ ID NO: 278709 - DNA, 693 bp, Homo Sapiens; identical to SEQ ID NO: 258829

SEQ ID NO: 278710 - DNA, 525 bp, Homo Sapiens; identical to SEQ ID NO: 258830

SEQ ID NO: 278711 - DNA, 451 bp, Homo Sapiens; identical to SEQ ID NO: 258831

SEQ ID NO: 278712 - DNA, 1160 bp, Homo Sapiens; identical to SEQ ID NO: 258835
  misc_feature (91)..(91): n is a, c, g, or t
  misc_feature (267)..(267): n is a, c, g, or t

SEQ ID NO: 278713 - DNA, 490 bp, Homo Sapiens; identical to SEQ ID NO: 258836
  misc_feature (374)..(374): n is a, c, g, or t
  misc_feature (424)..(424): n is a, c, g, or t

SEQ ID NO: 278714 - DNA, 716 bp, Homo Sapiens; identical to SEQ ID NO: 258841
  misc_feature (128)..(128): n is a, c, g, or t
  misc_feature (136)..(148): n is a, c, g, or t
  misc_feature (417)..(425): n is a, c, g, or t
  misc_feature (476)..(518): n is a, c, g, or t
  misc_feature (674)..(674): n is a, c, g, or t
  misc_feature (678)..(678): n is a, c, g, or t
  misc_feature (696)..(696): n is a, c, g, or t

SEQ ID NO: 278715 - DNA, 828 bp, Homo Sapiens; identical to SEQ ID NO: 258842
  misc_feature (534)..(548): n is a, c, g, or t
  misc_feature (793)..(793): n is a, c, g, or t

SEQ ID NO: 278716 - DNA, 1517 bp, Homo Sapiens; identical to SEQ ID NO: 258845
  misc_feature (38)..(38): n is a, c, g, or t
  misc_feature (74)..(113): n is a, c, g, or t
  misc_feature (161)..(161): n is a, c, g, or t
  misc_feature (210)..(210): n is a, c, g, or t
  misc_feature (212)..(212): n is a, c, g, or t
  misc_feature (224)..(224): n is a, c, g, or t
  misc_feature (240)..(240): n is a, c, g, or t
  misc_feature (318)..(318): n is a, c, g, or t
  misc_feature (445)..(445): n is a, c, g, or t
  misc_feature (485)..(485): n is a, c, g, or t
  misc_feature (506)..(506): n is a, c, g, or t
  misc_feature (861)..(861): n is a, c, g, or t
  misc_feature (1157)..(1157): n is a, c, g, or t
  misc_feature (1178)..(1178): n is a, c, g, or t

SEQ ID NO: 278717 - DNA, 472 bp, Homo Sapiens; identical to SEQ ID NO: 258846

SEQ ID NO: 278718 - DNA, 496 bp, Homo Sapiens; identical to SEQ ID NO: 258847
  misc_feature (461)..(461): n is a, c, g, or t

SEQ ID NO: 278719 - DNA, 999 bp, Homo Sapiens; identical to SEQ ID NO: 258854
  misc_feature (5)..(5): n is a, c, g, or t
  misc_feature (11)..(11): n is a, c, g, or t
  misc_feature (13)..(13): n is a, c, g, or t
  misc_feature (16)..(16): n is a, c, g, or t
  misc_feature (21)..(21): n is a, c, g, or t
  misc_feature (63)..(63): n is a, c, g, or t
  misc_feature (76)..(76): n is a, c, g, or t
  misc_feature (79)..(79): n is a, c, g, or t
  misc_feature (89)..(100): n is a, c, g, or t
  misc_feature (159)..(159): n is a, c, g, or t
  misc_feature (178)..(179): n is a, c, g, or t
  misc_feature (270)..(270): n is a, c, g, or t
  misc_feature (717)..(717): n is a, c, g, or t

SEQ ID NO: 278720 - DNA, 273 bp, Homo Sapiens; identical to SEQ ID NO: 258855
  misc_feature (37)..(37): n is a, c, g, or t
  misc_feature (212)..(212): n is a, c, g, or t
  misc_feature (215)..(215): n is a, c, g, or t
  misc_feature (217)..(218): n is a, c, g, or t
  misc_feature (235)..(235): n is a, c, g, or t

SEQ ID NO: 278721 - DNA, 979 bp, Homo Sapiens; identical to SEQ ID NO: 258856
  misc_feature (57)..(57): n is a, c, g, or t
  misc_feature (223)..(223): n is a, c, g, or t
  misc_feature (961)..(961): n is a, c, g, or t

SEQ ID NO: 278722 - DNA, 437 bp, Homo Sapiens; identical to SEQ ID NO: 258857
  misc_feature (21)..(21): n is a, c, g, or t
  misc_feature (55)..(55): n is a, c, g, or t
  misc_feature (64)..(64): n is a, c, g, or t

SEQ ID NO: 278723 - DNA, 1064 bp, Homo Sapiens; identical to SEQ ID NO: 258861
  misc_feature (724)..(724): n is a, c, g, or t
  misc_feature (726)..(726): n is a, c, g, or t
  misc_feature (730)..(730): n is a, c, g, or t
  misc_feature (738)..(762): n is a, c, g, or t
  misc_feature (764)..(765): n is a, c, g, or t
  misc_feature (768)..(768): n is a, c, g, or t
  misc_feature (770)..(770): n is a, c, g, or t
  misc_feature (776)..(778): n is a, c, g, or t
  misc_feature (780)..(782): n is a, c, g, or t
  misc_feature (784)..(794): n is a, c, g, or t
  misc_feature (799)..(799): n is a, c, g, or t
  misc_feature (804)..(805): n is a, c, g, or t
  misc_feature (824)..(825): n is a, c, g, or t

SEQ ID NO: 278724 - DNA, 587 bp, Homo Sapiens; identical to SEQ ID NO: 258862
  misc_feature (468)..(468): n is a, c, g, or t
  misc_feature (542)..(542): n is a, c, g, or t
  misc_feature (555)..(555): n is a, c, g, or t

SEQ ID NO: 278725 - DNA, 545 bp, Homo Sapiens; identical to SEQ ID NO: 258863
  misc_feature (22)..(22): n is a, c, g, or t
  misc_feature (32)..(32): n is a, c, g, or t
  misc_feature (40)..(40): n is a, c, g, or t
  misc_feature (82)..(82): n is a, c, g, or t
  misc_feature (106)..(106): n is a, c, g, or t

SEQ ID NO: 278726 - DNA, 2289 bp, Homo Sapiens; identical to SEQ ID NO: 258866
  misc_feature (194)..(282): n is a, c, g, or t
  misc_feature (1962)..(2032): n is a, c, g, or t

SEQ ID NO: 278727 - DNA, 213 bp, Homo Sapiens; identical to SEQ ID NO: 258867

SEQ ID NO: 278728 - DNA, 1105 bp, Homo Sapiens; identical to SEQ ID NO: 258869
  misc_feature (937)..(954): n is a, c, g, or t
  misc_feature (967)..(1004): n is a, c, g, or t
  misc_feature (1016)..(1016): n is a, c, g, or t
  misc_feature (1027)..(1027): n is a, c, g, or t
  misc_feature (1041)..(1041): n is a, c, g, or t
  misc_feature (1074)..(1074): n is a, c, g, or t
  misc_feature (1089)..(1089): n is a, c, g, or t
  misc_feature (1093)..(1093): n is a, c, g, or t

SEQ ID NO: 278729 - DNA, 1787 bp, Homo Sapiens; identical to SEQ ID NO: 258870
  misc_feature (895)..(1165): n is a, c, g, or t

SEQ ID NO: 278730 - DNA, 1795 bp, Homo Sapiens; identical to SEQ ID NO: 258871

SEQ ID NO: 278731 - DNA, 897 bp, Homo Sapiens; identical to SEQ ID NO: 258872
  misc_feature (773)..(773): n is a, c, g, or t

SEQ ID NO: 278732 - DNA, 1711 bp, Homo Sapiens; identical to SEQ ID NO: 258874
  misc_feature (547)..(584): n is a, c, g, or t
  misc_feature (1335)..(1335): n is a, c, g, or t
  misc_feature (1382)..(1400): n is a, c, g, or t
  misc_feature (1409)..(1447): n is a, c, g, or t
  misc_feature (1494)..(1565): n is a, c, g, or t
  misc_feature (1610)..(1621): n is a, c, g, or t
  misc_feature (1659)..(1669): n is a, c, g, or t

SEQ ID NO: 278733 - DNA, 1061 bp, Homo Sapiens; identical to SEQ ID NO: 258875

SEQ ID NO: 278734 - DNA, 391 bp, Homo Sapiens; identical to SEQ ID NO: 258878
  misc_feature (285)..(285): n is a, c, g, or t
  misc_feature (287)..(288): n is a, c, g, or t
  misc_feature (338)..(338): n is a, c, g, or t
  misc_feature (340)..(340): n is a, c, g, or t

SEQ ID NO: 278735 - DNA, 906 bp, Homo Sapiens; identical to SEQ ID NO: 258879
  misc_feature (231)..(250): n is a, c, g, or t
  misc_feature (732)..(743): n is a, c, g, or t

SEQ ID NO: 278736 - DNA, 917 bp, Homo Sapiens; identical to SEQ ID NO: 258881
  misc_feature (6)..(6): n is a, c, g, or t
  misc_feature (9)..(9): n is a, c, g, or t
  misc_feature (11)..(12): n is a, c, g, or t
  misc_feature (18)..(18): n is a, c, g, or t
  misc_feature (20)..(20): n is a, c, g, or t
  misc_feature (23)..(23): n is a, c, g, or t
  misc_feature (26)..(26): n is a, c, g, or t
  misc_feature (30)..(30): n is a, c, g, or t
  misc_feature (34)..(34): n is a, c, g, or t
  misc_feature (47)..(47): n is a, c, g, or t
  misc_feature (51)..(51): n is a, c, g, or t
  misc_feature (63)..(63): n is a, c, g, or t
  misc_feature (69)..(69): n is a, c, g, or t
  misc_feature (75)..(75): n is a, c, g, or t
  misc_feature (80)..(80): n is a, c, g, or t
  misc_feature (88)..(88): n is a, c, g, or t
  misc_feature (93)..(93): n is a, c, g, or t
  misc_feature (103)..(103): n is a, c, g, or t
  misc_feature (107)..(108): n is a, c, g, or t
  misc_feature (117)..(117): n is a, c, g, or t
  misc_feature (120)..(120): n is a, c, g, or t
  misc_feature (124)..(124): n is a, c, g, or t
  misc_feature (127)..(127): n is a, c, g, or t
  misc_feature (137)..(137): n is a, c, g, or t
  misc_feature (139)..(139): n is a, c, g, or t
  misc_feature (141)..(141): n is a, c, g, or t
  misc_feature (145)..(145): n is a, c, g, or t
  misc_feature (160)..(162): n is a, c, g, or t
  misc_feature (168)..(168): n is a, c, g, or t
  misc_feature (170)..(170): n is a, c, g, or t
  misc_feature (172)..(172): n is a, c, g, or t
  misc_feature (179)..(179): n is a, c, g, or t
  misc_feature (185)..(185): n is a, c, g, or t
  misc_feature (188)..(189): n is a, c, g, or t
  misc_feature (237)..(237): n is a, c, g, or t
  misc_feature (241)..(241): n is a, c, g, or t
  misc_feature (250)..(251): n is a, c, g, or t
  misc_feature (253)..(253): n is a, c, g, or t
  misc_feature (265)..(279): n is a, c, g, or t
  misc_feature (290)..(293): n is a, c, g, or t
  misc_feature (297)..(297): n is a, c, g, or t
  misc_feature (299)..(299): n is a, c, g, or t
  misc_feature (303)..(303): n is a, c, g, or t
  misc_feature (307)..(307): n is a, c, g, or t
  misc_feature (331)..(331): n is a, c, g, or t
  misc_feature (357)..(357): n is a, c, g, or t
  misc_feature (380)..(380): n is a, c, g, or t
  misc_feature (382)..(382): n is a, c, g, or t
  misc_feature (394)..(394): n is a, c, g, or t
  misc_feature (399)..(399): n is a, c, g, or t
  misc_feature (404)..(404): n is a, c, g, or t
  misc_feature (410)..(410): n is a, c, g, or t
  misc_feature (412)..(414): n is a, c, g, or t

SEQ ID NO: 278737 - DNA, 1393 bp, Homo Sapiens; identical to SEQ ID NO: 258882
  misc_feature (659)..(659): n is a, c, g, or t
  misc_feature (664)..(664): n is a, c, g, or t
  misc_feature (676)..(676): n is a, c, g, or t
  misc_feature (694)..(694): n is a, c, g, or t
  misc_feature (704)..(704): n is a, c, g, or t
  misc_feature (739)..(739): n is a, c, g, or t
  misc_feature (763)..(763): n is a, c, g, or t
  misc_feature (842)..(842): n is a, c, g, or t
  misc_feature (844)..(844): n is a, c, g, or t
  misc_feature (912)..(912): n is a, c, g, or t
  misc_feature (957)..(957): n is a, c, g, or t
  misc_feature (985)..(985): n is a, c, g, or t
  misc_feature (990)..(990): n is a, c, g, or t
  misc_feature (995)..(995): n is a, c, g, or t
  misc_feature (1002)..(1002): n is a, c, g, or t
  misc_feature (1005)..(1005): n is a, c, g, or t
  misc_feature (1014)..(1014): n is a, c, g, or t
  misc_feature (1016)..(1016): n is a, c, g, or t
  misc_feature (1018)..(1018): n is a, c, g, or t
  misc_feature (1025)..(1025): n is a, c, g, or t
  misc_feature (1037)..(1037): n is a, c, g, or t
  misc_feature (1101)..(1101): n is a, c, g, or t
  misc_feature (1111)..(1111): n is a, c, g, or t
  misc_feature (1129)..(1129): n is a, c, g, or t
  misc_feature (1228)..(1228): n is a, c, g, or t
  misc_feature (1260)..(1260): n is a, c, g, or t

SEQ ID NO: 278738 - DNA, 1580 bp, Homo Sapiens; identical to SEQ ID NO: 258898
  misc_feature (50)..(50): n is a, c, g, or t

SEQ ID NO: 278739 - DNA, 467 bp, Homo Sapiens; identical to SEQ ID NO: 258899
  misc_feature (41)..(41): n is a, c, g, or t
  misc_feature (193)..(193): n is a, c, g, or t
  misc_feature (284)..(284): n is a, c, g, or t
  misc_feature (367)..(367): n is a, c, g, or t
  misc_feature (393)..(393): n is a, c, g, or t
  misc_feature (435)..(435): n is a, c, g, or t
  misc_feature (442)..(442): n is a, c, g, or t

SEQ ID NO: 278740 - DNA, 1773 bp, Homo Sapiens; identical to SEQ ID NO: 258900
  misc_feature (431)..(433): n is a, c, g, or t

SEQ ID NO: 278741 - DNA, 739 bp, Homo Sapiens; identical to SEQ ID NO: 258901
  misc_feature (430)..(430): n is a, c, g, or t

SEQ ID NO: 278742 - DNA, 1543 bp, Homo Sapiens; identical to SEQ ID NO: 258902
  misc_feature (1358)..(1358): n is a, c, g, or t

SEQ ID NO: 278743 - DNA, 1002 bp, Homo Sapiens; identical to SEQ ID NO: 258903

SEQ ID NO: 278744 - DNA, 1412 bp, Homo Sapiens; identical to SEQ ID NO: 258914

SEQ ID NO: 278745 - DNA, 1040 bp, Homo Sapiens; identical to SEQ ID NO: 258915
  misc_feature (59)..(59): n is a, c, g, or t
  misc_feature (69)..(69): n is a, c, g, or t
  misc_feature (71)..(71): n is a, c, g, or t
  misc_feature (83)..(83): n is a, c, g, or t
  misc_feature (882)..(882): n is a, c, g, or t
  misc_feature (888)..(888): n is a, c, g, or t
  misc_feature (890)..(890): n is a, c, g, or t
  misc_feature (893)..(893): n is a, c, g, or t
  misc_feature (895)..(895): n is a, c, g, or t
  misc_feature (922)..(922): n is a, c, g, or t
  misc_feature (930)..(930): n is a, c, g, or t
  misc_feature (932)..(932): n is a, c, g, or t
  misc_feature (936)..(936): n is a, c, g, or t
  misc_feature (943)..(943): n is a, c, g, or t
  misc_feature (950)..(950): n is a, c, g, or t
  misc_feature (961)..(961): n is a, c, g, or t
  misc_feature (979)..(979): n is a, c, g, or t
  misc_feature (993)..(995): n is a, c, g, or t
  misc_feature (999)..(1000): n is a, c, g, or t
  misc_feature (1005)..(1006): n is a, c, g, or t
  misc_feature (1009)..(1009): n is a, c, g, or t
  misc_feature (1017)..(1017): n is a, c, g, or t
  misc_feature (1030)..(1030): n is a, c, g, or t
  misc_feature (1038)..(1038): n is a, c, g, or t

SEQ ID NO: 278746 - DNA, 857 bp, Homo Sapiens; identical to SEQ ID NO: 258916

SEQ ID NO: 278747 - DNA, 413 bp, Homo Sapiens; identical to SEQ ID NO: 258917
  misc_feature (250)..(280): n is a, c, g, or t

SEQ ID NO: 278748 - DNA, 1913 bp, Homo Sapiens; identical to SEQ ID NO: 258920
  misc_feature (693)..(693): n is a, c, g, or t
  misc_feature (749)..(749): n is a, c, g, or t
  misc_feature (806)..(806): n is a, c, g, or t
  misc_feature (971)..(972): n is a, c, g, or t
  misc_feature (978)..(978): n is a, c, g, or t
  misc_feature (985)..(985): n is a, c, g, or t
  misc_feature (987)..(987): n is a, c, g, or t
  misc_feature (993)..(993): n is a, c, g, or t
  misc_feature (1032)..(1032): n is a, c, g, or t
  misc_feature (1078)..(1078): n is a, c, g, or t
  misc_feature (1316)..(1316): n is a, c, g, or t
  misc_feature (1567)..(1567): n is a, c, g, or t

SEQ ID NO: 278749 - DNA, 966 bp, Homo Sapiens; identical to SEQ ID NO: 258921
  misc_feature (783)..(783): n is a, c, g, or t

SEQ ID NO: 278750 - DNA, 933 bp, Homo Sapiens; identical to SEQ ID NO: 258927

SEQ ID NO: 278751 - DNA, 928 bp, Homo Sapiens; identical to SEQ ID NO: 258928
  misc_feature (719)..(719): n is a, c, g, or t
  misc_feature (787)..(787): n is a, c, g, or t

SEQ ID NO: 278752 - DNA, 2623 bp, Homo Sapiens; identical to SEQ ID NO: 258934
  misc_feature (83)..(83): n is a, c, g, or t
  misc_feature (101)..(101): n is a, c, g, or t
  misc_feature (125)..(127): n is a, c, g, or t
  misc_feature (132)..(132): n is a, c, g, or t
  misc_feature (193)..(252): n is a, c, g, or t
  misc_feature (285)..(285): n is a, c, g, or t
  misc_feature (287)..(287): n is a, c, g, or t
  misc_feature (293)..(293): n is a, c, g, or t

SEQ ID NO: 278753 - DNA, 765 bp, Homo Sapiens; identical to SEQ ID NO: 258935
  misc_feature (298)..(334): n is a, c, g, or t
  misc_feature (495)..(538): n is a, c, g, or t

SEQ ID NO: 278754 - DNA, 814 bp, Homo Sapiens; identical to SEQ ID NO: 258939
  misc_feature (654)..(654): n is a, c, g, or t
  misc_feature (663)..(663): n is a, c, g, or t
  misc_feature (683)..(683): n is a, c, g, or t
  misc_feature (724)..(724): n is a, c, g, or t
  misc_feature (740)..(740): n is a, c, g, or t
  misc_feature (775)..(775): n is a, c, g, or t

SEQ ID NO: 278755 - DNA, 1500 bp, Homo Sapiens; identical to SEQ ID NO: 258940

SEQ ID NO: 278756 - DNA, 407 bp, Homo Sapiens; identical to SEQ ID NO: 258941

SEQ ID NO: 278757 - DNA, 1228 bp, Homo Sapiens; identical to SEQ ID NO: 258946
  misc_feature (252)..(252): n is a, c, g, or t
  misc_feature (355)..(355): n is a, c, g, or t
  misc_feature (1191)..(1191): n is a, c, g, or t

SEQ ID NO: 278758 - DNA, 974 bp, Homo Sapiens; identical to SEQ ID NO: 258947
  misc_feature (9)..(9): n is a, c, g, or t
  misc_feature (38)..(38): n is a, c, g, or t
  misc_feature (47)..(48): n is a, c, g, or t
  misc_feature (77)..(77): n is a, c, g, or t
  misc_feature (86)..(86): n is a, c, g, or t
  misc_feature (119)..(119): n is a, c, g, or t
  misc_feature (229)..(229): n is a, c, g, or t
  misc_feature (267)..(267): n is a, c, g, or t
  misc_feature (334)..(334): n is a, c, g, or t
  misc_feature (377)..(377): n is a, c, g, or t
  misc_feature (381)..(390): n is a, c, g, or t
  misc_feature (559)..(559): n is a, c, g, or t
  misc_feature (566)..(566): n is a, c, g, or t
  misc_feature (570)..(570): n is a, c, g, or t
  misc_feature (578)..(578): n is a, c, g, or t

SEQ ID NO: 278759 - DNA, 1004 bp, Homo Sapiens; identical to SEQ ID NO: 258948

SEQ ID NO: 278760 - DNA, 1726 bp, Homo Sapiens; identical to SEQ ID NO: 258951
  misc_feature (541)..(541): n is a, c, g, or t

SEQ ID NO: 278761 - DNA, 946 bp, Homo Sapiens; identical to SEQ ID NO: 258952

SEQ ID NO: 278762 - DNA, 837 bp, Homo Sapiens; identical to SEQ ID NO: 258959
  misc_feature (831)..(831): n is a, c, g, or t

SEQ ID NO: 278763 - DNA, 1065 bp, Homo Sapiens; identical to SEQ ID NO: 258960
  misc_feature (595)..(694): n is a, c, g, or t

SEQ ID NO: 278764 - DNA, 620 bp, Homo Sapiens; identical to SEQ ID NO: 175584

SEQ ID NO: 278765 - DNA, 1523 bp, Homo Sapiens; identical to SEQ ID NO: 258964
  misc_feature (1054)..(1054): n is a, c, g, or t
  misc_feature (1071)..(1071): n is a, c, g, or t
  misc_feature (1191)..(1191): n is a, c, g, or t
  misc_feature (1239)..(1239): n is a, c, g, or t
  misc_feature (1276)..(1276): n is a, c, g, or t
  misc_feature (1340)..(1340): n is a, c, g, or t
  misc_feature (1343)..(1343): n is a, c, g, or t
  misc_feature (1456)..(1456): n is a, c, g, or t
  misc_feature (1458)..(1478): n is a, c, g, or t

SEQ ID NO: 278766 - DNA, 431 bp, Homo Sapiens; identical to SEQ ID NO: 258965

SEQ ID NO: 278767 - DNA, 1638 bp, Homo Sapiens; identical to SEQ ID NO: 258967
  misc_feature (1124)..(1135): n is a, c, g, or t
  misc_feature (1371)..(1371): n is a, c, g, or t
  misc_feature (1547)..(1547): n is a, c, g, or t
  misc_feature (1573)..(1573): n is a, c, g, or t
  misc_feature (1598)..(1598): n is a, c, g, or t
  misc_feature (1627)..(1627): n is a, c, g, or t
  misc_feature (1634)..(1635): n is a, c, g, or t

SEQ ID NO: 278768 - DNA, 466 bp, Homo Sapiens; identical to SEQ ID NO: 258968

SEQ ID NO: 278769 - DNA, 1162 bp, Homo Sapiens; identical to SEQ ID NO: 258976
  misc_feature (153)..(165): n is a, c, g, or t
  misc_feature (239)..(239): n is a, c, g, or t
  misc_feature (279)..(279): n is a, c, g, or t
  misc_feature (1058)..(1071): n is a, c, g, or t

SEQ ID NO: 278770 - DNA, 936 bp, Homo Sapiens; identical to SEQ ID NO: 258977
  misc_feature (739)..(751): n is a, c, g, or t

SEQ ID NO: 278771 - DNA, 903 bp, Homo Sapiens; identical to SEQ ID NO: 258978
  misc_feature (12)..(12): n is a, c, g, or t
  misc_feature (46)..(58): n is a, c, g, or t
  misc_feature (243)..(243): n is a, c, g, or t

SEQ ID NO: 278772 - DNA, 725 bp, Homo Sapiens; identical to SEQ ID NO: 258979

SEQ ID NO: 278773 - DNA, 426 bp, Homo Sapiens; identical to SEQ ID NO: 258980
  misc_feature (352)..(352): n is a, c, g, or t

SEQ ID NO: 278774 - DNA, 1062 bp, Homo Sapiens; identical to SEQ ID NO: 258983
  misc_feature (12)..(12): n is a, c, g, or t
  misc_feature (15)..(15): n is a, c, g, or t
  misc_feature (22)..(22): n is a, c, g, or t
  misc_feature (32)..(32): n is a, c, g, or t
  misc_feature (50)..(51): n is a, c, g, or t
  misc_feature (62)..(62): n is a, c, g, or t
  misc_feature (105)..(105): n is a, c, g, or t
  misc_feature (109)..(109): n is a, c, g, or t
  misc_feature (129)..(129): n is a, c, g, or t
  misc_feature (645)..(645): n is a, c, g, or t
  misc_feature (651)..(651): n is a, c, g, or t
  misc_feature (784)..(784): n is a, c, g, or t
  misc_feature (799)..(799): n is a, c, g, or t
  misc_feature (801)..(801): n is a, c, g, or t
  misc_feature (803)..(803): n is a, c, g, or t
  misc_feature (806)..(806): n is a, c, g, or t
  misc_feature (809)..(809): n is a, c, g, or t
  misc_feature (818)..(818): n is a, c, g, or t
  misc_feature (820)..(820): n is a, c, g, or t
  misc_feature (835)..(835): n is a, c, g, or t
  misc_feature (837)..(837): n is a, c, g, or t
  misc_feature (842)..(842): n is a, c, g, or t
  misc_feature (855)..(856): n is a, c, g, or t
  misc_feature (858)..(858): n is a, c, g, or t

SEQ ID NO: 278775 - DNA, 916 bp, Homo Sapiens; identical to SEQ ID NO: 258984
  misc_feature (882)..(882): n is a, c, g, or t

SEQ ID NO: 278776 - DNA, 387 bp, Homo Sapiens; identical to SEQ ID NO: 258992
  misc_feature (45)..(45): n is a, c, g, or t
  misc_feature (49)..(49): n is a, c, g, or t
  misc_feature (52)..(53): n is a, c, g, or t
  misc_feature (60)..(60): n is a, c, g, or t
  misc_feature (68)..(139): n is a, c, g, or t

SEQ ID NO: 278777 - DNA, 1894 bp, Homo Sapiens; identical to SEQ ID NO: 258993
  misc_feature (74)..(74): n is a, c, g, or t
  misc_feature (95)..(124): n is a, c, g, or t
  misc_feature (137)..(147): n is a, c, g, or t
  misc_feature (172)..(172): n is a, c, g, or t
  misc_feature (177)..(177): n is a, c, g, or t
  misc_feature (193)..(193): n is a, c, g, or t
  misc_feature (198)..(257): n is a, c, g, or t
  misc_feature (259)..(259): n is a, c, g, or t
  misc_feature (264)..(264): n is a, c, g, or t
  misc_feature (273)..(273): n is a, c, g, or t
  misc_feature (275)..(275): n is a, c, g, or t
  misc_feature (283)..(284): n is a, c, g, or t
  misc_feature (287)..(287): n is a, c, g, or t
  misc_feature (290)..(290): n is a, c, g, or t
  misc_feature (292)..(292): n is a, c, g, or t
  misc_feature (294)..(297): n is a, c, g, or t
  misc_feature (299)..(310): n is a, c, g, or t
  misc_feature (312)..(312): n is a, c, g, or t
  misc_feature (314)..(316): n is a, c, g, or t
  misc_feature (320)..(349): n is a, c, g, or t
  misc_feature (1128)..(1140): n is a, c, g, or t
  misc_feature (1693)..(1726): n is a, c, g, or t

SEQ ID NO: 278778 - DNA, 1224 bp, Homo Sapiens; identical to SEQ ID NO: 258998
  misc_feature (1017)..(1017): n is a, c, g, or t
  misc_feature (1035)..(1035): n is a, c, g, or t
  misc_feature (1063)..(1063): n is a, c, g, or t
  misc_feature (1075)..(1075): n is a, c, g, or t
  misc_feature (1091)..(1091): n is a, c, g, or t
  misc_feature (1115)..(1115): n is a, c, g, or t
  misc_feature (1117)..(1117): n is a, c, g, or t
  misc_feature (1125)..(1125): n is a, c, g, or t
  misc_feature (1142)..(1142): n is a, c, g, or t
  misc_feature (1145)..(1145): n is a, c, g, or t
  misc_feature (1152)..(1153): n is a, c, g, or t
  misc_feature (1179)..(1179): n is a, c, g, or t
  misc_feature (1201)..(1201): n is a, c, g, or t
  misc_feature (1205)..(1205): n is a, c, g, or t

SEQ ID NO: 278779 - DNA, 2009 bp, Homo Sapiens; identical to SEQ ID NO: 258999

SEQ ID NO: 278780 - DNA, 583 bp, Homo Sapiens; identical to SEQ ID NO: 259000

SEQ ID NO: 278781 - DNA, 371 bp, Homo Sapiens; identical to SEQ ID NO: 259014
  misc_feature (28)..(28): n is a, c, g, or t
  misc_feature (35)..(35): n is a, c, g, or t
  misc_feature (41)..(41): n is a, c, g, or t
  misc_feature (82)..(82): n is a, c, g, or t

SEQ ID NO: 278782 - DNA, 736 bp, Homo Sapiens; identical to SEQ ID NO: 259015

SEQ ID NO: 278783 - DNA, 1506 bp, Homo Sapiens; identical to SEQ ID NO: 259019

SEQ ID NO: 278784 - DNA, 415 bp, Homo Sapiens; identical to SEQ ID NO: 259020
  misc_feature (23)..(23): n is a, c, g, or t

SEQ ID NO: 278785 - DNA, 2132 bp, Homo Sapiens; identical to SEQ ID NO: 259035
  misc_feature (168)..(168): n is a, c, g, or t
  misc_feature (941)..(973): n is a, c, g, or t

SEQ ID NO: 278786 - DNA, 414 bp, Homo Sapiens; identical to SEQ ID NO: 259036
  misc_feature (36)..(36): n is a, c, g, or t

SEQ ID NO: 278787 - DNA, 1372 bp, Homo Sapiens; identical to SEQ ID NO: 259044
  misc_feature (1341)..(1341): n is a, c, g, or t

SEQ ID NO: 278788 - DNA, 383 bp, Homo Sapiens; identical to SEQ ID NO: 259045
  misc_feature (307)..(307): n is a, c, g, or t

SEQ ID NO: 278789 - DNA, 1093 bp, Homo Sapiens; identical to SEQ ID NO: 259055
  misc_feature (274)..(311): n is a, c, g, or t
  misc_feature (1023)..(1023): n is a, c, g, or t
  misc_feature (1054)..(1054): n is a, c, g, or t
  misc_feature (1062)..(1062): n is a, c, g, or t

SEQ ID NO: 278790 - DNA, 480 bp, Homo Sapiens; identical to SEQ ID NO: 259056
  misc_feature (274)..(286): n is a, c, g, or t
  misc_feature (437)..(437): n is a, c, g, or t
  misc_feature (458)..(458): n is a, c, g, or t

SEQ ID NO: 278791 - DNA, 943 bp, Homo Sapiens; identical to SEQ ID NO: 259059

SEQ ID NO: 278792 - DNA, 447 bp, Homo Sapiens; identical to SEQ ID NO: 259060
  misc_feature (29)..(29): n is a, c, g, or t
  misc_feature (37)..(37): n is a, c, g, or t
  misc_feature (59)..(59): n is a, c, g, or t
  misc_feature (282)..(282): n is a, c, g, or t

SEQ ID NO: 278793 - DNA, 858 bp, Homo Sapiens; identical to SEQ ID NO: 259061

SEQ ID NO: 278794 - DNA, 1652 bp, Homo Sapiens; identical to SEQ ID NO: 259065
  misc_feature (1622)..(1622): n is a, c, g, or t
  misc_feature (1625)..(1625): n is a, c, g, or t
  misc_feature (1635)..(1635): n is a, c, g, or t

SEQ ID NO: 278795 - DNA, 908 bp, Homo Sapiens; identical to SEQ ID NO: 259066
  misc_feature (652)..(652): n is a, c, g, or t
  misc_feature (818)..(818): n is a, c, g, or t
  misc_feature (842)..(842): n is a, c, g, or t

SEQ ID NO: 278796 - DNA, 575 bp, Homo Sapiens; identical to SEQ ID NO: 259067
  misc_feature (34)..(34): n is a, c, g, or t
  misc_feature (48)..(48): n is a, c, g, or t

SEQ ID NO: 278797 - DNA, 630 bp, Homo Sapiens; identical to SEQ ID NO: 259068
  misc_feature (197)..(197): n is a, c, g, or t
  misc_feature (418)..(418): n is a, c, g, or t
  misc_feature (571)..(571): n is a, c, g, or t

SEQ ID NO: 278798 - DNA, 717 bp, Homo Sapiens; identical to SEQ ID NO: 259074

SEQ ID NO: 278799 - DNA, 1278 bp, Homo Sapiens; identical to SEQ ID NO: 259075

SEQ ID NO: 278800 - DNA, 559 bp, Homo Sapiens; identical to SEQ ID NO: 259084
  misc_feature (59)..(112): n is a, c, g, or t
  misc_feature (192)..(200): n is a, c, g, or t
  misc_feature (202)..(265): n is a, c, g, or t

SEQ ID NO: 278801 - DNA, 879 bp, Homo Sapiens; identical to SEQ ID NO: 259085
  misc_feature (295)..(358): n is a, c, g, or t
  misc_feature (360)..(368): n is a, c, g, or t
  misc_feature (448)..(501): n is a, c, g, or t
  misc_feature (573)..(719): n is a, c, g, or t

SEQ ID NO: 278802 - DNA, 1261 bp, Homo Sapiens; identical to SEQ ID NO: 259092
  misc_feature (61)..(480): n is a, c, g, or t

SEQ ID NO: 278803 - DNA, 552 bp, Homo Sapiens; identical to SEQ ID NO: 259093

SEQ ID NO: 278804 - DNA, 574 bp, Homo Sapiens; identical to SEQ ID NO: 259094
  misc_feature (191)..(192): n is a, c, g, or t
  misc_feature (205)..(205): n is a, c, g, or t
  misc_feature (232)..(232): n is a, c, g, or t
  misc_feature (240)..(240): n is a, c, g, or t
  misc_feature (327)..(327): n is a, c, g, or t
  misc_feature (336)..(336): n is a, c, g, or t
  misc_feature (348)..(348): n is a, c, g, or t
  misc_feature (379)..(380): n is a, c, g, or t

SEQ ID NO: 278805 - DNA, 1065 bp, Homo Sapiens; identical to SEQ ID NO: 259103

SEQ ID NO: 278806 - DNA, 802 bp, Homo Sapiens; identical to SEQ ID NO: 259104
  misc_feature (111)..(131): n is a, c, g, or t

SEQ ID NO: 278807 - DNA, 977 bp, Homo Sapiens; identical to SEQ ID NO: 259105
  misc_feature (32)..(32): n is a, c, g, or t
  misc_feature (483)..(506): n is a, c, g, or t

SEQ ID NO: 278808 - DNA, 652 bp, Homo Sapiens; identical to SEQ ID NO: 259110

SEQ ID NO: 278809 - DNA, 508 bp, Homo Sapiens; identical to SEQ ID NO: 259111
  misc_feature (17)..(17): n is a, c, g, or t
  misc_feature (31)..(31): n is a, c, g, or t
  misc_feature (56)..(56): n is a, c, g, or t
  misc_feature (200)..(200): n is a, c, g, or t
  misc_feature (295)..(295): n is a, c, g, or t
  misc_feature (454)..(465): n is a, c, g, or t

SEQ ID NO: 278810 - DNA, 649 bp, Homo Sapiens; identical to SEQ ID NO: 259112
  misc_feature (569)..(569): n is a, c, g, or t
  misc_feature (577)..(577): n is a, c, g, or t
  misc_feature (595)..(595): n is a, c, g, or t
  misc_feature (605)..(605): n is a, c, g, or t
  misc_feature (614)..(614): n is a, c, g, or t

SEQ ID NO: 278811 - DNA, 943 bp, Homo Sapiens; identical to SEQ ID NO: 259113
  misc_feature (705)..(780): n is a, c, g, or t

SEQ ID NO: 278812 - DNA, 751 bp, Homo Sapiens; identical to SEQ ID NO: 259114

SEQ ID NO: 278813 - DNA, 931 bp, Homo Sapiens; identical to SEQ ID NO: 259132

SEQ ID NO: 278814 - DNA, 443 bp, Homo Sapiens; identical to SEQ ID NO: 259133
  misc_feature (382)..(382): n is a, c, g, or t
  misc_feature (414)..(414): n is a, c, g, or t

SEQ ID NO: 278815 - DNA, 435 bp, Homo Sapiens; identical to SEQ ID NO: 259134

SEQ ID NO: 278816 - DNA, 1128 bp, Homo Sapiens; identical to SEQ ID NO: 259138

SEQ ID NO: 278817 - DNA, 1265 bp, Homo Sapiens; identical to SEQ ID NO: 259139

SEQ ID NO: 278818 - DNA, 898 bp, Homo Sapiens; identical to SEQ ID NO: 259140

SEQ ID NO: 278819 - DNA, 1198 bp, Homo Sapiens; identical to SEQ ID NO: 259147
  misc_feature (942)..(973): n is a, c, g, or t

SEQ ID NO: 278820 - DNA, 2596 bp, Homo Sapiens; identical to SEQ ID NO: 259148
  misc_feature (450)..(481): n is a, c, g, or t
  misc_feature (845)..(860): n is a, c, g, or t
  misc_feature (2400)..(2400): n is a, c, g, or t
  misc_feature (2539)..(2539): n is a, c, g, or t
  misc_feature (2569)..(2569): n is a, c, g, or t
  misc_feature (2577)..(2577): n is a, c, g, or t

SEQ ID NO: 278821 - DNA, 1057 bp, Homo Sapiens; identical to SEQ ID NO: 259157
  misc_feature (266)..(296): n is a, c, g, or t
  misc_feature (764)..(779): n is a, c, g, or t
  misc_feature (802)..(901): n is a, c, g, or t
  misc_feature (903)..(904): n is a, c, g, or t
  misc_feature (908)..(909): n is a, c, g, or t
  misc_feature (920)..(934): n is a, c, g, or t

SEQ ID NO: 278822 - DNA, 387 bp, Homo Sapiens; identical to SEQ ID NO: 259158
  misc_feature (261)..(291): n is a, c, g, or t
  misc_feature (309)..(309): n is a, c, g, or t
  misc_feature (326)..(326): n is a, c, g, or t

SEQ ID NO: 278823 - DNA, 2434 bp, Homo Sapiens; identical to SEQ ID NO: 259164
  misc_feature (1684)..(1686): n is a, c, g, or t

SEQ ID NO: 278824 - DNA, 566 bp, Homo Sapiens; identical to SEQ ID NO: 259165
  misc_feature (12)..(12): n is a, c, g, or t

SEQ ID NO: 278825 - DNA, 775 bp, Homo Sapiens; identical to SEQ ID NO: 259174

SEQ ID NO: 278826 - DNA, 1190 bp, Homo Sapiens; identical to SEQ ID NO: 259175

SEQ ID NO: 278827 - DNA, 799 bp, Homo Sapiens; identical to SEQ ID NO: 259181

SEQ ID NO: 278828 - DNA, 487 bp, Homo Sapiens; identical to SEQ ID NO: 259182
  misc_feature (30)..(30): n is a, c, g, or t
  misc_feature (36)..(36): n is a, c, g, or t
  misc_feature (43)..(43): n is a, c, g, or t
  misc_feature (54)..(54): n is a, c, g, or t
  misc_feature (59)..(59): n is a, c, g, or t
  misc_feature (98)..(98): n is a, c, g, or t

SEQ ID NO: 278829 - DNA, 1919 bp, Homo Sapiens; identical to SEQ ID NO: 259183
  misc_feature (24)..(24): n is a, c, g, or t
  misc_feature (1481)..(1481): n is a, c, g, or t
  misc_feature (1662)..(1662): n is a, c, g, or t
  misc_feature (1717)..(1717): n is a, c, g, or t
  misc_feature (1761)..(1761): n is a, c, g, or t

SEQ ID NO: 278830 - DNA, 463 bp, Homo Sapiens; identical to SEQ ID NO: 259184
  misc_feature (356)..(356): n is a, c, g, or t
  misc_feature (423)..(423): n is a, c, g, or t
  misc_feature (430)..(430): n is a, c, g, or t
  misc_feature (440)..(440): n is a, c, g, or t
  misc_feature (447)..(447): n is a, c, g, or t

SEQ ID NO: 278831 - DNA, 729 bp, Homo Sapiens; identical to SEQ ID NO: 259192
  misc_feature (685)..(685): n is a, c, g, or t

SEQ ID NO: 278832 - DNA, 1002 bp, Homo Sapiens; identical to SEQ ID NO: 259193
  misc_feature (897)..(929): n is a, c, g, or t
  misc_feature (990)..(990): n is a, c, g, or t

SEQ ID NO: 278833 - DNA, 2516 bp, Homo Sapiens; identical to SEQ ID NO: 259197

SEQ ID NO: 278834 - DNA, 474 bp, Homo Sapiens; identical to SEQ ID NO: 259198
  misc_feature (17)..(17): n is a, c, g, or t
  misc_feature (22)..(22): n is a, c, g, or t
  misc_feature (36)..(36): n is a, c, g, or t
  misc_feature (57)..(57): n is a, c, g, or t
  misc_feature (74)..(74): n is a, c, g, or t

SEQ ID NO: 278835 - DNA, 885 bp, Homo Sapiens; identical to SEQ ID NO: 259207
  misc_feature (117)..(117): n is a, c, g, or t

SEQ ID NO: 278836 - DNA, 519 bp, Homo Sapiens; identical to SEQ ID NO: 259208
  misc_feature (13)..(13): n is a, c, g, or t
  misc_feature (65)..(65): n is a, c, g, or t
  misc_feature (98)..(98): n is a, c, g, or t
  misc_feature (120)..(120): n is a, c, g, or t

SEQ ID NO: 278837 - DNA, 872 bp, Homo Sapiens; identical to SEQ ID NO: 259220
  misc_feature (692)..(692): n is a, c, g, or t
  misc_feature (757)..(757): n is a, c, g, or t
  misc_feature (785)..(785): n is a, c, g, or t
  misc_feature (791)..(791): n is a, c, g, or t

SEQ ID NO: 278838 - DNA, 991 bp, Homo Sapiens; identical to SEQ ID NO: 259221
  misc_feature (691)..(691): n is a, c, g, or t

SEQ ID NO: 278839 - DNA, 894 bp, Homo Sapiens; identical to SEQ ID NO: 259224
  misc_feature (583)..(583): n is a, c, g, or t

SEQ ID NO: 278840 - DNA, 833 bp, Homo Sapiens; identical to SEQ ID NO: 259225
  misc_feature (724)..(724): n is a, c, g, or t

SEQ ID NO: 278841 - DNA, 634 bp, Homo Sapiens; identical to SEQ ID NO: 259226
  misc_feature (539)..(539): n is a, c, g, or t

SEQ ID NO: 278842 - DNA, 745 bp, Homo Sapiens; identical to SEQ ID NO: 259228
  misc_feature (172)..(222): n is a, c, g, or t
  misc_feature (240)..(283): n is a, c, g, or t

SEQ ID NO: 278843 - DNA, 472 bp, Homo Sapiens; identical to SEQ ID NO: 259229

SEQ ID NO: 278844 - DNA, 663 bp, Homo Sapiens; identical to SEQ ID NO: 13272

SEQ ID NO: 278845 - DNA, 595 bp, Homo Sapiens; identical to SEQ ID NO: 259239
  misc_feature (60)..(60): n is a, c, g, or t

SEQ ID NO: 278846 - DNA, 2433 bp, Homo Sapiens; identical to SEQ ID NO: 259240
  misc_feature (2168)..(2180): n is a, c, g, or t
  misc_feature (2212)..(2212): n is a, c, g, or t
  misc_feature (2404)..(2404): n is a, c, g, or t

SEQ ID NO: 278847 - DNA, 456 bp, Homo Sapiens; identical to SEQ ID NO: 259241
  misc_feature (37)..(37): n is a, c, g, or t
  misc_feature (53)..(53): n is a, c, g, or t
  misc_feature (66)..(66): n is a, c, g, or t

SEQ ID NO: 278848 - DNA, 2654 bp, Homo Sapiens; identical to SEQ ID NO: 259245
  misc_feature (1964)..(1984): n is a, c, g, or t
  misc_feature (2088)..(2096): n is a, c, g, or t
  misc_feature (2213)..(2213): n is a, c, g, or t
  misc_feature (2360)..(2360): n is a, c, g, or t
  misc_feature (2372)..(2372): n is a, c, g, or t
  misc_feature (2423)..(2423): n is a, c, g, or t
  misc_feature (2520)..(2520): n is a, c, g, or t
  misc_feature (2522)..(2522): n is a, c, g, or t
  misc_feature (2552)..(2552): n is a, c, g, or t

SEQ ID NO: 278849 - DNA, 577 bp, Homo Sapiens; identical to SEQ ID NO: 259246
  misc_feature (247)..(285): n is a, c, g, or t

SEQ ID NO: 278850 - DNA, 429 bp, Homo Sapiens; identical to SEQ ID NO: 259247
  misc_feature (108)..(146): n is a, c, g, or t

SEQ ID NO: 278851 - DNA, 468 bp, Homo Sapiens; identical to SEQ ID NO: 259248
  misc_feature (137)..(175): n is a, c, g, or t

SEQ ID NO: 278852 - DNA, 1003 bp, Homo Sapiens; identical to SEQ ID NO: 259250

SEQ ID NO: 278853 - DNA, 1517 bp, Homo Sapiens; identical to SEQ ID NO: 259251
  misc_feature (1172)..(1172): n is a, c, g, or t
  misc_feature (1468)..(1476): n is a, c, g, or t

SEQ ID NO: 278854 - DNA, 698 bp, Homo Sapiens; identical to SEQ ID NO: 259252

SEQ ID NO: 278855 - DNA, 909 bp, Homo Sapiens; identical to SEQ ID NO: 259253

SEQ ID NO: 278856 - DNA, 661 bp, Homo Sapiens; identical to SEQ ID NO: 259254

SEQ ID NO: 278857 - DNA, 434 bp, Homo Sapiens; identical to SEQ ID NO: 259255
  misc_feature (29)..(29): n is a, c, g, or t
  misc_feature (53)..(53): n is a, c, g, or t
  misc_feature (72)..(72): n is a, c, g, or t
  misc_feature (83)..(83): n is a, c, g, or t

SEQ ID NO: 278858 - DNA, 1395 bp, Homo Sapiens; identical to SEQ ID NO: 259256
  misc_feature (12)..(12): n is a, c, g, or t
  misc_feature (31)..(31): n is a, c, g, or t
  misc_feature (36)..(36): n is a, c, g, or t
  misc_feature (77)..(77): n is a, c, g, or t
  misc_feature (153)..(153): n is a, c, g, or t
  misc_feature (221)..(247): n is a, c, g, or t

SEQ ID NO: 278859 - DNA, 1003 bp, Homo Sapiens; identical to SEQ ID NO: 259257
  misc_feature (45)..(75): n is a, c, g, or t
  misc_feature (813)..(838): n is a, c, g, or t

SEQ ID NO: 278860 - DNA, 1450 bp, Homo Sapiens; identical to SEQ ID NO: 259262
  misc_feature (1254)..(1254): n is a, c, g, or t

SEQ ID NO: 278861 - DNA, 711 bp, Homo Sapiens; identical to SEQ ID NO: 259263

SEQ ID NO: 278862 - DNA, 1306 bp, Homo Sapiens; identical to SEQ ID NO: 259274
  misc_feature (815)..(835): n is a, c, g, or t
  misc_feature (1036)..(1036): n is a, c, g, or t
  misc_feature (1038)..(1040): n is a, c, g, or t
  misc_feature (1042)..(1045): n is a, c, g, or t
  misc_feature (1050)..(1050): n is a, c, g, or t
  misc_feature (1173)..(1174): n is a, c, g, or t
  misc_feature (1229)..(1238): n is a, c, g, or t

SEQ ID NO: 278863 - DNA, 994 bp, Homo Sapiens; identical to SEQ ID NO: 259275

SEQ ID NO: 278864 - DNA, 1028 bp, Homo Sapiens; identical to SEQ ID NO: 259279
  misc_feature (73)..(91): n is a, c, g, or t

SEQ ID NO: 278865 - DNA, 1033 bp, Homo Sapiens; identical to SEQ ID NO: 259280

SEQ ID NO: 278866 - DNA, 796 bp, Homo Sapiens; identical to SEQ ID NO: 259282

SEQ ID NO: 278867 - DNA, 1888 bp, Homo Sapiens; identical to SEQ ID NO: 259283
  misc_feature (675)..(675): n is a, c, g, or t
  misc_feature (1550)..(1617): n is a, c, g, or t
  misc_feature (1870)..(1870): n is a, c, g, or t

SEQ ID NO: 278868 - DNA, 471 bp, Homo Sapiens; identical to SEQ ID NO: 259284

SEQ ID NO: 278869 - DNA, 443 bp, Homo Sapiens; identical to SEQ ID NO: 259285
  misc_feature (27)..(27): n is a, c, g, or t
  misc_feature (168)..(168): n is a, c, g, or t
  misc_feature (326)..(326): n is a, c, g, or t
  misc_feature (417)..(417): n is a, c, g, or t

SEQ ID NO: 278870 - DNA, 1803 bp, Homo Sapiens; identical to SEQ ID NO: 259286
  misc_feature (356)..(379): n is a, c, g, or t
  misc_feature (1680)..(1680): n is a, c, g, or t
  misc_feature (1764)..(1764): n is a, c, g, or t
  misc_feature (1792)..(1792): n is a, c, g, or t

SEQ ID NO: 278871 - DNA, 895 bp, Homo Sapiens; identical to SEQ ID NO: 259287
  misc_feature (458)..(459): n is a, c, g, or t
  misc_feature (586)..(586): n is a, c, g, or t
  misc_feature (591)..(591): n is a, c, g, or t
  misc_feature (602)..(602): n is a, c, g, or t

SEQ ID NO: 278872 - DNA, 551 bp, Homo Sapiens; identical to SEQ ID NO: 259290
  misc_feature (230)..(252): n is a, c, g, or t

SEQ ID NO: 278873 - DNA, 377 bp, Homo Sapiens; identical to SEQ ID NO: 259291
  misc_feature (47)..(69): n is a, c, g, or t
  misc_feature (162)..(162): n is a, c, g, or t

SEQ ID NO: 278874 - DNA, 728 bp, Homo Sapiens; identical to SEQ ID NO: 259306
  misc_feature (273)..(273): n is a, c, g, or t
  misc_feature (417)..(456): n is a, c, g, or t

SEQ ID NO: 278875 - DNA, 409 bp, Homo Sapiens; identical to SEQ ID NO: 259307
  misc_feature (11)..(11): n is a, c, g, or t

SEQ ID NO: 278876 - DNA, 1116 bp, Homo Sapiens; identical to SEQ ID NO: 259309
  misc_feature (489)..(606): n is a, c, g, or t
  misc_feature (738)..(746): n is a, c, g, or t
  misc_feature (875)..(887): n is a, c, g, or t
  misc_feature (969)..(977): n is a, c, g, or t

SEQ ID NO: 278877 - DNA, 1528 bp, Homo Sapiens; identical to SEQ ID NO: 259310
  misc_feature (18)..(18): n is a, c, g, or t
  misc_feature (49)..(49): n is a, c, g, or t
  misc_feature (128)..(128): n is a, c, g, or t

SEQ ID NO: 278878 - DNA, 1274 bp, Homo Sapiens; identical to SEQ ID NO: 259322
  misc_feature (1134)..(1134): n is a, c, g, or t

SEQ ID NO: 278879 - DNA, 432 bp, Homo Sapiens; identical to SEQ ID NO: 259323
  misc_feature (100)..(100): n is a, c, g, or t

SEQ ID NO: 278880 - DNA, 837 bp, Homo Sapiens; identical to SEQ ID NO: 259327

SEQ ID NO: 278881 - DNA, 424 bp, Homo Sapiens; identical to SEQ ID NO: 259328
  misc_feature (34)..(34): n is a, c, g, or t

SEQ ID NO: 278882 - DNA, 2110 bp, Homo Sapiens; identical to SEQ ID NO: 259333
  misc_feature (1627)..(1627): n is a, c, g, or t

SEQ ID NO: 278883 - DNA, 488 bp, Homo Sapiens; identical to SEQ ID NO: 259334
  misc_feature (327)..(327): n is a, c, g, or t
  misc_feature (434)..(434): n is a, c, g, or t
  misc_feature (443)..(443): n is a, c, g, or t
  misc_feature (448)..(448): n is a, c, g, or t
  misc_feature (473)..(473): n is a, c, g, or t

SEQ ID NO: 278884 - DNA, 818 bp, Homo Sapiens; identical to SEQ ID NO: 259342

SEQ ID NO: 278885 - DNA, 829 bp, Homo Sapiens; identical to SEQ ID NO: 259343
  misc_feature (539)..(539): n is a, c, g, or t
  misc_feature (709)..(709): n is a, c, g, or t
  misc_feature (720)..(720): n is a, c, g, or t
  misc_feature (755)..(755): n is a, c, g, or t
  misc_feature (762)..(762): n is a, c, g, or t
  misc_feature (768)..(768): n is a, c, g, or t

SEQ ID NO: 278886 - DNA, 954 bp, Homo Sapiens; identical to SEQ ID NO: 259345
  misc_feature (830)..(888): n is a, c, g, or t

SEQ ID NO: 278887 - DNA, 843 bp, Homo Sapiens; identical to SEQ ID NO: 259346
  misc_feature (513)..(656): n is a, c, g, or t
  misc_feature (741)..(741): n is a, c, g, or t

SEQ ID NO: 278888 - DNA, 561 bp, Homo Sapiens; identical to SEQ ID NO: 165596

SEQ ID NO: 278889 - DNA, 871 bp, Homo Sapiens; identical to SEQ ID NO: 14978

SEQ ID NO: 278890 - DNA, 742 bp, Homo Sapiens; identical to SEQ ID NO: 259351

SEQ ID NO: 278891 - DNA, 576 bp, Homo Sapiens; identical to SEQ ID NO: 259352
  misc_feature (36)..(36): n is a, c, g, or t
  misc_feature (74)..(74): n is a, c, g, or t
  misc_feature (84)..(84): n is a, c, g, or t

SEQ ID NO: 278892 - DNA, 552 bp, Homo Sapiens; identical to SEQ ID NO: 259354
  misc_feature (71)..(203): n is a, c, g, or t

SEQ ID NO: 278893 - DNA, 573 bp, Homo Sapiens; identical to SEQ ID NO: 259355

SEQ ID NO: 278894 - DNA, 825 bp, Homo Sapiens; identical to SEQ ID NO: 259370
  misc_feature (183)..(183): n is a, c, g, or t
  misc_feature (568)..(568): n is a, c, g, or t
  misc_feature (664)..(664): n is a, c, g, or t

SEQ ID NO: 278895 - DNA, 404 bp, Homo Sapiens; identical to SEQ ID NO: 259371
  misc_feature (17)..(17): n is a, c, g, or t
  misc_feature (125)..(125): n is a, c, g, or t

SEQ ID NO: 278896 - DNA, 1274 bp, Homo Sapiens; identical to SEQ ID NO: 259382

SEQ ID NO: 278897 - DNA, 812 bp, Homo Sapiens; identical to SEQ ID NO: 259383
  misc_feature (553)..(601): n is a, c, g, or t
  misc_feature (616)..(619): n is a, c, g, or t
  misc_feature (683)..(699): n is a, c, g, or t

SEQ ID NO: 278898 - DNA, 1370 bp, Homo Sapiens; identical to SEQ ID NO: 259391
  misc_feature (378)..(427): n is a, c, g, or t
  misc_feature (1123)..(1195): n is a, c, g, or t

SEQ ID NO: 278899 - DNA, 1001 bp, Homo Sapiens; identical to SEQ ID NO: 259392
  misc_feature (582)..(616): n is a, c, g, or t

SEQ ID NO: 278900 - DNA, 938 bp, Homo Sapiens; identical to SEQ ID NO: 259397

SEQ ID NO: 278901 - DNA, 832 bp, Homo Sapiens; identical to SEQ ID NO: 259398
  misc_feature (73)..(74): n is a, c, g, or t
  misc_feature (110)..(110): n is a, c, g, or t
  misc_feature (119)..(119): n is a, c, g, or t
  misc_feature (167)..(171): n is a, c, g, or t
  misc_feature (176)..(176): n is a, c, g, or t
  misc_feature (180)..(183): n is a, c, g, or t
  misc_feature (186)..(186): n is a, c, g, or t
  misc_feature (188)..(188): n is a, c, g, or t

SEQ ID NO: 278902 - DNA, 610 bp, Homo Sapiens; identical to SEQ ID NO: 259399

SEQ ID NO: 278903 - DNA, 606 bp, Homo Sapiens; identical to SEQ ID NO: 259400

SEQ ID NO: 278904 - DNA, 1034 bp, Homo Sapiens; identical to SEQ ID NO: 259402
  misc_feature (677)..(677): n is a, c, g, or t

SEQ ID NO: 278905 - DNA, 960 bp, Homo Sapiens; identical to SEQ ID NO: 259403

SEQ ID NO: 278906 - DNA, 910 bp, Homo Sapiens; identical to SEQ ID NO: 259406
  misc_feature (607)..(670): n is a, c, g, or t

SEQ ID NO: 278907 - DNA, 1316 bp, Homo Sapiens; identical to SEQ ID NO: 259407
  misc_feature (97)..(155): n is a, c, g, or t
  misc_feature (440)..(449): n is a, c, g, or t
  misc_feature (620)..(671): n is a, c, g, or t
  misc_feature (806)..(869): n is a, c, g, or t
  misc_feature (1090)..(1090): n is a, c, g, or t
  misc_feature (1138)..(1138): n is a, c, g, or t
  misc_feature (1182)..(1182): n is a, c, g, or t

SEQ ID NO: 278908 - DNA, 1864 bp, Homo Sapiens; identical to SEQ ID NO: 259411
  misc_feature (1835)..(1835): n is a, c, g, or t

SEQ ID NO: 278909 - DNA, 485 bp, Homo Sapiens; identical to SEQ ID NO: 259412
  misc_feature (19)..(19): n is a, c, g, or t
  misc_feature (26)..(26): n is a, c, g, or t
  misc_feature (54)..(54): n is a, c, g, or t

SEQ ID NO: 278910 - DNA, 1317 bp, Homo Sapiens; identical to SEQ ID NO: 259419
  misc_feature (1259)..(1259): n is a, c, g, or t
  misc_feature (1290)..(1290): n is a, c, g, or t

SEQ ID NO: 278911 - DNA, 348 bp, Homo Sapiens; identical to SEQ ID NO: 259420
  misc_feature (80)..(80): n is a, c, g, or t

SEQ ID NO: 278912 - DNA, 888 bp, Homo Sapiens; identical to SEQ ID NO: 259423

SEQ ID NO: 278913 - DNA, 740 bp, Homo Sapiens; identical to SEQ ID NO: 259424
  misc_feature (682)..(682): n is a, c, g, or t

SEQ ID NO: 278914 - DNA, 922 bp, Homo Sapiens; identical to SEQ ID NO: 259426
  misc_feature (544)..(544): n is a, c, g, or t
  misc_feature (678)..(689): n is a, c, g, or t

SEQ ID NO: 278915 - DNA, 1357 bp, Homo Sapiens; identical to SEQ ID NO: 259427
  misc_feature (853)..(853): n is a, c, g, or t

SEQ ID NO: 278916 - DNA, 1198 bp, Homo Sapiens; identical to SEQ ID NO: 259432
  misc_feature (306)..(352): n is a, c, g, or t

SEQ ID NO: 278917 - DNA, 808 bp, Homo Sapiens; identical to SEQ ID NO: 259433

SEQ ID NO: 278918 - DNA, 1553 bp, Homo Sapiens; identical to SEQ ID NO: 259435

SEQ ID NO: 278919 - DNA, 1164 bp, Homo Sapiens; identical to SEQ ID NO: 259436
  misc_feature (863)..(872): n is a, c, g, or t
  misc_feature (1093)..(1118): n is a, c, g, or t

SEQ ID NO: 278920 - DNA, 793 bp, Homo Sapiens; identical to SEQ ID NO: 259437

SEQ ID NO: 278921 - DNA, 445 bp, Homo Sapiens; identical to SEQ ID NO: 259438
  misc_feature (16)..(16): n is a, c, g, or t
  misc_feature (42)..(42): n is a, c, g, or t
  misc_feature (63)..(63): n is a, c, g, or t

SEQ ID NO: 278922 - DNA, 439 bp, Homo Sapiens; identical to SEQ ID NO: 259439
  misc_feature (260)..(260): n is a, c, g, or t
  misc_feature (418)..(418): n is a, c, g, or t

SEQ ID NO: 278923 - DNA, 1817 bp, Homo Sapiens; identical to SEQ ID NO: 259440

SEQ ID NO: 278924 - DNA, 2580 bp, Homo Sapiens; identical to SEQ ID NO: 259441

SEQ ID NO: 278925 - DNA, 1016 bp, Homo Sapiens; identical to SEQ ID NO: 259452

SEQ ID NO: 278926 - DNA, 465 bp, Homo Sapiens; identical to SEQ ID NO: 259453

SEQ ID NO: 278927 - DNA, 915 bp, Homo Sapiens; identical to SEQ ID NO: 259455
  misc_feature (28)..(28): n is a, c, g, or t

SEQ ID NO: 278928 - DNA, 428 bp, Homo Sapiens; identical to SEQ ID NO: 259456
  misc_feature (341)..(341): n is a, c, g, or t
  misc_feature (394)..(394): n is a, c, g, or t

SEQ ID NO: 278929 - DNA, 1495 bp, Homo Sapiens; identical to SEQ ID NO: 259487
  misc_feature (26)..(26): n is a, c, g, or t
  misc_feature (31)..(31): n is a, c, g, or t
  misc_feature (52)..(52): n is a, c, g, or t
  misc_feature (62)..(62): n is a, c, g, or t
  misc_feature (102)..(102): n is a, c, g, or t
  misc_feature (145)..(145): n is a, c, g, or t
  misc_feature (1428)..(1448): n is a, c, g, or t

SEQ ID NO: 278930 - DNA, 458 bp, Homo Sapiens; identical to SEQ ID NO: 259488
  misc_feature (18)..(18): n is a, c, g, or t
  misc_feature (26)..(26): n is a, c, g, or t

SEQ ID NO: 278931 - DNA, 1030 bp, Homo Sapiens; identical to SEQ ID NO: 259504

SEQ ID NO: 278932 - DNA, 821 bp, Homo Sapiens; identical to SEQ ID NO: 259505
  misc_feature (39)..(40): n is a, c, g, or t
  misc_feature (49)..(49): n is a, c, g, or t
  misc_feature (53)..(53): n is a, c, g, or t
  misc_feature (59)..(59): n is a, c, g, or t
  misc_feature (100)..(100): n is a, c, g, or t
  misc_feature (403)..(523): n is a, c, g, or t
  misc_feature (534)..(545): n is a, c, g, or t
  misc_feature (603)..(725): n is a, c, g, or t
  misc_feature (765)..(779): n is a, c, g, or t

SEQ ID NO: 278933 - DNA, 680 bp, Homo Sapiens; identical to SEQ ID NO: 259522

SEQ ID NO: 278934 - DNA, 394 bp, Homo Sapiens; identical to SEQ ID NO: 259523

SEQ ID NO: 278935 - DNA, 1718 bp, Homo Sapiens; identical to SEQ ID NO: 259526

SEQ ID NO: 278936 - DNA, 373 bp, Homo Sapiens; identical to SEQ ID NO: 259527
  misc_feature (14)..(14): n is a, c, g, or t

SEQ ID NO: 278937 - DNA, 465 bp, Homo Sapiens; identical to SEQ ID NO: 259528
  misc_feature (386)..(386): n is a, c, g, or t
  misc_feature (397)..(397): n is a, c, g, or t
  misc_feature (430)..(430): n is a, c, g, or t
  misc_feature (439)..(439): n is a, c, g, or t
  misc_feature (452)..(452): n is a, c, g, or t

SEQ ID NO: 278938 - DNA, 1062 bp, Homo Sapiens; identical to SEQ ID NO: 259531
  misc_feature (887)..(902): n is a, c, g, or t

SEQ ID NO: 278939 - DNA, 919 bp, Homo Sapiens; identical to SEQ ID NO: 259532
  misc_feature (38)..(38): n is a, c, g, or t
  misc_feature (49)..(49): n is a, c, g, or t
  misc_feature (67)..(67): n is a, c, g, or t
  misc_feature (83)..(83): n is a, c, g, or t
  misc_feature (152)..(152): n is a, c, g, or t

SEQ ID NO: 278940 - DNA, 725 bp, Homo Sapiens; identical to SEQ ID NO: 259538

SEQ ID NO: 278941 - DNA, 499 bp, Homo Sapiens; identical to SEQ ID NO: 259539

SEQ ID NO: 278942 - DNA, 1240 bp, Homo Sapiens; identical to SEQ ID NO: 259541
  misc_feature (986)..(996): n is a, c, g, or t
  misc_feature (1044)..(1044): n is a, c, g, or t

SEQ ID NO: 278943 - DNA, 1694 bp, Homo Sapiens; identical to SEQ ID NO: 259542
  misc_feature (1204)..(1215): n is a, c, g, or t

SEQ ID NO: 278944 - DNA, 757 bp, Homo Sapiens; identical to SEQ ID NO: 259548

SEQ ID NO: 278945 - DNA, 473 bp, Homo Sapiens; identical to SEQ ID NO: 259549
  misc_feature (342)..(342): n is a, c, g, or t
  misc_feature (418)..(418): n is a, c, g, or t
  misc_feature (423)..(423): n is a, c, g, or t
  misc_feature (438)..(438): n is a, c, g, or t

SEQ ID NO: 278946 - DNA, 474 bp, Homo Sapiens; identical to SEQ ID NO: 259554
  misc_feature (445)..(445): n is a, c, g, or t
  misc_feature (451)..(451): n is a, c, g, or t

SEQ ID NO: 278947 - DNA, 1074 bp, Homo Sapiens; identical to SEQ ID NO: 259555
  misc_feature (23)..(23): n is a, c, g, or t
  misc_feature (785)..(785): n is a, c, g, or t

SEQ ID NO: 278948 - DNA, 1229 bp, Homo Sapiens; identical to SEQ ID NO: 259567

SEQ ID NO: 278949 - DNA, 1057 bp, Homo Sapiens; identical to SEQ ID NO: 259568
  misc_feature (856)..(856): n is a, c, g, or t
  misc_feature (895)..(895): n is a, c, g, or t
  misc_feature (1039)..(1039): n is a, c, g, or t

SEQ ID NO: 278950 - DNA, 411 bp, Homo Sapiens; identical to SEQ ID NO: 259569
  misc_feature (20)..(20): n is a, c, g, or t
  misc_feature (30)..(30): n is a, c, g, or t

SEQ ID NO: 278951 - DNA, 1199 bp, Homo Sapiens; identical to SEQ ID NO: 259584

SEQ ID NO: 278952 - DNA, 786 bp, Homo Sapiens; identical to SEQ ID NO: 259585

SEQ ID NO: 278953 - DNA, 477 bp, Homo Sapiens; identical to SEQ ID NO: 259586
  misc_feature (433)..(433): n is a, c, g, or t
  misc_feature (446)..(446): n is a, c, g, or t

SEQ ID NO: 278954 - DNA, 452 bp, Homo Sapiens; identical to SEQ ID NO: 259587

SEQ ID NO: 278955 - DNA, 529 bp, Homo Sapiens; identical to SEQ ID NO: 259590

SEQ ID NO: 278956 - DNA, 881 bp, Homo Sapiens; identical to SEQ ID NO: 259591
  misc_feature (193)..(237): n is a, c, g, or t

SEQ ID NO: 278957 - DNA, 346 bp, Homo Sapiens; identical to SEQ ID NO: 259592

SEQ ID NO: 278958 - DNA, 1168 bp, Homo Sapiens; identical to SEQ ID NO: 259593

SEQ ID NO: 278959 - DNA, 1068 bp, Homo Sapiens; identical to SEQ ID NO: 259594

SEQ ID NO: 278960 - DNA, 902 bp, Homo Sapiens; identical to SEQ ID NO: 259595
  misc_feature (213)..(213): n is a, c, g, or t
  misc_feature (229)..(229): n is a, c, g, or t

SEQ ID NO: 278961 - DNA, 1172 bp, Homo Sapiens; identical to SEQ ID NO: 259596

SEQ ID NO: 278962 - DNA, 1913 bp, Homo Sapiens; identical to SEQ ID NO: 259601
  misc_feature (898)..(924): n is a, c, g, or t
  misc_feature (1674)..(1674): n is a, c, g, or t
  misc_feature (1676)..(1692): n is a, c, g, or t
  misc_feature (1819)..(1829): n is a, c, g, or t

SEQ ID NO: 278963 - DNA, 888 bp, Homo Sapiens; identical to SEQ ID NO: 259602

SEQ ID NO: 278964 - DNA, 331 bp, Homo Sapiens; identical to SEQ ID NO: 259603

SEQ ID NO: 278965 - DNA, 937 bp, Homo Sapiens; identical to SEQ ID NO: 259606
  misc_feature (710)..(710): n is a, c, g, or t

SEQ ID NO: 278966 - DNA, 1198 bp, Homo Sapiens; identical to SEQ ID NO: 259607
  misc_feature (20)..(20): n is a, c, g, or t
  misc_feature (365)..(365): n is a, c, g, or t
  misc_feature (380)..(380): n is a, c, g, or t
  misc_feature (1056)..(1056): n is a, c, g, or t

SEQ ID NO: 278967 - DNA, 904 bp, Homo Sapiens; identical to SEQ ID NO: 259608
  misc_feature (550)..(563): n is a, c, g, or t
  misc_feature (568)..(569): n is a, c, g, or t
  misc_feature (574)..(574): n is a, c, g, or t
  misc_feature (580)..(580): n is a, c, g, or t

SEQ ID NO: 278968 - DNA, 812 bp, Homo Sapiens; identical to SEQ ID NO: 259609
  misc_feature (244)..(252): n is a, c, g, or t

SEQ ID NO: 278969 - DNA, 1317 bp, Homo Sapiens; identical to SEQ ID NO: 259610

SEQ ID NO: 278970 - DNA, 1138 bp, Homo Sapiens; identical to SEQ ID NO: 259614

SEQ ID NO: 278971 - DNA, 396 bp, Homo Sapiens; identical to SEQ ID NO: 259615
  misc_feature (381)..(381): n is a, c, g, or t

SEQ ID NO: 278972 - DNA, 727 bp, Homo Sapiens; identical to SEQ ID NO: 259616

SEQ ID NO: 278973 - DNA, 686 bp, Homo Sapiens; identical to SEQ ID NO: 259617

SEQ ID NO: 278974 - DNA, 875 bp, Homo Sapiens; identical to SEQ ID NO: 259618
  misc_feature (86)..(86): n is a, c, g, or t

SEQ ID NO: 278975 - DNA, 1067 bp, Homo Sapiens; identical to SEQ ID NO: 259619

SEQ ID NO: 278976 - DNA, 1132 bp, Homo Sapiens; identical to SEQ ID NO: 259620
  misc_feature (203)..(240): n is a, c, g, or t
  misc_feature (945)..(945): n is a, c, g, or t
  misc_feature (1109)..(1109): n is a, c, g, or t

SEQ ID NO: 278977 - DNA, 764 bp, Homo Sapiens; identical to SEQ ID NO: 259621
  misc_feature (15)..(15): n is a, c, g, or t

SEQ ID NO: 278978 - DNA, 425 bp, Homo Sapiens; identical to SEQ ID NO: 259622
  misc_feature (207)..(207): n is a, c, g, or t

SEQ ID NO: 278979 - DNA, 495 bp, Homo Sapiens; identical to SEQ ID NO: 259629
  misc_feature (90)..(90): n is a, c, g, or t

SEQ ID NO: 278980 - DNA, 439 bp, Homo Sapiens; identical to SEQ ID NO: 259630
  misc_feature (55)..(87): n is a, c, g, or t
  misc_feature (371)..(371): n is a, c, g, or t
  misc_feature (399)..(399): n is a, c, g, or t
  misc_feature (405)..(405): n is a, c, g, or t
  misc_feature (420)..(420): n is a, c, g, or t

SEQ ID NO: 278981 - DNA, 2689 bp, Homo Sapiens; identical to SEQ ID NO: 259636
  misc_feature (2285)..(2305): n is a, c, g, or t
  misc_feature (2550)..(2550): n is a, c, g, or t
  misc_feature (2600)..(2600): n is a, c, g, or t

SEQ ID NO: 278982 - DNA, 508 bp, Homo Sapiens; identical to SEQ ID NO: 259637
  misc_feature (61)..(82): n is a, c, g, or t
  misc_feature (259)..(375): n is a, c, g, or t
  misc_feature (385)..(398): n is a, c, g, or t

SEQ ID NO: 278983 - DNA, 865 bp, Homo Sapiens; identical to SEQ ID NO: 259648

SEQ ID NO: 278984 - DNA, 727 bp, Homo Sapiens; identical to SEQ ID NO: 259649

SEQ ID NO: 278985 - DNA, 451 bp, Homo Sapiens; identical to SEQ ID NO: 259661

SEQ ID NO: 278986 - DNA, 760 bp, Homo Sapiens; identical to SEQ ID NO: 259662

SEQ ID NO: 278987 - DNA, 545 bp, Homo Sapiens; identical to SEQ ID NO: 259665

SEQ ID NO: 278988 - DNA, 581 bp, Homo Sapiens; identical to SEQ ID NO: 259666
  misc_feature (468)..(468): n is a, c, g, or t
  misc_feature (490)..(490): n is a, c, g, or t
  misc_feature (511)..(511): n is a, c, g, or t
  misc_feature (532)..(532): n is a, c, g, or t

SEQ ID NO: 278989 - DNA, 1615 bp, Homo Sapiens; identical to SEQ ID NO: 259672
  misc_feature (1187)..(1297): n is a, c, g, or t
  misc_feature (1422)..(1431): n is a, c, g, or t

SEQ ID NO: 278990 - DNA, 412 bp, Homo Sapiens; identical to SEQ ID NO: 259673
  misc_feature (21)..(21): n is a, c, g, or t
  misc_feature (27)..(27): n is a, c, g, or t
  misc_feature (41)..(41): n is a, c, g, or t
  misc_feature (48)..(48): n is a, c, g, or t
  misc_feature (65)..(65): n is a, c, g, or t
  misc_feature (137)..(137): n is a, c, g, or t

SEQ ID NO: 278991 - DNA, 774 bp, Homo Sapiens; identical to SEQ ID NO: 259683

SEQ ID NO: 278992 - DNA, 444 bp, Homo Sapiens; identical to SEQ ID NO: 259684
  misc_feature (311)..(311): n is a, c, g, or t
  misc_feature (356)..(356): n is a, c, g, or t
  misc_feature (389)..(389): n is a, c, g, or t
  misc_feature (412)..(412): n is a, c, g, or t

SEQ ID NO: 278993 - DNA, 1096 bp, Homo Sapiens; identical to SEQ ID NO: 259690

SEQ ID NO: 278994 - DNA, 447 bp, Homo Sapiens; identical to SEQ ID NO: 259691
  misc_feature (40)..(40): n is a, c, g, or t
  misc_feature (180)..(180): n is a, c, g, or t

SEQ ID NO: 278995 - DNA, 832 bp, Homo Sapiens; identical to SEQ ID NO: 259692
  misc_feature (596)..(600): n is a, c, g, or t
  misc_feature (603)..(683): n is a, c, g, or t
  misc_feature (699)..(700): n is a, c, g, or t
  misc_feature (704)..(704): n is a, c, g, or t
  misc_feature (708)..(708): n is a, c, g, or t
  misc_feature (712)..(752): n is a, c, g, or t
  misc_feature (756)..(756): n is a, c, g, or t
  misc_feature (770)..(770): n is a, c, g, or t
  misc_feature (776)..(790): n is a, c, g, or t

SEQ ID NO: 278996 - DNA, 1128 bp, Homo Sapiens; identical to SEQ ID NO: 259693

SEQ ID NO: 278997 - DNA, 924 bp, Homo Sapiens; identical to SEQ ID NO: 259702
  misc_feature (762)..(762): n is a, c, g, or t
  misc_feature (806)..(806): n is a, c, g, or t
  misc_feature (882)..(883): n is a, c, g, or t

SEQ ID NO: 278998 - DNA, 1353 bp, Homo Sapiens; identical to SEQ ID NO: 259703

SEQ ID NO: 278999 - DNA, 1044 bp, Homo Sapiens; identical to SEQ ID NO: 259710
  misc_feature (976)..(976): n is a, c, g, or t

SEQ ID NO: 279000 - DNA, 2454 bp, Homo Sapiens; identical to SEQ ID NO: 259711
  misc_feature (1419)..(1453): n is a, c, g, or t
  misc_feature (1664)..(1675): n is a, c, g, or t
  misc_feature (1899)..(1967): n is a, c, g, or t

SEQ ID NO: 279001 - DNA, 795 bp, Homo Sapiens; identical to SEQ ID NO: 259713
  misc_feature (673)..(701): n is a, c, g, or t

SEQ ID NO: 279002 - DNA, 815 bp, Homo Sapiens; identical to SEQ ID NO: 86334
  misc_feature (538)..(538): n is a, c, g, or t
  misc_feature (587)..(587): n is a, c, g, or t
  misc_feature (601)..(627): n is a, c, g, or t

SEQ ID NO: 279003 - DNA, 971 bp, Homo Sapiens; identical to SEQ ID NO: 259717
  misc_feature (891)..(891): n is a, c, g, or t
  misc_feature (894)..(894): n is a, c, g, or t
  misc_feature (924)..(924): n is a, c, g, or t

SEQ ID NO: 279004 - DNA, 427 bp, Homo Sapiens; identical to SEQ ID NO: 259718
  misc_feature (131)..(131): n is a, c, g, or t
  misc_feature (147)..(147): n is a, c, g, or t
  misc_feature (151)..(151): n is a, c, g, or t
  misc_feature (269)..(269): n is a, c, g, or t
  misc_feature (312)..(312): n is a, c, g, or t
  misc_feature (355)..(355): n is a, c, g, or t
  misc_feature (364)..(364): n is a, c, g, or t
  misc_feature (409)..(409): n is a, c, g, or t

SEQ ID NO: 279005 - DNA, 905 bp, Homo Sapiens; identical to SEQ ID NO: 259721
  misc_feature (784)..(784): n is a, c, g, or t

SEQ ID NO: 279006 - DNA, 942 bp, Homo Sapiens; identical to SEQ ID NO: 259722

SEQ ID NO: 279007 - DNA, 1059 bp, Homo Sapiens; identical to SEQ ID NO: 259730
  misc_feature (127)..(127): n is a, c, g, or t

SEQ ID NO: 279008 - DNA, 859 bp, Homo Sapiens; identical to SEQ ID NO: 259731

SEQ ID NO: 279009 - DNA, 1539 bp, Homo Sapiens; identical to SEQ ID NO: 259747

SEQ ID NO: 279010 - DNA, 900 bp, Homo Sapiens; identical to SEQ ID NO: 259748

SEQ ID NO: 279011 - DNA, 881 bp, Homo Sapiens; identical to SEQ ID NO: 259749

SEQ ID NO: 279012 - DNA, 1448 bp, Homo Sapiens; identical to SEQ ID NO: 259750

SEQ ID NO: 279013 - DNA, 1116 bp, Homo Sapiens; identical to SEQ ID NO: 259751
  misc_feature (412)..(412): n is a, c, g, or t
  misc_feature (663)..(663): n is a, c, g, or t
  misc_feature (810)..(810): n is a, c, g, or t
  misc_feature (812)..(812): n is a, c, g, or t
  misc_feature (1056)..(1056): n is a, c, g, or t
  misc_feature (1063)..(1063): n is a, c, g, or t

SEQ ID NO: 279014 - DNA, 503 bp, Homo Sapiens; identical to SEQ ID NO: 259752
  misc_feature (115)..(115): n is a, c, g, or t
  misc_feature (138)..(138): n is a, c, g, or t

SEQ ID NO: 279015 - DNA, 630 bp, Homo Sapiens; identical to SEQ ID NO: 259756
  misc_feature (452)..(542): n is a, c, g, or t

SEQ ID NO: 279016 - DNA, 956 bp, Homo Sapiens; identical to SEQ ID NO: 259757

SEQ ID NO: 279017 - DNA, 2479 bp, Homo Sapiens; identical to SEQ ID NO: 259774

SEQ ID NO: 279018 - DNA, 473 bp, Homo Sapiens; identical to SEQ ID NO: 259775
  misc_feature (38)..(38): n is a, c, g, or t
  misc_feature (67)..(67): n is a, c, g, or t

SEQ ID NO: 279019 - DNA, 1019 bp, Homo Sapiens; identical to SEQ ID NO: 259795

SEQ ID NO: 279020 - DNA, 384 bp, Homo Sapiens; identical to SEQ ID NO: 259796
  misc_feature (313)..(313): n is a, c, g, or t

SEQ ID NO: 279021 - DNA, 769 bp, Homo Sapiens; identical to SEQ ID NO: 259798

SEQ ID NO: 279022 - DNA, 1060 bp, Homo Sapiens; identical to SEQ ID NO: 259799
  misc_feature (32)..(32): n is a, c, g, or t

SEQ ID NO: 279023 - DNA, 722 bp, Homo Sapiens; identical to SEQ ID NO: 259800

SEQ ID NO: 279024 - DNA, 1715 bp, Homo Sapiens; identical to SEQ ID NO: 259801
  misc_feature (1126)..(1126): n is a, c, g, or t

SEQ ID NO: 279025 - DNA, 1238 bp, Homo Sapiens; identical to SEQ ID NO: 259805
  misc_feature (778)..(787): n is a, c, g, or t
  misc_feature (827)..(841): n is a, c, g, or t
  misc_feature (1102)..(1110): n is a, c, g, or t

SEQ ID NO: 279026 - DNA, 3174 bp, Homo Sapiens; identical to SEQ ID NO: 259806
  misc_feature (74)..(74): n is a, c, g, or t
  misc_feature (109)..(109): n is a, c, g, or t
  misc_feature (124)..(124): n is a, c, g, or t
  misc_feature (138)..(138): n is a, c, g, or t
  misc_feature (263)..(263): n is a, c, g, or t
  misc_feature (406)..(406): n is a, c, g, or t
  misc_feature (436)..(436): n is a, c, g, or t
  misc_feature (550)..(550): n is a, c, g, or t
  misc_feature (555)..(555): n is a, c, g, or t
  misc_feature (750)..(758): n is a, c, g, or t
  misc_feature (1014)..(1088): n is a, c, g, or t
  misc_feature (1215)..(1225): n is a, c, g, or t
  misc_feature (1506)..(1515): n is a, c, g, or t
  misc_feature (1597)..(1618): n is a, c, g, or t
  misc_feature (1776)..(1784): n is a, c, g, or t

SEQ ID NO: 279027 - DNA, 681 bp, Homo Sapiens; identical to SEQ ID NO: 259807
  misc_feature (13)..(13): n is a, c, g, or t
  misc_feature (438)..(438): n is a, c, g, or t

SEQ ID NO: 279028 - DNA, 1092 bp, Homo Sapiens; identical to SEQ ID NO: 259813

SEQ ID NO: 279029 - DNA, 826 bp, Homo Sapiens; identical to SEQ ID NO: 259814

SEQ ID NO: 279030 - DNA, 831 bp, Homo Sapiens; identical to SEQ ID NO: 259823
  misc_feature (625)..(625): n is a, c, g, or t

SEQ ID NO: 279031 - DNA, 921 bp, Homo Sapiens; identical to SEQ ID NO: 259824

SEQ ID NO: 279032 - DNA, 919 bp, Homo Sapiens; identical to SEQ ID NO: 259846

SEQ ID NO: 279033 - DNA, 947 bp, Homo Sapiens; identical to SEQ ID NO: 259847
  misc_feature (926)..(926): n is a, c, g, or t

SEQ ID NO: 279034 - DNA, 457 bp, Homo Sapiens; identical to SEQ ID NO: 259848
  misc_feature (36)..(36): n is a, c, g, or t
  misc_feature (133)..(133): n is a, c, g, or t
  misc_feature (316)..(316): n is a, c, g, or t
  misc_feature (443)..(443): n is a, c, g, or t

SEQ ID NO: 279035 - DNA, 1072 bp, Homo Sapiens; identical to SEQ ID NO: 259856
  misc_feature (489)..(489): n is a, c, g, or t
  misc_feature (524)..(524): n is a, c, g, or t

SEQ ID NO: 279036 - DNA, 996 bp, Homo Sapiens; identical to SEQ ID NO: 259857
  misc_feature (618)..(667): n is a, c, g, or t

SEQ ID NO: 279037 - DNA, 547 bp, Homo Sapiens; identical to SEQ ID NO: 259859

SEQ ID NO: 279038 - DNA, 1954 bp, Homo Sapiens; identical to SEQ ID NO: 259860

SEQ ID NO: 279039 - DNA, 1808 bp, Homo Sapiens; identical to SEQ ID NO: 259863

SEQ ID NO: 279040 - DNA, 964 bp, Homo Sapiens; identical to SEQ ID NO: 259864

SEQ ID NO: 279041 - DNA, 1145 bp, Homo Sapiens; identical to SEQ ID NO: 259865
  misc_feature (719)..(719): n is a, c, g, or t
  misc_feature (1115)..(1115): n is a, c, g, or t

SEQ ID NO: 279042 - DNA, 461 bp, Homo Sapiens; identical to SEQ ID NO: 259866
  misc_feature (48)..(49): n is a, c, g, or t
  misc_feature (82)..(82): n is a, c, g, or t
  misc_feature (426)..(426): n is a, c, g, or t

SEQ ID NO: 279043 - DNA, 1008 bp, Homo Sapiens; identical to SEQ ID NO: 259882
  misc_feature (939)..(947): n is a, c, g, or t
  misc_feature (986)..(986): n is a, c, g, or t

SEQ ID NO: 279044 - DNA, 1054 bp, Homo Sapiens; identical to SEQ ID NO: 259883
  misc_feature (103)..(103): n is a, c, g, or t
  misc_feature (987)..(1004): n is a, c, g, or t

SEQ ID NO: 279045 - DNA, 986 bp, Homo Sapiens; identical to SEQ ID NO: 259887

SEQ ID NO: 279046 - DNA, 2301 bp, Homo Sapiens; identical to SEQ ID NO: 259888
  misc_feature (1195)..(1208): n is a, c, g, or t
  misc_feature (1712)..(1712): n is a, c, g, or t
  misc_feature (2157)..(2157): n is a, c, g, or t

SEQ ID NO: 279047 - DNA, 1219 bp, Homo Sapiens; identical to SEQ ID NO: 259893
  misc_feature (63)..(63): n is a, c, g, or t

SEQ ID NO: 279048 - DNA, 1371 bp, Homo Sapiens; identical to SEQ ID NO: 259894

SEQ ID NO: 279049 - DNA, 962 bp, Homo Sapiens; identical to SEQ ID NO: 259902

SEQ ID NO: 279050 - DNA, 610 bp, Homo Sapiens; identical to SEQ ID NO: 259903

SEQ ID NO: 279051 - DNA, 374 bp, Homo Sapiens; identical to SEQ ID NO: 259907
  misc_feature (178)..(223): n is a, c, g, or t
  misc_feature (355)..(355): n is a, c, g, or t

SEQ ID NO: 279052 - DNA, 1078 bp, Homo Sapiens; identical to SEQ ID NO: 259908
  misc_feature (773)..(818): n is a, c, g, or t
  misc_feature (998)..(1006): n is a, c, g, or t

SEQ ID NO: 279053 - DNA, 2197 bp, Homo Sapiens; identical to SEQ ID NO: 259915
  misc_feature (1484)..(1776): n is a, c, g, or t
  misc_feature (1859)..(1893): n is a, c, g, or t

SEQ ID NO: 279054 - DNA, 900 bp, Homo Sapiens; identical to SEQ ID NO: 259916

SEQ ID NO: 279055 - DNA, 571 bp, Homo Sapiens; identical to SEQ ID NO: 259918

SEQ ID NO: 279056 - DNA, 1743 bp, Homo Sapiens; identical to SEQ ID NO: 259919
  misc_feature (185)..(185): n is a, c, g, or t

SEQ ID NO: 279057 - DNA, 1087 bp, Homo Sapiens; identical to SEQ ID NO: 259920
  misc_feature (609)..(609): n is a, c, g, or t

SEQ ID NO: 279058 - DNA, 1985 bp, Homo Sapiens; identical to SEQ ID NO: 259921
  misc_feature (908)..(924): n is a, c, g, or t

SEQ ID NO: 279059 - DNA, 445 bp, Homo Sapiens; identical to SEQ ID NO: 259922
  misc_feature (167)..(183): n is a, c, g, or t

SEQ ID NO: 279060 - DNA, 997 bp, Homo Sapiens; identical to SEQ ID NO: 259923

SEQ ID NO: 279061 - DNA, 1063 bp, Homo Sapiens; identical to SEQ ID NO: 259924

SEQ ID NO: 279062 - DNA, 1535 bp, Homo Sapiens; identical to SEQ ID NO: 259927
  misc_feature (41)..(41): n is a, c, g, or t

SEQ ID NO: 279063 - DNA, 405 bp, Homo Sapiens; identical to SEQ ID NO: 259928

SEQ ID NO: 279064 - DNA, 903 bp, Homo Sapiens; identical to SEQ ID NO: 259934

SEQ ID NO: 279065 - DNA, 520 bp, Homo Sapiens; identical to SEQ ID NO: 259935

SEQ ID NO: 279066 - DNA, 902 bp, Homo Sapiens; identical to SEQ ID NO: 259938

SEQ ID NO: 279067 - DNA, 883 bp, Homo Sapiens; identical to SEQ ID NO: 174906

SEQ ID NO: 279068 - DNA, 510 bp, Homo Sapiens; identical to SEQ ID NO: 259940

SEQ ID NO: 279069 - DNA, 1389 bp, Homo Sapiens; identical to SEQ ID NO: 259945

SEQ ID NO: 279070 - DNA, 989 bp, Homo Sapiens; identical to SEQ ID NO: 259946
  misc_feature (964)..(964): n is a, c, g, or t

SEQ ID NO: 279071 - DNA, 781 bp, Homo Sapiens; identical to SEQ ID NO: 259947

SEQ ID NO: 279072 - DNA, 1508 bp, Homo Sapiens; identical to SEQ ID NO: 259948
  misc_feature (902)..(990): n is a, c, g, or t
  misc_feature (1143)..(1225): n is a, c, g, or t
  misc_feature (1276)..(1276): n is a, c, g, or t
  misc_feature (1383)..(1383): n is a, c, g, or t

SEQ ID NO: 279073 - DNA, 2242 bp, Homo Sapiens; identical to SEQ ID NO: 259949
  misc_feature (44)..(105): n is a, c, g, or t
  misc_feature (675)..(675): n is a, c, g, or t
  misc_feature (2116)..(2116): n is a, c, g, or t
  misc_feature (2216)..(2216): n is a, c, g, or t

SEQ ID NO: 279074 - DNA, 950 bp, Homo Sapiens; identical to SEQ ID NO: 259950

SEQ ID NO: 279075 - DNA, 1148 bp, Homo Sapiens; identical to SEQ ID NO: 259957

SEQ ID NO: 279076 - DNA, 467 bp, Homo Sapiens; identical to SEQ ID NO: 259958
  misc_feature (296)..(296): n is a, c, g, or t
  misc_feature (365)..(365): n is a, c, g, or t
  misc_feature (405)..(405): n is a, c, g, or t
  misc_feature (419)..(419): n is a, c, g, or t
  misc_feature (432)..(432): n is a, c, g, or t

SEQ ID NO: 279077 - DNA, 1945 bp, Homo Sapiens; identical to SEQ ID NO: 259969

SEQ ID NO: 279078 - DNA, 475 bp, Homo Sapiens; identical to SEQ ID NO: 259970

SEQ ID NO: 279079 - DNA, 846 bp, Homo Sapiens; identical to SEQ ID NO: 259972

SEQ ID NO: 279080 - DNA, 456 bp, Homo Sapiens; identical to SEQ ID NO: 259973

SEQ ID NO: 279081 - DNA, 1752 bp, Homo Sapiens; identical to SEQ ID NO: 259984

SEQ ID NO: 279082 - DNA, 1013 bp, Homo Sapiens; identical to SEQ ID NO: 259985

SEQ ID NO: 279083 - DNA, 989 bp, Homo Sapiens; identical to SEQ ID NO: 259986

SEQ ID NO: 279084 - DNA, 963 bp, Homo Sapiens; identical to SEQ ID NO: 259987
  misc_feature (45)..(45): n is a, c, g, or t

SEQ ID NO: 279085 - DNA, 572 bp, Homo Sapiens; identical to SEQ ID NO: 260002

SEQ ID NO: 279086 - DNA, 900 bp, Homo Sapiens; identical to SEQ ID NO: 260003

SEQ ID NO: 279087 - DNA, 1122 bp, Homo Sapiens; identical to SEQ ID NO: 260007
  misc_feature (580)..(580): n is a, c, g, or t

SEQ ID NO: 279088 - DNA, 434 bp, Homo Sapiens; identical to SEQ ID NO: 260008
  misc_feature (16)..(16): n is a, c, g, or t
  misc_feature (36)..(36): n is a, c, g, or t
  misc_feature (87)..(87): n is a, c, g, or t
  misc_feature (95)..(95): n is a, c, g, or t
  misc_feature (374)..(374): n is a, c, g, or t
  misc_feature (413)..(413): n is a, c, g, or t

SEQ ID NO: 279089 - DNA, 801 bp, Homo Sapiens; identical to SEQ ID NO: 260018

SEQ ID NO: 279090 - DNA, 436 bp, Homo Sapiens; identical to SEQ ID NO: 260019
  misc_feature (34)..(34): n is a, c, g, or t
  misc_feature (53)..(53): n is a, c, g, or t

SEQ ID NO: 279091 - DNA, 638 bp, Homo Sapiens; identical to SEQ ID NO: 260021

SEQ ID NO: 279092 - DNA, 962 bp, Homo Sapiens; identical to SEQ ID NO: 260022

SEQ ID NO: 279093 - DNA, 943 bp, Homo Sapiens; identical to SEQ ID NO: 260024
  misc_feature (851)..(851): n is a, c, g, or t
  misc_feature (874)..(874): n is a, c, g, or t
  misc_feature (917)..(917): n is a, c, g, or t
  misc_feature (928)..(928): n is a, c, g, or t

SEQ ID NO: 279094 - DNA, 457 bp, Homo Sapiens; identical to SEQ ID NO: 260025
  misc_feature (17)..(17): n is a, c, g, or t
  misc_feature (416)..(416): n is a, c, g, or t

SEQ ID NO: 279095 - DNA, 707 bp, Homo Sapiens; identical to SEQ ID NO: 260026

SEQ ID NO: 279096 - DNA, 1107 bp, Homo Sapiens; identical to SEQ ID NO: 260029
  misc_feature (823)..(838): n is a, c, g, or t

SEQ ID NO: 279097 - DNA, 524 bp, Homo Sapiens; identical to SEQ ID NO: 260030
  misc_feature (13)..(13): n is a, c, g, or t
  misc_feature (33)..(33): n is a, c, g, or t
  misc_feature (41)..(41): n is a, c, g, or t
  misc_feature (69)..(69): n is a, c, g, or t
  misc_feature (74)..(74): n is a, c, g, or t
  misc_feature (91)..(91): n is a, c, g, or t
  misc_feature (107)..(107): n is a, c, g, or t
  misc_feature (119)..(119): n is a, c, g, or t
  misc_feature (129)..(129): n is a, c, g, or t

SEQ ID NO: 279098 - DNA, 1413 bp, Homo Sapiens; identical to SEQ ID NO: 260032

SEQ ID NO: 279099 - DNA, 951 bp, Homo Sapiens; identical to SEQ ID NO: 260033
  misc_feature (916)..(916): n is a, c, g, or t

SEQ ID NO: 279100 - DNA, 909 bp, Homo Sapiens; identical to SEQ ID NO: 260034
  misc_feature (788)..(788): n is a, c, g, or t

SEQ ID NO: 279101 - DNA, 821 bp, Homo Sapiens; identical to SEQ ID NO: 260035

SEQ ID NO: 279102 - DNA, 728 bp, Homo Sapiens; identical to SEQ ID NO: 260036

SEQ ID NO: 279103 - DNA, 1461 bp, Homo Sapiens; identical to SEQ ID NO: 260039

SEQ ID NO: 279104 - DNA, 1277 bp, Homo Sapiens; identical to SEQ ID NO: 260040

SEQ ID NO: 279105 - DNA, 2374 bp, Homo Sapiens; identical to SEQ ID NO: 260045

SEQ ID NO: 279106 - DNA, 652 bp, Homo Sapiens; identical to SEQ ID NO: 260046
  misc_feature (546)..(546): n is a, c, g, or t
  misc_feature (571)..(571): n is a, c, g, or t
  misc_feature (582)..(582): n is a, c, g, or t
  misc_feature (604)..(604): n is a, c, g, or t
  misc_feature (618)..(618): n is a, c, g, or t
  misc_feature (632)..(632): n is a, c, g, or t
  misc_feature (638)..(638): n is a, c, g, or t

SEQ ID NO: 279107 - DNA, 398 bp, Homo Sapiens; identical to SEQ ID NO: 260047
  misc_feature (373)..(373): n is a, c, g, or t

SEQ ID NO: 279108 - DNA, 551 bp, Homo Sapiens; identical to SEQ ID NO: 260048
  misc_feature (41)..(41): n is a, c, g, or t

SEQ ID NO: 279109 - DNA, 587 bp, Homo Sapiens; identical to SEQ ID NO: 260049
  misc_feature (38)..(38): n is a, c, g, or t
  misc_feature (44)..(44): n is a, c, g, or t
  misc_feature (54)..(54): n is a, c, g, or t

SEQ ID NO: 279110 - DNA, 847 bp, Homo Sapiens; identical to SEQ ID NO: 260058

SEQ ID NO: 279111 - DNA, 1075 bp, Homo Sapiens; identical to SEQ ID NO: 260059
  misc_feature (173)..(173): n is a, c, g, or t
  misc_feature (634)..(644): n is a, c, g, or t

SEQ ID NO: 279112 - DNA, 1438 bp, Homo Sapiens; identical to SEQ ID NO: 260064

SEQ ID NO: 279113 - DNA, 523 bp, Homo Sapiens; identical to SEQ ID NO: 260065
  misc_feature (53)..(53): n is a, c, g, or t

SEQ ID NO: 279114 - DNA, 1015 bp, Homo Sapiens; identical to SEQ ID NO: 260075

SEQ ID NO: 279115 - DNA, 771 bp, Homo Sapiens; identical to SEQ ID NO: 260076

SEQ ID NO: 279116 - DNA, 796 bp, Homo Sapiens; identical to SEQ ID NO: 260081
  misc_feature (110)..(162): n is a, c, g, or t
  misc_feature (465)..(465): n is a, c, g, or t
  misc_feature (626)..(626): n is a, c, g, or t
  misc_feature (723)..(723): n is a, c, g, or t
  misc_feature (750)..(750): n is a, c, g, or t
  misc_feature (758)..(758): n is a, c, g, or t
  misc_feature (780)..(780): n is a, c, g, or t

SEQ ID NO: 279117 - DNA, 1235 bp, Homo Sapiens; identical to SEQ ID NO: 260082
  misc_feature (12)..(12): n is a, c, g, or t
  misc_feature (28)..(28): n is a, c, g, or t
  misc_feature (34)..(34): n is a, c, g, or t
  misc_feature (60)..(60): n is a, c, g, or t
  misc_feature (1055)..(1093): n is a, c, g, or t
  misc_feature (1103)..(1103): n is a, c, g, or t
  misc_feature (1109)..(1109): n is a, c, g, or t
  misc_feature (1111)..(1111): n is a, c, g, or t
  misc_feature (1113)..(1114): n is a, c, g, or t

SEQ ID NO: 279118 - DNA, 344 bp, Homo Sapiens; identical to SEQ ID NO: 260083
  misc_feature (118)..(144): n is a, c, g, or t
  misc_feature (164)..(164): n is a, c, g, or t
  misc_feature (182)..(182): n is a, c, g, or t

SEQ ID NO: 279119 - DNA, 1402 bp, Homo Sapiens; identical to SEQ ID NO: 260085

SEQ ID NO: 279120 - DNA, 557 bp, Homo Sapiens; identical to SEQ ID NO: 260086

SEQ ID NO: 279121 - DNA, 901 bp, Homo Sapiens; identical to SEQ ID NO: 260094
  misc_feature (693)..(693): n is a, c, g, or t
  misc_feature (699)..(699): n is a, c, g, or t

SEQ ID NO: 279122 - DNA, 838 bp, Homo Sapiens; identical to SEQ ID NO: 260095

SEQ ID NO: 279123 - DNA, 1601 bp, Homo Sapiens; identical to SEQ ID NO: 260096
  misc_feature (42)..(42): n is a, c, g, or t
  misc_feature (1163)..(1396): n is a, c, g, or t
  misc_feature (1412)..(1420): n is a, c, g, or t
  misc_feature (1456)..(1468): n is a, c, g, or t

SEQ ID NO: 279124 - DNA, 1066 bp, Homo Sapiens; identical to SEQ ID NO: 260109
  misc_feature (937)..(937): n is a, c, g, or t

SEQ ID NO: 279125 - DNA, 420 bp, Homo Sapiens; identical to SEQ ID NO: 260110
  misc_feature (20)..(20): n is a, c, g, or t
  misc_feature (33)..(33): n is a, c, g, or t

SEQ ID NO: 279126 - DNA, 777 bp, Homo Sapiens; identical to SEQ ID NO: 260116

SEQ ID NO: 279127 - DNA, 963 bp, Homo Sapiens; identical to SEQ ID NO: 260117
  misc_feature (739)..(739): n is a, c, g, or t
  misc_feature (747)..(747): n is a, c, g, or t
  misc_feature (749)..(749): n is a, c, g, or t
  misc_feature (751)..(754): n is a, c, g, or t
  misc_feature (765)..(801): n is a, c, g, or t

SEQ ID NO: 279128 - DNA, 2086 bp, Homo Sapiens; identical to SEQ ID NO: 260119
  misc_feature (17)..(17): n is a, c, g, or t
  misc_feature (1738)..(1884): n is a, c, g, or t
  misc_feature (1902)..(1918): n is a, c, g, or t
  misc_feature (1933)..(2005): n is a, c, g, or t

SEQ ID NO: 279129 - DNA, 461 bp, Homo Sapiens; identical to SEQ ID NO: 260120
  misc_feature (67)..(67): n is a, c, g, or t

SEQ ID NO: 279130 - DNA, 437 bp, Homo Sapiens; identical to SEQ ID NO: 260121

SEQ ID NO: 279131 - DNA, 578 bp, Homo Sapiens; identical to SEQ ID NO: 260127
  misc_feature (30)..(30): n is a, c, g, or t
  misc_feature (36)..(36): n is a, c, g, or t
  misc_feature (50)..(50): n is a, c, g, or t
  misc_feature (63)..(63): n is a, c, g, or t

SEQ ID NO: 279132 - DNA, 1559 bp, Homo Sapiens; identical to SEQ ID NO: 260128
  misc_feature (710)..(710): n is a, c, g, or t

SEQ ID NO: 279133 - DNA, 933 bp, Homo Sapiens; identical to SEQ ID NO: 260130

SEQ ID NO: 279134 - DNA, 409 bp, Homo Sapiens; identical to SEQ ID NO: 260131

SEQ ID NO: 279135 - DNA, 1550 bp, Homo Sapiens; identical to SEQ ID NO: 260141
  misc_feature (708)..(717): n is a, c, g, or t

SEQ ID NO: 279136 - DNA, 477 bp, Homo Sapiens; identical to SEQ ID NO: 260142

SEQ ID NO: 279137 - DNA, 833 bp, Homo Sapiens; identical to SEQ ID NO: 260146
  misc_feature (695)..(695): n is a, c, g, or t
  misc_feature (786)..(786): n is a, c, g, or t
  misc_feature (788)..(788): n is a, c, g, or t

SEQ ID NO: 279138 - DNA, 771 bp, Homo Sapiens; identical to SEQ ID NO: 260147

SEQ ID NO: 279139 - DNA, 1041 bp, Homo Sapiens; identical to SEQ ID NO: 260148

SEQ ID NO: 279140 - DNA, 1646 bp, Homo Sapiens; identical to SEQ ID NO: 260149
  misc_feature (1428)..(1428): n is a, c, g, or t
  misc_feature (1623)..(1623): n is a, c, g, or t

SEQ ID NO: 279141 - DNA, 1036 bp, Homo Sapiens; identical to SEQ ID NO: 260150

SEQ ID NO: 279142 - DNA, 878 bp, Homo Sapiens; identical to SEQ ID NO: 260151

SEQ ID NO: 279143 - DNA, 893 bp, Homo Sapiens; identical to SEQ ID NO: 260159

SEQ ID NO: 279144 - DNA, 902 bp, Homo Sapiens; identical to SEQ ID NO: 260160

SEQ ID NO: 279145 - DNA, 915 bp, Homo Sapiens; identical to SEQ ID NO: 260161
  misc_feature (822)..(830): n is a, c, g, or t

SEQ ID NO: 279146 - DNA, 905 bp, Homo Sapiens; identical to SEQ ID NO: 260164
  misc_feature (854)..(854): n is a, c, g, or t

SEQ ID NO: 279147 - DNA, 1473 bp, Homo Sapiens; identical to SEQ ID NO: 260165

SEQ ID NO: 279148 - DNA, 1033 bp, Homo Sapiens; identical to SEQ ID NO: 260172
  misc_feature (863)..(863): n is a, c, g, or t

SEQ ID NO: 279149 - DNA, 971 bp, Homo Sapiens; identical to SEQ ID NO: 260173
  misc_feature (722)..(722): n is a, c, g, or t
  misc_feature (904)..(904): n is a, c, g, or t

SEQ ID NO: 279150 - DNA, 1873 bp, Homo Sapiens; identical to SEQ ID NO: 260177
  misc_feature (1512)..(1512): n is a, c, g, or t

SEQ ID NO: 279151 - DNA, 941 bp, Homo Sapiens; identical to SEQ ID NO: 260178
  misc_feature (630)..(630): n is a, c, g, or t
  misc_feature (647)..(647): n is a, c, g, or t
  misc_feature (657)..(657): n is a, c, g, or t
  misc_feature (781)..(781): n is a, c, g, or t
  misc_feature (783)..(784): n is a, c, g, or t
  misc_feature (797)..(797): n is a, c, g, or t

SEQ ID NO: 279152 - DNA, 651 bp, Homo Sapiens; identical to SEQ ID NO: 260183

SEQ ID NO: 279153 - DNA, 386 bp, Homo Sapiens; identical to SEQ ID NO: 260184

SEQ ID NO: 279154 - DNA, 936 bp, Homo Sapiens; identical to SEQ ID NO: 260185
  misc_feature (222)..(318): n is a, c, g, or t
  misc_feature (420)..(420): n is a, c, g, or t

SEQ ID NO: 279155 - DNA, 430 bp, Homo Sapiens; identical to SEQ ID NO: 260186
  misc_feature (39)..(39): n is a, c, g, or t
  misc_feature (60)..(60): n is a, c, g, or t
  misc_feature (69)..(69): n is a, c, g, or t
  misc_feature (93)..(164): n is a, c, g, or t

SEQ ID NO: 279156 - DNA, 784 bp, Homo Sapiens; identical to SEQ ID NO: 260188

SEQ ID NO: 279157 - DNA, 888 bp, Homo Sapiens; identical to SEQ ID NO: 260189

SEQ ID NO: 279158 - DNA, 736 bp, Homo Sapiens; identical to SEQ ID NO: 260198

SEQ ID NO: 279159 - DNA, 272 bp, Homo Sapiens; identical to SEQ ID NO: 260199
  misc_feature (92)..(92): n is a, c, g, or t

SEQ ID NO: 279160 - DNA, 1295 bp, Homo Sapiens; identical to SEQ ID NO: 260202
  misc_feature (970)..(975): n is a, c, g, or t
  misc_feature (977)..(980): n is a, c, g, or t
  misc_feature (982)..(985): n is a, c, g, or t
  misc_feature (987)..(990): n is a, c, g, or t
  misc_feature (992)..(996): n is a, c, g, or t
  misc_feature (998)..(1001): n is a, c, g, or t
  misc_feature (1005)..(1009): n is a, c, g, or t
  misc_feature (1011)..(1012): n is a, c, g, or t

SEQ ID NO: 279161 - DNA, 958 bp, Homo Sapiens; identical to SEQ ID NO: 260203

SEQ ID NO: 279162 - DNA, 890 bp, Homo Sapiens; identical to SEQ ID NO: 260206
  misc_feature (415)..(415): n is a, c, g, or t
  misc_feature (428)..(428): n is a, c, g, or t
  misc_feature (483)..(483): n is a, c, g, or t
  misc_feature (574)..(575): n is a, c, g, or t
  misc_feature (602)..(602): n is a, c, g, or t
  misc_feature (646)..(646): n is a, c, g, or t
  misc_feature (686)..(686): n is a, c, g, or t
  misc_feature (714)..(715): n is a, c, g, or t
  misc_feature (728)..(728): n is a, c, g, or t
  misc_feature (745)..(745): n is a, c, g, or t
  misc_feature (754)..(755): n is a, c, g, or t
  misc_feature (766)..(766): n is a, c, g, or t
  misc_feature (802)..(803): n is a, c, g, or t
  misc_feature (814)..(814): n is a, c, g, or t

SEQ ID NO: 279163 - DNA, 796 bp, Homo Sapiens; identical to SEQ ID NO: 260207

SEQ ID NO: 279164 - DNA, 1669 bp, Homo Sapiens; identical to SEQ ID NO: 260217
  misc_feature (1608)..(1617): n is a, c, g, or t
  misc_feature (1643)..(1643): n is a, c, g, or t

SEQ ID NO: 279165 - DNA, 403 bp, Homo Sapiens; identical to SEQ ID NO: 260218
  misc_feature (327)..(327): n is a, c, g, or t
  misc_feature (392)..(392): n is a, c, g, or t

SEQ ID NO: 279166 - DNA, 557 bp, Homo Sapiens; identical to SEQ ID NO: 260223

SEQ ID NO: 279167 - DNA, 1067 bp, Homo Sapiens; identical to SEQ ID NO: 260224

SEQ ID NO: 279168 - DNA, 1490 bp, Homo Sapiens; identical to SEQ ID NO: 260225
  misc_feature (674)..(674): n is a, c, g, or t

SEQ ID NO: 279169 - DNA, 471 bp, Homo Sapiens; identical to SEQ ID NO: 260226

SEQ ID NO: 279170 - DNA, 800 bp, Homo Sapiens; identical to SEQ ID NO: 15479
  misc_feature (330)..(357): n is a, c, g, or t

SEQ ID NO: 279171 - DNA, 628 bp, Homo Sapiens; identical to SEQ ID NO: 260228

SEQ ID NO: 279172 - DNA, 379 bp, Homo Sapiens; identical to SEQ ID NO: 260229
  misc_feature (19)..(19): n is a, c, g, or t
  misc_feature (28)..(28): n is a, c, g, or t
  misc_feature (80)..(80): n is a, c, g, or t
  misc_feature (282)..(282): n is a, c, g, or t

SEQ ID NO: 279173 - DNA, 513 bp, Homo Sapiens; identical to SEQ ID NO: 260230
  misc_feature (151)..(151): n is a, c, g, or t
  misc_feature (232)..(232): n is a, c, g, or t
  misc_feature (408)..(408): n is a, c, g, or t
  misc_feature (443)..(443): n is a, c, g, or t
  misc_feature (461)..(461): n is a, c, g, or t
  misc_feature (470)..(470): n is a, c, g, or t
  misc_feature (492)..(492): n is a, c, g, or t

SEQ ID NO: 279174 - DNA, 757 bp, Homo Sapiens; identical to SEQ ID NO: 260234
  misc_feature (63)..(63): n is a, c, g, or t
  misc_feature (136)..(162): n is a, c, g, or t
  misc_feature (365)..(414): n is a, c, g, or t
  misc_feature (741)..(741): n is a, c, g, or t

SEQ ID NO: 279175 - DNA, 1104 bp, Homo Sapiens; identical to SEQ ID NO: 260235
  misc_feature (591)..(591): n is a, c, g, or t
  misc_feature (931)..(931): n is a, c, g, or t
  misc_feature (943)..(943): n is a, c, g, or t

SEQ ID NO: 279176 - DNA, 858 bp, Homo Sapiens; identical to SEQ ID NO: 260244
  misc_feature (16)..(16): n is a, c, g, or t

SEQ ID NO: 279177 - DNA, 1181 bp, Homo Sapiens; identical to SEQ ID NO: 260245

SEQ ID NO: 279178 - DNA, 1266 bp, Homo Sapiens; identical to SEQ ID NO: 260246
  misc_feature (521)..(521): n is a, c, g, or t
  misc_feature (529)..(529): n is a, c, g, or t

SEQ ID NO: 279179 - DNA, 534 bp, Homo Sapiens; identical to SEQ ID NO: 260247
  misc_feature (36)..(36): n is a, c, g, or t
  misc_feature (47)..(47): n is a, c, g, or t

SEQ ID NO: 279180 - DNA, 1714 bp, Homo Sapiens; identical to SEQ ID NO: 260252

SEQ ID NO: 279181 - DNA, 996 bp, Homo Sapiens; identical to SEQ ID NO: 260253

SEQ ID NO: 279182 - DNA, 408 bp, Homo Sapiens; identical to SEQ ID NO: 260254
  misc_feature (24)..(24): n is a, c, g, or t
  misc_feature (64)..(64): n is a, c, g, or t

SEQ ID NO: 279183 - DNA, 1018 bp, Homo Sapiens; identical to SEQ ID NO: 260268
  misc_feature (731)..(769): n is a, c, g, or t
  misc_feature (902)..(902): n is a, c, g, or t

SEQ ID NO: 279184 - DNA, 891 bp, Homo Sapiens; identical to SEQ ID NO: 96419
  misc_feature (641)..(706): n is a, c, g, or t

SEQ ID NO: 279185 - DNA, 475 bp, Homo Sapiens; identical to SEQ ID NO: 260270
  misc_feature (22)..(22): n is a, c, g, or t
  misc_feature (34)..(34): n is a, c, g, or t
  misc_feature (55)..(55): n is a, c, g, or t

SEQ ID NO: 279186 - DNA, 862 bp, Homo Sapiens; identical to SEQ ID NO: 260273

SEQ ID NO: 279187 - DNA, 672 bp, Homo Sapiens; identical to SEQ ID NO: 260274

SEQ ID NO: 279188 - DNA, 892 bp, Homo Sapiens; identical to SEQ ID NO: 260275
  misc_feature (786)..(805): n is a, c, g, or t
  misc_feature (807)..(811): n is a, c, g, or t

SEQ ID NO: 279189 - DNA, 477 bp, Homo Sapiens; identical to SEQ ID NO: 260276
  misc_feature (346)..(346): n is a, c, g, or t
  misc_feature (432)..(432): n is a, c, g, or t
  misc_feature (445)..(445): n is a, c, g, or t
  misc_feature (455)..(455): n is a, c, g, or t

SEQ ID NO: 279190 - DNA, 578 bp, Homo Sapiens; identical to SEQ ID NO: 260278

SEQ ID NO: 279191 - DNA, 916 bp, Homo Sapiens; identical to SEQ ID NO: 260279

SEQ ID NO: 279192 - DNA, 1117 bp, Homo Sapiens; identical to SEQ ID NO: 260281

SEQ ID NO: 279193 - DNA, 1046 bp, Homo Sapiens; identical to SEQ ID NO: 260282
  misc_feature (57)..(57): n is a, c, g, or t

SEQ ID NO: 279194 - DNA, 1078 bp, Homo Sapiens; identical to SEQ ID NO: 260283

SEQ ID NO: 279195 - DNA, 912 bp, Homo Sapiens; identical to SEQ ID NO: 260284

SEQ ID NO: 279196 - DNA, 1090 bp, Homo Sapiens; identical to SEQ ID NO: 260287

SEQ ID NO: 279197 - DNA, 559 bp, Homo Sapiens; identical to SEQ ID NO: 260288

SEQ ID NO: 279198 - DNA, 1560 bp, Homo Sapiens; identical to SEQ ID NO: 260290
  misc_feature (282)..(282): n is a, c, g, or t
  misc_feature (317)..(317): n is a, c, g, or t
  misc_feature (1009)..(1009): n is a, c, g, or t

SEQ ID NO: 279199 - DNA, 883 bp, Homo Sapiens; identical to SEQ ID NO: 260291
  misc_feature (577)..(587): n is a, c, g, or t
  misc_feature (680)..(680): n is a, c, g, or t
  misc_feature (803)..(803): n is a, c, g, or t

SEQ ID NO: 279200 - DNA, 625 bp, Homo Sapiens; identical to SEQ ID NO: 260299

SEQ ID NO: 279201 - DNA, 487 bp, Homo Sapiens; identical to SEQ ID NO: 260300

SEQ ID NO: 279202 - DNA, 816 bp, Homo Sapiens; identical to SEQ ID NO: 260301

SEQ ID NO: 279203 - DNA, 878 bp, Homo Sapiens; identical to SEQ ID NO: 260303

SEQ ID NO: 279204 - DNA, 1293 bp, Homo Sapiens; identical to SEQ ID NO: 260304

SEQ ID NO: 279205 - DNA, 553 bp, Homo Sapiens; identical to SEQ ID NO: 260308

SEQ ID NO: 279206 - DNA, 867 bp, Homo Sapiens; identical to SEQ ID NO: 3558
  misc_feature (836)..(836): n is a, c, g, or t

SEQ ID NO: 279207 - DNA, 1589 bp, Homo Sapiens; identical to SEQ ID NO: 260313

SEQ ID NO: 279208 - DNA, 353 bp, Homo Sapiens; identical to SEQ ID NO: 260314
  misc_feature (249)..(249): n is a, c, g, or t

SEQ ID NO: 279209 - DNA, 1222 bp, Homo Sapiens; identical to SEQ ID NO: 260315
  misc_feature (11)..(11): n is a, c, g, or t
  misc_feature (36)..(36): n is a, c, g, or t
  misc_feature (735)..(747): n is a, c, g, or t
  misc_feature (752)..(768): n is a, c, g, or t

SEQ ID NO: 279210 - DNA, 834 bp, Homo Sapiens; identical to SEQ ID NO: 176296

SEQ ID NO: 279211 - DNA, 577 bp, Homo Sapiens; identical to SEQ ID NO: 260322

SEQ ID NO: 279212 - DNA, 657 bp, Homo Sapiens; identical to SEQ ID NO: 260323

SEQ ID NO: 279213 - DNA, 1757 bp, Homo Sapiens; identical to SEQ ID NO: 260324
  misc_feature (1009)..(1133): n is a, c, g, or t
  misc_feature (1170)..(1170): n is a, c, g, or t
  misc_feature (1181)..(1198): n is a, c, g, or t
  misc_feature (1317)..(1326): n is a, c, g, or t
  misc_feature (1331)..(1422): n is a, c, g, or t
  misc_feature (1452)..(1481): n is a, c, g, or t
  misc_feature (1621)..(1656): n is a, c, g, or t

SEQ ID NO: 279214 - DNA, 578 bp, Homo Sapiens; identical to SEQ ID NO: 260329

SEQ ID NO: 279215 - DNA, 792 bp, Homo Sapiens; identical to SEQ ID NO: 14924

SEQ ID NO: 279216 - DNA, 898 bp, Homo Sapiens; identical to SEQ ID NO: 78073

SEQ ID NO: 279217 - DNA, 367 bp, Homo Sapiens; identical to SEQ ID NO: 260341
  misc_feature (25)..(25): n is a, c, g, or t
  misc_feature (87)..(87): n is a, c, g, or t

SEQ ID NO: 279218 - DNA, 1295 bp, Homo Sapiens; identical to SEQ ID NO: 15014
  misc_feature (452)..(587): n is a, c, g, or t
  misc_feature (742)..(804): n is a, c, g, or t
  misc_feature (898)..(908): n is a, c, g, or t
  misc_feature (1215)..(1225): n is a, c, g, or t

SEQ ID NO: 279219 - DNA, 486 bp, Homo Sapiens; identical to SEQ ID NO: 260347

SEQ ID NO: 279220 - DNA, 835 bp, Homo Sapiens; identical to SEQ ID NO: 260349

SEQ ID NO: 279221 - DNA, 1063 bp, Homo Sapiens; identical to SEQ ID NO: 260350
  misc_feature (92)..(92): n is a, c, g, or t
  misc_feature (119)..(157): n is a, c, g, or t

SEQ ID NO: 279222 - DNA, 476 bp, Homo Sapiens; identical to SEQ ID NO: 260357

SEQ ID NO: 279223 - DNA, 992 bp, Homo Sapiens; identical to SEQ ID NO: 260358
  misc_feature (87)..(87): n is a, c, g, or t

SEQ ID NO: 279224 - DNA, 1090 bp, Homo Sapiens; identical to SEQ ID NO: 260359
  misc_feature (647)..(647): n is a, c, g, or t
  misc_feature (932)..(932): n is a, c, g, or t

SEQ ID NO: 279225 - DNA, 931 bp, Homo Sapiens; identical to SEQ ID NO: 260369

SEQ ID NO: 279226 - DNA, 2121 bp, Homo Sapiens; identical to SEQ ID NO: 260370
  misc_feature (38)..(38): n is a, c, g, or t
  misc_feature (1190)..(1190): n is a, c, g, or t
  misc_feature (1320)..(1320): n is a, c, g, or t

SEQ ID NO: 279227 - DNA, 432 bp, Homo Sapiens; identical to SEQ ID NO: 260371
  misc_feature (324)..(324): n is a, c, g, or t
  misc_feature (352)..(352): n is a, c, g, or t
  misc_feature (358)..(358): n is a, c, g, or t
  misc_feature (405)..(405): n is a, c, g, or t
  misc_feature (411)..(411): n is a, c, g, or t

SEQ ID NO: 279228 - DNA, 452 bp, Homo Sapiens; identical to SEQ ID NO: 260372

SEQ ID NO: 279229 - DNA, 982 bp, Homo Sapiens; identical to SEQ ID NO: 260387
  misc_feature (53)..(80): n is a, c, g, or t

SEQ ID NO: 279230 - DNA, 1317 bp, Homo Sapiens; identical to SEQ ID NO: 260388
  misc_feature (888)..(888): n is a, c, g, or t
  misc_feature (913)..(913): n is a, c, g, or t

SEQ ID NO: 279231 - DNA, 1083 bp, Homo Sapiens; identical to SEQ ID NO: 260402
  misc_feature (89)..(89): n is a, c, g, or t
  misc_feature (572)..(582): n is a, c, g, or t

SEQ ID NO: 279232 - DNA, 922 bp, Homo Sapiens; identical to SEQ ID NO: 260403

SEQ ID NO: 279233 - DNA, 833 bp, Homo Sapiens; identical to SEQ ID NO: 260406
  misc_feature (116)..(125): n is a, c, g, or t
  misc_feature (701)..(735): n is a, c, g, or t

SEQ ID NO: 279234 - DNA, 665 bp, Homo Sapiens; identical to SEQ ID NO: 260407
  misc_feature (292)..(320): n is a, c, g, or t

SEQ ID NO: 279235 - DNA, 1058 bp, Homo Sapiens; identical to SEQ ID NO: 260409
  misc_feature (993)..(993): n is a, c, g, or t
  misc_feature (1016)..(1016): n is a, c, g, or t
  misc_feature (1041)..(1041): n is a, c, g, or t

SEQ ID NO: 279236 - DNA, 1430 bp, Homo Sapiens; identical to SEQ ID NO: 260410
  misc_feature (1279)..(1288): n is a, c, g, or t
  misc_feature (1292)..(1295): n is a, c, g, or t
  misc_feature (1297)..(1297): n is a, c, g, or t
  misc_feature (1302)..(1306): n is a, c, g, or t

SEQ ID NO: 279237 - DNA, 756 bp, Homo Sapiens; identical to SEQ ID NO: 260411
  misc_feature (446)..(503): n is a, c, g, or t
  misc_feature (551)..(632): n is a, c, g, or t

SEQ ID NO: 279238 - DNA, 1884 bp, Homo Sapiens; identical to SEQ ID NO: 260412
  misc_feature (105)..(188): n is a, c, g, or t
  misc_feature (225)..(285): n is a, c, g, or t
  misc_feature (1588)..(1622): n is a, c, g, or t
  misc_feature (1809)..(1809): n is a, c, g, or t

SEQ ID NO: 279239 - DNA, 507 bp, Homo Sapiens; identical to SEQ ID NO: 260413
  misc_feature (217)..(286): n is a, c, g, or t
  misc_feature (322)..(413): n is a, c, g, or t

SEQ ID NO: 279240 - DNA, 756 bp, Homo Sapiens; identical to SEQ ID NO: 260452

SEQ ID NO: 279241 - DNA, 533 bp, Homo Sapiens; identical to SEQ ID NO: 260453

SEQ ID NO: 279242 - DNA, 408 bp, Homo Sapiens; identical to SEQ ID NO: 260492

SEQ ID NO: 279243 - DNA, 414 bp, Homo Sapiens; identical to SEQ ID NO: 260493

SEQ ID NO: 279244 - DNA, 1510 bp, Homo Sapiens; identical to SEQ ID NO: 260498

SEQ ID NO: 279245 - DNA, 777 bp, Homo Sapiens; identical to SEQ ID NO: 260499
  misc_feature (126)..(126): n is a, c, g, or t

SEQ ID NO: 279246 - DNA, 510 bp, Homo Sapiens; identical to SEQ ID NO: 260500

SEQ ID NO: 279247 - DNA, 704 bp, Homo Sapiens; identical to SEQ ID NO: 260514

SEQ ID NO: 279248 - DNA, 874 bp, Homo Sapiens; identical to SEQ ID NO: 260515

SEQ ID NO: 279249 - DNA, 604 bp, Homo Sapiens; identical to SEQ ID NO: 260523
  misc_feature (408)..(448): n is a, c, g, or t

SEQ ID NO: 279250 - DNA, 824 bp, Homo Sapiens; identical to SEQ ID NO: 260524

SEQ ID NO: 279251 - DNA, 464 bp, Homo Sapiens; identical to SEQ ID NO: 260525

SEQ ID NO: 279252 - DNA, 473 bp, Homo Sapiens; identical to SEQ ID NO: 260529
  misc_feature (19)..(19): n is a, c, g, or t
  misc_feature (55)..(55): n is a, c, g, or t

SEQ ID NO: 279253 - DNA, 759 bp, Homo Sapiens; identical to SEQ ID NO: 260530

SEQ ID NO: 279254 - DNA, 763 bp, Homo Sapiens; identical to SEQ ID NO: 260535
  misc_feature (67)..(94): n is a, c, g, or t
  misc_feature (493)..(517): n is a, c, g, or t

SEQ ID NO: 279255 - DNA, 327 bp, Homo Sapiens; identical to SEQ ID NO: 260536
  misc_feature (54)..(78): n is a, c, g, or t

SEQ ID NO: 279256 - DNA, 756 bp, Homo Sapiens; identical to SEQ ID NO: 260538
  misc_feature (66)..(66): n is a, c, g, or t
  misc_feature (518)..(562): n is a, c, g, or t
  misc_feature (612)..(612): n is a, c, g, or t
  misc_feature (651)..(651): n is a, c, g, or t
  misc_feature (701)..(702): n is a, c, g, or t
  misc_feature (724)..(724): n is a, c, g, or t

SEQ ID NO: 279257 - DNA, 785 bp, Homo Sapiens; identical to SEQ ID NO: 260539
  misc_feature (288)..(298): n is a, c, g, or t

SEQ ID NO: 279258 - DNA, 452 bp, Homo Sapiens; identical to SEQ ID NO: 260556
  misc_feature (106)..(106): n is a, c, g, or t

SEQ ID NO: 279259 - DNA, 381 bp, Homo Sapiens; identical to SEQ ID NO: 260557
  misc_feature (24)..(24): n is a, c, g, or t
  misc_feature (32)..(32): n is a, c, g, or t
  misc_feature (43)..(43): n is a, c, g, or t
  misc_feature (48)..(48): n is a, c, g, or t
  misc_feature (99)..(99): n is a, c, g, or t
  misc_feature (131)..(131): n is a, c, g, or t

SEQ ID NO: 279260 - DNA, 1012 bp, Homo Sapiens; identical to SEQ ID NO: 260559
  misc_feature (709)..(724): n is a, c, g, or t
  misc_feature (960)..(960): n is a, c, g, or t
  misc_feature (982)..(982): n is a, c, g, or t

SEQ ID NO: 279261 - DNA, 473 bp, Homo Sapiens; identical to SEQ ID NO: 260560
  misc_feature (327)..(327): n is a, c, g, or t
  misc_feature (426)..(426): n is a, c, g, or t
  misc_feature (432)..(432): n is a, c, g, or t
  misc_feature (442)..(442): n is a, c, g, or t

SEQ ID NO: 279262 - DNA, 1070 bp, Homo Sapiens; identical to SEQ ID NO: 260572

SEQ ID NO: 279263 - DNA, 978 bp, Homo Sapiens; identical to SEQ ID NO: 260573

SEQ ID NO: 279264 - DNA, 1305 bp, Homo Sapiens; identical to SEQ ID NO: 260578

SEQ ID NO: 279265 - DNA, 431 bp, Homo Sapiens; identical to SEQ ID NO: 260579

SEQ ID NO: 279266 - DNA, 807 bp, Homo Sapiens; identical to SEQ ID NO: 260581

SEQ ID NO: 279267 - DNA, 559 bp, Homo Sapiens; identical to SEQ ID NO: 260582
  misc_feature (17)..(17): n is a, c, g, or t
  misc_feature (39)..(39): n is a, c, g, or t

SEQ ID NO: 279268 - DNA, 1456 bp, Homo Sapiens; identical to SEQ ID NO: 260588
  misc_feature (800)..(811): n is a, c, g, or t

SEQ ID NO: 279269 - DNA, 448 bp, Homo Sapiens; identical to SEQ ID NO: 260589
  misc_feature (364)..(364): n is a, c, g, or t
  misc_feature (428)..(428): n is a, c, g, or t

SEQ ID NO: 279270 - DNA, 907 bp, Homo Sapiens; identical to SEQ ID NO: 260607
  misc_feature (738)..(803): n is a, c, g, or t
  misc_feature (833)..(833): n is a, c, g, or t

SEQ ID NO: 279271 - DNA, 827 bp, Homo Sapiens; identical to SEQ ID NO: 260608
  misc_feature (590)..(590): n is a, c, g, or t
  misc_feature (616)..(616): n is a, c, g, or t

SEQ ID NO: 279272 - DNA, 544 bp, Homo Sapiens; identical to SEQ ID NO: 260609
  misc_feature (65)..(65): n is a, c, g, or t

SEQ ID NO: 279273 - DNA, 505 bp, Homo Sapiens; identical to SEQ ID NO: 260612

SEQ ID NO: 279274 - DNA, 694 bp, Homo Sapiens; identical to SEQ ID NO: 260613

SEQ ID NO: 279275 - DNA, 941 bp, Homo Sapiens; identical to SEQ ID NO: 260620
  misc_feature (890)..(898): n is a, c, g, or t

SEQ ID NO: 279276 - DNA, 1439 bp, Homo Sapiens; identical to SEQ ID NO: 260621

SEQ ID NO: 279277 - DNA, 1268 bp, Homo Sapiens; identical to SEQ ID NO: 260630
  misc_feature (125)..(133): n is a, c, g, or t
  misc_feature (137)..(137): n is a, c, g, or t
  misc_feature (222)..(249): n is a, c, g, or t
  misc_feature (377)..(405): n is a, c, g, or t
  misc_feature (465)..(478): n is a, c, g, or t
  misc_feature (895)..(895): n is a, c, g, or t

SEQ ID NO: 279278 - DNA, 812 bp, Homo Sapiens; identical to SEQ ID NO: 260631

SEQ ID NO: 279279 - DNA, 780 bp, Homo Sapiens; identical to SEQ ID NO: 260639

SEQ ID NO: 279280 - DNA, 499 bp, Homo Sapiens; identical to SEQ ID NO: 260640

SEQ ID NO: 279281 - DNA, 881 bp, Homo Sapiens; identical to SEQ ID NO: 260641
  misc_feature (657)..(665): n is a, c, g, or t

SEQ ID NO: 279282 - DNA, 1003 bp, Homo Sapiens; identical to SEQ ID NO: 260642
  misc_feature (96)..(107): n is a, c, g, or t
  misc_feature (347)..(348): n is a, c, g, or t
  misc_feature (358)..(358): n is a, c, g, or t
  misc_feature (368)..(369): n is a, c, g, or t
  misc_feature (374)..(375): n is a, c, g, or t

SEQ ID NO: 279283 - DNA, 1149 bp, Homo Sapiens; identical to SEQ ID NO: 260645
  misc_feature (153)..(196): n is a, c, g, or t

SEQ ID NO: 279284 - DNA, 539 bp, Homo Sapiens; identical to SEQ ID NO: 260646
  misc_feature (447)..(447): n is a, c, g, or t

SEQ ID NO: 279285 - DNA, 519 bp, Homo Sapiens; identical to SEQ ID NO: 260658
  misc_feature (450)..(450): n is a, c, g, or t
  misc_feature (473)..(473): n is a, c, g, or t
  misc_feature (476)..(476): n is a, c, g, or t
  misc_feature (484)..(484): n is a, c, g, or t
  misc_feature (487)..(487): n is a, c, g, or t

SEQ ID NO: 279286 - DNA, 1563 bp, Homo Sapiens; identical to SEQ ID NO: 260659
  misc_feature (12)..(12): n is a, c, g, or t

SEQ ID NO: 279287 - DNA, 167 bp, Homo Sapiens; identical to SEQ ID NO: 260661

SEQ ID NO: 279288 - DNA, 1041 bp, Homo Sapiens; identical to SEQ ID NO: 260662
  misc_feature (18)..(18): n is a, c, g, or t
  misc_feature (113)..(113): n is a, c, g, or t
  misc_feature (115)..(116): n is a, c, g, or t
  misc_feature (118)..(119): n is a, c, g, or t
  misc_feature (122)..(123): n is a, c, g, or t
  misc_feature (127)..(162): n is a, c, g, or t
  misc_feature (172)..(174): n is a, c, g, or t
  misc_feature (224)..(224): n is a, c, g, or t
  misc_feature (388)..(388): n is a, c, g, or t
  misc_feature (730)..(730): n is a, c, g, or t
  misc_feature (870)..(870): n is a, c, g, or t
  misc_feature (873)..(873): n is a, c, g, or t
  misc_feature (880)..(915): n is a, c, g, or t

SEQ ID NO: 279289 - DNA, 355 bp, Homo Sapiens; identical to SEQ ID NO: 260663

SEQ ID NO: 279290 - DNA, 953 bp, Homo Sapiens; identical to SEQ ID NO: 260665
  misc_feature (176)..(204): n is a, c, g, or t
  misc_feature (327)..(337): n is a, c, g, or t
  misc_feature (487)..(495): n is a, c, g, or t

SEQ ID NO: 279291 - DNA, 466 bp, Homo Sapiens; identical to SEQ ID NO: 260666
  misc_feature (22)..(22): n is a, c, g, or t
  misc_feature (44)..(44): n is a, c, g, or t
  misc_feature (163)..(171): n is a, c, g, or t

SEQ ID NO: 279292 - DNA, 1135 bp, Homo Sapiens; identical to SEQ ID NO: 260668
  misc_feature (1007)..(1033): n is a, c, g, or t
  misc_feature (1053)..(1053): n is a, c, g, or t

SEQ ID NO: 279293 - DNA, 522 bp, Homo Sapiens; identical to SEQ ID NO: 260669
  misc_feature (154)..(154): n is a, c, g, or t

SEQ ID NO: 279294 - DNA, 1415 bp, Homo Sapiens; identical to SEQ ID NO: 260671
  misc_feature (1400)..(1400): n is a, c, g, or t

SEQ ID NO: 279295 - DNA, 401 bp, Homo Sapiens; identical to SEQ ID NO: 260672

SEQ ID NO: 279296 - DNA, 461 bp, Homo Sapiens; identical to SEQ ID NO: 260673

SEQ ID NO: 279297 - DNA, 509 bp, Homo Sapiens; identical to SEQ ID NO: 260674
  misc_feature (123)..(309): n is a, c, g, or t

SEQ ID NO: 279298 - DNA, 751 bp, Homo Sapiens; identical to SEQ ID NO: 260696
  misc_feature (357)..(357): n is a, c, g, or t

SEQ ID NO: 279299 - DNA, 598 bp, Homo Sapiens; identical to SEQ ID NO: 260697
  misc_feature (372)..(372): n is a, c, g, or t
  misc_feature (399)..(399): n is a, c, g, or t

SEQ ID NO: 279300 - DNA, 949 bp, Homo Sapiens; identical to SEQ ID NO: 260708
  misc_feature (658)..(688): n is a, c, g, or t
  misc_feature (881)..(881): n is a, c, g, or t

SEQ ID NO: 279301 - DNA, 889 bp, Homo Sapiens; identical to SEQ ID NO: 260709
  misc_feature (332)..(360): n is a, c, g, or t
  misc_feature (683)..(683): n is a, c, g, or t
  misc_feature (746)..(746): n is a, c, g, or t

SEQ ID NO: 279302 - DNA, 929 bp, Homo Sapiens; identical to SEQ ID NO: 260710
  misc_feature (473)..(483): n is a, c, g, or t

SEQ ID NO: 279303 - DNA, 845 bp, Homo Sapiens; identical to SEQ ID NO: 169553
  misc_feature (753)..(756): n is a, c, g, or t
  misc_feature (764)..(764): n is a, c, g, or t
  misc_feature (768)..(768): n is a, c, g, or t
  misc_feature (772)..(775): n is a, c, g, or t

SEQ ID NO: 279304 - DNA, 1653 bp, Homo Sapiens; identical to SEQ ID NO: 260720

SEQ ID NO: 279305 - DNA, 1330 bp, Homo Sapiens; identical to SEQ ID NO: 260730
  misc_feature (838)..(961): n is a, c, g, or t
  misc_feature (984)..(1008): n is a, c, g, or t
  misc_feature (1021)..(1102): n is a, c, g, or t
  misc_feature (1109)..(1168): n is a, c, g, or t
  misc_feature (1203)..(1212): n is a, c, g, or t

SEQ ID NO: 279306 - DNA, 479 bp, Homo Sapiens; identical to SEQ ID NO: 260731
  misc_feature (385)..(385): n is a, c, g, or t
  misc_feature (433)..(433): n is a, c, g, or t

SEQ ID NO: 279307 - DNA, 1260 bp, Homo Sapiens; identical to SEQ ID NO: 260735
  misc_feature (1182)..(1182): n is a, c, g, or t

SEQ ID NO: 279308 - DNA, 516 bp, Homo Sapiens; identical to SEQ ID NO: 260736
  misc_feature (29)..(29): n is a, c, g, or t
  misc_feature (31)..(31): n is a, c, g, or t
  misc_feature (371)..(371): n is a, c, g, or t
  misc_feature (390)..(390): n is a, c, g, or t
  misc_feature (395)..(395): n is a, c, g, or t
  misc_feature (408)..(408): n is a, c, g, or t
  misc_feature (427)..(427): n is a, c, g, or t
  misc_feature (458)..(458): n is a, c, g, or t
  misc_feature (463)..(463): n is a, c, g, or t
  misc_feature (469)..(469): n is a, c, g, or t
  misc_feature (489)..(489): n is a, c, g, or t

SEQ ID NO: 279309 - DNA, 1226 bp, Homo Sapiens; identical to SEQ ID NO: 260740

SEQ ID NO: 279310 - DNA, 1036 bp, Homo Sapiens; identical to SEQ ID NO: 260741
  misc_feature (976)..(976): n is a, c, g, or t

SEQ ID NO: 279311 - DNA, 430 bp, Homo Sapiens; identical to SEQ ID NO: 260747
  misc_feature (350)..(350): n is a, c, g, or t
  misc_feature (407)..(407): n is a, c, g, or t

SEQ ID NO: 279312 - DNA, 683 bp, Homo Sapiens; identical to SEQ ID NO: 260748

SEQ ID NO: 279313 - DNA, 1620 bp, Homo Sapiens; identical to SEQ ID NO: 260758

SEQ ID NO: 279314 - DNA, 422 bp, Homo Sapiens; identical to SEQ ID NO: 260759
  misc_feature (116)..(116): n is a, c, g, or t

SEQ ID NO: 279315 - DNA, 1016 bp, Homo Sapiens; identical to SEQ ID NO: 260760
  misc_feature (614)..(622): n is a, c, g, or t
  misc_feature (924)..(932): n is a, c, g, or t

SEQ ID NO: 279316 - DNA, 799 bp, Homo Sapiens; identical to SEQ ID NO: 260761
  misc_feature (513)..(704): n is a, c, g, or t
  misc_feature (706)..(708): n is a, c, g, or t
  misc_feature (710)..(715): n is a, c, g, or t
  misc_feature (717)..(737): n is a, c, g, or t

SEQ ID NO: 279317 - DNA, 597 bp, Homo Sapiens; identical to SEQ ID NO: 260768
  misc_feature (17)..(17): n is a, c, g, or t
  misc_feature (42)..(42): n is a, c, g, or t
  misc_feature (110)..(110): n is a, c, g, or t
  misc_feature (120)..(120): n is a, c, g, or t

SEQ ID NO: 279318 - DNA, 501 bp, Homo Sapiens; identical to SEQ ID NO: 260769
  misc_feature (29)..(29): n is a, c, g, or t
  misc_feature (58)..(58): n is a, c, g, or t
  misc_feature (141)..(141): n is a, c, g, or t
  misc_feature (155)..(155): n is a, c, g, or t

SEQ ID NO: 279319 - DNA, 551 bp, Homo Sapiens; identical to SEQ ID NO: 260770
  misc_feature (23)..(23): n is a, c, g, or t
  misc_feature (40)..(40): n is a, c, g, or t
  misc_feature (130)..(130): n is a, c, g, or t

SEQ ID NO: 279320 - DNA, 669 bp, Homo Sapiens; identical to SEQ ID NO: 260785
  misc_feature (600)..(600): n is a, c, g, or t

SEQ ID NO: 279321 - DNA, 947 bp, Homo Sapiens; identical to SEQ ID NO: 260786
  misc_feature (615)..(615): n is a, c, g, or t
  misc_feature (652)..(763): n is a, c, g, or t
  misc_feature (820)..(820): n is a, c, g, or t

SEQ ID NO: 279322 - DNA, 842 bp, Homo Sapiens; identical to SEQ ID NO: 260789
  misc_feature (33)..(33): n is a, c, g, or t
  misc_feature (35)..(35): n is a, c, g, or t

SEQ ID NO: 279323 - DNA, 2013 bp, Homo Sapiens; identical to SEQ ID NO: 260790

SEQ ID NO: 279324 - DNA, 430 bp, Homo Sapiens; identical to SEQ ID NO: 260791

SEQ ID NO: 279325 - DNA, 1051 bp, Homo Sapiens; identical to SEQ ID NO: 260792

SEQ ID NO: 279326 - DNA, 1030 bp, Homo Sapiens; identical to SEQ ID NO: 260793

SEQ ID NO: 279327 - DNA, 982 bp, Homo Sapiens; identical to SEQ ID NO: 260796
  misc_feature (593)..(593): n is a, c, g, or t
  misc_feature (875)..(883): n is a, c, g, or t

SEQ ID NO: 279328 - DNA, 961 bp, Homo Sapiens; identical to SEQ ID NO: 169246

SEQ ID NO: 279329 - DNA, 986 bp, Homo Sapiens; identical to SEQ ID NO: 169247

SEQ ID NO: 279330 - DNA, 961 bp, Homo Sapiens; identical to SEQ ID NO: 260799

SEQ ID NO: 279331 - DNA, 359 bp, Homo Sapiens; identical to SEQ ID NO: 260800
  misc_feature (247)..(247): n is a, c, g, or t
  misc_feature (254)..(254): n is a, c, g, or t
  misc_feature (279)..(279): n is a, c, g, or t
  misc_feature (348)..(348): n is a, c, g, or t

SEQ ID NO: 279332 - DNA, 1543 bp, Homo Sapiens; identical to SEQ ID NO: 260802
  misc_feature (111)..(111): n is a, c, g, or t
  misc_feature (255)..(255): n is a, c, g, or t
  misc_feature (346)..(399): n is a, c, g, or t

SEQ ID NO: 279333 - DNA, 397 bp, Homo Sapiens; identical to SEQ ID NO: 260803
  misc_feature (18)..(18): n is a, c, g, or t

SEQ ID NO: 279334 - DNA, 690 bp, Homo Sapiens; identical to SEQ ID NO: 260812

SEQ ID NO: 279335 - DNA, 709 bp, Homo Sapiens; identical to SEQ ID NO: 260813
  misc_feature (39)..(39): n is a, c, g, or t
  misc_feature (73)..(73): n is a, c, g, or t
  misc_feature (113)..(113): n is a, c, g, or t
  misc_feature (133)..(133): n is a, c, g, or t
  misc_feature (152)..(152): n is a, c, g, or t
  misc_feature (210)..(210): n is a, c, g, or t
  misc_feature (229)..(229): n is a, c, g, or t

SEQ ID NO: 279336 - DNA, 479 bp, Homo Sapiens; identical to SEQ ID NO: 260814

SEQ ID NO: 279337 - DNA, 1106 bp, Homo Sapiens; identical to SEQ ID NO: 260815

SEQ ID NO: 279338 - DNA, 1421 bp, Homo Sapiens; identical to SEQ ID NO: 260816
  misc_feature (1150)..(1150): n is a, c, g, or t

SEQ ID NO: 279339 - DNA, 1351 bp, Homo Sapiens; identical to SEQ ID NO: 260830
  misc_feature (484)..(571): n is a, c, g, or t
  misc_feature (920)..(920): n is a, c, g, or t

SEQ ID NO: 279340 - DNA, 1401 bp, Homo Sapiens; identical to SEQ ID NO: 260831
  misc_feature (1338)..(1338): n is a, c, g, or t

SEQ ID NO: 279341 - DNA, 1182 bp, Homo Sapiens; identical to SEQ ID NO: 260833
  misc_feature (357)..(357): n is a, c, g, or t
  misc_feature (646)..(771): n is a, c, g, or t
  misc_feature (904)..(913): n is a, c, g, or t
  misc_feature (1015)..(1025): n is a, c, g, or t
  misc_feature (1084)..(1092): n is a, c, g, or t

SEQ ID NO: 279342 - DNA, 902 bp, Homo Sapiens; identical to SEQ ID NO: 260834

SEQ ID NO: 279343 - DNA, 452 bp, Homo Sapiens; identical to SEQ ID NO: 260863
  misc_feature (110)..(111): n is a, c, g, or t
  misc_feature (114)..(114): n is a, c, g, or t
  misc_feature (119)..(119): n is a, c, g, or t
  misc_feature (122)..(126): n is a, c, g, or t
  misc_feature (128)..(130): n is a, c, g, or t
  misc_feature (134)..(134): n is a, c, g, or t
  misc_feature (142)..(142): n is a, c, g, or t
  misc_feature (146)..(146): n is a, c, g, or t
  misc_feature (157)..(157): n is a, c, g, or t
  misc_feature (176)..(177): n is a, c, g, or t
  misc_feature (180)..(180): n is a, c, g, or t
  misc_feature (183)..(184): n is a, c, g, or t
  misc_feature (191)..(191): n is a, c, g, or t
  misc_feature (195)..(195): n is a, c, g, or t
  misc_feature (206)..(206): n is a, c, g, or t
  misc_feature (213)..(213): n is a, c, g, or t
  misc_feature (215)..(215): n is a, c, g, or t
  misc_feature (220)..(220): n is a, c, g, or t
  misc_feature (232)..(232): n is a, c, g, or t
  misc_feature (237)..(237): n is a, c, g, or t
  misc_feature (244)..(244): n is a, c, g, or t
  misc_feature (248)..(248): n is a, c, g, or t
  misc_feature (250)..(251): n is a, c, g, or t
  misc_feature (255)..(255): n is a, c, g, or t
  misc_feature (340)..(340): n is a, c, g, or t
  misc_feature (414)..(415): n is a, c, g, or t

SEQ ID NO: 279344 - DNA, 699 bp, Homo Sapiens; identical to SEQ ID NO: 97925

SEQ ID NO: 279345 - DNA, 723 bp, Homo Sapiens; identical to SEQ ID NO: 260867

SEQ ID NO: 279346 - DNA, 361 bp, Homo Sapiens; identical to SEQ ID NO: 260868

SEQ ID NO: 279347 - DNA, 736 bp, Homo Sapiens; identical to SEQ ID NO: 260874
  misc_feature (656)..(675): n is a, c, g, or t
  misc_feature (677)..(679): n is a, c, g, or t

SEQ ID NO: 279348 - DNA, 866 bp, Homo Sapiens; identical to SEQ ID NO: 260875
  misc_feature (68)..(69): n is a, c, g, or t

SEQ ID NO: 279349 - DNA, 493 bp, Homo Sapiens; identical to SEQ ID NO: 260876
  misc_feature (195)..(195): n is a, c, g, or t
  misc_feature (343)..(343): n is a, c, g, or t
  misc_feature (348)..(348): n is a, c, g, or t
  misc_feature (426)..(426): n is a, c, g, or t
  misc_feature (448)..(448): n is a, c, g, or t
  misc_feature (468)..(468): n is a, c, g, or t

SEQ ID NO: 279350 - DNA, 649 bp, Homo Sapiens; identical to SEQ ID NO: 260886

SEQ ID NO: 279351 - DNA, 973 bp, Homo Sapiens; identical to SEQ ID NO: 260887
  misc_feature (895)..(906): n is a, c, g, or t

SEQ ID NO: 279352 - DNA, 1114 bp, Homo Sapiens; identical to SEQ ID NO: 260888

SEQ ID NO: 279353 - DNA, 502 bp, Homo Sapiens; identical to SEQ ID NO: 260889
  misc_feature (32)..(32): n is a, c, g, or t

SEQ ID NO: 279354 - DNA, 713 bp, Homo Sapiens; identical to SEQ ID NO: 260891

SEQ ID NO: 279355 - DNA, 850 bp, Homo Sapiens; identical to SEQ ID NO: 260892
  misc_feature (245)..(245): n is a, c, g, or t

SEQ ID NO: 279356 - DNA, 980 bp, Homo Sapiens; identical to SEQ ID NO: 260893

SEQ ID NO: 279357 - DNA, 992 bp, Homo Sapiens; identical to SEQ ID NO: 260896
  misc_feature (822)..(822): n is a, c, g, or t
  misc_feature (841)..(841): n is a, c, g, or t
  misc_feature (851)..(851): n is a, c, g, or t

SEQ ID NO: 279358 - DNA, 1009 bp, Homo Sapiens; identical to SEQ ID NO: 260897
  misc_feature (68)..(128): n is a, c, g, or t

SEQ ID NO: 279359 - DNA, 1125 bp, Homo Sapiens; identical to SEQ ID NO: 260901
  misc_feature (107)..(107): n is a, c, g, or t
  misc_feature (300)..(300): n is a, c, g, or t

SEQ ID NO: 279360 - DNA, 435 bp, Homo Sapiens; identical to SEQ ID NO: 260902

SEQ ID NO: 279361 - DNA, 866 bp, Homo Sapiens; identical to SEQ ID NO: 260911
  misc_feature (801)..(801): n is a, c, g, or t
  misc_feature (827)..(827): n is a, c, g, or t
  misc_feature (835)..(835): n is a, c, g, or t
  misc_feature (852)..(852): n is a, c, g, or t

SEQ ID NO: 279362 - DNA, 418 bp, Homo Sapiens; identical to SEQ ID NO: 260912
  misc_feature (21)..(21): n is a, c, g, or t
  misc_feature (314)..(314): n is a, c, g, or t
  misc_feature (354)..(354): n is a, c, g, or t
  misc_feature (406)..(406): n is a, c, g, or t

SEQ ID NO: 279363 - DNA, 669 bp, Homo Sapiens; identical to SEQ ID NO: 260929

SEQ ID NO: 279364 - DNA, 845 bp, Homo Sapiens; identical to SEQ ID NO: 74273
  misc_feature (542)..(554): n is a, c, g, or t
  misc_feature (556)..(557): n is a, c, g, or t
  misc_feature (613)..(625): n is a, c, g, or t
  misc_feature (676)..(676): n is a, c, g, or t
  misc_feature (681)..(682): n is a, c, g, or t
  misc_feature (684)..(684): n is a, c, g, or t
  misc_feature (698)..(712): n is a, c, g, or t
  misc_feature (719)..(741): n is a, c, g, or t

SEQ ID NO: 279365 - DNA, 911 bp, Homo Sapiens; identical to SEQ ID NO: 260931
  misc_feature (727)..(774): n is a, c, g, or t
  misc_feature (811)..(822): n is a, c, g, or t
  misc_feature (842)..(854): n is a, c, g, or t

SEQ ID NO: 279366 - DNA, 711 bp, Homo Sapiens; identical to SEQ ID NO: 260932

SEQ ID NO: 279367 - DNA, 1459 bp, Homo Sapiens; identical to SEQ ID NO: 260941
  misc_feature (16)..(16): n is a, c, g, or t
  misc_feature (1407)..(1407): n is a, c, g, or t
  misc_feature (1432)..(1432): n is a, c, g, or t

SEQ ID NO: 279368 - DNA, 556 bp, Homo Sapiens; identical to SEQ ID NO: 260942
  misc_feature (451)..(451): n is a, c, g, or t
  misc_feature (518)..(518): n is a, c, g, or t
  misc_feature (530)..(530): n is a, c, g, or t

SEQ ID NO: 279369 - DNA, 513 bp, Homo Sapiens; identical to SEQ ID NO: 260945

SEQ ID NO: 279370 - DNA, 794 bp, Homo Sapiens; identical to SEQ ID NO: 260946

SEQ ID NO: 279371 - DNA, 436 bp, Homo Sapiens; identical to SEQ ID NO: 260947
  misc_feature (238)..(238): n is a, c, g, or t
  misc_feature (240)..(240): n is a, c, g, or t
  misc_feature (284)..(284): n is a, c, g, or t

SEQ ID NO: 279372 - DNA, 1086 bp, Homo Sapiens; identical to SEQ ID NO: 260948
  misc_feature (680)..(680): n is a, c, g, or t

SEQ ID NO: 279373 - DNA, 897 bp, Homo Sapiens; identical to SEQ ID NO: 260962

SEQ ID NO: 279374 - DNA, 783 bp, Homo Sapiens; identical to SEQ ID NO: 260963

SEQ ID NO: 279375 - DNA, 708 bp, Homo Sapiens; identical to SEQ ID NO: 260964

SEQ ID NO: 279376 - DNA, 726 bp, Homo Sapiens; identical to SEQ ID NO: 260965
  misc_feature (601)..(601): n is a, c, g, or t

SEQ ID NO: 279377 - DNA, 769 bp, Homo Sapiens; identical to SEQ ID NO: 260966

SEQ ID NO: 279378 - DNA, 1016 bp, Homo Sapiens; identical to SEQ ID NO: 260969

SEQ ID NO: 279379 - DNA, 977 bp, Homo Sapiens; identical to SEQ ID NO: 260970

SEQ ID NO: 279380 - DNA, 893 bp, Homo Sapiens; identical to SEQ ID NO: 260971

SEQ ID NO: 279381 - DNA, 421 bp, Homo Sapiens; identical to SEQ ID NO: 260972
  misc_feature (64)..(64): n is a, c, g, or t
  misc_feature (346)..(346): n is a, c, g, or t
  misc_feature (371)..(371): n is a, c, g, or t

SEQ ID NO: 279382 - DNA, 679 bp, Homo Sapiens; identical to SEQ ID NO: 260976

SEQ ID NO: 279383 - DNA, 401 bp, Homo Sapiens; identical to SEQ ID NO: 260977
  misc_feature (359)..(359): n is a, c, g, or t
  misc_feature (366)..(366): n is a, c, g, or t

SEQ ID NO: 279384 - DNA, 813 bp, Homo Sapiens; identical to SEQ ID NO: 260980
  misc_feature (649)..(649): n is a, c, g, or t
  misc_feature (651)..(651): n is a, c, g, or t
  misc_feature (658)..(770): n is a, c, g, or t

SEQ ID NO: 279385 - DNA, 445 bp, Homo Sapiens; identical to SEQ ID NO: 260981
  misc_feature (21)..(21): n is a, c, g, or t
  misc_feature (53)..(53): n is a, c, g, or t
  misc_feature (58)..(58): n is a, c, g, or t
  misc_feature (66)..(66): n is a, c, g, or t
  misc_feature (90)..(90): n is a, c, g, or t
  misc_feature (106)..(106): n is a, c, g, or t
  misc_feature (422)..(423): n is a, c, g, or t

SEQ ID NO: 279386 - DNA, 415 bp, Homo Sapiens; identical to SEQ ID NO: 260982
  misc_feature (23)..(23): n is a, c, g, or t
  misc_feature (177)..(177): n is a, c, g, or t

SEQ ID NO: 279387 - DNA, 930 bp, Homo Sapiens; identical to SEQ ID NO: 260990

SEQ ID NO: 279388 - DNA, 439 bp, Homo Sapiens; identical to SEQ ID NO: 260991
  misc_feature (22)..(22): n is a, c, g, or t

SEQ ID NO: 279389 - DNA, 1618 bp, Homo Sapiens; identical to SEQ ID NO: 261001

SEQ ID NO: 279390 - DNA, 586 bp, Homo Sapiens; identical to SEQ ID NO: 261002

SEQ ID NO: 279391 - DNA, 719 bp, Homo Sapiens; identical to SEQ ID NO: 261016

SEQ ID NO: 279392 - DNA, 465 bp, Homo Sapiens; identical to SEQ ID NO: 261017
  misc_feature (13)..(13): n is a, c, g, or t
  misc_feature (37)..(37): n is a, c, g, or t
  misc_feature (42)..(42): n is a, c, g, or t
  misc_feature (51)..(51): n is a, c, g, or t
  misc_feature (76)..(76): n is a, c, g, or t
  misc_feature (119)..(119): n is a, c, g, or t

SEQ ID NO: 279393 - DNA, 1227 bp, Homo Sapiens; identical to SEQ ID NO: 261021

SEQ ID NO: 279394 - DNA, 958 bp, Homo Sapiens; identical to SEQ ID NO: 261022

SEQ ID NO: 279395 - DNA, 1774 bp, Homo Sapiens; identical to SEQ ID NO: 261023
  misc_feature (1665)..(1702): n is a, c, g, or t
  misc_feature (1705)..(1713): n is a, c, g, or t

SEQ ID NO: 279396 - DNA, 491 bp, Homo Sapiens; identical to SEQ ID NO: 261024
  misc_feature (358)..(358): n is a, c, g, or t
  misc_feature (378)..(378): n is a, c, g, or t
  misc_feature (416)..(416): n is a, c, g, or t
  misc_feature (463)..(463): n is a, c, g, or t

SEQ ID NO: 279397 - DNA, 1053 bp, Homo Sapiens; identical to SEQ ID NO: 261035
  misc_feature (464)..(473): n is a, c, g, or t
  misc_feature (997)..(997): n is a, c, g, or t

SEQ ID NO: 279398 - DNA, 1457 bp, Homo Sapiens; identical to SEQ ID NO: 261036
  misc_feature (440)..(566): n is a, c, g, or t
  misc_feature (577)..(590): n is a, c, g, or t
  misc_feature (750)..(760): n is a, c, g, or t
  misc_feature (816)..(827): n is a, c, g, or t
  misc_feature (1309)..(1309): n is a, c, g, or t

SEQ ID NO: 279399 - DNA, 976 bp, Homo Sapiens; identical to SEQ ID NO: 261054
  misc_feature (100)..(199): n is a, c, g, or t

SEQ ID NO: 279400 - DNA, 610 bp, Homo Sapiens; identical to SEQ ID NO: 261055
  misc_feature (560)..(561): n is a, c, g, or t

SEQ ID NO: 279401 - DNA, 411 bp, Homo Sapiens; identical to SEQ ID NO: 261059

SEQ ID NO: 279402 - DNA, 762 bp, Homo Sapiens; identical to SEQ ID NO: 261060
  misc_feature (76)..(151): n is a, c, g, or t

SEQ ID NO: 279403 - DNA, 1028 bp, Homo Sapiens; identical to SEQ ID NO: 261069
  misc_feature (97)..(159): n is a, c, g, or t

SEQ ID NO: 279404 - DNA, 535 bp, Homo Sapiens; identical to SEQ ID NO: 261070
  misc_feature (19)..(19): n is a, c, g, or t
  misc_feature (146)..(146): n is a, c, g, or t

SEQ ID NO: 279405 - DNA, 1021 bp, Homo Sapiens; identical to SEQ ID NO: 261078
  misc_feature (124)..(124): n is a, c, g, or t
  misc_feature (144)..(216): n is a, c, g, or t
  misc_feature (514)..(588): n is a, c, g, or t
  misc_feature (628)..(639): n is a, c, g, or t

SEQ ID NO: 279406 - DNA, 834 bp, Homo Sapiens; identical to SEQ ID NO: 261079
  misc_feature (172)..(181): n is a, c, g, or t
  misc_feature (221)..(265): n is a, c, g, or t
  misc_feature (367)..(367): n is a, c, g, or t

SEQ ID NO: 279407 - DNA, 411 bp, Homo Sapiens; identical to SEQ ID NO: 261105

SEQ ID NO: 279408 - DNA, 1069 bp, Homo Sapiens; identical to SEQ ID NO: 261106

SEQ ID NO: 279409 - DNA, 1732 bp, Homo Sapiens; identical to SEQ ID NO: 261113

SEQ ID NO: 279410 - DNA, 454 bp, Homo Sapiens; identical to SEQ ID NO: 261114
  misc_feature (27)..(27): n is a, c, g, or t

SEQ ID NO: 279411 - DNA, 1260 bp, Homo Sapiens; identical to SEQ ID NO: 261120
  misc_feature (46)..(82): n is a, c, g, or t

SEQ ID NO: 279412 - DNA, 672 bp, Homo Sapiens; identical to SEQ ID NO: 261121
  misc_feature (18)..(18): n is a, c, g, or t
  misc_feature (222)..(315): n is a, c, g, or t
  misc_feature (478)..(478): n is a, c, g, or t
  misc_feature (652)..(652): n is a, c, g, or t

SEQ ID NO: 279413 - DNA, 573 bp, Homo Sapiens; identical to SEQ ID NO: 261122
  misc_feature (40)..(40): n is a, c, g, or t
  misc_feature (106)..(106): n is a, c, g, or t
  misc_feature (196)..(196): n is a, c, g, or t
  misc_feature (213)..(213): n is a, c, g, or t
  misc_feature (236)..(301): n is a, c, g, or t
  misc_feature (319)..(319): n is a, c, g, or t
  misc_feature (322)..(322): n is a, c, g, or t
  misc_feature (453)..(485): n is a, c, g, or t

SEQ ID NO: 279414 - DNA, 428 bp, Homo Sapiens; identical to SEQ ID NO: 261129
  misc_feature (378)..(378): n is a, c, g, or t
  misc_feature (387)..(387): n is a, c, g, or t
  misc_feature (390)..(390): n is a, c, g, or t
  misc_feature (410)..(410): n is a, c, g, or t

SEQ ID NO: 279415 - DNA, 1069 bp, Homo Sapiens; identical to SEQ ID NO: 261130

SEQ ID NO: 279416 - DNA, 1175 bp, Homo Sapiens; identical to SEQ ID NO: 261142
  misc_feature (1085)..(1125): n is a, c, g, or t

SEQ ID NO: 279417 - DNA, 486 bp, Homo Sapiens; identical to SEQ ID NO: 261143
  misc_feature (32)..(32): n is a, c, g, or t
  misc_feature (46)..(46): n is a, c, g, or t
  misc_feature (56)..(56): n is a, c, g, or t
  misc_feature (95)..(95): n is a, c, g, or t

SEQ ID NO: 279418 - DNA, 1307 bp, Homo Sapiens; identical to SEQ ID NO: 261146

SEQ ID NO: 279419 - DNA, 432 bp, Homo Sapiens; identical to SEQ ID NO: 261147
  misc_feature (19)..(19): n is a, c, g, or t

SEQ ID NO: 279420 - DNA, 601 bp, Homo Sapiens; identical to SEQ ID NO: 261157

SEQ ID NO: 279421 - DNA, 513 bp, Homo Sapiens; identical to SEQ ID NO: 261158

SEQ ID NO: 279422 - DNA, 416 bp, Homo Sapiens; identical to SEQ ID NO: 261165

SEQ ID NO: 279423 - DNA, 2014 bp, Homo Sapiens; identical to SEQ ID NO: 261166
  misc_feature (515)..(524): n is a, c, g, or t
  misc_feature (1316)..(1324): n is a, c, g, or t

SEQ ID NO: 279424 - DNA, 437 bp, Homo Sapiens; identical to SEQ ID NO: 261176
  misc_feature (27)..(27): n is a, c, g, or t

SEQ ID NO: 279425 - DNA, 432 bp, Homo Sapiens; identical to SEQ ID NO: 261177
  misc_feature (329)..(329): n is a, c, g, or t

SEQ ID NO: 279426 - DNA, 1172 bp, Homo Sapiens; identical to SEQ ID NO: 261178
  misc_feature (20)..(20): n is a, c, g, or t
  misc_feature (80)..(80): n is a, c, g, or t
  misc_feature (142)..(142): n is a, c, g, or t
  misc_feature (168)..(168): n is a, c, g, or t
  misc_feature (177)..(177): n is a, c, g, or t
  misc_feature (392)..(392): n is a, c, g, or t
  misc_feature (597)..(730): n is a, c, g, or t
  misc_feature (743)..(756): n is a, c, g, or t
  misc_feature (865)..(875): n is a, c, g, or t
  misc_feature (912)..(952): n is a, c, g, or t
  misc_feature (982)..(991): n is a, c, g, or t
  misc_feature (1072)..(1080): n is a, c, g, or t
  misc_feature (1111)..(1120): n is a, c, g, or t

SEQ ID NO: 279427 - DNA, 742 bp, Homo Sapiens; identical to SEQ ID NO: 261179

SEQ ID NO: 279428 - DNA, 578 bp, Homo Sapiens; identical to SEQ ID NO: 261180

SEQ ID NO: 279429 - DNA, 444 bp, Homo Sapiens; identical to SEQ ID NO: 261181
  misc_feature (75)..(83): n is a, c, g, or t
  misc_feature (421)..(421): n is a, c, g, or t

SEQ ID NO: 279430 - DNA, 333 bp, Homo Sapiens; identical to SEQ ID NO: 261182
  misc_feature (19)..(19): n is a, c, g, or t
  misc_feature (97)..(97): n is a, c, g, or t
  misc_feature (104)..(104): n is a, c, g, or t
  misc_feature (286)..(286): n is a, c, g, or t

SEQ ID NO: 279431 - DNA, 372 bp, Homo Sapiens; identical to SEQ ID NO: 261183
  misc_feature (240)..(267): n is a, c, g, or t
  misc_feature (349)..(349): n is a, c, g, or t

SEQ ID NO: 279432 - DNA, 733 bp, Homo Sapiens; identical to SEQ ID NO: 261184
  misc_feature (23)..(23): n is a, c, g, or t
  misc_feature (29)..(29): n is a, c, g, or t
  misc_feature (37)..(37): n is a, c, g, or t
  misc_feature (43)..(43): n is a, c, g, or t
  misc_feature (71)..(71): n is a, c, g, or t
  misc_feature (110)..(110): n is a, c, g, or t
  misc_feature (183)..(183): n is a, c, g, or t
  misc_feature (214)..(214): n is a, c, g, or t
  misc_feature (228)..(228): n is a, c, g, or t
  misc_feature (585)..(612): n is a, c, g, or t

SEQ ID NO: 279433 - DNA, 978 bp, Homo Sapiens; identical to SEQ ID NO: 261190
  misc_feature (102)..(208): n is a, c, g, or t

SEQ ID NO: 279434 - DNA, 311 bp, Homo Sapiens; identical to SEQ ID NO: 261191

SEQ ID NO: 279435 - DNA, 899 bp, Homo Sapiens; identical to SEQ ID NO: 261192

SEQ ID NO: 279436 - DNA, 259 bp, Homo Sapiens; identical to SEQ ID NO: 261193

SEQ ID NO: 279437 - DNA, 762 bp, Homo Sapiens; identical to SEQ ID NO: 261194

SEQ ID NO: 279438 - DNA, 1085 bp, Homo Sapiens; identical to SEQ ID NO: 261195

SEQ ID NO: 279439 - DNA, 1725 bp, Homo Sapiens; identical to SEQ ID NO: 261204
  misc_feature (639)..(639): n is a, c, g, or t
  misc_feature (641)..(641): n is a, c, g, or t
  misc_feature (777)..(890): n is a, c, g, or t

SEQ ID NO: 279440 - DNA, 415 bp, Homo Sapiens; identical to SEQ ID NO: 261205

SEQ ID NO: 279441 - DNA, 586 bp, Homo Sapiens; identical to SEQ ID NO: 261209
  misc_feature (102)..(151): n is a, c, g, or t
  misc_feature (425)..(476): n is a, c, g, or t

SEQ ID NO: 279442 - DNA, 403 bp, Homo Sapiens; identical to SEQ ID NO: 261210
  misc_feature (113)..(161): n is a, c, g, or t

SEQ ID NO: 279443 - DNA, 1546 bp, Homo Sapiens; identical to SEQ ID NO: 261211
  misc_feature (919)..(964): n is a, c, g, or t

SEQ ID NO: 279444 - DNA, 882 bp, Homo Sapiens; identical to SEQ ID NO: 261212
  misc_feature (226)..(271): n is a, c, g, or t

SEQ ID NO: 279445 - DNA, 1256 bp, Homo Sapiens; identical to SEQ ID NO: 261223

SEQ ID NO: 279446 - DNA, 530 bp, Homo Sapiens; identical to SEQ ID NO: 261224
  misc_feature (24)..(24): n is a, c, g, or t
  misc_feature (46)..(46): n is a, c, g, or t

SEQ ID NO: 279447 - DNA, 684 bp, Homo Sapiens; identical to SEQ ID NO: 261227

SEQ ID NO: 279448 - DNA, 1163 bp, Homo Sapiens; identical to SEQ ID NO: 261228
  misc_feature (1108)..(1108): n is a, c, g, or t

SEQ ID NO: 279449 - DNA, 613 bp, Homo Sapiens; identical to SEQ ID NO: 261229

SEQ ID NO: 279450 - DNA, 996 bp, Homo Sapiens; identical to SEQ ID NO: 261230

SEQ ID NO: 279451 - DNA, 545 bp, Homo Sapiens; identical to SEQ ID NO: 261231
  misc_feature (490)..(490): n is a, c, g, or t

SEQ ID NO: 279452 - DNA, 425 bp, Homo Sapiens; identical to SEQ ID NO: 261232
  misc_feature (380)..(380): n is a, c, g, or t
  misc_feature (403)..(403): n is a, c, g, or t

SEQ ID NO: 279453 - DNA, 397 bp, Homo Sapiens; identical to SEQ ID NO: 261233
  misc_feature (58)..(88): n is a, c, g, or t

SEQ ID NO: 279454 - DNA, 820 bp, Homo Sapiens; identical to SEQ ID NO: 261234

SEQ ID NO: 279455 - DNA, 1553 bp, Homo Sapiens; identical to SEQ ID NO: 261246
  misc_feature (250)..(270): n is a, c, g, or t

SEQ ID NO: 279456 - DNA, 596 bp, Homo Sapiens; identical to SEQ ID NO: 261247

SEQ ID NO: 279457 - DNA, 492 bp, Homo Sapiens; identical to SEQ ID NO: 261259
  misc_feature (84)..(84): n is a, c, g, or t
  misc_feature (110)..(110): n is a, c, g, or t

SEQ ID NO: 279458 - DNA, 1855 bp, Homo Sapiens; identical to SEQ ID NO: 261260
  misc_feature (578)..(578): n is a, c, g, or t
  misc_feature (1139)..(1178): n is a, c, g, or t
  misc_feature (1284)..(1344): n is a, c, g, or t
  misc_feature (1365)..(1555): n is a, c, g, or t

SEQ ID NO: 279459 - DNA, 684 bp, Homo Sapiens; identical to SEQ ID NO: 261274
  misc_feature (523)..(561): n is a, c, g, or t

SEQ ID NO: 279460 - DNA, 1103 bp, Homo Sapiens; identical to SEQ ID NO: 261275
  misc_feature (165)..(201): n is a, c, g, or t
  misc_feature (625)..(653): n is a, c, g, or t
  misc_feature (952)..(953): n is a, c, g, or t

SEQ ID NO: 279461 - DNA, 766 bp, Homo Sapiens; identical to SEQ ID NO: 261296
  misc_feature (30)..(30): n is a, c, g, or t
  misc_feature (39)..(39): n is a, c, g, or t
  misc_feature (76)..(77): n is a, c, g, or t
  misc_feature (123)..(123): n is a, c, g, or t
  misc_feature (125)..(125): n is a, c, g, or t
  misc_feature (142)..(142): n is a, c, g, or t
  misc_feature (161)..(162): n is a, c, g, or t
  misc_feature (181)..(181): n is a, c, g, or t
  misc_feature (530)..(594): n is a, c, g, or t

SEQ ID NO: 279462 - DNA, 741 bp, Homo Sapiens; identical to SEQ ID NO: 261297
  misc_feature (179)..(245): n is a, c, g, or t

SEQ ID NO: 279463 - DNA, 898 bp, Homo Sapiens; identical to SEQ ID NO: 261301

SEQ ID NO: 279464 - DNA, 452 bp, Homo Sapiens; identical to SEQ ID NO: 261302
  misc_feature (206)..(206): n is a, c, g, or t
  misc_feature (226)..(226): n is a, c, g, or t
  misc_feature (365)..(365): n is a, c, g, or t

SEQ ID NO: 279465 - DNA, 1280 bp, Homo Sapiens; identical to SEQ ID NO: 261315

SEQ ID NO: 279466 - DNA, 956 bp, Homo Sapiens; identical to SEQ ID NO: 261316

SEQ ID NO: 279467 - DNA, 1126 bp, Homo Sapiens; identical to SEQ ID NO: 261317

SEQ ID NO: 279468 - DNA, 945 bp, Homo Sapiens; identical to SEQ ID NO: 261318

SEQ ID NO: 279469 - DNA, 907 bp, Homo Sapiens; identical to SEQ ID NO: 261336

SEQ ID NO: 279470 - DNA, 535 bp, Homo Sapiens; identical to SEQ ID NO: 261337

SEQ ID NO: 279471 - DNA, 1108 bp, Homo Sapiens; identical to SEQ ID NO: 261345
  misc_feature (901)..(901): n is a, c, g, or t

SEQ ID NO: 279472 - DNA, 731 bp, Homo Sapiens; identical to SEQ ID NO: 261346
  misc_feature (492)..(558): n is a, c, g, or t

SEQ ID NO: 279473 - DNA, 518 bp, Homo Sapiens; identical to SEQ ID NO: 261353
  misc_feature (34)..(34): n is a, c, g, or t

SEQ ID NO: 279474 - DNA, 580 bp, Homo Sapiens; identical to SEQ ID NO: 261354
  misc_feature (376)..(421): n is a, c, g, or t
  misc_feature (473)..(504): n is a, c, g, or t

SEQ ID NO: 279475 - DNA, 507 bp, Homo Sapiens; identical to SEQ ID NO: 70952
  misc_feature (477)..(477): n is a, c, g, or t

SEQ ID NO: 279476 - DNA, 768 bp, Homo Sapiens; identical to SEQ ID NO: 175742
  misc_feature (580)..(581): n is a, c, g, or t
  misc_feature (586)..(586): n is a, c, g, or t
  misc_feature (588)..(589): n is a, c, g, or t
  misc_feature (595)..(596): n is a, c, g, or t

SEQ ID NO: 279477 - DNA, 1071 bp, Homo Sapiens; identical to SEQ ID NO: 261363

SEQ ID NO: 279478 - DNA, 1021 bp, Homo Sapiens; identical to SEQ ID NO: 261364

SEQ ID NO: 279479 - DNA, 957 bp, Homo Sapiens; identical to SEQ ID NO: 261365

SEQ ID NO: 279480 - DNA, 2852 bp, Homo Sapiens; identical to SEQ ID NO: 261366
  misc_feature (1667)..(1985): n is a, c, g, or t

SEQ ID NO: 279481 - DNA, 1001 bp, Homo Sapiens; identical to SEQ ID NO: 261372
  misc_feature (298)..(384): n is a, c, g, or t
  misc_feature (659)..(660): n is a, c, g, or t
  misc_feature (662)..(662): n is a, c, g, or t
  misc_feature (664)..(664): n is a, c, g, or t
  misc_feature (666)..(666): n is a, c, g, or t
  misc_feature (670)..(670): n is a, c, g, or t
  misc_feature (699)..(720): n is a, c, g, or t

SEQ ID NO: 279482 - DNA, 1199 bp, Homo Sapiens; identical to SEQ ID NO: 261373
  misc_feature (304)..(380): n is a, c, g, or t
  misc_feature (677)..(768): n is a, c, g, or t
  misc_feature (866)..(927): n is a, c, g, or t

SEQ ID NO: 279483 - DNA, 881 bp, Homo Sapiens; identical to SEQ ID NO: 15366
  misc_feature (631)..(650): n is a, c, g, or t

SEQ ID NO: 279484 - DNA, 816 bp, Homo Sapiens; identical to SEQ ID NO: 261387
  misc_feature (674)..(720): n is a, c, g, or t
  misc_feature (768)..(768): n is a, c, g, or t

SEQ ID NO: 279485 - DNA, 462 bp, Homo Sapiens; identical to SEQ ID NO: 261388

SEQ ID NO: 279486 - DNA, 475 bp, Homo Sapiens; identical to SEQ ID NO: 261389
  misc_feature (16)..(16): n is a, c, g, or t
  misc_feature (121)..(121): n is a, c, g, or t
  misc_feature (130)..(130): n is a, c, g, or t

SEQ ID NO: 279487 - DNA, 545 bp, Homo Sapiens; identical to SEQ ID NO: 261404

SEQ ID NO: 279488 - DNA, 608 bp, Homo Sapiens; identical to SEQ ID NO: 261405

SEQ ID NO: 279489 - DNA, 705 bp, Homo Sapiens; identical to SEQ ID NO: 261409

SEQ ID NO: 279490 - DNA, 1203 bp, Homo Sapiens; identical to SEQ ID NO: 261410
  misc_feature (1140)..(1140): n is a, c, g, or t

SEQ ID NO: 279491 - DNA, 492 bp, Homo Sapiens; identical to SEQ ID NO: 261411
  misc_feature (385)..(385): n is a, c, g, or t
  misc_feature (403)..(403): n is a, c, g, or t
  misc_feature (422)..(422): n is a, c, g, or t
  misc_feature (439)..(439): n is a, c, g, or t
  misc_feature (449)..(449): n is a, c, g, or t
  misc_feature (454)..(454): n is a, c, g, or t
  misc_feature (471)..(471): n is a, c, g, or t

SEQ ID NO: 279492 - DNA, 842 bp, Homo Sapiens; identical to SEQ ID NO: 261418
  misc_feature (505)..(517): n is a, c, g, or t
  misc_feature (600)..(600): n is a, c, g, or t
  misc_feature (769)..(769): n is a, c, g, or t

SEQ ID NO: 279493 - DNA, 1023 bp, Homo Sapiens; identical to SEQ ID NO: 261419

SEQ ID NO: 279494 - DNA, 985 bp, Homo Sapiens; identical to SEQ ID NO: 261427

SEQ ID NO: 279495 - DNA, 903 bp, Homo Sapiens; identical to SEQ ID NO: 261428
  misc_feature (596)..(596): n is a, c, g, or t

SEQ ID NO: 279496 - DNA, 611 bp, Homo Sapiens; identical to SEQ ID NO: 261433

SEQ ID NO: 279497 - DNA, 940 bp, Homo Sapiens; identical to SEQ ID NO: 261434

SEQ ID NO: 279498 - DNA, 1043 bp, Homo Sapiens; identical to SEQ ID NO: 261443

SEQ ID NO: 279499 - DNA, 473 bp, Homo Sapiens; identical to SEQ ID NO: 261444
  misc_feature (22)..(22): n is a, c, g, or t

SEQ ID NO: 279500 - DNA, 931 bp, Homo Sapiens; identical to SEQ ID NO: 261447

SEQ ID NO: 279501 - DNA, 921 bp, Homo Sapiens; identical to SEQ ID NO: 261448
  misc_feature (776)..(776): n is a, c, g, or t

SEQ ID NO: 279502 - DNA, 1158 bp, Homo Sapiens; identical to SEQ ID NO: 261449

SEQ ID NO: 279503 - DNA, 907 bp, Homo Sapiens; identical to SEQ ID NO: 261450
  misc_feature (609)..(609): n is a, c, g, or t
  misc_feature (620)..(620): n is a, c, g, or t

SEQ ID NO: 279504 - DNA, 575 bp, Homo Sapiens; identical to SEQ ID NO: 261451

SEQ ID NO: 279505 - DNA, 685 bp, Homo Sapiens; identical to SEQ ID NO: 261452
  misc_feature (618)..(618): n is a, c, g, or t
  misc_feature (633)..(633): n is a, c, g, or t
  misc_feature (649)..(649): n is a, c, g, or t
  misc_feature (662)..(662): n is a, c, g, or t

SEQ ID NO: 279506 - DNA, 719 bp, Homo Sapiens; identical to SEQ ID NO: 261459

SEQ ID NO: 279507 - DNA, 879 bp, Homo Sapiens; identical to SEQ ID NO: 261460

SEQ ID NO: 279508 - DNA, 1372 bp, Homo Sapiens; identical to SEQ ID NO: 261461
  misc_feature (1145)..(1166): n is a, c, g, or t

SEQ ID NO: 279509 - DNA, 955 bp, Homo Sapiens; identical to SEQ ID NO: 14941
  misc_feature (137)..(137): n is a, c, g, or t
  misc_feature (195)..(195): n is a, c, g, or t
  misc_feature (202)..(203): n is a, c, g, or t
  misc_feature (206)..(213): n is a, c, g, or t
  misc_feature (713)..(731): n is a, c, g, or t

SEQ ID NO: 279510 - DNA, 730 bp, Homo Sapiens; identical to SEQ ID NO: 261471
  misc_feature (146)..(152): n is a, c, g, or t
  misc_feature (155)..(155): n is a, c, g, or t
  misc_feature (158)..(160): n is a, c, g, or t
  misc_feature (163)..(163): n is a, c, g, or t
  misc_feature (165)..(167): n is a, c, g, or t
  misc_feature (171)..(173): n is a, c, g, or t
  misc_feature (178)..(179): n is a, c, g, or t
  misc_feature (181)..(232): n is a, c, g, or t
  misc_feature (458)..(506): n is a, c, g, or t

SEQ ID NO: 279511 - DNA, 990 bp, Homo Sapiens; identical to SEQ ID NO: 261475
  misc_feature (790)..(790): n is a, c, g, or t
  misc_feature (857)..(875): n is a, c, g, or t

SEQ ID NO: 279512 - DNA, 805 bp, Homo Sapiens; identical to SEQ ID NO: 261476
  misc_feature (587)..(587): n is a, c, g, or t
  misc_feature (793)..(793): n is a, c, g, or t

SEQ ID NO: 279513 - DNA, 842 bp, Homo Sapiens; identical to SEQ ID NO: 261493
  misc_feature (592)..(614): n is a, c, g, or t

SEQ ID NO: 279514 - DNA, 799 bp, Homo Sapiens; identical to SEQ ID NO: 261494

SEQ ID NO: 279515 - DNA, 1150 bp, Homo Sapiens; identical to SEQ ID NO: 261495

SEQ ID NO: 279516 - DNA, 1107 bp, Homo Sapiens; identical to SEQ ID NO: 261502

SEQ ID NO: 279517 - DNA, 514 bp, Homo Sapiens; identical to SEQ ID NO: 261503
  misc_feature (478)..(478): n is a, c, g, or t
  misc_feature (485)..(485): n is a, c, g, or t

SEQ ID NO: 279518 - DNA, 451 bp, Homo Sapiens; identical to SEQ ID NO: 261504
  misc_feature (401)..(401): n is a, c, g, or t

SEQ ID NO: 279519 - DNA, 720 bp, Homo Sapiens; identical to SEQ ID NO: 261527
  misc_feature (567)..(625): n is a, c, g, or t
  misc_feature (628)..(640): n is a, c, g, or t
  misc_feature (642)..(649): n is a, c, g, or t
  misc_feature (662)..(677): n is a, c, g, or t

SEQ ID NO: 279520 - DNA, 1264 bp, Homo Sapiens; identical to SEQ ID NO: 261528
  misc_feature (62)..(62): n is a, c, g, or t
  misc_feature (947)..(962): n is a, c, g, or t
  misc_feature (1058)..(1122): n is a, c, g, or t
  misc_feature (1249)..(1249): n is a, c, g, or t

SEQ ID NO: 279521 - DNA, 756 bp, Homo Sapiens; identical to SEQ ID NO: 261529
  misc_feature (356)..(371): n is a, c, g, or t
  misc_feature (434)..(537): n is a, c, g, or t

SEQ ID NO: 279522 - DNA, 645 bp, Homo Sapiens; identical to SEQ ID NO: 261535

SEQ ID NO: 279523 - DNA, 1014 bp, Homo Sapiens; identical to SEQ ID NO: 261536
  misc_feature (493)..(493): n is a, c, g, or t
  misc_feature (695)..(712): n is a, c, g, or t

SEQ ID NO: 279524 - DNA, 730 bp, Homo Sapiens; identical to SEQ ID NO: 261540

SEQ ID NO: 279525 - DNA, 414 bp, Homo Sapiens; identical to SEQ ID NO: 261541

SEQ ID NO: 279526 - DNA, 567 bp, Homo Sapiens; identical to SEQ ID NO: 261546

SEQ ID NO: 279527 - DNA, 1124 bp, Homo Sapiens; identical to SEQ ID NO: 261547
  misc_feature (546)..(765): n is a, c, g, or t
  misc_feature (959)..(1014): n is a, c, g, or t

SEQ ID NO: 279528 - DNA, 716 bp, Homo Sapiens; identical to SEQ ID NO: 261548

SEQ ID NO: 279529 - DNA, 1025 bp, Homo Sapiens; identical to SEQ ID NO: 261566
  misc_feature (814)..(822): n is a, c, g, or t
  misc_feature (824)..(928): n is a, c, g, or t
  misc_feature (937)..(952): n is a, c, g, or t

SEQ ID NO: 279530 - DNA, 831 bp, Homo Sapiens; identical to SEQ ID NO: 171245
  misc_feature (507)..(507): n is a, c, g, or t

SEQ ID NO: 279531 - DNA, 1048 bp, Homo Sapiens; identical to SEQ ID NO: 261575
  misc_feature (48)..(101): n is a, c, g, or t
  misc_feature (148)..(211): n is a, c, g, or t
  misc_feature (249)..(307): n is a, c, g, or t

SEQ ID NO: 279532 - DNA, 859 bp, Homo Sapiens; identical to SEQ ID NO: 261576
  misc_feature (229)..(241): n is a, c, g, or t
  misc_feature (557)..(569): n is a, c, g, or t

SEQ ID NO: 279533 - DNA, 1752 bp, Homo Sapiens; identical to SEQ ID NO: 261577
  misc_feature (1640)..(1648): n is a, c, g, or t

SEQ ID NO: 279534 - DNA, 920 bp, Homo Sapiens; identical to SEQ ID NO: 261582
  misc_feature (232)..(232): n is a, c, g, or t
  misc_feature (282)..(282): n is a, c, g, or t

SEQ ID NO: 279535 - DNA, 713 bp, Homo Sapiens; identical to SEQ ID NO: 261583

SEQ ID NO: 279536 - DNA, 810 bp, Homo Sapiens; identical to SEQ ID NO: 261587
  misc_feature (316)..(357): n is a, c, g, or t

SEQ ID NO: 279537 - DNA, 531 bp, Homo Sapiens; identical to SEQ ID NO: 261588
  misc_feature (29)..(29): n is a, c, g, or t
  misc_feature (77)..(77): n is a, c, g, or t

SEQ ID NO: 279538 - DNA, 854 bp, Homo Sapiens; identical to SEQ ID NO: 261591

SEQ ID NO: 279539 - DNA, 542 bp, Homo Sapiens; identical to SEQ ID NO: 261592
  misc_feature (21)..(21): n is a, c, g, or t
  misc_feature (430)..(442): n is a, c, g, or t

SEQ ID NO: 279540 - DNA, 619 bp, Homo Sapiens; identical to SEQ ID NO: 261600
  misc_feature (211)..(287): n is a, c, g, or t

SEQ ID NO: 279541 - DNA, 606 bp, Homo Sapiens; identical to SEQ ID NO: 261601
  misc_feature (211)..(287): n is a, c, g, or t

SEQ ID NO: 279542 - DNA, 1250 bp, Homo Sapiens; identical to SEQ ID NO: 261603

SEQ ID NO: 279543 - DNA, 802 bp, Homo Sapiens; identical to SEQ ID NO: 261604
  misc_feature (26)..(26): n is a, c, g, or t

SEQ ID NO: 279544 - DNA, 1024 bp, Homo Sapiens; identical to SEQ ID NO: 261614
  misc_feature (986)..(986): n is a, c, g, or t

SEQ ID NO: 279545 - DNA, 666 bp, Homo Sapiens; identical to SEQ ID NO: 261615

SEQ ID NO: 279546 - DNA, 635 bp, Homo Sapiens; identical to SEQ ID NO: 261622
  misc_feature (33)..(33): n is a, c, g, or t
  misc_feature (456)..(456): n is a, c, g, or t

SEQ ID NO: 279547 - DNA, 888 bp, Homo Sapiens; identical to SEQ ID NO: 261623
  misc_feature (25)..(25): n is a, c, g, or t

SEQ ID NO: 279548 - DNA, 869 bp, Homo Sapiens; identical to SEQ ID NO: 261624
  misc_feature (838)..(838): n is a, c, g, or t

SEQ ID NO: 279549 - DNA, 638 bp, Homo Sapiens; identical to SEQ ID NO: 261625
  misc_feature (545)..(545): n is a, c, g, or t
  misc_feature (576)..(576): n is a, c, g, or t
  misc_feature (605)..(605): n is a, c, g, or t
  misc_feature (610)..(610): n is a, c, g, or t
  misc_feature (628)..(628): n is a, c, g, or t

SEQ ID NO: 279550 - DNA, 612 bp, Homo Sapiens; identical to SEQ ID NO: 261626
  misc_feature (542)..(542): n is a, c, g, or t
  misc_feature (564)..(564): n is a, c, g, or t
  misc_feature (590)..(590): n is a, c, g, or t

SEQ ID NO: 279551 - DNA, 426 bp, Homo Sapiens; identical to SEQ ID NO: 261627

SEQ ID NO: 279552 - DNA, 777 bp, Homo Sapiens; identical to SEQ ID NO: 261628
  misc_feature (35)..(35): n is a, c, g, or t
  misc_feature (233)..(233): n is a, c, g, or t

SEQ ID NO: 279553 - DNA, 1107 bp, Homo Sapiens; identical to SEQ ID NO: 261629
  misc_feature (308)..(308): n is a, c, g, or t

SEQ ID NO: 279554 - DNA, 961 bp, Homo Sapiens; identical to SEQ ID NO: 261630
  misc_feature (63)..(63): n is a, c, g, or t
  misc_feature (68)..(68): n is a, c, g, or t

SEQ ID NO: 279555 - DNA, 475 bp, Homo Sapiens; identical to SEQ ID NO: 261631

SEQ ID NO: 279556 - DNA, 1297 bp, Homo Sapiens; identical to SEQ ID NO: 261632
  misc_feature (21)..(21): n is a, c, g, or t
  misc_feature (28)..(28): n is a, c, g, or t

SEQ ID NO: 279557 - DNA, 543 bp, Homo Sapiens; identical to SEQ ID NO: 261633
  misc_feature (434)..(434): n is a, c, g, or t
  misc_feature (491)..(491): n is a, c, g, or t
  misc_feature (496)..(496): n is a, c, g, or t
  misc_feature (523)..(523): n is a, c, g, or t

SEQ ID NO: 279558 - DNA, 433 bp, Homo Sapiens; identical to SEQ ID NO: 261634
  misc_feature (40)..(40): n is a, c, g, or t

SEQ ID NO: 279559 - DNA, 420 bp, Homo Sapiens; identical to SEQ ID NO: 261635
  misc_feature (16)..(16): n is a, c, g, or t
  misc_feature (25)..(25): n is a, c, g, or t
  misc_feature (48)..(48): n is a, c, g, or t
  misc_feature (69)..(69): n is a, c, g, or t
  misc_feature (88)..(88): n is a, c, g, or t
  misc_feature (178)..(178): n is a, c, g, or t
  misc_feature (188)..(188): n is a, c, g, or t

SEQ ID NO: 279560 - DNA, 1033 bp, Homo Sapiens; identical to SEQ ID NO: 261636
  misc_feature (190)..(284): n is a, c, g, or t

SEQ ID NO: 279561 - DNA, 1060 bp, Homo Sapiens; identical to SEQ ID NO: 261649

SEQ ID NO: 279562 - DNA, 1671 bp, Homo Sapiens; identical to SEQ ID NO: 261650
  misc_feature (1340)..(1349): n is a, c, g, or t
  misc_feature (1551)..(1593): n is a, c, g, or t

SEQ ID NO: 279563 - DNA, 1684 bp, Homo Sapiens; identical to SEQ ID NO: 261669

SEQ ID NO: 279564 - DNA, 1114 bp, Homo Sapiens; identical to SEQ ID NO: 261670

SEQ ID NO: 279565 - DNA, 638 bp, Homo Sapiens; identical to SEQ ID NO: 261691

SEQ ID NO: 279566 - DNA, 1020 bp, Homo Sapiens; identical to SEQ ID NO: 261692
  misc_feature (787)..(797): n is a, c, g, or t

SEQ ID NO: 279567 - DNA, 1476 bp, Homo Sapiens; identical to SEQ ID NO: 261698

SEQ ID NO: 279568 - DNA, 574 bp, Homo Sapiens; identical to SEQ ID NO: 261699
  misc_feature (558)..(558): n is a, c, g, or t

SEQ ID NO: 279569 - DNA, 1323 bp, Homo Sapiens; identical to SEQ ID NO: 261705
  misc_feature (269)..(269): n is a, c, g, or t

SEQ ID NO: 279570 - DNA, 1162 bp, Homo Sapiens; identical to SEQ ID NO: 261706
  misc_feature (1073)..(1099): n is a, c, g, or t
  misc_feature (1101)..(1101): n is a, c, g, or t

SEQ ID NO: 279571 - DNA, 1073 bp, Homo Sapiens; identical to SEQ ID NO: 261720

SEQ ID NO: 279572 - DNA, 729 bp, Homo Sapiens; identical to SEQ ID NO: 261721
  misc_feature (152)..(254): n is a, c, g, or t

SEQ ID NO: 279573 - DNA, 1502 bp, Homo Sapiens; identical to SEQ ID NO: 261725
  misc_feature (166)..(255): n is a, c, g, or t
  misc_feature (1068)..(1085): n is a, c, g, or t
  misc_feature (1092)..(1109): n is a, c, g, or t
  misc_feature (1476)..(1476): n is a, c, g, or t

SEQ ID NO: 279574 - DNA, 1134 bp, Homo Sapiens; identical to SEQ ID NO: 261726
  misc_feature (25)..(25): n is a, c, g, or t
  misc_feature (112)..(112): n is a, c, g, or t
  misc_feature (314)..(392): n is a, c, g, or t

SEQ ID NO: 279575 - DNA, 1255 bp, Homo Sapiens; identical to SEQ ID NO: 261737

SEQ ID NO: 279576 - DNA, 363 bp, Homo Sapiens; identical to SEQ ID NO: 261738
  misc_feature (23)..(23): n is a, c, g, or t

SEQ ID NO: 279577 - DNA, 508 bp, Homo Sapiens; identical to SEQ ID NO: 261739
  misc_feature (286)..(330): n is a, c, g, or t

SEQ ID NO: 279578 - DNA, 587 bp, Homo Sapiens; identical to SEQ ID NO: 261743

SEQ ID NO: 279579 - DNA, 1115 bp, Homo Sapiens; identical to SEQ ID NO: 261744

SEQ ID NO: 279580 - DNA, 1146 bp, Homo Sapiens; identical to SEQ ID NO: 261745

SEQ ID NO: 279581 - DNA, 1155 bp, Homo Sapiens; identical to SEQ ID NO: 261755

SEQ ID NO: 279582 - DNA, 1414 bp, Homo Sapiens; identical to SEQ ID NO: 261756

SEQ ID NO: 279583 - DNA, 1641 bp, Homo Sapiens; identical to SEQ ID NO: 261757
  misc_feature (1333)..(1363): n is a, c, g, or t
  misc_feature (1365)..(1365): n is a, c, g, or t
  misc_feature (1367)..(1387): n is a, c, g, or t
  misc_feature (1389)..(1392): n is a, c, g, or t
  misc_feature (1394)..(1396): n is a, c, g, or t
  misc_feature (1398)..(1400): n is a, c, g, or t
  misc_feature (1407)..(1408): n is a, c, g, or t
  misc_feature (1410)..(1410): n is a, c, g, or t
  misc_feature (1454)..(1455): n is a, c, g, or t
  misc_feature (1461)..(1461): n is a, c, g, or t
  misc_feature (1517)..(1538): n is a, c, g, or t

SEQ ID NO: 279584 - DNA, 931 bp, Homo Sapiens; identical to SEQ ID NO: 261758
  misc_feature (846)..(846): n is a, c, g, or t
  misc_feature (850)..(850): n is a, c, g, or t

SEQ ID NO: 279585 - DNA, 877 bp, Homo Sapiens; identical to SEQ ID NO: 261759

SEQ ID NO: 279586 - DNA, 885 bp, Homo Sapiens; identical to SEQ ID NO: 261760

SEQ ID NO: 279587 - DNA, 1438 bp, Homo Sapiens; identical to SEQ ID NO: 261768

SEQ ID NO: 279588 - DNA, 434 bp, Homo Sapiens; identical to SEQ ID NO: 261769

SEQ ID NO: 279589 - DNA, 485 bp, Homo Sapiens; identical to SEQ ID NO: 261770
  misc_feature (134)..(134): n is a, c, g, or t
  misc_feature (137)..(137): n is a, c, g, or t

SEQ ID NO: 279590 - DNA, 525 bp, Homo Sapiens; identical to SEQ ID NO: 261771
  misc_feature (379)..(379): n is a, c, g, or t
  misc_feature (397)..(397): n is a, c, g, or t
  misc_feature (424)..(424): n is a, c, g, or t
  misc_feature (468)..(468): n is a, c, g, or t
  misc_feature (491)..(491): n is a, c, g, or t
  misc_feature (499)..(499): n is a, c, g, or t

SEQ ID NO: 279591 - DNA, 785 bp, Homo Sapiens; identical to SEQ ID NO: 261772

SEQ ID NO: 279592 - DNA, 933 bp, Homo Sapiens; identical to SEQ ID NO: 261775

SEQ ID NO: 279593 - DNA, 644 bp, Homo Sapiens; identical to SEQ ID NO: 261776

SEQ ID NO: 279594 - DNA, 795 bp, Homo Sapiens; identical to SEQ ID NO: 261779
  misc_feature (312)..(320): n is a, c, g, or t
  misc_feature (770)..(770): n is a, c, g, or t
  misc_feature (776)..(776): n is a, c, g, or t

SEQ ID NO: 279595 - DNA, 391 bp, Homo Sapiens; identical to SEQ ID NO: 261780
  misc_feature (347)..(347): n is a, c, g, or t
  misc_feature (357)..(357): n is a, c, g, or t

SEQ ID NO: 279596 - DNA, 1375 bp, Homo Sapiens; identical to SEQ ID NO: 261781

SEQ ID NO: 279597 - DNA, 1010 bp, Homo Sapiens; identical to SEQ ID NO: 261782
  misc_feature (44)..(44): n is a, c, g, or t

SEQ ID NO: 279598 - DNA, 1039 bp, Homo Sapiens; identical to SEQ ID NO: 261790

SEQ ID NO: 279599 - DNA, 1119 bp, Homo Sapiens; identical to SEQ ID NO: 261791

SEQ ID NO: 279600 - DNA, 1010 bp, Homo Sapiens; identical to SEQ ID NO: 261792

SEQ ID NO: 279601 - DNA, 1293 bp, Homo Sapiens; identical to SEQ ID NO: 261797

SEQ ID NO: 279602 - DNA, 433 bp, Homo Sapiens; identical to SEQ ID NO: 261798
  misc_feature (19)..(19): n is a, c, g, or t
  misc_feature (30)..(30): n is a, c, g, or t
  misc_feature (63)..(63): n is a, c, g, or t
  misc_feature (74)..(74): n is a, c, g, or t

SEQ ID NO: 279603 - DNA, 1511 bp, Homo Sapiens; identical to SEQ ID NO: 261807
  misc_feature (813)..(846): n is a, c, g, or t
  misc_feature (1431)..(1431): n is a, c, g, or t

SEQ ID NO: 279604 - DNA, 723 bp, Homo Sapiens; identical to SEQ ID NO: 261808

SEQ ID NO: 279605 - DNA, 648 bp, Homo Sapiens; identical to SEQ ID NO: 261814

SEQ ID NO: 279606 - DNA, 968 bp, Homo Sapiens; identical to SEQ ID NO: 261815
  misc_feature (497)..(497): n is a, c, g, or t
  misc_feature (500)..(501): n is a, c, g, or t
  misc_feature (512)..(520): n is a, c, g, or t
  misc_feature (522)..(527): n is a, c, g, or t
  misc_feature (529)..(529): n is a, c, g, or t
  misc_feature (535)..(535): n is a, c, g, or t
  misc_feature (540)..(540): n is a, c, g, or t
  misc_feature (553)..(553): n is a, c, g, or t
  misc_feature (906)..(918): n is a, c, g, or t

SEQ ID NO: 279607 - DNA, 1212 bp, Homo Sapiens; identical to SEQ ID NO: 261817
  misc_feature (1121)..(1121): n is a, c, g, or t
  misc_feature (1171)..(1171): n is a, c, g, or t

SEQ ID NO: 279608 - DNA, 512 bp, Homo Sapiens; identical to SEQ ID NO: 261818

SEQ ID NO: 279609 - DNA, 848 bp, Homo Sapiens; identical to SEQ ID NO: 261820

SEQ ID NO: 279610 - DNA, 597 bp, Homo Sapiens; identical to SEQ ID NO: 261821
  misc_feature (111)..(120): n is a, c, g, or t

SEQ ID NO: 279611 - DNA, 841 bp, Homo Sapiens; identical to SEQ ID NO: 72893

SEQ ID NO: 279612 - DNA, 925 bp, Homo Sapiens; identical to SEQ ID NO: 15808

SEQ ID NO: 279613 - DNA, 921 bp, Homo Sapiens; identical to SEQ ID NO: 15841

SEQ ID NO: 279614 - DNA, 765 bp, Homo Sapiens; identical to SEQ ID NO: 261843
  misc_feature (662)..(662): n is a, c, g, or t
  misc_feature (671)..(672): n is a, c, g, or t
  misc_feature (675)..(680): n is a, c, g, or t

SEQ ID NO: 279615 - DNA, 596 bp, Homo Sapiens; identical to SEQ ID NO: 261848
  misc_feature (126)..(126): n is a, c, g, or t
  misc_feature (516)..(539): n is a, c, g, or t

SEQ ID NO: 279616 - DNA, 335 bp, Homo Sapiens; identical to SEQ ID NO: 261849

SEQ ID NO: 279617 - DNA, 512 bp, Homo Sapiens; identical to SEQ ID NO: 261864

SEQ ID NO: 279618 - DNA, 542 bp, Homo Sapiens; identical to SEQ ID NO: 261865

SEQ ID NO: 279619 - DNA, 708 bp, Homo Sapiens; identical to SEQ ID NO: 261871

SEQ ID NO: 279620 - DNA, 469 bp, Homo Sapiens; identical to SEQ ID NO: 178162

SEQ ID NO: 279621 - DNA, 1525 bp, Homo Sapiens; identical to SEQ ID NO: 261884
  misc_feature (446)..(446): n is a, c, g, or t

SEQ ID NO: 279622 - DNA, 969 bp, Homo Sapiens; identical to SEQ ID NO: 261885

SEQ ID NO: 279623 - DNA, 994 bp, Homo Sapiens; identical to SEQ ID NO: 261886
  misc_feature (457)..(457): n is a, c, g, or t
  misc_feature (741)..(741): n is a, c, g, or t
  misc_feature (971)..(971): n is a, c, g, or t

SEQ ID NO: 279624 - DNA, 1272 bp, Homo Sapiens; identical to SEQ ID NO: 261900

SEQ ID NO: 279625 - DNA, 440 bp, Homo Sapiens; identical to SEQ ID NO: 261901

SEQ ID NO: 279626 - DNA, 1180 bp, Homo Sapiens; identical to SEQ ID NO: 261902
  misc_feature (1102)..(1102): n is a, c, g, or t

SEQ ID NO: 279627 - DNA, 542 bp, Homo Sapiens; identical to SEQ ID NO: 261903

SEQ ID NO: 279628 - DNA, 758 bp, Homo Sapiens; identical to SEQ ID NO: 261941

SEQ ID NO: 279629 - DNA, 1067 bp, Homo Sapiens; identical to SEQ ID NO: 261942

SEQ ID NO: 279630 - DNA, 726 bp, Homo Sapiens; identical to SEQ ID NO: 261957
  misc_feature (56)..(56): n is a, c, g, or t
  misc_feature (82)..(91): n is a, c, g, or t
  misc_feature (424)..(424): n is a, c, g, or t

SEQ ID NO: 279631 - DNA, 1069 bp, Homo Sapiens; identical to SEQ ID NO: 261958

SEQ ID NO: 279632 - DNA, 1169 bp, Homo Sapiens; identical to SEQ ID NO: 261965

SEQ ID NO: 279633 - DNA, 893 bp, Homo Sapiens; identical to SEQ ID NO: 261966

SEQ ID NO: 279634 - DNA, 1018 bp, Homo Sapiens; identical to SEQ ID NO: 261975
  misc_feature (283)..(283): n is a, c, g, or t
  misc_feature (665)..(847): n is a, c, g, or t
  misc_feature (938)..(938): n is a, c, g, or t

SEQ ID NO: 279635 - DNA, 448 bp, Homo Sapiens; identical to SEQ ID NO: 261976
  misc_feature (364)..(364): n is a, c, g, or t
  misc_feature (405)..(405): n is a, c, g, or t
  misc_feature (434)..(434): n is a, c, g, or t

SEQ ID NO: 279636 - DNA, 1488 bp, Homo Sapiens; identical to SEQ ID NO: 261978
  misc_feature (1426)..(1443): n is a, c, g, or t

SEQ ID NO: 279637 - DNA, 997 bp, Homo Sapiens; identical to SEQ ID NO: 261979

SEQ ID NO: 279638 - DNA, 445 bp, Homo Sapiens; identical to SEQ ID NO: 261980
  misc_feature (411)..(411): n is a, c, g, or t

SEQ ID NO: 279639 - DNA, 1350 bp, Homo Sapiens; identical to SEQ ID NO: 261990
  misc_feature (770)..(770): n is a, c, g, or t
  misc_feature (817)..(817): n is a, c, g, or t
  misc_feature (1297)..(1297): n is a, c, g, or t
  misc_feature (1308)..(1308): n is a, c, g, or t
  misc_feature (1319)..(1319): n is a, c, g, or t
  misc_feature (1330)..(1330): n is a, c, g, or t

SEQ ID NO: 279640 - DNA, 503 bp, Homo Sapiens; identical to SEQ ID NO: 261991
  misc_feature (395)..(396): n is a, c, g, or t
  misc_feature (398)..(398): n is a, c, g, or t
  misc_feature (402)..(402): n is a, c, g, or t
  misc_feature (427)..(427): n is a, c, g, or t
  misc_feature (492)..(492): n is a, c, g, or t

SEQ ID NO: 279641 - DNA, 2658 bp, Homo Sapiens; identical to SEQ ID NO: 261992
  misc_feature (423)..(423): n is a, c, g, or t
  misc_feature (2265)..(2265): n is a, c, g, or t
  misc_feature (2274)..(2274): n is a, c, g, or t
  misc_feature (2588)..(2588): n is a, c, g, or t

SEQ ID NO: 279642 - DNA, 436 bp, Homo Sapiens; identical to SEQ ID NO: 261993
  misc_feature (12)..(12): n is a, c, g, or t

SEQ ID NO: 279643 - DNA, 543 bp, Homo Sapiens; identical to SEQ ID NO: 262010

SEQ ID NO: 279644 - DNA, 702 bp, Homo Sapiens; identical to SEQ ID NO: 262011

SEQ ID NO: 279645 - DNA, 895 bp, Homo Sapiens; identical to SEQ ID NO: 262012

SEQ ID NO: 279646 - DNA, 1443 bp, Homo Sapiens; identical to SEQ ID NO: 262053
  misc_feature (19)..(19): n is a, c, g, or t
  misc_feature (445)..(508): n is a, c, g, or t

SEQ ID NO: 279647 - DNA, 629 bp, Homo Sapiens; identical to SEQ ID NO: 262054
  misc_feature (27)..(27): n is a, c, g, or t
  misc_feature (38)..(38): n is a, c, g, or t
  misc_feature (79)..(79): n is a, c, g, or t
  misc_feature (94)..(94): n is a, c, g, or t
  misc_feature (106)..(106): n is a, c, g, or t
  misc_feature (166)..(166): n is a, c, g, or t

SEQ ID NO: 279648 - DNA, 1296 bp, Homo Sapiens; identical to SEQ ID NO: 262062

SEQ ID NO: 279649 - DNA, 718 bp, Homo Sapiens; identical to SEQ ID NO: 262063

SEQ ID NO: 279650 - DNA, 542 bp, Homo Sapiens; identical to SEQ ID NO: 262064
  misc_feature (274)..(274): n is a, c, g, or t
  misc_feature (472)..(472): n is a, c, g, or t
  misc_feature (478)..(478): n is a, c, g, or t
  misc_feature (501)..(501): n is a, c, g, or t
  misc_feature (516)..(516): n is a, c, g, or t

SEQ ID NO: 279651 - DNA, 1019 bp, Homo Sapiens; identical to SEQ ID NO: 262069
  misc_feature (26)..(26): n is a, c, g, or t
  misc_feature (192)..(192): n is a, c, g, or t
  misc_feature (267)..(376): n is a, c, g, or t

SEQ ID NO: 279652 - DNA, 493 bp, Homo Sapiens; identical to SEQ ID NO: 262070
  misc_feature (18)..(18): n is a, c, g, or t
  misc_feature (27)..(27): n is a, c, g, or t
  misc_feature (128)..(128): n is a, c, g, or t
  misc_feature (155)..(155): n is a, c, g, or t
  misc_feature (309)..(309): n is a, c, g, or t
  misc_feature (360)..(360): n is a, c, g, or t

SEQ ID NO: 279653 - DNA, 531 bp, Homo Sapiens; identical to SEQ ID NO: 262085
  misc_feature (498)..(498): n is a, c, g, or t

SEQ ID NO: 279654 - DNA, 1004 bp, Homo Sapiens; identical to SEQ ID NO: 262086
  misc_feature (431)..(431): n is a, c, g, or t

SEQ ID NO: 279655 - DNA, 569 bp, Homo Sapiens; identical to SEQ ID NO: 262087
  misc_feature (50)..(50): n is a, c, g, or t

SEQ ID NO: 279656 - DNA, 873 bp, Homo Sapiens; identical to SEQ ID NO: 262096
  misc_feature (45)..(45): n is a, c, g, or t
  misc_feature (55)..(103): n is a, c, g, or t
  misc_feature (130)..(130): n is a, c, g, or t

SEQ ID NO: 279657 - DNA, 503 bp, Homo Sapiens; identical to SEQ ID NO: 262097

SEQ ID NO: 279658 - DNA, 782 bp, Homo Sapiens; identical to SEQ ID NO: 262100
  misc_feature (79)..(79): n is a, c, g, or t

SEQ ID NO: 279659 - DNA, 454 bp, Homo Sapiens; identical to SEQ ID NO: 262101

SEQ ID NO: 279660 - DNA, 1663 bp, Homo Sapiens; identical to SEQ ID NO: 262108
  misc_feature (670)..(695): n is a, c, g, or t

SEQ ID NO: 279661 - DNA, 426 bp, Homo Sapiens; identical to SEQ ID NO: 262109

SEQ ID NO: 279662 - DNA, 712 bp, Homo Sapiens; identical to SEQ ID NO: 262118
  misc_feature (71)..(71): n is a, c, g, or t
  misc_feature (77)..(77): n is a, c, g, or t
  misc_feature (88)..(88): n is a, c, g, or t
  misc_feature (102)..(102): n is a, c, g, or t
  misc_feature (130)..(130): n is a, c, g, or t

SEQ ID NO: 279663 - DNA, 402 bp, Homo Sapiens; identical to SEQ ID NO: 262119
  misc_feature (349)..(349): n is a, c, g, or t
  misc_feature (363)..(363): n is a, c, g, or t
  misc_feature (387)..(387): n is a, c, g, or t

SEQ ID NO: 279664 - DNA, 596 bp, Homo Sapiens; identical to SEQ ID NO: 262148
  misc_feature (79)..(79): n is a, c, g, or t
  misc_feature (113)..(113): n is a, c, g, or t
  misc_feature (561)..(561): n is a, c, g, or t

SEQ ID NO: 279665 - DNA, 1188 bp, Homo Sapiens; identical to SEQ ID NO: 262149
  misc_feature (599)..(599): n is a, c, g, or t
  misc_feature (858)..(858): n is a, c, g, or t

SEQ ID NO: 279666 - DNA, 393 bp, Homo Sapiens; identical to SEQ ID NO: 262163

SEQ ID NO: 279667 - DNA, 403 bp, Homo Sapiens; identical to SEQ ID NO: 262164

SEQ ID NO: 279668 - DNA, 1042 bp, Homo Sapiens; identical to SEQ ID NO: 262167
  misc_feature (422)..(422): n is a, c, g, or t
  misc_feature (992)..(992): n is a, c, g, or t

SEQ ID NO: 279669 - DNA, 669 bp, Homo Sapiens; identical to SEQ ID NO: 262168
  misc_feature (21)..(21): n is a, c, g, or t
  misc_feature (59)..(59): n is a, c, g, or t
  misc_feature (76)..(76): n is a, c, g, or t
  misc_feature (87)..(87): n is a, c, g, or t
  misc_feature (167)..(167): n is a, c, g, or t
  misc_feature (499)..(499): n is a, c, g, or t
  misc_feature (531)..(540): n is a, c, g, or t

SEQ ID NO: 279670 - DNA, 683 bp, Homo Sapiens; identical to SEQ ID NO: 262171

SEQ ID NO: 279671 - DNA, 677 bp, Homo Sapiens; identical to SEQ ID NO: 262172

SEQ ID NO: 279672 - DNA, 1096 bp, Homo Sapiens; identical to SEQ ID NO: 77548

SEQ ID NO: 279673 - DNA, 1575 bp, Homo Sapiens; identical to SEQ ID NO: 262206
  misc_feature (1472)..(1472): n is a, c, g, or t

SEQ ID NO: 279674 - DNA, 891 bp, Homo Sapiens; identical to SEQ ID NO: 262212
  misc_feature (620)..(620): n is a, c, g, or t
  misc_feature (632)..(633): n is a, c, g, or t

SEQ ID NO: 279675 - DNA, 2569 bp, Homo Sapiens; identical to SEQ ID NO: 262213

SEQ ID NO: 279676 - DNA, 568 bp, Homo Sapiens; identical to SEQ ID NO: 262214
  misc_feature (50)..(50): n is a, c, g, or t
  misc_feature (77)..(77): n is a, c, g, or t

SEQ ID NO: 279677 - DNA, 942 bp, Homo Sapiens; identical to SEQ ID NO: 262221

SEQ ID NO: 279678 - DNA, 1187 bp, Homo Sapiens; identical to SEQ ID NO: 262222

SEQ ID NO: 279679 - DNA, 1014 bp, Homo Sapiens; identical to SEQ ID NO: 78447

SEQ ID NO: 279680 - DNA, 1280 bp, Homo Sapiens; identical to SEQ ID NO: 262226
  misc_feature (946)..(946): n is a, c, g, or t

SEQ ID NO: 279681 - DNA, 890 bp, Homo Sapiens; identical to SEQ ID NO: 262228
  misc_feature (736)..(736): n is a, c, g, or t

SEQ ID NO: 279682 - DNA, 483 bp, Homo Sapiens; identical to SEQ ID NO: 262229
  misc_feature (42)..(42): n is a, c, g, or t

SEQ ID NO: 279683 - DNA, 1116 bp, Homo Sapiens; identical to SEQ ID NO: 262235
  misc_feature (70)..(128): n is a, c, g, or t

SEQ ID NO: 279684 - DNA, 1399 bp, Homo Sapiens; identical to SEQ ID NO: 262236

SEQ ID NO: 279685 - DNA, 1139 bp, Homo Sapiens; identical to SEQ ID NO: 262241

SEQ ID NO: 279686 - DNA, 803 bp, Homo Sapiens; identical to SEQ ID NO: 262242
  misc_feature (253)..(253): n is a, c, g, or t

SEQ ID NO: 279687 - DNA, 943 bp, Homo Sapiens; identical to SEQ ID NO: 99413

SEQ ID NO: 279688 - DNA, 1187 bp, Homo Sapiens; identical to SEQ ID NO: 99414
  misc_feature (835)..(835): n is a, c, g, or t
  misc_feature (1070)..(1078): n is a, c, g, or t
  misc_feature (1086)..(1087): n is a, c, g, or t
  misc_feature (1092)..(1092): n is a, c, g, or t
  misc_feature (1094)..(1094): n is a, c, g, or t

SEQ ID NO: 279689 - DNA, 913 bp, Homo Sapiens; identical to SEQ ID NO: 99415

SEQ ID NO: 279690 - DNA, 948 bp, Homo Sapiens; identical to SEQ ID NO: 99416

SEQ ID NO: 279691 - DNA, 905 bp, Homo Sapiens; identical to SEQ ID NO: 262247

SEQ ID NO: 279692 - DNA, 905 bp, Homo Sapiens; identical to SEQ ID NO: 99417

SEQ ID NO: 279693 - DNA, 865 bp, Homo Sapiens; identical to SEQ ID NO: 99418

SEQ ID NO: 279694 - DNA, 1896 bp, Homo Sapiens; identical to SEQ ID NO: 262251
  misc_feature (130)..(138): n is a, c, g, or t
  misc_feature (158)..(158): n is a, c, g, or t
  misc_feature (241)..(241): n is a, c, g, or t
  misc_feature (1053)..(1053): n is a, c, g, or t
  misc_feature (1069)..(1069): n is a, c, g, or t

SEQ ID NO: 279695 - DNA, 789 bp, Homo Sapiens; identical to SEQ ID NO: 262252
  misc_feature (21)..(21): n is a, c, g, or t
  misc_feature (767)..(767): n is a, c, g, or t

SEQ ID NO: 279696 - DNA, 909 bp, Homo Sapiens; identical to SEQ ID NO: 262256

SEQ ID NO: 279697 - DNA, 993 bp, Homo Sapiens; identical to SEQ ID NO: 262257
  misc_feature (75)..(136): n is a, c, g, or t
  misc_feature (139)..(151): n is a, c, g, or t

SEQ ID NO: 279698 - DNA, 902 bp, Homo Sapiens; identical to SEQ ID NO: 262263
  misc_feature (138)..(191): n is a, c, g, or t

SEQ ID NO: 279699 - DNA, 1015 bp, Homo Sapiens; identical to SEQ ID NO: 262264

SEQ ID NO: 279700 - DNA, 902 bp, Homo Sapiens; identical to SEQ ID NO: 73615

SEQ ID NO: 279701 - DNA, 1160 bp, Homo Sapiens; identical to SEQ ID NO: 262275
  misc_feature (957)..(957): n is a, c, g, or t

SEQ ID NO: 279702 - DNA, 899 bp, Homo Sapiens; identical to SEQ ID NO: 262277
  misc_feature (69)..(255): n is a, c, g, or t

SEQ ID NO: 279703 - DNA, 1125 bp, Homo Sapiens; identical to SEQ ID NO: 262278

SEQ ID NO: 279704 - DNA, 820 bp, Homo Sapiens; identical to SEQ ID NO: 262281

SEQ ID NO: 279705 - DNA, 327 bp, Homo Sapiens; identical to SEQ ID NO: 262282
  misc_feature (231)..(231): n is a, c, g, or t

SEQ ID NO: 279706 - DNA, 1209 bp, Homo Sapiens; identical to SEQ ID NO: 262285

SEQ ID NO: 279707 - DNA, 658 bp, Homo Sapiens; identical to SEQ ID NO: 262286

SEQ ID NO: 279708 - DNA, 1738 bp, Homo Sapiens; identical to SEQ ID NO: 262289
  misc_feature (1393)..(1393): n is a, c, g, or t

SEQ ID NO: 279709 - DNA, 1028 bp, Homo Sapiens; identical to SEQ ID NO: 262290
  misc_feature (51)..(51): n is a, c, g, or t

SEQ ID NO: 279710 - DNA, 1471 bp, Homo Sapiens; identical to SEQ ID NO: 262293
  misc_feature (842)..(842): n is a, c, g, or t

SEQ ID NO: 279711 - DNA, 990 bp, Homo Sapiens; identical to SEQ ID NO: 262294
  misc_feature (494)..(744): n is a, c, g, or t

SEQ ID NO: 279712 - DNA, 1104 bp, Homo Sapiens; identical to SEQ ID NO: 262303
  misc_feature (26)..(26): n is a, c, g, or t

SEQ ID NO: 279713 - DNA, 1078 bp, Homo Sapiens; identical to SEQ ID NO: 262304
  misc_feature (775)..(809): n is a, c, g, or t

SEQ ID NO: 279714 - DNA, 924 bp, Homo Sapiens; identical to SEQ ID NO: 262305
  misc_feature (781)..(781): n is a, c, g, or t

SEQ ID NO: 279715 - DNA, 1506 bp, Homo Sapiens; identical to SEQ ID NO: 262306
  misc_feature (1358)..(1358): n is a, c, g, or t
  misc_feature (1456)..(1456): n is a, c, g, or t
  misc_feature (1459)..(1459): n is a, c, g, or t

SEQ ID NO: 279716 - DNA, 1700 bp, Homo Sapiens; identical to SEQ ID NO: 262310

SEQ ID NO: 279717 - DNA, 410 bp, Homo Sapiens; identical to SEQ ID NO: 262311
  misc_feature (15)..(15): n is a, c, g, or t
  misc_feature (25)..(25): n is a, c, g, or t
  misc_feature (114)..(114): n is a, c, g, or t
  misc_feature (117)..(117): n is a, c, g, or t

SEQ ID NO: 279718 - DNA, 1250 bp, Homo Sapiens; identical to SEQ ID NO: 262320
  misc_feature (1032)..(1032): n is a, c, g, or t

SEQ ID NO: 279719 - DNA, 507 bp, Homo Sapiens; identical to SEQ ID NO: 262321

SEQ ID NO: 279720 - DNA, 870 bp, Homo Sapiens; identical to SEQ ID NO: 262328

SEQ ID NO: 279721 - DNA, 996 bp, Homo Sapiens; identical to SEQ ID NO: 262329
  misc_feature (906)..(906): n is a, c, g, or t
  misc_feature (910)..(910): n is a, c, g, or t
  misc_feature (913)..(913): n is a, c, g, or t
  misc_feature (922)..(923): n is a, c, g, or t
  misc_feature (927)..(929): n is a, c, g, or t
  misc_feature (970)..(970): n is a, c, g, or t

SEQ ID NO: 279722 - DNA, 710 bp, Homo Sapiens; identical to SEQ ID NO: 262331
  misc_feature (634)..(634): n is a, c, g, or t

SEQ ID NO: 279723 - DNA, 444 bp, Homo Sapiens; identical to SEQ ID NO: 262332
  misc_feature (17)..(17): n is a, c, g, or t
  misc_feature (23)..(23): n is a, c, g, or t
  misc_feature (49)..(49): n is a, c, g, or t
  misc_feature (55)..(55): n is a, c, g, or t
  misc_feature (65)..(65): n is a, c, g, or t
  misc_feature (104)..(104): n is a, c, g, or t
  misc_feature (117)..(117): n is a, c, g, or t
  misc_feature (125)..(125): n is a, c, g, or t

SEQ ID NO: 279724 - DNA, 1868 bp, Homo Sapiens; identical to SEQ ID NO: 262336

SEQ ID NO: 279725 - DNA, 374 bp, Homo Sapiens; identical to SEQ ID NO: 262337

SEQ ID NO: 279726 - DNA, 1091 bp, Homo Sapiens; identical to SEQ ID NO: 262348
  misc_feature (1008)..(1008): n is a, c, g, or t

SEQ ID NO: 279727 - DNA, 388 bp, Homo Sapiens; identical to SEQ ID NO: 262349
  misc_feature (69)..(69): n is a, c, g, or t

SEQ ID NO: 279728 - DNA, 967 bp, Homo Sapiens; identical to SEQ ID NO: 262353

SEQ ID NO: 279729 - DNA, 1521 bp, Homo Sapiens; identical to SEQ ID NO: 262354
  misc_feature (1406)..(1446): n is a, c, g, or t

SEQ ID NO: 279730 - DNA, 642 bp, Homo Sapiens; identical to SEQ ID NO: 262355
  misc_feature (415)..(483): n is a, c, g, or t
  misc_feature (514)..(542): n is a, c, g, or t

SEQ ID NO: 279731 - DNA, 1617 bp, Homo Sapiens; identical to SEQ ID NO: 262357
  misc_feature (204)..(204): n is a, c, g, or t
  misc_feature (369)..(379): n is a, c, g, or t
  misc_feature (512)..(533): n is a, c, g, or t
  misc_feature (677)..(677): n is a, c, g, or t

SEQ ID NO: 279732 - DNA, 414 bp, Homo Sapiens; identical to SEQ ID NO: 262358
  misc_feature (20)..(20): n is a, c, g, or t
  misc_feature (22)..(22): n is a, c, g, or t
  misc_feature (122)..(122): n is a, c, g, or t

SEQ ID NO: 279733 - DNA, 355 bp, Homo Sapiens; identical to SEQ ID NO: 262359
  misc_feature (26)..(26): n is a, c, g, or t
  misc_feature (46)..(46): n is a, c, g, or t
  misc_feature (64)..(64): n is a, c, g, or t
  misc_feature (86)..(86): n is a, c, g, or t
  misc_feature (135)..(135): n is a, c, g, or t

SEQ ID NO: 279734 - DNA, 840 bp, Homo Sapiens; identical to SEQ ID NO: 262361

SEQ ID NO: 279735 - DNA, 989 bp, Homo Sapiens; identical to SEQ ID NO: 262362
  misc_feature (105)..(162): n is a, c, g, or t

SEQ ID NO: 279736 - DNA, 934 bp, Homo Sapiens; identical to SEQ ID NO: 262363
  misc_feature (819)..(827): n is a, c, g, or t

SEQ ID NO: 279737 - DNA, 1481 bp, Homo Sapiens; identical to SEQ ID NO: 262364
  misc_feature (55)..(63): n is a, c, g, or t
  misc_feature (87)..(87): n is a, c, g, or t
  misc_feature (184)..(184): n is a, c, g, or t

SEQ ID NO: 279738 - DNA, 1534 bp, Homo Sapiens; identical to SEQ ID NO: 262365

SEQ ID NO: 279739 - DNA, 394 bp, Homo Sapiens; identical to SEQ ID NO: 262366

SEQ ID NO: 279740 - DNA, 1197 bp, Homo Sapiens; identical to SEQ ID NO: 262389
  misc_feature (657)..(680): n is a, c, g, or t
  misc_feature (881)..(881): n is a, c, g, or t
  misc_feature (893)..(893): n is a, c, g, or t
  misc_feature (1097)..(1097): n is a, c, g, or t

SEQ ID NO: 279741 - DNA, 1543 bp, Homo Sapiens; identical to SEQ ID NO: 262390

SEQ ID NO: 279742 - DNA, 827 bp, Homo Sapiens; identical to SEQ ID NO: 262391
  misc_feature (19)..(19): n is a, c, g, or t
  misc_feature (31)..(31): n is a, c, g, or t
  misc_feature (727)..(738): n is a, c, g, or t

SEQ ID NO: 279743 - DNA, 880 bp, Homo Sapiens; identical to SEQ ID NO: 262392
  misc_feature (18)..(18): n is a, c, g, or t
  misc_feature (85)..(96): n is a, c, g, or t
  misc_feature (507)..(507): n is a, c, g, or t

SEQ ID NO: 279744 - DNA, 773 bp, Homo Sapiens; identical to SEQ ID NO: 262404
  misc_feature (42)..(42): n is a, c, g, or t
  misc_feature (57)..(57): n is a, c, g, or t

SEQ ID NO: 279745 - DNA, 760 bp, Homo Sapiens; identical to SEQ ID NO: 262405

SEQ ID NO: 279746 - DNA, 862 bp, Homo Sapiens; identical to SEQ ID NO: 262415

SEQ ID NO: 279747 - DNA, 1040 bp, Homo Sapiens; identical to SEQ ID NO: 262416
  misc_feature (945)..(945): n is a, c, g, or t

SEQ ID NO: 279748 - DNA, 1069 bp, Homo Sapiens; identical to SEQ ID NO: 262417

SEQ ID NO: 279749 - DNA, 420 bp, Homo Sapiens; identical to SEQ ID NO: 262418

SEQ ID NO: 279750 - DNA, 1078 bp, Homo Sapiens; identical to SEQ ID NO: 262457
  misc_feature (1047)..(1047): n is a, c, g, or t

SEQ ID NO: 279751 - DNA, 815 bp, Homo Sapiens; identical to SEQ ID NO: 262458

SEQ ID NO: 279752 - DNA, 1671 bp, Homo Sapiens; identical to SEQ ID NO: 262459
  misc_feature (955)..(964): n is a, c, g, or t

SEQ ID NO: 279753 - DNA, 405 bp, Homo Sapiens; identical to SEQ ID NO: 262460
  misc_feature (15)..(15): n is a, c, g, or t

SEQ ID NO: 279754 - DNA, 1141 bp, Homo Sapiens; identical to SEQ ID NO: 262469
  misc_feature (585)..(585): n is a, c, g, or t

SEQ ID NO: 279755 - DNA, 628 bp, Homo Sapiens; identical to SEQ ID NO: 262470

SEQ ID NO: 279756 - DNA, 1043 bp, Homo Sapiens; identical to SEQ ID NO: 262481
  misc_feature (670)..(670): n is a, c, g, or t
  misc_feature (1033)..(1033): n is a, c, g, or t

SEQ ID NO: 279757 - DNA, 743 bp, Homo Sapiens; identical to SEQ ID NO: 262482

SEQ ID NO: 279758 - DNA, 1820 bp, Homo Sapiens; identical to SEQ ID NO: 262485
  misc_feature (363)..(363): n is a, c, g, or t
  misc_feature (1278)..(1278): n is a, c, g, or t
  misc_feature (1541)..(1541): n is a, c, g, or t
  misc_feature (1567)..(1567): n is a, c, g, or t

SEQ ID NO: 279759 - DNA, 725 bp, Homo Sapiens; identical to SEQ ID NO: 262486
  misc_feature (15)..(15): n is a, c, g, or t
  misc_feature (21)..(21): n is a, c, g, or t

SEQ ID NO: 279760 - DNA, 778 bp, Homo Sapiens; identical to SEQ ID NO: 262492
  misc_feature (112)..(112): n is a, c, g, or t
  misc_feature (282)..(282): n is a, c, g, or t

SEQ ID NO: 279761 - DNA, 862 bp, Homo Sapiens; identical to SEQ ID NO: 262493
  misc_feature (301)..(313): n is a, c, g, or t

SEQ ID NO: 279762 - DNA, 958 bp, Homo Sapiens; identical to SEQ ID NO: 262496

SEQ ID NO: 279763 - DNA, 392 bp, Homo Sapiens; identical to SEQ ID NO: 262497
  misc_feature (22)..(22): n is a, c, g, or t
  misc_feature (58)..(58): n is a, c, g, or t
  misc_feature (113)..(113): n is a, c, g, or t
  misc_feature (124)..(188): n is a, c, g, or t
  misc_feature (247)..(247): n is a, c, g, or t
  misc_feature (337)..(337): n is a, c, g, or t
  misc_feature (359)..(359): n is a, c, g, or t

SEQ ID NO: 279764 - DNA, 1051 bp, Homo Sapiens; identical to SEQ ID NO: 262518
  misc_feature (554)..(554): n is a, c, g, or t

SEQ ID NO: 279765 - DNA, 968 bp, Homo Sapiens; identical to SEQ ID NO: 262519

SEQ ID NO: 279766 - DNA, 920 bp, Homo Sapiens; identical to SEQ ID NO: 262524
  misc_feature (449)..(506): n is a, c, g, or t

SEQ ID NO: 279767 - DNA, 914 bp, Homo Sapiens; identical to SEQ ID NO: 262525
  misc_feature (677)..(760): n is a, c, g, or t

SEQ ID NO: 279768 - DNA, 1129 bp, Homo Sapiens; identical to SEQ ID NO: 262542
  misc_feature (487)..(559): n is a, c, g, or t

SEQ ID NO: 279769 - DNA, 656 bp, Homo Sapiens; identical to SEQ ID NO: 262543

SEQ ID NO: 279770 - DNA, 963 bp, Homo Sapiens; identical to SEQ ID NO: 262551
  misc_feature (501)..(501): n is a, c, g, or t
  misc_feature (524)..(524): n is a, c, g, or t
  misc_feature (829)..(866): n is a, c, g, or t

SEQ ID NO: 279771 - DNA, 964 bp, Homo Sapiens; identical to SEQ ID NO: 262552

SEQ ID NO: 279772 - DNA, 895 bp, Homo Sapiens; identical to SEQ ID NO: 262554

SEQ ID NO: 279773 - DNA, 637 bp, Homo Sapiens; identical to SEQ ID NO: 262555

SEQ ID NO: 279774 - DNA, 1270 bp, Homo Sapiens; identical to SEQ ID NO: 262562
  misc_feature (44)..(44): n is a, c, g, or t
  misc_feature (46)..(96): n is a, c, g, or t

SEQ ID NO: 279775 - DNA, 975 bp, Homo Sapiens; identical to SEQ ID NO: 262563
  misc_feature (46)..(96): n is a, c, g, or t

SEQ ID NO: 279776 - DNA, 994 bp, Homo Sapiens; identical to SEQ ID NO: 262564

SEQ ID NO: 279777 - DNA, 1101 bp, Homo Sapiens; identical to SEQ ID NO: 262566

SEQ ID NO: 279778 - DNA, 450 bp, Homo Sapiens; identical to SEQ ID NO: 262567
  misc_feature (39)..(39): n is a, c, g, or t

SEQ ID NO: 279779 - DNA, 954 bp, Homo Sapiens; identical to SEQ ID NO: 262573

SEQ ID NO: 279780 - DNA, 546 bp, Homo Sapiens; identical to SEQ ID NO: 262574
  misc_feature (360)..(360): n is a, c, g, or t
  misc_feature (410)..(410): n is a, c, g, or t
  misc_feature (425)..(425): n is a, c, g, or t
  misc_feature (435)..(435): n is a, c, g, or t
  misc_feature (456)..(456): n is a, c, g, or t
  misc_feature (473)..(473): n is a, c, g, or t

SEQ ID NO: 279781 - DNA, 2194 bp, Homo Sapiens; identical to SEQ ID NO: 262578
  misc_feature (901)..(901): n is a, c, g, or t
  misc_feature (2126)..(2126): n is a, c, g, or t
  misc_feature (2172)..(2172): n is a, c, g, or t

SEQ ID NO: 279782 - DNA, 668 bp, Homo Sapiens; identical to SEQ ID NO: 262579

SEQ ID NO: 279783 - DNA, 1571 bp, Homo Sapiens; identical to SEQ ID NO: 262580
  misc_feature (111)..(111): n is a, c, g, or t
  misc_feature (165)..(165): n is a, c, g, or t
  misc_feature (989)..(1003): n is a, c, g, or t

SEQ ID NO: 279784 - DNA, 276 bp, Homo Sapiens; identical to SEQ ID NO: 72659

SEQ ID NO: 279785 - DNA, 1851 bp, Homo Sapiens; identical to SEQ ID NO: 262588

SEQ ID NO: 279786 - DNA, 755 bp, Homo Sapiens; identical to SEQ ID NO: 174316

SEQ ID NO: 279787 - DNA, 821 bp, Homo Sapiens; identical to SEQ ID NO: 262590
  misc_feature (753)..(753): n is a, c, g, or t
  misc_feature (772)..(772): n is a, c, g, or t
  misc_feature (797)..(797): n is a, c, g, or t

SEQ ID NO: 279788 - DNA, 376 bp, Homo Sapiens; identical to SEQ ID NO: 262591
  misc_feature (26)..(26): n is a, c, g, or t

SEQ ID NO: 279789 - DNA, 442 bp, Homo Sapiens; identical to SEQ ID NO: 262592
  misc_feature (19)..(19): n is a, c, g, or t

SEQ ID NO: 279790 - DNA, 1293 bp, Homo Sapiens; identical to SEQ ID NO: 262599
  misc_feature (1157)..(1157): n is a, c, g, or t

SEQ ID NO: 279791 - DNA, 721 bp, Homo Sapiens; identical to SEQ ID NO: 262600
  misc_feature (264)..(264): n is a, c, g, or t

SEQ ID NO: 279792 - DNA, 628 bp, Homo Sapiens; identical to SEQ ID NO: 262601
  misc_feature (18)..(18): n is a, c, g, or t
  misc_feature (25)..(25): n is a, c, g, or t
  misc_feature (37)..(37): n is a, c, g, or t
  misc_feature (181)..(181): n is a, c, g, or t
  misc_feature (199)..(199): n is a, c, g, or t
  misc_feature (287)..(287): n is a, c, g, or t

SEQ ID NO: 279793 - DNA, 395 bp, Homo Sapiens; identical to SEQ ID NO: 262602

SEQ ID NO: 279794 - DNA, 692 bp, Homo Sapiens; identical to SEQ ID NO: 262618
  misc_feature (460)..(580): n is a, c, g, or t
  misc_feature (582)..(615): n is a, c, g, or t
  misc_feature (618)..(618): n is a, c, g, or t
  misc_feature (624)..(638): n is a, c, g, or t

SEQ ID NO: 279795 - DNA, 423 bp, Homo Sapiens; identical to SEQ ID NO: 262619
  misc_feature (157)..(157): n is a, c, g, or t

SEQ ID NO: 279796 - DNA, 543 bp, Homo Sapiens; identical to SEQ ID NO: 262627
  misc_feature (218)..(218): n is a, c, g, or t

SEQ ID NO: 279797 - DNA, 532 bp, Homo Sapiens; identical to SEQ ID NO: 262628

SEQ ID NO: 279798 - DNA, 791 bp, Homo Sapiens; identical to SEQ ID NO: 262634

SEQ ID NO: 279799 - DNA, 756 bp, Homo Sapiens; identical to SEQ ID NO: 262635
  misc_feature (13)..(13): n is a, c, g, or t
  misc_feature (43)..(43): n is a, c, g, or t
  misc_feature (124)..(124): n is a, c, g, or t
  misc_feature (580)..(580): n is a, c, g, or t

SEQ ID NO: 279800 - DNA, 345 bp, Homo Sapiens; identical to SEQ ID NO: 262642
  misc_feature (195)..(242): n is a, c, g, or t

SEQ ID NO: 279801 - DNA, 708 bp, Homo Sapiens; identical to SEQ ID NO: 262643

SEQ ID NO: 279802 - DNA, 939 bp, Homo Sapiens; identical to SEQ ID NO: 262648
  misc_feature (789)..(791): n is a, c, g, or t
  misc_feature (794)..(794): n is a, c, g, or t
  misc_feature (801)..(803): n is a, c, g, or t
  misc_feature (805)..(845): n is a, c, g, or t
  misc_feature (849)..(849): n is a, c, g, or t

SEQ ID NO: 279803 - DNA, 481 bp, Homo Sapiens; identical to SEQ ID NO: 262649
  misc_feature (16)..(16): n is a, c, g, or t
  misc_feature (36)..(36): n is a, c, g, or t
  misc_feature (41)..(41): n is a, c, g, or t
  misc_feature (65)..(65): n is a, c, g, or t

SEQ ID NO: 279804 - DNA, 439 bp, Homo Sapiens; identical to SEQ ID NO: 262650

SEQ ID NO: 279805 - DNA, 1405 bp, Homo Sapiens; identical to SEQ ID NO: 262660
  misc_feature (1237)..(1256): n is a, c, g, or t
  misc_feature (1258)..(1262): n is a, c, g, or t
  misc_feature (1264)..(1264): n is a, c, g, or t

SEQ ID NO: 279806 - DNA, 1229 bp, Homo Sapiens; identical to SEQ ID NO: 262661
  misc_feature (875)..(875): n is a, c, g, or t

SEQ ID NO: 279807 - DNA, 1008 bp, Homo Sapiens; identical to SEQ ID NO: 262663

SEQ ID NO: 279808 - DNA, 970 bp, Homo Sapiens; identical to SEQ ID NO: 262664

SEQ ID NO: 279809 - DNA, 1004 bp, Homo Sapiens; identical to SEQ ID NO: 262671
  misc_feature (678)..(678): n is a, c, g, or t
  misc_feature (747)..(747): n is a, c, g, or t

SEQ ID NO: 279810 - DNA, 999 bp, Homo Sapiens; identical to SEQ ID NO: 262672
  misc_feature (34)..(34): n is a, c, g, or t

SEQ ID NO: 279811 - DNA, 927 bp, Homo Sapiens; identical to SEQ ID NO: 262673
  misc_feature (799)..(799): n is a, c, g, or t
  misc_feature (804)..(804): n is a, c, g, or t

SEQ ID NO: 279812 - DNA, 1022 bp, Homo Sapiens; identical to SEQ ID NO: 262685

SEQ ID NO: 279813 - DNA, 1131 bp, Homo Sapiens; identical to SEQ ID NO: 262686

SEQ ID NO: 279814 - DNA, 953 bp, Homo Sapiens; identical to SEQ ID NO: 262694

SEQ ID NO: 279815 - DNA, 1002 bp, Homo Sapiens; identical to SEQ ID NO: 262695

SEQ ID NO: 279816 - DNA, 967 bp, Homo Sapiens; identical to SEQ ID NO: 262696
  misc_feature (913)..(913): n is a, c, g, or t
  misc_feature (945)..(945): n is a, c, g, or t

SEQ ID NO: 279817 - DNA, 942 bp, Homo Sapiens; identical to SEQ ID NO: 262697

SEQ ID NO: 279818 - DNA, 934 bp, Homo Sapiens; identical to SEQ ID NO: 262698

SEQ ID NO: 279819 - DNA, 689 bp, Homo Sapiens; identical to SEQ ID NO: 262701

SEQ ID NO: 279820 - DNA, 464 bp, Homo Sapiens; identical to SEQ ID NO: 262702

SEQ ID NO: 279821 - DNA, 725 bp, Homo Sapiens; identical to SEQ ID NO: 262703

SEQ ID NO: 279822 - DNA, 1114 bp, Homo Sapiens; identical to SEQ ID NO: 262736

SEQ ID NO: 279823 - DNA, 838 bp, Homo Sapiens; identical to SEQ ID NO: 262737
  misc_feature (717)..(718): n is a, c, g, or t
  misc_feature (739)..(739): n is a, c, g, or t
  misc_feature (742)..(742): n is a, c, g, or t

SEQ ID NO: 279824 - DNA, 816 bp, Homo Sapiens; identical to SEQ ID NO: 262738
  misc_feature (215)..(283): n is a, c, g, or t

SEQ ID NO: 279825 - DNA, 950 bp, Homo Sapiens; identical to SEQ ID NO: 262739

SEQ ID NO: 279826 - DNA, 1003 bp, Homo Sapiens; identical to SEQ ID NO: 262741

SEQ ID NO: 279827 - DNA, 1179 bp, Homo Sapiens; identical to SEQ ID NO: 262742

SEQ ID NO: 279828 - DNA, 976 bp, Homo Sapiens; identical to SEQ ID NO: 262743

SEQ ID NO: 279829 - DNA, 1032 bp, Homo Sapiens; identical to SEQ ID NO: 262753

SEQ ID NO: 279830 - DNA, 1129 bp, Homo Sapiens; identical to SEQ ID NO: 262754
  misc_feature (184)..(184): n is a, c, g, or t

SEQ ID NO: 279831 - DNA, 1953 bp, Homo Sapiens; identical to SEQ ID NO: 262755

SEQ ID NO: 279832 - DNA, 964 bp, Homo Sapiens; identical to SEQ ID NO: 262774

SEQ ID NO: 279833 - DNA, 596 bp, Homo Sapiens; identical to SEQ ID NO: 262775
  misc_feature (26)..(26): n is a, c, g, or t
  misc_feature (29)..(29): n is a, c, g, or t
  misc_feature (54)..(54): n is a, c, g, or t

SEQ ID NO: 279834 - DNA, 1159 bp, Homo Sapiens; identical to SEQ ID NO: 262778

SEQ ID NO: 279835 - DNA, 410 bp, Homo Sapiens; identical to SEQ ID NO: 262779
  misc_feature (246)..(246): n is a, c, g, or t
  misc_feature (281)..(281): n is a, c, g, or t
  misc_feature (340)..(340): n is a, c, g, or t
  misc_feature (357)..(357): n is a, c, g, or t
  misc_feature (370)..(370): n is a, c, g, or t

SEQ ID NO: 279836 - DNA, 1005 bp, Homo Sapiens; identical to SEQ ID NO: 262788
  misc_feature (941)..(941): n is a, c, g, or t

SEQ ID NO: 279837 - DNA, 924 bp, Homo Sapiens; identical to SEQ ID NO: 262789

SEQ ID NO: 279838 - DNA, 1052 bp, Homo Sapiens; identical to SEQ ID NO: 262794

SEQ ID NO: 279839 - DNA, 862 bp, Homo Sapiens; identical to SEQ ID NO: 262795

SEQ ID NO: 279840 - DNA, 1056 bp, Homo Sapiens; identical to SEQ ID NO: 262800
  misc_feature (652)..(690): n is a, c, g, or t

SEQ ID NO: 279841 - DNA, 1365 bp, Homo Sapiens; identical to SEQ ID NO: 262801
  misc_feature (1065)..(1065): n is a, c, g, or t

SEQ ID NO: 279842 - DNA, 1133 bp, Homo Sapiens; identical to SEQ ID NO: 262807
  misc_feature (846)..(846): n is a, c, g, or t
  misc_feature (1064)..(1064): n is a, c, g, or t
  misc_feature (1100)..(1100): n is a, c, g, or t

SEQ ID NO: 279843 - DNA, 1244 bp, Homo Sapiens; identical to SEQ ID NO: 262808

SEQ ID NO: 279844 - DNA, 1124 bp, Homo Sapiens; identical to SEQ ID NO: 262810

SEQ ID NO: 279845 - DNA, 445 bp, Homo Sapiens; identical to SEQ ID NO: 262811
  misc_feature (16)..(16): n is a, c, g, or t
  misc_feature (226)..(226): n is a, c, g, or t
  misc_feature (411)..(411): n is a, c, g, or t
  misc_feature (433)..(433): n is a, c, g, or t

SEQ ID NO: 279846 - DNA, 1086 bp, Homo Sapiens; identical to SEQ ID NO: 262816
  misc_feature (121)..(129): n is a, c, g, or t
  misc_feature (455)..(455): n is a, c, g, or t
  misc_feature (461)..(461): n is a, c, g, or t
  misc_feature (486)..(486): n is a, c, g, or t

SEQ ID NO: 279847 - DNA, 1258 bp, Homo Sapiens; identical to SEQ ID NO: 262817
  misc_feature (386)..(440): n is a, c, g, or t

SEQ ID NO: 279848 - DNA, 1122 bp, Homo Sapiens; identical to SEQ ID NO: 262818

SEQ ID NO: 279849 - DNA, 960 bp, Homo Sapiens; identical to SEQ ID NO: 262824
  misc_feature (43)..(59): n is a, c, g, or t
  misc_feature (305)..(597): n is a, c, g, or t
  misc_feature (629)..(629): n is a, c, g, or t

SEQ ID NO: 279850 - DNA, 1386 bp, Homo Sapiens; identical to SEQ ID NO: 262825
  misc_feature (1024)..(1316): n is a, c, g, or t

SEQ ID NO: 279851 - DNA, 1073 bp, Homo Sapiens; identical to SEQ ID NO: 262827
  misc_feature (959)..(1018): n is a, c, g, or t

SEQ ID NO: 279852 - DNA, 266 bp, Homo Sapiens; identical to SEQ ID NO: 262828
  misc_feature (75)..(75): n is a, c, g, or t

SEQ ID NO: 279853 - DNA, 767 bp, Homo Sapiens; identical to SEQ ID NO: 262829
  misc_feature (88)..(88): n is a, c, g, or t

SEQ ID NO: 279854 - DNA, 1080 bp, Homo Sapiens; identical to SEQ ID NO: 262844

SEQ ID NO: 279855 - DNA, 1030 bp, Homo Sapiens; identical to SEQ ID NO: 262845
  misc_feature (730)..(730): n is a, c, g, or t

SEQ ID NO: 279856 - DNA, 1356 bp, Homo Sapiens; identical to SEQ ID NO: 262854

SEQ ID NO: 279857 - DNA, 440 bp, Homo Sapiens; identical to SEQ ID NO: 262855
  misc_feature (50)..(66): n is a, c, g, or t

SEQ ID NO: 279858 - DNA, 969 bp, Homo Sapiens; identical to SEQ ID NO: 262861

SEQ ID NO: 279859 - DNA, 866 bp, Homo Sapiens; identical to SEQ ID NO: 262862

SEQ ID NO: 279860 - DNA, 1159 bp, Homo Sapiens; identical to SEQ ID NO: 262865

SEQ ID NO: 279861 - DNA, 772 bp, Homo Sapiens; identical to SEQ ID NO: 262866

SEQ ID NO: 279862 - DNA, 1036 bp, Homo Sapiens; identical to SEQ ID NO: 262870

SEQ ID NO: 279863 - DNA, 957 bp, Homo Sapiens; identical to SEQ ID NO: 262871

SEQ ID NO: 279864 - DNA, 1047 bp, Homo Sapiens; identical to SEQ ID NO: 262876

SEQ ID NO: 279865 - DNA, 439 bp, Homo Sapiens; identical to SEQ ID NO: 262877
  misc_feature (368)..(368): n is a, c, g, or t
  misc_feature (407)..(407): n is a, c, g, or t
  misc_feature (418)..(418): n is a, c, g, or t
  misc_feature (426)..(426): n is a, c, g, or t

SEQ ID NO: 279866 - DNA, 1174 bp, Homo Sapiens; identical to SEQ ID NO: 262892
  misc_feature (220)..(232): n is a, c, g, or t
  misc_feature (290)..(305): n is a, c, g, or t
  misc_feature (372)..(384): n is a, c, g, or t
  misc_feature (900)..(900): n is a, c, g, or t
  misc_feature (947)..(947): n is a, c, g, or t
  misc_feature (1022)..(1022): n is a, c, g, or t
  misc_feature (1042)..(1042): n is a, c, g, or t
  misc_feature (1062)..(1062): n is a, c, g, or t
  misc_feature (1073)..(1073): n is a, c, g, or t
  misc_feature (1111)..(1111): n is a, c, g, or t
  misc_feature (1117)..(1117): n is a, c, g, or t
  misc_feature (1120)..(1120): n is a, c, g, or t

SEQ ID NO: 279867 - DNA, 1164 bp, Homo Sapiens; identical to SEQ ID NO: 262893
  misc_feature (137)..(231): n is a, c, g, or t
  misc_feature (250)..(270): n is a, c, g, or t
  misc_feature (297)..(309): n is a, c, g, or t
  misc_feature (466)..(481): n is a, c, g, or t
  misc_feature (803)..(803): n is a, c, g, or t

SEQ ID NO: 279868 - DNA, 977 bp, Homo Sapiens; identical to SEQ ID NO: 262901
  misc_feature (910)..(921): n is a, c, g, or t

SEQ ID NO: 279869 - DNA, 225 bp, Homo Sapiens; identical to SEQ ID NO: 262902
  misc_feature (15)..(15): n is a, c, g, or t

SEQ ID NO: 279870 - DNA, 748 bp, Homo Sapiens; identical to SEQ ID NO: 262903

SEQ ID NO: 279871 - DNA, 1003 bp, Homo Sapiens; identical to SEQ ID NO: 262920

SEQ ID NO: 279872 - DNA, 1021 bp, Homo Sapiens; identical to SEQ ID NO: 262921

SEQ ID NO: 279873 - DNA, 1117 bp, Homo Sapiens; identical to SEQ ID NO: 262923

SEQ ID NO: 279874 - DNA, 507 bp, Homo Sapiens; identical to SEQ ID NO: 262924

SEQ ID NO: 279875 - DNA, 1009 bp, Homo Sapiens; identical to SEQ ID NO: 262925

SEQ ID NO: 279876 - DNA, 558 bp, Homo Sapiens; identical to SEQ ID NO: 262926
  misc_feature (30)..(30): n is a, c, g, or t
  misc_feature (456)..(456): n is a, c, g, or t

SEQ ID NO: 279877 - DNA, 1079 bp, Homo Sapiens; identical to SEQ ID NO: 262932
  misc_feature (72)..(114): n is a, c, g, or t

SEQ ID NO: 279878 - DNA, 478 bp, Homo Sapiens; identical to SEQ ID NO: 262933
  misc_feature (44)..(44): n is a, c, g, or t
  misc_feature (50)..(50): n is a, c, g, or t
  misc_feature (92)..(92): n is a, c, g, or t

SEQ ID NO: 279879 - DNA, 1643 bp, Homo Sapiens; identical to SEQ ID NO: 262936
  misc_feature (35)..(35): n is a, c, g, or t
  misc_feature (98)..(98): n is a, c, g, or t
  misc_feature (177)..(177): n is a, c, g, or t
  misc_feature (610)..(619): n is a, c, g, or t

SEQ ID NO: 279880 - DNA, 448 bp, Homo Sapiens; identical to SEQ ID NO: 262937
  misc_feature (30)..(30): n is a, c, g, or t

SEQ ID NO: 279881 - DNA, 424 bp, Homo Sapiens; identical to SEQ ID NO: 262938
  misc_feature (24)..(24): n is a, c, g, or t
  misc_feature (78)..(78): n is a, c, g, or t
  misc_feature (120)..(120): n is a, c, g, or t

SEQ ID NO: 279882 - DNA, 952 bp, Homo Sapiens; identical to SEQ ID NO: 262939
  misc_feature (738)..(738): n is a, c, g, or t

SEQ ID NO: 279883 - DNA, 1172 bp, Homo Sapiens; identical to SEQ ID NO: 262940
  misc_feature (38)..(38): n is a, c, g, or t

SEQ ID NO: 279884 - DNA, 1103 bp, Homo Sapiens; identical to SEQ ID NO: 262941
  misc_feature (362)..(386): n is a, c, g, or t
  misc_feature (853)..(853): n is a, c, g, or t
  misc_feature (906)..(906): n is a, c, g, or t
  misc_feature (929)..(929): n is a, c, g, or t
  misc_feature (960)..(968): n is a, c, g, or t
  misc_feature (1043)..(1044): n is a, c, g, or t
  misc_feature (1053)..(1053): n is a, c, g, or t
  misc_feature (1077)..(1077): n is a, c, g, or t

SEQ ID NO: 279885 - DNA, 1748 bp, Homo Sapiens; identical to SEQ ID NO: 262942
  misc_feature (234)..(258): n is a, c, g, or t
  misc_feature (870)..(910): n is a, c, g, or t
  misc_feature (957)..(965): n is a, c, g, or t
  misc_feature (1444)..(1444): n is a, c, g, or t
  misc_feature (1469)..(1469): n is a, c, g, or t
  misc_feature (1597)..(1597): n is a, c, g, or t
  misc_feature (1606)..(1606): n is a, c, g, or t
  misc_feature (1619)..(1619): n is a, c, g, or t

SEQ ID NO: 279886 - DNA, 960 bp, Homo Sapiens; identical to SEQ ID NO: 262952
  misc_feature (833)..(841): n is a, c, g, or t

SEQ ID NO: 279887 - DNA, 1021 bp, Homo Sapiens; identical to SEQ ID NO: 262953

SEQ ID NO: 279888 - DNA, 743 bp, Homo Sapiens; identical to SEQ ID NO: 262956
  misc_feature (199)..(207): n is a, c, g, or t
  misc_feature (301)..(353): n is a, c, g, or t
  misc_feature (499)..(507): n is a, c, g, or t
  misc_feature (552)..(560): n is a, c, g, or t
  misc_feature (632)..(698): n is a, c, g, or t

SEQ ID NO: 279889 - DNA, 888 bp, Homo Sapiens; identical to SEQ ID NO: 262957
  misc_feature (310)..(318): n is a, c, g, or t
  misc_feature (455)..(463): n is a, c, g, or t
  misc_feature (557)..(610): n is a, c, g, or t

SEQ ID NO: 279890 - DNA, 919 bp, Homo Sapiens; identical to SEQ ID NO: 262965

SEQ ID NO: 279891 - DNA, 564 bp, Homo Sapiens; identical to SEQ ID NO: 262966
  misc_feature (15)..(15): n is a, c, g, or t
  misc_feature (47)..(47): n is a, c, g, or t
  misc_feature (471)..(471): n is a, c, g, or t

SEQ ID NO: 279892 - DNA, 736 bp, Homo Sapiens; identical to SEQ ID NO: 262967

SEQ ID NO: 279893 - DNA, 914 bp, Homo Sapiens; identical to SEQ ID NO: 262968

SEQ ID NO: 279894 - DNA, 500 bp, Homo Sapiens; identical to SEQ ID NO: 262969
  misc_feature (94)..(94): n is a, c, g, or t
  misc_feature (487)..(487): n is a, c, g, or t

SEQ ID NO: 279895 - DNA, 1319 bp, Homo Sapiens; identical to SEQ ID NO: 262970

SEQ ID NO: 279896 - DNA, 507 bp, Homo Sapiens; identical to SEQ ID NO: 262971
  misc_feature (41)..(41): n is a, c, g, or t

SEQ ID NO: 279897 - DNA, 1082 bp, Homo Sapiens; identical to SEQ ID NO: 262988
  misc_feature (231)..(231): n is a, c, g, or t

SEQ ID NO: 279898 - DNA, 495 bp, Homo Sapiens; identical to SEQ ID NO: 262989

SEQ ID NO: 279899 - DNA, 497 bp, Homo Sapiens; identical to SEQ ID NO: 262990

SEQ ID NO: 279900 - DNA, 1011 bp, Homo Sapiens; identical to SEQ ID NO: 262996
  misc_feature (929)..(943): n is a, c, g, or t

SEQ ID NO: 279901 - DNA, 1087 bp, Homo Sapiens; identical to SEQ ID NO: 262997
  misc_feature (18)..(18): n is a, c, g, or t
  misc_feature (21)..(21): n is a, c, g, or t

SEQ ID NO: 279902 - DNA, 958 bp, Homo Sapiens; identical to SEQ ID NO: 263015

SEQ ID NO: 279903 - DNA, 486 bp, Homo Sapiens; identical to SEQ ID NO: 263016
  misc_feature (410)..(410): n is a, c, g, or t
  misc_feature (428)..(428): n is a, c, g, or t

SEQ ID NO: 279904 - DNA, 998 bp, Homo Sapiens; identical to SEQ ID NO: 263034

SEQ ID NO: 279905 - DNA, 479 bp, Homo Sapiens; identical to SEQ ID NO: 263035
  misc_feature (47)..(47): n is a, c, g, or t
  misc_feature (73)..(73): n is a, c, g, or t
  misc_feature (82)..(82): n is a, c, g, or t
  misc_feature (90)..(90): n is a, c, g, or t
  misc_feature (129)..(129): n is a, c, g, or t
  misc_feature (138)..(138): n is a, c, g, or t
  misc_feature (174)..(174): n is a, c, g, or t

SEQ ID NO: 279906 - DNA, 1013 bp, Homo Sapiens; identical to SEQ ID NO: 263041

SEQ ID NO: 279907 - DNA, 1059 bp, Homo Sapiens; identical to SEQ ID NO: 171006
  misc_feature (47)..(50): n is a, c, g, or t
  misc_feature (56)..(58): n is a, c, g, or t
  misc_feature (62)..(62): n is a, c, g, or t
  misc_feature (64)..(65): n is a, c, g, or t
  misc_feature (67)..(74): n is a, c, g, or t
  misc_feature (238)..(238): n is a, c, g, or t
  misc_feature (240)..(249): n is a, c, g, or t

SEQ ID NO: 279908 - DNA, 974 bp, Homo Sapiens; identical to SEQ ID NO: 263046
  misc_feature (780)..(780): n is a, c, g, or t

SEQ ID NO: 279909 - DNA, 1167 bp, Homo Sapiens; identical to SEQ ID NO: 263047
  misc_feature (785)..(799): n is a, c, g, or t
  misc_feature (889)..(889): n is a, c, g, or t
  misc_feature (988)..(988): n is a, c, g, or t

SEQ ID NO: 279910 - DNA, 696 bp, Homo Sapiens; identical to SEQ ID NO: 263054

SEQ ID NO: 279911 - DNA, 768 bp, Homo Sapiens; identical to SEQ ID NO: 263055
  misc_feature (683)..(683): n is a, c, g, or t
  misc_feature (702)..(702): n is a, c, g, or t

SEQ ID NO: 279912 - DNA, 853 bp, Homo Sapiens; identical to SEQ ID NO: 263066

SEQ ID NO: 279913 - DNA, 950 bp, Homo Sapiens; identical to SEQ ID NO: 263067

SEQ ID NO: 279914 - DNA, 775 bp, Homo Sapiens; identical to SEQ ID NO: 263068
  misc_feature (506)..(506): n is a, c, g, or t
  misc_feature (615)..(615): n is a, c, g, or t
  misc_feature (665)..(665): n is a, c, g, or t
  misc_feature (701)..(701): n is a, c, g, or t
  misc_feature (759)..(759): n is a, c, g, or t

SEQ ID NO: 279915 - DNA, 983 bp, Homo Sapiens; identical to SEQ ID NO: 263077

SEQ ID NO: 279916 - DNA, 639 bp, Homo Sapiens; identical to SEQ ID NO: 263078
  misc_feature (53)..(53): n is a, c, g, or t

SEQ ID NO: 279917 - DNA, 516 bp, Homo Sapiens; identical to SEQ ID NO: 263086
  misc_feature (13)..(13): n is a, c, g, or t
  misc_feature (23)..(23): n is a, c, g, or t
  misc_feature (482)..(482): n is a, c, g, or t

SEQ ID NO: 279918 - DNA, 1020 bp, Homo Sapiens; identical to SEQ ID NO: 263087

SEQ ID NO: 279919 - DNA, 750 bp, Homo Sapiens; identical to SEQ ID NO: 263090
  misc_feature (593)..(593): n is a, c, g, or t

SEQ ID NO: 279920 - DNA, 1145 bp, Homo Sapiens; identical to SEQ ID NO: 263091
  misc_feature (62)..(86): n is a, c, g, or t

SEQ ID NO: 279921 - DNA, 813 bp, Homo Sapiens; identical to SEQ ID NO: 263100

SEQ ID NO: 279922 - DNA, 382 bp, Homo Sapiens; identical to SEQ ID NO: 263101
  misc_feature (104)..(104): n is a, c, g, or t
  misc_feature (110)..(111): n is a, c, g, or t
  misc_feature (115)..(115): n is a, c, g, or t
  misc_feature (128)..(128): n is a, c, g, or t
  misc_feature (220)..(220): n is a, c, g, or t
  misc_feature (278)..(278): n is a, c, g, or t
  misc_feature (330)..(330): n is a, c, g, or t
  misc_feature (347)..(347): n is a, c, g, or t
  misc_feature (370)..(370): n is a, c, g, or t

SEQ ID NO: 279923 - DNA, 959 bp, Homo Sapiens; identical to SEQ ID NO: 263112
  misc_feature (749)..(749): n is a, c, g, or t

SEQ ID NO: 279924 - DNA, 377 bp, Homo Sapiens; identical to SEQ ID NO: 263113
  misc_feature (11)..(11): n is a, c, g, or t
  misc_feature (25)..(25): n is a, c, g, or t
  misc_feature (34)..(34): n is a, c, g, or t
  misc_feature (43)..(43): n is a, c, g, or t

SEQ ID NO: 279925 - DNA, 410 bp, Homo Sapiens; identical to SEQ ID NO: 263114
  misc_feature (39)..(39): n is a, c, g, or t
  misc_feature (87)..(87): n is a, c, g, or t
  misc_feature (245)..(245): n is a, c, g, or t

SEQ ID NO: 279926 - DNA, 421 bp, Homo Sapiens; identical to SEQ ID NO: 263115
  misc_feature (129)..(129): n is a, c, g, or t
  misc_feature (338)..(338): n is a, c, g, or t
  misc_feature (375)..(375): n is a, c, g, or t

SEQ ID NO: 279927 - DNA, 1144 bp, Homo Sapiens; identical to SEQ ID NO: 263140

SEQ ID NO: 279928 - DNA, 463 bp, Homo Sapiens; identical to SEQ ID NO: 263141
  misc_feature (36)..(36): n is a, c, g, or t
  misc_feature (135)..(135): n is a, c, g, or t

SEQ ID NO: 279929 - DNA, 1036 bp, Homo Sapiens; identical to SEQ ID NO: 263148

SEQ ID NO: 279930 - DNA, 421 bp, Homo Sapiens; identical to SEQ ID NO: 263149
  misc_feature (39)..(39): n is a, c, g, or t
  misc_feature (54)..(54): n is a, c, g, or t

SEQ ID NO: 279931 - DNA, 455 bp, Homo Sapiens; identical to SEQ ID NO: 263150
  misc_feature (31)..(31): n is a, c, g, or t
  misc_feature (124)..(124): n is a, c, g, or t
  misc_feature (372)..(372): n is a, c, g, or t

SEQ ID NO: 279932 - DNA, 941 bp, Homo Sapiens; identical to SEQ ID NO: 263161

SEQ ID NO: 279933 - DNA, 778 bp, Homo Sapiens; identical to SEQ ID NO: 263162

SEQ ID NO: 279934 - DNA, 1319 bp, Homo Sapiens; identical to SEQ ID NO: 263176
  misc_feature (831)..(1121): n is a, c, g, or t
  misc_feature (1127)..(1139): n is a, c, g, or t

SEQ ID NO: 279935 - DNA, 312 bp, Homo Sapiens; identical to SEQ ID NO: 263177
  misc_feature (74)..(74): n is a, c, g, or t
  misc_feature (134)..(134): n is a, c, g, or t

SEQ ID NO: 279936 - DNA, 868 bp, Homo Sapiens; identical to SEQ ID NO: 263197
  misc_feature (405)..(405): n is a, c, g, or t

SEQ ID NO: 279937 - DNA, 325 bp, Homo Sapiens; identical to SEQ ID NO: 263198

SEQ ID NO: 279938 - DNA, 952 bp, Homo Sapiens; identical to SEQ ID NO: 15293
  misc_feature (545)..(560): n is a, c, g, or t

SEQ ID NO: 279939 - DNA, 546 bp, Homo Sapiens; identical to SEQ ID NO: 85157

SEQ ID NO: 279940 - DNA, 847 bp, Homo Sapiens; identical to SEQ ID NO: 263210
  misc_feature (822)..(822): n is a, c, g, or t

SEQ ID NO: 279941 - DNA, 399 bp, Homo Sapiens; identical to SEQ ID NO: 263211

SEQ ID NO: 279942 - DNA, 399 bp, Homo Sapiens; identical to SEQ ID NO: 263212
  misc_feature (60)..(60): n is a, c, g, or t
  misc_feature (383)..(383): n is a, c, g, or t

SEQ ID NO: 279943 - DNA, 513 bp, Homo Sapiens; identical to SEQ ID NO: 263217
  misc_feature (12)..(12): n is a, c, g, or t

SEQ ID NO: 279944 - DNA, 112 bp, Homo Sapiens; identical to SEQ ID NO: 263218
  misc_feature (56)..(56): n is a, c, g, or t

SEQ ID NO: 279945 - DNA, 707 bp, Homo Sapiens; identical to SEQ ID NO: 263220
  misc_feature (466)..(603): n is a, c, g, or t
  misc_feature (605)..(608): n is a, c, g, or t
  misc_feature (617)..(632): n is a, c, g, or t
  misc_feature (657)..(667): n is a, c, g, or t

SEQ ID NO: 279946 - DNA, 468 bp, Homo Sapiens; identical to SEQ ID NO: 263221
  misc_feature (448)..(448): n is a, c, g, or t

SEQ ID NO: 279947 - DNA, 494 bp, Homo Sapiens; identical to SEQ ID NO: 263222
  misc_feature (452)..(452): n is a, c, g, or t
  misc_feature (458)..(458): n is a, c, g, or t
  misc_feature (464)..(464): n is a, c, g, or t
  misc_feature (481)..(481): n is a, c, g, or t

SEQ ID NO: 279948 - DNA, 636 bp, Homo Sapiens; identical to SEQ ID NO: 263232

SEQ ID NO: 279949 - DNA, 373 bp, Homo Sapiens; identical to SEQ ID NO: 263233

SEQ ID NO: 279950 - DNA, 475 bp, Homo Sapiens; identical to SEQ ID NO: 263238
  misc_feature (367)..(367): n is a, c, g, or t
  misc_feature (410)..(410): n is a, c, g, or t

SEQ ID NO: 279951 - DNA, 846 bp, Homo Sapiens; identical to SEQ ID NO: 263239
  misc_feature (698)..(698): n is a, c, g, or t
  misc_feature (713)..(713): n is a, c, g, or t
  misc_feature (736)..(736): n is a, c, g, or t
  misc_feature (752)..(752): n is a, c, g, or t
  misc_feature (784)..(784): n is a, c, g, or t
  misc_feature (791)..(791): n is a, c, g, or t
  misc_feature (798)..(798): n is a, c, g, or t
  misc_feature (818)..(818): n is a, c, g, or t

SEQ ID NO: 279952 - DNA, 521 bp, Homo Sapiens; identical to SEQ ID NO: 263240

SEQ ID NO: 279953 - DNA, 653 bp, Homo Sapiens; identical to SEQ ID NO: 263248

SEQ ID NO: 279954 - DNA, 1303 bp, Homo Sapiens; identical to SEQ ID NO: 263249
  misc_feature (982)..(1016): n is a, c, g, or t
  misc_feature (1042)..(1042): n is a, c, g, or t
  misc_feature (1222)..(1222): n is a, c, g, or t

SEQ ID NO: 279955 - DNA, 740 bp, Homo Sapiens; identical to SEQ ID NO: 263253
  misc_feature (68)..(68): n is a, c, g, or t
  misc_feature (74)..(101): n is a, c, g, or t

SEQ ID NO: 279956 - DNA, 382 bp, Homo Sapiens; identical to SEQ ID NO: 263254
  misc_feature (15)..(15): n is a, c, g, or t
  misc_feature (22)..(22): n is a, c, g, or t
  misc_feature (44)..(44): n is a, c, g, or t
  misc_feature (65)..(65): n is a, c, g, or t
  misc_feature (121)..(121): n is a, c, g, or t
  misc_feature (125)..(125): n is a, c, g, or t
  misc_feature (139)..(139): n is a, c, g, or t
  misc_feature (228)..(257): n is a, c, g, or t

SEQ ID NO: 279957 - DNA, 1208 bp, Homo Sapiens; identical to SEQ ID NO: 263256
  misc_feature (1004)..(1034): n is a, c, g, or t

SEQ ID NO: 279958 - DNA, 397 bp, Homo Sapiens; identical to SEQ ID NO: 263257
  misc_feature (62)..(62): n is a, c, g, or t

SEQ ID NO: 279959 - DNA, 641 bp, Homo Sapiens; identical to SEQ ID NO: 15357
  misc_feature (456)..(465): n is a, c, g, or t

SEQ ID NO: 279960 - DNA, 419 bp, Homo Sapiens; identical to SEQ ID NO: 263272

SEQ ID NO: 279961 - DNA, 985 bp, Homo Sapiens; identical to SEQ ID NO: 263281
  misc_feature (20)..(20): n is a, c, g, or t

SEQ ID NO: 279962 - DNA, 850 bp, Homo Sapiens; identical to SEQ ID NO: 9194

SEQ ID NO: 279963 - DNA, 861 bp, Homo Sapiens; identical to SEQ ID NO: 263299
  misc_feature (463)..(463): n is a, c, g, or t

SEQ ID NO: 279964 - DNA, 499 bp, Homo Sapiens; identical to SEQ ID NO: 263300
  misc_feature (238)..(262): n is a, c, g, or t
  misc_feature (365)..(384): n is a, c, g, or t

SEQ ID NO: 279965 - DNA, 1095 bp, Homo Sapiens; identical to SEQ ID NO: 263308
  misc_feature (896)..(896): n is a, c, g, or t
  misc_feature (966)..(966): n is a, c, g, or t
  misc_feature (976)..(976): n is a, c, g, or t

SEQ ID NO: 279966 - DNA, 518 bp, Homo Sapiens; identical to SEQ ID NO: 263309

SEQ ID NO: 279967 - DNA, 945 bp, Homo Sapiens; identical to SEQ ID NO: 263310
  misc_feature (107)..(107): n is a, c, g, or t
  misc_feature (306)..(306): n is a, c, g, or t

SEQ ID NO: 279968 - DNA, 1294 bp, Homo Sapiens; identical to SEQ ID NO: 263311
  misc_feature (1253)..(1253): n is a, c, g, or t
  misc_feature (1275)..(1275): n is a, c, g, or t

SEQ ID NO: 279969 - DNA, 468 bp, Homo Sapiens; identical to SEQ ID NO: 263322
  misc_feature (389)..(389): n is a, c, g, or t

SEQ ID NO: 279970 - DNA, 753 bp, Homo Sapiens; identical to SEQ ID NO: 263323
  misc_feature (12)..(12): n is a, c, g, or t

SEQ ID NO: 279971 - DNA, 868 bp, Homo Sapiens; identical to SEQ ID NO: 263324
  misc_feature (493)..(509): n is a, c, g, or t
  misc_feature (511)..(512): n is a, c, g, or t
  misc_feature (514)..(514): n is a, c, g, or t
  misc_feature (519)..(520): n is a, c, g, or t
  misc_feature (584)..(586): n is a, c, g, or t
  misc_feature (684)..(684): n is a, c, g, or t
  misc_feature (690)..(692): n is a, c, g, or t
  misc_feature (792)..(792): n is a, c, g, or t
  misc_feature (804)..(804): n is a, c, g, or t

SEQ ID NO: 279972 - DNA, 590 bp, Homo Sapiens; identical to SEQ ID NO: 263325

SEQ ID NO: 279973 - DNA, 700 bp, Homo Sapiens; identical to SEQ ID NO: 263327
  misc_feature (493)..(521): n is a, c, g, or t

SEQ ID NO: 279974 - DNA, 468 bp, Homo Sapiens; identical to SEQ ID NO: 263328

SEQ ID NO: 279975 - DNA, 604 bp, Homo Sapiens; identical to SEQ ID NO: 263334

SEQ ID NO: 279976 - DNA, 335 bp, Homo Sapiens; identical to SEQ ID NO: 263335

SEQ ID NO: 279977 - DNA, 862 bp, Homo Sapiens; identical to SEQ ID NO: 263346
  misc_feature (46)..(46): n is a, c, g, or t

SEQ ID NO: 279978 - DNA, 446 bp, Homo Sapiens; identical to SEQ ID NO: 263347
  misc_feature (23)..(23): n is a, c, g, or t
  misc_feature (73)..(73): n is a, c, g, or t
  misc_feature (95)..(95): n is a, c, g, or t
  misc_feature (118)..(118): n is a, c, g, or t
  misc_feature (124)..(124): n is a, c, g, or t

SEQ ID NO: 279979 - DNA, 541 bp, Homo Sapiens; identical to SEQ ID NO: 263358
  misc_feature (362)..(371): n is a, c, g, or t
  misc_feature (521)..(521): n is a, c, g, or t
  misc_feature (525)..(525): n is a, c, g, or t

SEQ ID NO: 279980 - DNA, 461 bp, Homo Sapiens; identical to SEQ ID NO: 263359
  misc_feature (386)..(386): n is a, c, g, or t
  misc_feature (430)..(430): n is a, c, g, or t
  misc_feature (435)..(435): n is a, c, g, or t

SEQ ID NO: 279981 - DNA, 637 bp, Homo Sapiens; identical to SEQ ID NO: 263365
  misc_feature (113)..(184): n is a, c, g, or t

SEQ ID NO: 279982 - DNA, 614 bp, Homo Sapiens; identical to SEQ ID NO: 263366

SEQ ID NO: 279983 - DNA, 595 bp, Homo Sapiens; identical to SEQ ID NO: 263375

SEQ ID NO: 279984 - DNA, 410 bp, Homo Sapiens; identical to SEQ ID NO: 263376
  misc_feature (51)..(51): n is a, c, g, or t

SEQ ID NO: 279985 - DNA, 433 bp, Homo Sapiens; identical to SEQ ID NO: 263387
  misc_feature (24)..(24): n is a, c, g, or t
  misc_feature (34)..(34): n is a, c, g, or t
  misc_feature (44)..(44): n is a, c, g, or t
  misc_feature (53)..(53): n is a, c, g, or t
  misc_feature (128)..(128): n is a, c, g, or t

SEQ ID NO: 279986 - DNA, 832 bp, Homo Sapiens; identical to SEQ ID NO: 263388

SEQ ID NO: 279987 - DNA, 1027 bp, Homo Sapiens; identical to SEQ ID NO: 263391
  misc_feature (768)..(892): n is a, c, g, or t
  misc_feature (904)..(917): n is a, c, g, or t
  misc_feature (924)..(943): n is a, c, g, or t

SEQ ID NO: 279988 - DNA, 378 bp, Homo Sapiens; identical to SEQ ID NO: 263392
  misc_feature (66)..(66): n is a, c, g, or t
  misc_feature (72)..(72): n is a, c, g, or t
  misc_feature (91)..(91): n is a, c, g, or t
  misc_feature (137)..(137): n is a, c, g, or t
  misc_feature (153)..(153): n is a, c, g, or t
  misc_feature (171)..(171): n is a, c, g, or t

SEQ ID NO: 279989 - DNA, 745 bp, Homo Sapiens; identical to SEQ ID NO: 263407

SEQ ID NO: 279990 - DNA, 405 bp, Homo Sapiens; identical to SEQ ID NO: 263408

SEQ ID NO: 279991 - DNA, 866 bp, Homo Sapiens; identical to SEQ ID NO: 263423
  misc_feature (558)..(558): n is a, c, g, or t
  misc_feature (563)..(564): n is a, c, g, or t
  misc_feature (575)..(575): n is a, c, g, or t

SEQ ID NO: 279992 - DNA, 806 bp, Homo Sapiens; identical to SEQ ID NO: 15426

SEQ ID NO: 279993 - DNA, 522 bp, Homo Sapiens; identical to SEQ ID NO: 263429
  misc_feature (183)..(183): n is a, c, g, or t
  misc_feature (287)..(399): n is a, c, g, or t
  misc_feature (419)..(421): n is a, c, g, or t

SEQ ID NO: 279994 - DNA, 527 bp, Homo Sapiens; identical to SEQ ID NO: 263430
  misc_feature (11)..(11): n is a, c, g, or t
  misc_feature (188)..(188): n is a, c, g, or t
  misc_feature (205)..(205): n is a, c, g, or t
  misc_feature (327)..(327): n is a, c, g, or t
  misc_feature (343)..(343): n is a, c, g, or t
  misc_feature (360)..(360): n is a, c, g, or t
  misc_feature (367)..(367): n is a, c, g, or t
  misc_feature (376)..(376): n is a, c, g, or t
  misc_feature (405)..(405): n is a, c, g, or t
  misc_feature (449)..(449): n is a, c, g, or t
  misc_feature (458)..(458): n is a, c, g, or t
  misc_feature (481)..(481): n is a, c, g, or t

SEQ ID NO: 279995 - DNA, 434 bp, Homo Sapiens; identical to SEQ ID NO: 263456
  misc_feature (18)..(18): n is a, c, g, or t
  misc_feature (26)..(26): n is a, c, g, or t
  misc_feature (102)..(102): n is a, c, g, or t
  misc_feature (247)..(247): n is a, c, g, or t

SEQ ID NO: 279996 - DNA, 630 bp, Homo Sapiens; identical to SEQ ID NO: 263457
  misc_feature (119)..(181): n is a, c, g, or t
  misc_feature (518)..(549): n is a, c, g, or t
  misc_feature (608)..(608): n is a, c, g, or t

SEQ ID NO: 279997 - DNA, 1206 bp, Homo Sapiens; identical to SEQ ID NO: 263478
  misc_feature (868)..(1053): n is a, c, g, or t
  misc_feature (1062)..(1136): n is a, c, g, or t

SEQ ID NO: 279998 - DNA, 377 bp, Homo Sapiens; identical to SEQ ID NO: 263479

SEQ ID NO: 279999 - DNA, 1594 bp, Homo Sapiens; identical to SEQ ID NO: 263489

SEQ ID NO: 280000 - DNA, 511 bp, Homo Sapiens; identical to SEQ ID NO: 263490
  misc_feature (15)..(15): n is a, c, g, or t
  misc_feature (38)..(38): n is a, c, g, or t
  misc_feature (224)..(224): n is a, c, g, or t

SEQ ID NO: 280001 - DNA, 763 bp, Homo Sapiens; identical to SEQ ID NO: 263510

SEQ ID NO: 280002 - DNA, 541 bp, Homo Sapiens; identical to SEQ ID NO: 263511
  misc_feature (268)..(268): n is a, c, g, or t

SEQ ID NO: 280003 - DNA, 479 bp, Homo Sapiens; identical to SEQ ID NO: 263514

SEQ ID NO: 280004 - DNA, 344 bp, Homo Sapiens; identical to SEQ ID NO: 263515
  misc_feature (17)..(17): n is a, c, g, or t
  misc_feature (36)..(36): n is a, c, g, or t
  misc_feature (58)..(58): n is a, c, g, or t

SEQ ID NO: 280005 - DNA, 1169 bp, Homo Sapiens; identical to SEQ ID NO: 263521

SEQ ID NO: 280006 - DNA, 744 bp, Homo Sapiens; identical to SEQ ID NO: 263522
  misc_feature (523)..(523): n is a, c, g, or t
  misc_feature (660)..(660): n is a, c, g, or t
  misc_feature (693)..(693): n is a, c, g, or t
  misc_feature (699)..(699): n is a, c, g, or t

SEQ ID NO: 280007 - DNA, 1714 bp, Homo Sapiens; identical to SEQ ID NO: 263525
  misc_feature (188)..(188): n is a, c, g, or t
  misc_feature (201)..(202): n is a, c, g, or t
  misc_feature (229)..(229): n is a, c, g, or t
  misc_feature (249)..(249): n is a, c, g, or t
  misc_feature (254)..(254): n is a, c, g, or t
  misc_feature (398)..(398): n is a, c, g, or t
  misc_feature (476)..(476): n is a, c, g, or t
  misc_feature (580)..(580): n is a, c, g, or t
  misc_feature (685)..(685): n is a, c, g, or t
  misc_feature (711)..(711): n is a, c, g, or t
  misc_feature (1695)..(1695): n is a, c, g, or t

SEQ ID NO: 280008 - DNA, 412 bp, Homo Sapiens; identical to SEQ ID NO: 263526
  misc_feature (38)..(38): n is a, c, g, or t

SEQ ID NO: 280009 - DNA, 698 bp, Homo Sapiens; identical to SEQ ID NO: 263527

SEQ ID NO: 280010 - DNA, 513 bp, Homo Sapiens; identical to SEQ ID NO: 263528
  misc_feature (49)..(49): n is a, c, g, or t
  misc_feature (68)..(68): n is a, c, g, or t
  misc_feature (84)..(84): n is a, c, g, or t
  misc_feature (130)..(130): n is a, c, g, or t

SEQ ID NO: 280011 - DNA, 406 bp, Homo Sapiens; identical to SEQ ID NO: 263532
  misc_feature (15)..(15): n is a, c, g, or t
  misc_feature (254)..(254): n is a, c, g, or t

SEQ ID NO: 280012 - DNA, 1058 bp, Homo Sapiens; identical to SEQ ID NO: 263533

SEQ ID NO: 280013 - DNA, 435 bp, Homo Sapiens; identical to SEQ ID NO: 263548

SEQ ID NO: 280014 - DNA, 651 bp, Homo Sapiens; identical to SEQ ID NO: 263549
  misc_feature (255)..(255): n is a, c, g, or t

SEQ ID NO: 280015 - DNA, 397 bp, Homo Sapiens; identical to SEQ ID NO: 263550
  misc_feature (13)..(13): n is a, c, g, or t
  misc_feature (43)..(43): n is a, c, g, or t
  misc_feature (136)..(136): n is a, c, g, or t
  misc_feature (144)..(144): n is a, c, g, or t

SEQ ID NO: 280016 - DNA, 470 bp, Homo Sapiens; identical to SEQ ID NO: 263551
  misc_feature (26)..(26): n is a, c, g, or t
  misc_feature (39)..(39): n is a, c, g, or t
  misc_feature (44)..(44): n is a, c, g, or t
  misc_feature (62)..(62): n is a, c, g, or t
  misc_feature (68)..(68): n is a, c, g, or t
  misc_feature (113)..(113): n is a, c, g, or t
  misc_feature (196)..(196): n is a, c, g, or t
  misc_feature (236)..(236): n is a, c, g, or t
  misc_feature (253)..(253): n is a, c, g, or t
  misc_feature (291)..(291): n is a, c, g, or t

SEQ ID NO: 280017 - DNA, 712 bp, Homo Sapiens; identical to SEQ ID NO: 263572
  misc_feature (268)..(294): n is a, c, g, or t

SEQ ID NO: 280018 - DNA, 431 bp, Homo Sapiens; identical to SEQ ID NO: 263573
  misc_feature (32)..(32): n is a, c, g, or t
  misc_feature (79)..(90): n is a, c, g, or t
  misc_feature (390)..(390): n is a, c, g, or t

SEQ ID NO: 280019 - DNA, 806 bp, Homo Sapiens; identical to SEQ ID NO: 263590

SEQ ID NO: 280020 - DNA, 382 bp, Homo Sapiens; identical to SEQ ID NO: 263591
  misc_feature (359)..(359): n is a, c, g, or t
  misc_feature (365)..(365): n is a, c, g, or t

SEQ ID NO: 280021 - DNA, 1249 bp, Homo Sapiens; identical to SEQ ID NO: 263598

SEQ ID NO: 280022 - DNA, 672 bp, Homo Sapiens; identical to SEQ ID NO: 263599
  misc_feature (630)..(630): n is a, c, g, or t
  misc_feature (642)..(642): n is a, c, g, or t
  misc_feature (650)..(650): n is a, c, g, or t

SEQ ID NO: 280023 - DNA, 1322 bp, Homo Sapiens; identical to SEQ ID NO: 263626
  misc_feature (1050)..(1050): n is a, c, g, or t
  misc_feature (1257)..(1257): n is a, c, g, or t

SEQ ID NO: 280024 - DNA, 926 bp, Homo Sapiens; identical to SEQ ID NO: 263627

SEQ ID NO: 280025 - DNA, 379 bp, Homo Sapiens; identical to SEQ ID NO: 263628
  misc_feature (109)..(109): n is a, c, g, or t

SEQ ID NO: 280026 - DNA, 1466 bp, Homo Sapiens; identical to SEQ ID NO: 263630

SEQ ID NO: 280027 - DNA, 536 bp, Homo Sapiens; identical to SEQ ID NO: 263631

SEQ ID NO: 280028 - DNA, 1019 bp, Homo Sapiens; identical to SEQ ID NO: 263637

SEQ ID NO: 280029 - DNA, 852 bp, Homo Sapiens; identical to SEQ ID NO: 166428

SEQ ID NO: 280030 - DNA, 792 bp, Homo Sapiens; identical to SEQ ID NO: 263639

SEQ ID NO: 280031 - DNA, 907 bp, Homo Sapiens; identical to SEQ ID NO: 263640
  misc_feature (18)..(18): n is a, c, g, or t

SEQ ID NO: 280032 - DNA, 1053 bp, Homo Sapiens; identical to SEQ ID NO: 263644

SEQ ID NO: 280033 - DNA, 449 bp, Homo Sapiens; identical to SEQ ID NO: 263645

SEQ ID NO: 280034 - DNA, 459 bp, Homo Sapiens; identical to SEQ ID NO: 263646
  misc_feature (330)..(330): n is a, c, g, or t
  misc_feature (353)..(353): n is a, c, g, or t

SEQ ID NO: 280035 - DNA, 487 bp, Homo Sapiens; identical to SEQ ID NO: 263647

SEQ ID NO: 280036 - DNA, 487 bp, Homo Sapiens; identical to SEQ ID NO: 263648

SEQ ID NO: 280037 - DNA, 712 bp, Homo Sapiens; identical to SEQ ID NO: 263656

SEQ ID NO: 280038 - DNA, 412 bp, Homo Sapiens; identical to SEQ ID NO: 263657
  misc_feature (38)..(38): n is a, c, g, or t
  misc_feature (65)..(65): n is a, c, g, or t
  misc_feature (81)..(81): n is a, c, g, or t

SEQ ID NO: 280039 - DNA, 755 bp, Homo Sapiens; identical to SEQ ID NO: 263659

SEQ ID NO: 280040 - DNA, 427 bp, Homo Sapiens; identical to SEQ ID NO: 263660
  misc_feature (27)..(27): n is a, c, g, or t
  misc_feature (133)..(133): n is a, c, g, or t

SEQ ID NO: 280041 - DNA, 341 bp, Homo Sapiens; identical to SEQ ID NO: 263675
  misc_feature (150)..(161): n is a, c, g, or t

SEQ ID NO: 280042 - DNA, 653 bp, Homo Sapiens; identical to SEQ ID NO: 263676

SEQ ID NO: 280043 - DNA, 858 bp, Homo Sapiens; identical to SEQ ID NO: 263684

SEQ ID NO: 280044 - DNA, 692 bp, Homo Sapiens; identical to SEQ ID NO: 263685

SEQ ID NO: 280045 - DNA, 772 bp, Homo Sapiens; identical to SEQ ID NO: 263690
  misc_feature (312)..(312): n is a, c, g, or t
  misc_feature (328)..(328): n is a, c, g, or t

SEQ ID NO: 280046 - DNA, 523 bp, Homo Sapiens; identical to SEQ ID NO: 263691
  misc_feature (28)..(28): n is a, c, g, or t
  misc_feature (58)..(58): n is a, c, g, or t
  misc_feature (79)..(79): n is a, c, g, or t
  misc_feature (264)..(264): n is a, c, g, or t
  misc_feature (266)..(266): n is a, c, g, or t

SEQ ID NO: 280047 - DNA, 881 bp, Homo Sapiens; identical to SEQ ID NO: 263700
  misc_feature (365)..(365): n is a, c, g, or t
  misc_feature (796)..(813): n is a, c, g, or t

SEQ ID NO: 280048 - DNA, 429 bp, Homo Sapiens; identical to SEQ ID NO: 263701
  misc_feature (360)..(360): n is a, c, g, or t
  misc_feature (413)..(413): n is a, c, g, or t

SEQ ID NO: 280049 - DNA, 769 bp, Homo Sapiens; identical to SEQ ID NO: 263715

SEQ ID NO: 280050 - DNA, 1373 bp, Homo Sapiens; identical to SEQ ID NO: 263716

SEQ ID NO: 280051 - DNA, 268 bp, Homo Sapiens; identical to SEQ ID NO: 263717

SEQ ID NO: 280052 - DNA, 1210 bp, Homo Sapiens; identical to SEQ ID NO: 263721

SEQ ID NO: 280053 - DNA, 296 bp, Homo Sapiens; identical to SEQ ID NO: 263722

SEQ ID NO: 280054 - DNA, 836 bp, Homo Sapiens; identical to SEQ ID NO: 178574

SEQ ID NO: 280055 - DNA, 610 bp, Homo Sapiens; identical to SEQ ID NO: 263792
  misc_feature (87)..(87): n is a, c, g, or t
  misc_feature (110)..(110): n is a, c, g, or t
  misc_feature (131)..(131): n is a, c, g, or t
  misc_feature (155)..(185): n is a, c, g, or t

SEQ ID NO: 280056 - DNA, 319 bp, Homo Sapiens; identical to SEQ ID NO: 263793
  misc_feature (203)..(203): n is a, c, g, or t
  misc_feature (216)..(247): n is a, c, g, or t
  misc_feature (277)..(277): n is a, c, g, or t

SEQ ID NO: 280057 - DNA, 887 bp, Homo Sapiens; identical to SEQ ID NO: 263806
  misc_feature (850)..(850): n is a, c, g, or t

SEQ ID NO: 280058 - DNA, 409 bp, Homo Sapiens; identical to SEQ ID NO: 263807

SEQ ID NO: 280059 - DNA, 540 bp, Homo Sapiens; identical to SEQ ID NO: 263808
  misc_feature (27)..(27): n is a, c, g, or t
  misc_feature (96)..(96): n is a, c, g, or t
  misc_feature (362)..(362): n is a, c, g, or t

SEQ ID NO: 280060 - DNA, 920 bp, Homo Sapiens; identical to SEQ ID NO: 263827

SEQ ID NO: 280061 - DNA, 448 bp, Homo Sapiens; identical to SEQ ID NO: 263828
  misc_feature (28)..(28): n is a, c, g, or t

SEQ ID NO: 280062 - DNA, 741 bp, Homo Sapiens; identical to SEQ ID NO: 263831

SEQ ID NO: 280063 - DNA, 523 bp, Homo Sapiens; identical to SEQ ID NO: 263832
  misc_feature (27)..(27): n is a, c, g, or t
  misc_feature (38)..(38): n is a, c, g, or t

SEQ ID NO: 280064 - DNA, 425 bp, Homo Sapiens; identical to SEQ ID NO: 263833
  misc_feature (361)..(361): n is a, c, g, or t
  misc_feature (381)..(381): n is a, c, g, or t
  misc_feature (405)..(405): n is a, c, g, or t
  misc_feature (414)..(414): n is a, c, g, or t

SEQ ID NO: 280065 - DNA, 447 bp, Homo Sapiens; identical to SEQ ID NO: 263834

SEQ ID NO: 280066 - DNA, 1046 bp, Homo Sapiens; identical to SEQ ID NO: 263835
  misc_feature (615)..(615): n is a, c, g, or t
  misc_feature (903)..(903): n is a, c, g, or t

SEQ ID NO: 280067 - DNA, 877 bp, Homo Sapiens; identical to SEQ ID NO: 263848
  misc_feature (41)..(56): n is a, c, g, or t
  misc_feature (69)..(228): n is a, c, g, or t
  misc_feature (511)..(615): n is a, c, g, or t
  misc_feature (865)..(865): n is a, c, g, or t

SEQ ID NO: 280068 - DNA, 525 bp, Homo Sapiens; identical to SEQ ID NO: 263849
  misc_feature (11)..(11): n is a, c, g, or t
  misc_feature (32)..(32): n is a, c, g, or t
  misc_feature (49)..(49): n is a, c, g, or t
  misc_feature (59)..(59): n is a, c, g, or t
  misc_feature (73)..(73): n is a, c, g, or t
  misc_feature (102)..(102): n is a, c, g, or t
  misc_feature (108)..(116): n is a, c, g, or t
  misc_feature (235)..(235): n is a, c, g, or t
  misc_feature (374)..(445): n is a, c, g, or t

SEQ ID NO: 280069 - DNA, 713 bp, Homo Sapiens; identical to SEQ ID NO: 263862

SEQ ID NO: 280070 - DNA, 439 bp, Homo Sapiens; identical to SEQ ID NO: 263863
  misc_feature (14)..(14): n is a, c, g, or t
  misc_feature (54)..(54): n is a, c, g, or t
  misc_feature (106)..(106): n is a, c, g, or t

SEQ ID NO: 280071 - DNA, 1477 bp, Homo Sapiens; identical to SEQ ID NO: 178643
  misc_feature (110)..(110): n is a, c, g, or t
  misc_feature (195)..(195): n is a, c, g, or t
  misc_feature (252)..(252): n is a, c, g, or t
  misc_feature (254)..(258): n is a, c, g, or t
  misc_feature (302)..(339): n is a, c, g, or t
  misc_feature (353)..(362): n is a, c, g, or t
  misc_feature (366)..(374): n is a, c, g, or t
  misc_feature (376)..(376): n is a, c, g, or t
  misc_feature (381)..(381): n is a, c, g, or t
  misc_feature (386)..(386): n is a, c, g, or t
  misc_feature (439)..(447): n is a, c, g, or t
  misc_feature (468)..(468): n is a, c, g, or t
  misc_feature (478)..(495): n is a, c, g, or t
  misc_feature (533)..(571): n is a, c, g, or t
  misc_feature (610)..(610): n is a, c, g, or t
  misc_feature (670)..(670): n is a, c, g, or t
  misc_feature (750)..(750): n is a, c, g, or t
  misc_feature (784)..(784): n is a, c, g, or t
  misc_feature (787)..(787): n is a, c, g, or t
  misc_feature (800)..(800): n is a, c, g, or t

SEQ ID NO: 280072 - DNA, 725 bp, Homo Sapiens; identical to SEQ ID NO: 263899
  misc_feature (475)..(475): n is a, c, g, or t
  misc_feature (505)..(505): n is a, c, g, or t

SEQ ID NO: 280073 - DNA, 437 bp, Homo Sapiens; identical to SEQ ID NO: 263909

SEQ ID NO: 280074 - DNA, 633 bp, Homo Sapiens; identical to SEQ ID NO: 263910
  misc_feature (58)..(58): n is a, c, g, or t
  misc_feature (342)..(342): n is a, c, g, or t
  misc_feature (345)..(345): n is a, c, g, or t
  misc_feature (354)..(357): n is a, c, g, or t

SEQ ID NO: 280075 - DNA, 364 bp, Homo Sapiens; identical to SEQ ID NO: 263911
  misc_feature (65)..(90): n is a, c, g, or t

SEQ ID NO: 280076 - DNA, 1252 bp, Homo Sapiens; identical to SEQ ID NO: 263918
  misc_feature (103)..(113): n is a, c, g, or t
  misc_feature (168)..(220): n is a, c, g, or t
  misc_feature (319)..(337): n is a, c, g, or t
  misc_feature (544)..(558): n is a, c, g, or t
  misc_feature (734)..(776): n is a, c, g, or t
  misc_feature (801)..(917): n is a, c, g, or t

SEQ ID NO: 280077 - DNA, 787 bp, Homo Sapiens; identical to SEQ ID NO: 263919
  misc_feature (645)..(670): n is a, c, g, or t

SEQ ID NO: 280078 - DNA, 479 bp, Homo Sapiens; identical to SEQ ID NO: 263923

SEQ ID NO: 280079 - DNA, 422 bp, Homo Sapiens; identical to SEQ ID NO: 263924
  misc_feature (16)..(16): n is a, c, g, or t
  misc_feature (25)..(25): n is a, c, g, or t
  misc_feature (288)..(288): n is a, c, g, or t

SEQ ID NO: 280080 - DNA, 506 bp, Homo Sapiens; identical to SEQ ID NO: 263953
  misc_feature (202)..(202): n is a, c, g, or t

SEQ ID NO: 280081 - DNA, 736 bp, Homo Sapiens; identical to SEQ ID NO: 263954
  misc_feature (23)..(23): n is a, c, g, or t
  misc_feature (440)..(440): n is a, c, g, or t

SEQ ID NO: 280082 - DNA, 837 bp, Homo Sapiens; identical to SEQ ID NO: 263965
  misc_feature (324)..(324): n is a, c, g, or t
  misc_feature (346)..(346): n is a, c, g, or t
  misc_feature (456)..(456): n is a, c, g, or t

SEQ ID NO: 280083 - DNA, 326 bp, Homo Sapiens; identical to SEQ ID NO: 263966
  misc_feature (128)..(128): n is a, c, g, or t
  misc_feature (212)..(212): n is a, c, g, or t
  misc_feature (232)..(232): n is a, c, g, or t

SEQ ID NO: 280084 - DNA, 761 bp, Homo Sapiens; identical to SEQ ID NO: 15839

SEQ ID NO: 280085 - DNA, 603 bp, Homo Sapiens; identical to SEQ ID NO: 15840
  misc_feature (540)..(540): n is a, c, g, or t
  misc_feature (543)..(544): n is a, c, g, or t
  misc_feature (549)..(549): n is a, c, g, or t
  misc_feature (551)..(552): n is a, c, g, or t
  misc_feature (556)..(556): n is a, c, g, or t
  misc_feature (558)..(558): n is a, c, g, or t
  misc_feature (589)..(589): n is a, c, g, or t

SEQ ID NO: 280086 - DNA, 1091 bp, Homo Sapiens; identical to SEQ ID NO: 263993

SEQ ID NO: 280087 - DNA, 453 bp, Homo Sapiens; identical to SEQ ID NO: 263994
  misc_feature (21)..(21): n is a, c, g, or t
  misc_feature (38)..(38): n is a, c, g, or t
  misc_feature (53)..(53): n is a, c, g, or t
  misc_feature (67)..(67): n is a, c, g, or t
  misc_feature (76)..(76): n is a, c, g, or t
  misc_feature (94)..(94): n is a, c, g, or t

SEQ ID NO: 280088 - DNA, 655 bp, Homo Sapiens; identical to SEQ ID NO: 263996
  misc_feature (400)..(587): n is a, c, g, or t
  misc_feature (597)..(610): n is a, c, g, or t

SEQ ID NO: 280089 - DNA, 527 bp, Homo Sapiens; identical to SEQ ID NO: 263997
  misc_feature (41)..(41): n is a, c, g, or t
  misc_feature (238)..(238): n is a, c, g, or t

SEQ ID NO: 280090 - DNA, 463 bp, Homo Sapiens; identical to SEQ ID NO: 264042

SEQ ID NO: 280091 - DNA, 581 bp, Homo Sapiens; identical to SEQ ID NO: 264043
  misc_feature (17)..(17): n is a, c, g, or t
  misc_feature (24)..(24): n is a, c, g, or t
  misc_feature (36)..(36): n is a, c, g, or t
  misc_feature (42)..(42): n is a, c, g, or t
  misc_feature (47)..(47): n is a, c, g, or t
  misc_feature (54)..(54): n is a, c, g, or t
  misc_feature (61)..(61): n is a, c, g, or t
  misc_feature (73)..(73): n is a, c, g, or t
  misc_feature (96)..(96): n is a, c, g, or t
  misc_feature (108)..(108): n is a, c, g, or t
  misc_feature (271)..(271): n is a, c, g, or t
  misc_feature (312)..(312): n is a, c, g, or t
  misc_feature (483)..(483): n is a, c, g, or t

SEQ ID NO: 280092 - DNA, 342 bp, Homo Sapiens; identical to SEQ ID NO: 264052

SEQ ID NO: 280093 - DNA, 1031 bp, Homo Sapiens; identical to SEQ ID NO: 264053
  misc_feature (714)..(792): n is a, c, g, or t
  misc_feature (838)..(838): n is a, c, g, or t
  misc_feature (923)..(931): n is a, c, g, or t
  misc_feature (941)..(941): n is a, c, g, or t

SEQ ID NO: 280094 - DNA, 1404 bp, Homo Sapiens; identical to SEQ ID NO: 264059
  misc_feature (39)..(39): n is a, c, g, or t
  misc_feature (153)..(212): n is a, c, g, or t
  misc_feature (753)..(828): n is a, c, g, or t
  misc_feature (1373)..(1373): n is a, c, g, or t

SEQ ID NO: 280095 - DNA, 862 bp, Homo Sapiens; identical to SEQ ID NO: 264060
  misc_feature (380)..(380): n is a, c, g, or t
  misc_feature (643)..(807): n is a, c, g, or t

SEQ ID NO: 280096 - DNA, 400 bp, Homo Sapiens; identical to SEQ ID NO: 264066
  misc_feature (379)..(379): n is a, c, g, or t

SEQ ID NO: 280097 - DNA, 564 bp, Homo Sapiens; identical to SEQ ID NO: 264067
  misc_feature (15)..(15): n is a, c, g, or t

SEQ ID NO: 280098 - DNA, 463 bp, Homo Sapiens; identical to SEQ ID NO: 264092

SEQ ID NO: 280099 - DNA, 473 bp, Homo Sapiens; identical to SEQ ID NO: 264093

SEQ ID NO: 280100 - DNA, 483 bp, Homo Sapiens; identical to SEQ ID NO: 264099
  misc_feature (104)..(104): n is a, c, g, or t

SEQ ID NO: 280101 - DNA, 585 bp, Homo Sapiens; identical to SEQ ID NO: 264100

SEQ ID NO: 280102 - DNA, 520 bp, Homo Sapiens; identical to SEQ ID NO: 264133
  misc_feature (65)..(65): n is a, c, g, or t

SEQ ID NO: 280103 - DNA, 483 bp, Homo Sapiens; identical to SEQ ID NO: 264134
  misc_feature (49)..(49): n is a, c, g, or t
  misc_feature (64)..(64): n is a, c, g, or t
  misc_feature (78)..(78): n is a, c, g, or t
  misc_feature (88)..(88): n is a, c, g, or t

SEQ ID NO: 280104 - DNA, 1042 bp, Homo Sapiens; identical to SEQ ID NO: 264140
  misc_feature (187)..(187): n is a, c, g, or t
  misc_feature (189)..(189): n is a, c, g, or t
  misc_feature (198)..(198): n is a, c, g, or t
  misc_feature (217)..(217): n is a, c, g, or t
  misc_feature (490)..(492): n is a, c, g, or t
  misc_feature (495)..(630): n is a, c, g, or t
  misc_feature (642)..(712): n is a, c, g, or t
  misc_feature (745)..(800): n is a, c, g, or t
  misc_feature (824)..(873): n is a, c, g, or t

SEQ ID NO: 280105 - DNA, 909 bp, Homo Sapiens; identical to SEQ ID NO: 264141
  misc_feature (216)..(216): n is a, c, g, or t

SEQ ID NO: 280106 - DNA, 965 bp, Homo Sapiens; identical to SEQ ID NO: 264161
  misc_feature (242)..(274): n is a, c, g, or t
  misc_feature (502)..(625): n is a, c, g, or t
  misc_feature (631)..(647): n is a, c, g, or t
  misc_feature (654)..(672): n is a, c, g, or t
  misc_feature (686)..(766): n is a, c, g, or t
  misc_feature (867)..(877): n is a, c, g, or t

SEQ ID NO: 280107 - DNA, 525 bp, Homo Sapiens; identical to SEQ ID NO: 264162

SEQ ID NO: 280108 - DNA, 413 bp, Homo Sapiens; identical to SEQ ID NO: 264170

SEQ ID NO: 280109 - DNA, 955 bp, Homo Sapiens; identical to SEQ ID NO: 264171

SEQ ID NO: 280110 - DNA, 467 bp, Homo Sapiens; identical to SEQ ID NO: 264172
  misc_feature (15)..(15): n is a, c, g, or t
  misc_feature (42)..(42): n is a, c, g, or t
  misc_feature (89)..(89): n is a, c, g, or t

SEQ ID NO: 280111 - DNA, 631 bp, Homo Sapiens; identical to SEQ ID NO: 264216
  misc_feature (65)..(65): n is a, c, g, or t

SEQ ID NO: 280112 - DNA, 399 bp, Homo Sapiens; identical to SEQ ID NO: 264217

SEQ ID NO: 280113 - DNA, 1022 bp, Homo Sapiens; identical to SEQ ID NO: 264251
  misc_feature (49)..(49): n is a, c, g, or t
  misc_feature (193)..(204): n is a, c, g, or t
  misc_feature (221)..(283): n is a, c, g, or t
  misc_feature (349)..(465): n is a, c, g, or t

SEQ ID NO: 280114 - DNA, 762 bp, Homo Sapiens; identical to SEQ ID NO: 264252
  misc_feature (194)..(205): n is a, c, g, or t
  misc_feature (222)..(284): n is a, c, g, or t
  misc_feature (350)..(466): n is a, c, g, or t

SEQ ID NO: 280115 - DNA, 686 bp, Homo Sapiens; identical to SEQ ID NO: 264258

SEQ ID NO: 280116 - DNA, 428 bp, Homo Sapiens; identical to SEQ ID NO: 264259
  misc_feature (15)..(15): n is a, c, g, or t
  misc_feature (30)..(30): n is a, c, g, or t
  misc_feature (46)..(46): n is a, c, g, or t
  misc_feature (376)..(376): n is a, c, g, or t

SEQ ID NO: 280117 - DNA, 467 bp, Homo Sapiens; identical to SEQ ID NO: 264307

SEQ ID NO: 280118 - DNA, 805 bp, Homo Sapiens; identical to SEQ ID NO: 264308
  misc_feature (123)..(228): n is a, c, g, or t
  misc_feature (723)..(756): n is a, c, g, or t

SEQ ID NO: 280119 - DNA, 773 bp, Homo Sapiens; identical to SEQ ID NO: 264309
  misc_feature (33)..(33): n is a, c, g, or t
  misc_feature (518)..(623): n is a, c, g, or t
  misc_feature (735)..(735): n is a, c, g, or t
  misc_feature (745)..(745): n is a, c, g, or t

SEQ ID NO: 280120 - DNA, 1256 bp, Homo Sapiens; identical to SEQ ID NO: 264318

SEQ ID NO: 280121 - DNA, 411 bp, Homo Sapiens; identical to SEQ ID NO: 264319
  misc_feature (74)..(74): n is a, c, g, or t
  misc_feature (300)..(300): n is a, c, g, or t
  misc_feature (352)..(352): n is a, c, g, or t
  misc_feature (366)..(366): n is a, c, g, or t

SEQ ID NO: 280122 - DNA, 529 bp, Homo Sapiens; identical to SEQ ID NO: 264320
  misc_feature (369)..(369): n is a, c, g, or t
  misc_feature (375)..(375): n is a, c, g, or t
  misc_feature (439)..(439): n is a, c, g, or t
  misc_feature (459)..(459): n is a, c, g, or t
  misc_feature (464)..(464): n is a, c, g, or t
  misc_feature (484)..(484): n is a, c, g, or t
  misc_feature (508)..(508): n is a, c, g, or t
  misc_feature (513)..(513): n is a, c, g, or t

SEQ ID NO: 280123 - DNA, 1311 bp, Homo Sapiens; identical to SEQ ID NO: 264346
  misc_feature (1295)..(1295): n is a, c, g, or t

SEQ ID NO: 280124 - DNA, 344 bp, Homo Sapiens; identical to SEQ ID NO: 264347
  misc_feature (91)..(197): n is a, c, g, or t

SEQ ID NO: 280125 - DNA, 1105 bp, Homo Sapiens; identical to SEQ ID NO: 264354
  misc_feature (230)..(250): n is a, c, g, or t
  misc_feature (1051)..(1065): n is a, c, g, or t

SEQ ID NO: 280126 - DNA, 613 bp, Homo Sapiens; identical to SEQ ID NO: 264355
  misc_feature (11)..(11): n is a, c, g, or t
  misc_feature (33)..(33): n is a, c, g, or t
  misc_feature (50)..(50): n is a, c, g, or t
  misc_feature (61)..(61): n is a, c, g, or t
  misc_feature (76)..(76): n is a, c, g, or t
  misc_feature (252)..(252): n is a, c, g, or t

SEQ ID NO: 280127 - DNA, 850 bp, Homo Sapiens; identical to SEQ ID NO: 264400
  misc_feature (760)..(768): n is a, c, g, or t
  misc_feature (825)..(825): n is a, c, g, or t
  misc_feature (833)..(833): n is a, c, g, or t

SEQ ID NO: 280128 - DNA, 429 bp, Homo Sapiens; identical to SEQ ID NO: 264401
  misc_feature (227)..(227): n is a, c, g, or t
  misc_feature (247)..(247): n is a, c, g, or t
  misc_feature (324)..(324): n is a, c, g, or t
  misc_feature (370)..(370): n is a, c, g, or t
  misc_feature (391)..(391): n is a, c, g, or t
  misc_feature (400)..(400): n is a, c, g, or t
  misc_feature (419)..(419): n is a, c, g, or t

SEQ ID NO: 280129 - DNA, 570 bp, Homo Sapiens; identical to SEQ ID NO: 264402
  misc_feature (301)..(301): n is a, c, g, or t
  misc_feature (308)..(313): n is a, c, g, or t

SEQ ID NO: 280130 - DNA, 497 bp, Homo Sapiens; identical to SEQ ID NO: 264403

SEQ ID NO: 280131 - DNA, 467 bp, Homo Sapiens; identical to SEQ ID NO: 264411
  misc_feature (41)..(41): n is a, c, g, or t
  misc_feature (43)..(43): n is a, c, g, or t

SEQ ID NO: 280132 - DNA, 611 bp, Homo Sapiens; identical to SEQ ID NO: 264412
  misc_feature (24)..(24): n is a, c, g, or t

SEQ ID NO: 280133 - DNA, 883 bp, Homo Sapiens; identical to SEQ ID NO: 264423
  misc_feature (11)..(11): n is a, c, g, or t
  misc_feature (22)..(22): n is a, c, g, or t
  misc_feature (608)..(670): n is a, c, g, or t
  misc_feature (678)..(759): n is a, c, g, or t

SEQ ID NO: 280134 - DNA, 555 bp, Homo Sapiens; identical to SEQ ID NO: 264424
  misc_feature (510)..(510): n is a, c, g, or t
  misc_feature (520)..(520): n is a, c, g, or t

SEQ ID NO: 280135 - DNA, 884 bp, Homo Sapiens; identical to SEQ ID NO: 264434

SEQ ID NO: 280136 - DNA, 308 bp, Homo Sapiens; identical to SEQ ID NO: 264435

SEQ ID NO: 280137 - DNA, 594 bp, Homo Sapiens; identical to SEQ ID NO: 264485

SEQ ID NO: 280138 - DNA, 430 bp, Homo Sapiens; identical to SEQ ID NO: 264486

SEQ ID NO: 280139 - DNA, 1127 bp, Homo Sapiens; identical to SEQ ID NO: 264491

SEQ ID NO: 280140 - DNA, 706 bp, Homo Sapiens; identical to SEQ ID NO: 264492
  misc_feature (196)..(239): n is a, c, g, or t

SEQ ID NO: 280141 - DNA, 607 bp, Homo Sapiens; identical to SEQ ID NO: 264495

SEQ ID NO: 280142 - DNA, 400 bp, Homo Sapiens; identical to SEQ ID NO: 264496

SEQ ID NO: 280143 - DNA, 897 bp, Homo Sapiens; identical to SEQ ID NO: 264542
  misc_feature (147)..(147): n is a, c, g, or t

SEQ ID NO: 280144 - DNA, 448 bp, Homo Sapiens; identical to SEQ ID NO: 264543
  misc_feature (282)..(282): n is a, c, g, or t
  misc_feature (326)..(326): n is a, c, g, or t
  misc_feature (395)..(395): n is a, c, g, or t

SEQ ID NO: 280145 - DNA, 729 bp, Homo Sapiens; identical to SEQ ID NO: 264675

SEQ ID NO: 280146 - DNA, 725 bp, Homo Sapiens; identical to SEQ ID NO: 264676
  misc_feature (44)..(44): n is a, c, g, or t
  misc_feature (47)..(47): n is a, c, g, or t
  misc_feature (49)..(49): n is a, c, g, or t
  misc_feature (93)..(93): n is a, c, g, or t
  misc_feature (96)..(96): n is a, c, g, or t
  misc_feature (117)..(117): n is a, c, g, or t
  misc_feature (131)..(131): n is a, c, g, or t

SEQ ID NO: 280147 - DNA, 485 bp, Homo Sapiens; identical to SEQ ID NO: 264696

SEQ ID NO: 280148 - DNA, 443 bp, Homo Sapiens; identical to SEQ ID NO: 264697
  misc_feature (210)..(210): n is a, c, g, or t
  misc_feature (252)..(252): n is a, c, g, or t

SEQ ID NO: 280149 - DNA, 333 bp, Homo Sapiens; identical to SEQ ID NO: 264727

SEQ ID NO: 280150 - DNA, 412 bp, Homo Sapiens; identical to SEQ ID NO: 264728
  misc_feature (345)..(345): n is a, c, g, or t
  misc_feature (379)..(379): n is a, c, g, or t

SEQ ID NO: 280151 - DNA, 588 bp, Homo Sapiens; identical to SEQ ID NO: 264736

SEQ ID NO: 280152 - DNA, 592 bp, Homo Sapiens; identical to SEQ ID NO: 264737

SEQ ID NO: 280153 - DNA, 384 bp, Homo Sapiens; identical to SEQ ID NO: 264738

SEQ ID NO: 280154 - DNA, 440 bp, Homo Sapiens; identical to SEQ ID NO: 264743

SEQ ID NO: 280155 - DNA, 967 bp, Homo Sapiens; identical to SEQ ID NO: 264744
  misc_feature (824)..(833): n is a, c, g, or t

SEQ ID NO: 280156 - DNA, 724 bp, Homo Sapiens; identical to SEQ ID NO: 264794
  misc_feature (188)..(415): n is a, c, g, or t

SEQ ID NO: 280157 - DNA, 1611 bp, Homo Sapiens; identical to SEQ ID NO: 264795
  misc_feature (973)..(973): n is a, c, g, or t
  misc_feature (982)..(982): n is a, c, g, or t
  misc_feature (1025)..(1049): n is a, c, g, or t

SEQ ID NO: 280158 - DNA, 676 bp, Homo Sapiens; identical to SEQ ID NO: 264810

SEQ ID NO: 280159 - DNA, 576 bp, Homo Sapiens; identical to SEQ ID NO: 264811
  misc_feature (50)..(50): n is a, c, g, or t
  misc_feature (54)..(54): n is a, c, g, or t
  misc_feature (58)..(58): n is a, c, g, or t
  misc_feature (80)..(81): n is a, c, g, or t
  misc_feature (429)..(429): n is a, c, g, or t

SEQ ID NO: 280160 - DNA, 1108 bp, Homo Sapiens; identical to SEQ ID NO: 264874

SEQ ID NO: 280161 - DNA, 441 bp, Homo Sapiens; identical to SEQ ID NO: 264875
  misc_feature (263)..(263): n is a, c, g, or t
  misc_feature (351)..(351): n is a, c, g, or t
  misc_feature (373)..(373): n is a, c, g, or t
  misc_feature (416)..(416): n is a, c, g, or t

SEQ ID NO: 280162 - DNA, 968 bp, Homo Sapiens; identical to SEQ ID NO: 264894
  misc_feature (494)..(505): n is a, c, g, or t
  misc_feature (947)..(947): n is a, c, g, or t

SEQ ID NO: 280163 - DNA, 731 bp, Homo Sapiens; identical to SEQ ID NO: 264895
  misc_feature (567)..(593): n is a, c, g, or t

SEQ ID NO: 280164 - DNA, 1642 bp, Homo Sapiens; identical to SEQ ID NO: 264907

SEQ ID NO: 280165 - DNA, 444 bp, Homo Sapiens; identical to SEQ ID NO: 264908
  misc_feature (34)..(34): n is a, c, g, or t
  misc_feature (50)..(50): n is a, c, g, or t

SEQ ID NO: 280166 - DNA, 1028 bp, Homo Sapiens; identical to SEQ ID NO: 264926
  misc_feature (79)..(87): n is a, c, g, or t
  misc_feature (505)..(505): n is a, c, g, or t
  misc_feature (521)..(521): n is a, c, g, or t

SEQ ID NO: 280167 - DNA, 686 bp, Homo Sapiens; identical to SEQ ID NO: 264927
  misc_feature (189)..(313): n is a, c, g, or t
  misc_feature (447)..(455): n is a, c, g, or t

SEQ ID NO: 280168 - DNA, 650 bp, Homo Sapiens; identical to SEQ ID NO: 264959
  misc_feature (295)..(307): n is a, c, g, or t

SEQ ID NO: 280169 - DNA, 600 bp, Homo Sapiens; identical to SEQ ID NO: 264960

SEQ ID NO: 280170 - DNA, 873 bp, Homo Sapiens; identical to SEQ ID NO: 264974
  misc_feature (105)..(113): n is a, c, g, or t
  misc_feature (598)..(638): n is a, c, g, or t
  misc_feature (645)..(645): n is a, c, g, or t

SEQ ID NO: 280171 - DNA, 437 bp, Homo Sapiens; identical to SEQ ID NO: 264975
  misc_feature (80)..(80): n is a, c, g, or t
  misc_feature (164)..(211): n is a, c, g, or t

SEQ ID NO: 280172 - DNA, 789 bp, Homo Sapiens; identical to SEQ ID NO: 264992

SEQ ID NO: 280173 - DNA, 424 bp, Homo Sapiens; identical to SEQ ID NO: 264993
  misc_feature (365)..(365): n is a, c, g, or t

SEQ ID NO: 280174 - DNA, 474 bp, Homo Sapiens; identical to SEQ ID NO: 264994
  misc_feature (22)..(22): n is a, c, g, or t
  misc_feature (210)..(210): n is a, c, g, or t
  misc_feature (337)..(337): n is a, c, g, or t
  misc_feature (431)..(431): n is a, c, g, or t

SEQ ID NO: 280175 - DNA, 413 bp, Homo Sapiens; identical to SEQ ID NO: 264995

SEQ ID NO: 280176 - DNA, 892 bp, Homo Sapiens; identical to SEQ ID NO: 264997
  misc_feature (504)..(504): n is a, c, g, or t

SEQ ID NO: 280177 - DNA, 340 bp, Homo Sapiens; identical to SEQ ID NO: 264998

SEQ ID NO: 280178 - DNA, 867 bp, Homo Sapiens; identical to SEQ ID NO: 265003

SEQ ID NO: 280179 - DNA, 549 bp, Homo Sapiens; identical to SEQ ID NO: 265004
  misc_feature (60)..(60): n is a, c, g, or t
  misc_feature (198)..(198): n is a, c, g, or t
  misc_feature (202)..(202): n is a, c, g, or t
  misc_feature (213)..(213): n is a, c, g, or t
  misc_feature (234)..(234): n is a, c, g, or t
  misc_feature (352)..(352): n is a, c, g, or t

SEQ ID NO: 280180 - DNA, 426 bp, Homo Sapiens; identical to SEQ ID NO: 265009
  misc_feature (14)..(14): n is a, c, g, or t
  misc_feature (29)..(29): n is a, c, g, or t
  misc_feature (54)..(54): n is a, c, g, or t
  misc_feature (69)..(69): n is a, c, g, or t

SEQ ID NO: 280181 - DNA, 955 bp, Homo Sapiens; identical to SEQ ID NO: 265010
  misc_feature (935)..(935): n is a, c, g, or t

SEQ ID NO: 280182 - DNA, 829 bp, Homo Sapiens; identical to SEQ ID NO: 265014
  misc_feature (646)..(736): n is a, c, g, or t
  misc_feature (738)..(772): n is a, c, g, or t

SEQ ID NO: 280183 - DNA, 417 bp, Homo Sapiens; identical to SEQ ID NO: 265015
  misc_feature (48)..(78): n is a, c, g, or t
  misc_feature (80)..(170): n is a, c, g, or t
  misc_feature (263)..(263): n is a, c, g, or t

SEQ ID NO: 280184 - DNA, 1497 bp, Homo Sapiens; identical to SEQ ID NO: 265031
  misc_feature (349)..(349): n is a, c, g, or t

SEQ ID NO: 280185 - DNA, 416 bp, Homo Sapiens; identical to SEQ ID NO: 265032
  misc_feature (351)..(351): n is a, c, g, or t
  misc_feature (357)..(357): n is a, c, g, or t

SEQ ID NO: 280186 - DNA, 407 bp, Homo Sapiens; identical to SEQ ID NO: 265036
  misc_feature (84)..(174): n is a, c, g, or t
  misc_feature (359)..(359): n is a, c, g, or t

SEQ ID NO: 280187 - DNA, 413 bp, Homo Sapiens; identical to SEQ ID NO: 265037
  misc_feature (60)..(60): n is a, c, g, or t
  misc_feature (88)..(88): n is a, c, g, or t
  misc_feature (107)..(107): n is a, c, g, or t
  misc_feature (140)..(140): n is a, c, g, or t
  misc_feature (148)..(148): n is a, c, g, or t
  misc_feature (365)..(365): n is a, c, g, or t

SEQ ID NO: 280188 - DNA, 609 bp, Homo Sapiens; identical to SEQ ID NO: 265080

SEQ ID NO: 280189 - DNA, 476 bp, Homo Sapiens; identical to SEQ ID NO: 265081
  misc_feature (373)..(373): n is a, c, g, or t
  misc_feature (439)..(439): n is a, c, g, or t
  misc_feature (448)..(448): n is a, c, g, or t

SEQ ID NO: 280190 - DNA, 990 bp, Homo Sapiens; identical to SEQ ID NO: 265115
  misc_feature (224)..(298): n is a, c, g, or t

SEQ ID NO: 280191 - DNA, 502 bp, Homo Sapiens; identical to SEQ ID NO: 265116
  misc_feature (138)..(157): n is a, c, g, or t

SEQ ID NO: 280192 - DNA, 480 bp, Homo Sapiens; identical to SEQ ID NO: 265121

SEQ ID NO: 280193 - DNA, 550 bp, Homo Sapiens; identical to SEQ ID NO: 265122
  misc_feature (38)..(38): n is a, c, g, or t
  misc_feature (50)..(50): n is a, c, g, or t
  misc_feature (55)..(55): n is a, c, g, or t
  misc_feature (73)..(73): n is a, c, g, or t
  misc_feature (92)..(92): n is a, c, g, or t
  misc_feature (124)..(124): n is a, c, g, or t
  misc_feature (166)..(166): n is a, c, g, or t

SEQ ID NO: 280194 - DNA, 379 bp, Homo Sapiens; identical to SEQ ID NO: 265129

SEQ ID NO: 280195 - DNA, 488 bp, Homo Sapiens; identical to SEQ ID NO: 265130

SEQ ID NO: 280196 - DNA, 338 bp, Homo Sapiens; identical to SEQ ID NO: 265131
  misc_feature (51)..(51): n is a, c, g, or t

SEQ ID NO: 280197 - DNA, 769 bp, Homo Sapiens; identical to SEQ ID NO: 265135
  misc_feature (541)..(554): n is a, c, g, or t

SEQ ID NO: 280198 - DNA, 435 bp, Homo Sapiens; identical to SEQ ID NO: 265136
  misc_feature (13)..(13): n is a, c, g, or t
  misc_feature (21)..(21): n is a, c, g, or t
  misc_feature (38)..(38): n is a, c, g, or t
  misc_feature (45)..(45): n is a, c, g, or t
  misc_feature (93)..(93): n is a, c, g, or t

SEQ ID NO: 280199 - DNA, 463 bp, Homo Sapiens; identical to SEQ ID NO: 265142

SEQ ID NO: 280200 - DNA, 673 bp, Homo Sapiens; identical to SEQ ID NO: 265143
  misc_feature (614)..(614): n is a, c, g, or t
  misc_feature (634)..(634): n is a, c, g, or t

SEQ ID NO: 280201 - DNA, 443 bp, Homo Sapiens; identical to SEQ ID NO: 265151
  misc_feature (22)..(22): n is a, c, g, or t
  misc_feature (31)..(31): n is a, c, g, or t
  misc_feature (51)..(51): n is a, c, g, or t
  misc_feature (115)..(115): n is a, c, g, or t
  misc_feature (160)..(160): n is a, c, g, or t
  misc_feature (298)..(298): n is a, c, g, or t

SEQ ID NO: 280202 - DNA, 731 bp, Homo Sapiens; identical to SEQ ID NO: 265152

SEQ ID NO: 280203 - DNA, 570 bp, Homo Sapiens; identical to SEQ ID NO: 265157
  misc_feature (16)..(16): n is a, c, g, or t
  misc_feature (114)..(114): n is a, c, g, or t

SEQ ID NO: 280204 - DNA, 640 bp, Homo Sapiens; identical to SEQ ID NO: 265158
  misc_feature (43)..(43): n is a, c, g, or t

SEQ ID NO: 280205 - DNA, 690 bp, Homo Sapiens; identical to SEQ ID NO: 265159

SEQ ID NO: 280206 - DNA, 394 bp, Homo Sapiens; identical to SEQ ID NO: 265166
  misc_feature (15)..(15): n is a, c, g, or t
  misc_feature (41)..(41): n is a, c, g, or t

SEQ ID NO: 280207 - DNA, 403 bp, Homo Sapiens; identical to SEQ ID NO: 265167

SEQ ID NO: 280208 - DNA, 778 bp, Homo Sapiens; identical to SEQ ID NO: 265169

SEQ ID NO: 280209 - DNA, 475 bp, Homo Sapiens; identical to SEQ ID NO: 265170
  misc_feature (326)..(326): n is a, c, g, or t
  misc_feature (356)..(356): n is a, c, g, or t
  misc_feature (372)..(372): n is a, c, g, or t
  misc_feature (376)..(376): n is a, c, g, or t
  misc_feature (407)..(407): n is a, c, g, or t
  misc_feature (463)..(463): n is a, c, g, or t

SEQ ID NO: 280210 - DNA, 683 bp, Homo Sapiens; identical to SEQ ID NO: 265173

SEQ ID NO: 280211 - DNA, 567 bp, Homo Sapiens; identical to SEQ ID NO: 265174
  misc_feature (397)..(405): n is a, c, g, or t
  misc_feature (425)..(425): n is a, c, g, or t
  misc_feature (459)..(459): n is a, c, g, or t
  misc_feature (476)..(476): n is a, c, g, or t
  misc_feature (510)..(510): n is a, c, g, or t
  misc_feature (516)..(516): n is a, c, g, or t
  misc_feature (541)..(541): n is a, c, g, or t
  misc_feature (554)..(554): n is a, c, g, or t

SEQ ID NO: 280212 - DNA, 415 bp, Homo Sapiens; identical to SEQ ID NO: 265175
  misc_feature (19)..(19): n is a, c, g, or t
  misc_feature (33)..(33): n is a, c, g, or t
  misc_feature (39)..(39): n is a, c, g, or t
  misc_feature (46)..(46): n is a, c, g, or t
  misc_feature (55)..(55): n is a, c, g, or t
  misc_feature (66)..(66): n is a, c, g, or t
  misc_feature (71)..(71): n is a, c, g, or t

SEQ ID NO: 280213 - DNA, 437 bp, Homo Sapiens; identical to SEQ ID NO: 265176
  misc_feature (153)..(153): n is a, c, g, or t
  misc_feature (338)..(338): n is a, c, g, or t

SEQ ID NO: 280214 - DNA, 923 bp, Homo Sapiens; identical to SEQ ID NO: 265177

SEQ ID NO: 280215 - DNA, 531 bp, Homo Sapiens; identical to SEQ ID NO: 265180

SEQ ID NO: 280216 - DNA, 404 bp, Homo Sapiens; identical to SEQ ID NO: 265181
  misc_feature (162)..(162): n is a, c, g, or t

SEQ ID NO: 280217 - DNA, 477 bp, Homo Sapiens; identical to SEQ ID NO: 265183
  misc_feature (77)..(77): n is a, c, g, or t
  misc_feature (110)..(110): n is a, c, g, or t
  misc_feature (117)..(117): n is a, c, g, or t
  misc_feature (256)..(256): n is a, c, g, or t

SEQ ID NO: 280218 - DNA, 430 bp, Homo Sapiens; identical to SEQ ID NO: 265184
  misc_feature (79)..(79): n is a, c, g, or t
  misc_feature (236)..(236): n is a, c, g, or t
  misc_feature (282)..(282): n is a, c, g, or t
  misc_feature (326)..(326): n is a, c, g, or t
  misc_feature (396)..(396): n is a, c, g, or t

SEQ ID NO: 280219 - DNA, 501 bp, Homo Sapiens; identical to SEQ ID NO: 265190
  misc_feature (24)..(24): n is a, c, g, or t
  misc_feature (371)..(371): n is a, c, g, or t
  misc_feature (419)..(419): n is a, c, g, or t
  misc_feature (438)..(438): n is a, c, g, or t
  misc_feature (477)..(477): n is a, c, g, or t
  misc_feature (491)..(491): n is a, c, g, or t

SEQ ID NO: 280220 - DNA, 808 bp, Homo Sapiens; identical to SEQ ID NO: 265191
  misc_feature (85)..(85): n is a, c, g, or t
  misc_feature (176)..(177): n is a, c, g, or t
  misc_feature (737)..(737): n is a, c, g, or t
  misc_feature (739)..(739): n is a, c, g, or t
  misc_feature (757)..(757): n is a, c, g, or t

SEQ ID NO: 280221 - DNA, 423 bp, Homo Sapiens; identical to SEQ ID NO: 265193
  misc_feature (402)..(402): n is a, c, g, or t

SEQ ID NO: 280222 - DNA, 759 bp, Homo Sapiens; identical to SEQ ID NO: 265194

SEQ ID NO: 280223 - DNA, 656 bp, Homo Sapiens; identical to SEQ ID NO: 265211
  misc_feature (42)..(85): n is a, c, g, or t
  misc_feature (377)..(386): n is a, c, g, or t
  misc_feature (534)..(566): n is a, c, g, or t
  misc_feature (622)..(622): n is a, c, g, or t

SEQ ID NO: 280224 - DNA, 414 bp, Homo Sapiens; identical to SEQ ID NO: 265212

SEQ ID NO: 280225 - DNA, 562 bp, Homo Sapiens; identical to SEQ ID NO: 265219
  misc_feature (146)..(146): n is a, c, g, or t

SEQ ID NO: 280226 - DNA, 422 bp, Homo Sapiens; identical to SEQ ID NO: 265220
  misc_feature (142)..(142): n is a, c, g, or t
  misc_feature (370)..(370): n is a, c, g, or t

SEQ ID NO: 280227 - DNA, 477 bp, Homo Sapiens; identical to SEQ ID NO: 265221

SEQ ID NO: 280228 - DNA, 356 bp, Homo Sapiens; identical to SEQ ID NO: 265232
  misc_feature (34)..(34): n is a, c, g, or t
  misc_feature (71)..(71): n is a, c, g, or t
  misc_feature (243)..(243): n is a, c, g, or t
  misc_feature (317)..(317): n is a, c, g, or t

SEQ ID NO: 280229 - DNA, 533 bp, Homo Sapiens; identical to SEQ ID NO: 265233
  misc_feature (251)..(251): n is a, c, g, or t
  misc_feature (267)..(267): n is a, c, g, or t
  misc_feature (356)..(356): n is a, c, g, or t
  misc_feature (381)..(381): n is a, c, g, or t
  misc_feature (389)..(389): n is a, c, g, or t
  misc_feature (439)..(439): n is a, c, g, or t
  misc_feature (472)..(472): n is a, c, g, or t
  misc_feature (484)..(484): n is a, c, g, or t
  misc_feature (509)..(509): n is a, c, g, or t
  misc_feature (518)..(518): n is a, c, g, or t

SEQ ID NO: 280230 - DNA, 1197 bp, Homo Sapiens; identical to SEQ ID NO: 265246
  misc_feature (173)..(173): n is a, c, g, or t
  misc_feature (1139)..(1139): n is a, c, g, or t
  misc_feature (1156)..(1156): n is a, c, g, or t
  misc_feature (1172)..(1172): n is a, c, g, or t
  misc_feature (1177)..(1177): n is a, c, g, or t

SEQ ID NO: 280231 - DNA, 564 bp, Homo Sapiens; identical to SEQ ID NO: 265247
  misc_feature (54)..(54): n is a, c, g, or t
  misc_feature (61)..(61): n is a, c, g, or t
  misc_feature (83)..(83): n is a, c, g, or t
  misc_feature (89)..(89): n is a, c, g, or t
  misc_feature (530)..(530): n is a, c, g, or t
  misc_feature (539)..(539): n is a, c, g, or t
  misc_feature (552)..(552): n is a, c, g, or t

SEQ ID NO: 280232 - DNA, 427 bp, Homo Sapiens; identical to SEQ ID NO: 265248
  misc_feature (12)..(12): n is a, c, g, or t
  misc_feature (30)..(30): n is a, c, g, or t
  misc_feature (48)..(48): n is a, c, g, or t
  misc_feature (112)..(112): n is a, c, g, or t
  misc_feature (187)..(187): n is a, c, g, or t
  misc_feature (260)..(296): n is a, c, g, or t
  misc_feature (298)..(298): n is a, c, g, or t
  misc_feature (363)..(376): n is a, c, g, or t

SEQ ID NO: 280233 - DNA, 538 bp, Homo Sapiens; identical to SEQ ID NO: 265249
  misc_feature (436)..(476): n is a, c, g, or t

SEQ ID NO: 280234 - DNA, 383 bp, Homo Sapiens; identical to SEQ ID NO: 265254
  misc_feature (292)..(292): n is a, c, g, or t
  misc_feature (325)..(325): n is a, c, g, or t
  misc_feature (350)..(350): n is a, c, g, or t
  misc_feature (359)..(359): n is a, c, g, or t

SEQ ID NO: 280235 - DNA, 516 bp, Homo Sapiens; identical to SEQ ID NO: 265255

SEQ ID NO: 280236 - DNA, 387 bp, Homo Sapiens; identical to SEQ ID NO: 265280
  misc_feature (29)..(29): n is a, c, g, or t
  misc_feature (42)..(42): n is a, c, g, or t
  misc_feature (46)..(46): n is a, c, g, or t
  misc_feature (51)..(51): n is a, c, g, or t
  misc_feature (64)..(64): n is a, c, g, or t
  misc_feature (71)..(71): n is a, c, g, or t
  misc_feature (74)..(74): n is a, c, g, or t
  misc_feature (78)..(80): n is a, c, g, or t

SEQ ID NO: 280237 - DNA, 484 bp, Homo Sapiens; identical to SEQ ID NO: 265281
  misc_feature (247)..(340): n is a, c, g, or t
  misc_feature (396)..(396): n is a, c, g, or t
  misc_feature (465)..(465): n is a, c, g, or t

SEQ ID NO: 280238 - DNA, 691 bp, Homo Sapiens; identical to SEQ ID NO: 265282
  misc_feature (28)..(28): n is a, c, g, or t
  misc_feature (35)..(35): n is a, c, g, or t
  misc_feature (87)..(87): n is a, c, g, or t
  misc_feature (92)..(92): n is a, c, g, or t
  misc_feature (346)..(439): n is a, c, g, or t

SEQ ID NO: 280239 - DNA, 405 bp, Homo Sapiens; identical to SEQ ID NO: 265300

SEQ ID NO: 280240 - DNA, 756 bp, Homo Sapiens; identical to SEQ ID NO: 265301
  misc_feature (454)..(454): n is a, c, g, or t
  misc_feature (461)..(461): n is a, c, g, or t

SEQ ID NO: 280241 - DNA, 566 bp, Homo Sapiens; identical to SEQ ID NO: 265309
  misc_feature (20)..(20): n is a, c, g, or t
  misc_feature (26)..(26): n is a, c, g, or t
  misc_feature (39)..(39): n is a, c, g, or t
  misc_feature (51)..(51): n is a, c, g, or t
  misc_feature (61)..(61): n is a, c, g, or t
  misc_feature (85)..(85): n is a, c, g, or t
  misc_feature (379)..(438): n is a, c, g, or t

SEQ ID NO: 280242 - DNA, 421 bp, Homo Sapiens; identical to SEQ ID NO: 265310
  misc_feature (111)..(111): n is a, c, g, or t

SEQ ID NO: 280243 - DNA, 479 bp, Homo Sapiens; identical to SEQ ID NO: 265311
  misc_feature (72)..(72): n is a, c, g, or t
  misc_feature (174)..(174): n is a, c, g, or t
  misc_feature (182)..(182): n is a, c, g, or t
  misc_feature (289)..(289): n is a, c, g, or t
  misc_feature (297)..(347): n is a, c, g, or t
  misc_feature (369)..(369): n is a, c, g, or t

SEQ ID NO: 280244 - DNA, 392 bp, Homo Sapiens; identical to SEQ ID NO: 265326
  misc_feature (98)..(98): n is a, c, g, or t

SEQ ID NO: 280245 - DNA, 557 bp, Homo Sapiens; identical to SEQ ID NO: 265327

SEQ ID NO: 280246 - DNA, 565 bp, Homo Sapiens; identical to SEQ ID NO: 265330
  misc_feature (353)..(353): n is a, c, g, or t
  misc_feature (366)..(366): n is a, c, g, or t
  misc_feature (370)..(370): n is a, c, g, or t
  misc_feature (372)..(372): n is a, c, g, or t
  misc_feature (383)..(383): n is a, c, g, or t
  misc_feature (408)..(410): n is a, c, g, or t
  misc_feature (418)..(418): n is a, c, g, or t
  misc_feature (440)..(440): n is a, c, g, or t
  misc_feature (447)..(447): n is a, c, g, or t
  misc_feature (467)..(467): n is a, c, g, or t
  misc_feature (470)..(470): n is a, c, g, or t
  misc_feature (494)..(494): n is a, c, g, or t
  misc_feature (501)..(501): n is a, c, g, or t
  misc_feature (512)..(512): n is a, c, g, or t
  misc_feature (519)..(519): n is a, c, g, or t
  misc_feature (525)..(525): n is a, c, g, or t
  misc_feature (534)..(534): n is a, c, g, or t

SEQ ID NO: 280247 - DNA, 450 bp, Homo Sapiens; identical to SEQ ID NO: 265331
  misc_feature (394)..(394): n is a, c, g, or t
  misc_feature (423)..(423): n is a, c, g, or t
  misc_feature (432)..(432): n is a, c, g, or t

SEQ ID NO: 280248 - DNA, 474 bp, Homo Sapiens; identical to SEQ ID NO: 265346
  misc_feature (139)..(139): n is a, c, g, or t

SEQ ID NO: 280249 - DNA, 668 bp, Homo Sapiens; identical to SEQ ID NO: 265347
  misc_feature (267)..(267): n is a, c, g, or t

SEQ ID NO: 280250 - DNA, 466 bp, Homo Sapiens; identical to SEQ ID NO: 265348
  misc_feature (352)..(352): n is a, c, g, or t
  misc_feature (371)..(371): n is a, c, g, or t
  misc_feature (389)..(389): n is a, c, g, or t
  misc_feature (446)..(446): n is a, c, g, or t
  misc_feature (453)..(453): n is a, c, g, or t

SEQ ID NO: 280251 - DNA, 862 bp, Homo Sapiens; identical to SEQ ID NO: 265349
  misc_feature (223)..(223): n is a, c, g, or t
  misc_feature (259)..(259): n is a, c, g, or t
  misc_feature (266)..(266): n is a, c, g, or t
  misc_feature (272)..(272): n is a, c, g, or t
  misc_feature (278)..(278): n is a, c, g, or t
  misc_feature (284)..(284): n is a, c, g, or t

SEQ ID NO: 280252 - DNA, 416 bp, Homo Sapiens; identical to SEQ ID NO: 265384
  misc_feature (36)..(36): n is a, c, g, or t
  misc_feature (86)..(86): n is a, c, g, or t

SEQ ID NO: 280253 - DNA, 716 bp, Homo Sapiens; identical to SEQ ID NO: 265385

SEQ ID NO: 280254 - DNA, 307 bp, Homo Sapiens; identical to SEQ ID NO: 265400

SEQ ID NO: 280255 - DNA, 337 bp, Homo Sapiens; identical to SEQ ID NO: 265401
  misc_feature (223)..(223): n is a, c, g, or t

SEQ ID NO: 280256 - DNA, 406 bp, Homo Sapiens; identical to SEQ ID NO: 265411
  misc_feature (31)..(31): n is a, c, g, or t

SEQ ID NO: 280257 - DNA, 693 bp, Homo Sapiens; identical to SEQ ID NO: 265412

SEQ ID NO: 280258 - DNA, 463 bp, Homo Sapiens; identical to SEQ ID NO: 265427
  misc_feature (419)..(419): n is a, c, g, or t
  misc_feature (427)..(427): n is a, c, g, or t
  misc_feature (438)..(438): n is a, c, g, or t

SEQ ID NO: 280259 - DNA, 380 bp, Homo Sapiens; identical to SEQ ID NO: 265428
  misc_feature (47)..(47): n is a, c, g, or t

SEQ ID NO: 280260 - DNA, 528 bp, Homo Sapiens; identical to SEQ ID NO: 265429
  misc_feature (36)..(36): n is a, c, g, or t
  misc_feature (60)..(60): n is a, c, g, or t
  misc_feature (147)..(147): n is a, c, g, or t

SEQ ID NO: 280261 - DNA, 431 bp, Homo Sapiens; identical to SEQ ID NO: 265430
  misc_feature (406)..(406): n is a, c, g, or t
  misc_feature (414)..(414): n is a, c, g, or t

SEQ ID NO: 280262 - DNA, 806 bp, Homo Sapiens; identical to SEQ ID NO: 265435
  misc_feature (18)..(18): n is a, c, g, or t

SEQ ID NO: 280263 - DNA, 426 bp, Homo Sapiens; identical to SEQ ID NO: 265436
  misc_feature (33)..(33): n is a, c, g, or t
  misc_feature (47)..(47): n is a, c, g, or t
  misc_feature (63)..(71): n is a, c, g, or t
  misc_feature (91)..(91): n is a, c, g, or t
  misc_feature (109)..(109): n is a, c, g, or t
  misc_feature (116)..(116): n is a, c, g, or t

SEQ ID NO: 280264 - DNA, 896 bp, Homo Sapiens; identical to SEQ ID NO: 265441

SEQ ID NO: 280265 - DNA, 413 bp, Homo Sapiens; identical to SEQ ID NO: 265442
  misc_feature (17)..(17): n is a, c, g, or t
  misc_feature (65)..(65): n is a, c, g, or t

SEQ ID NO: 280266 - DNA, 854 bp, Homo Sapiens; identical to SEQ ID NO: 265443
  misc_feature (645)..(755): n is a, c, g, or t

SEQ ID NO: 280267 - DNA, 569 bp, Homo Sapiens; identical to SEQ ID NO: 265444
  misc_feature (274)..(274): n is a, c, g, or t
  misc_feature (313)..(313): n is a, c, g, or t
  misc_feature (371)..(371): n is a, c, g, or t
  misc_feature (443)..(443): n is a, c, g, or t
  misc_feature (457)..(457): n is a, c, g, or t
  misc_feature (473)..(473): n is a, c, g, or t
  misc_feature (493)..(493): n is a, c, g, or t
  misc_feature (500)..(500): n is a, c, g, or t
  misc_feature (510)..(510): n is a, c, g, or t
  misc_feature (518)..(518): n is a, c, g, or t
  misc_feature (535)..(535): n is a, c, g, or t
  misc_feature (546)..(546): n is a, c, g, or t
  misc_feature (555)..(555): n is a, c, g, or t

SEQ ID NO: 280268 - DNA, 727 bp, Homo Sapiens; identical to SEQ ID NO: 265446

SEQ ID NO: 280269 - DNA, 505 bp, Homo Sapiens; identical to SEQ ID NO: 265447
  misc_feature (16)..(16): n is a, c, g, or t
  misc_feature (35)..(35): n is a, c, g, or t

SEQ ID NO: 280270 - DNA, 700 bp, Homo Sapiens; identical to SEQ ID NO: 265487
  misc_feature (24)..(24): n is a, c, g, or t
  misc_feature (392)..(423): n is a, c, g, or t
  misc_feature (668)..(668): n is a, c, g, or t

SEQ ID NO: 280271 - DNA, 392 bp, Homo Sapiens; identical to SEQ ID NO: 265488
  misc_feature (28)..(28): n is a, c, g, or t
  misc_feature (38)..(38): n is a, c, g, or t
  misc_feature (45)..(45): n is a, c, g, or t
  misc_feature (356)..(356): n is a, c, g, or t

SEQ ID NO: 280272 - DNA, 507 bp, Homo Sapiens; identical to SEQ ID NO: 265499
  misc_feature (38)..(38): n is a, c, g, or t
  misc_feature (44)..(44): n is a, c, g, or t
  misc_feature (57)..(57): n is a, c, g, or t

SEQ ID NO: 280273 - DNA, 856 bp, Homo Sapiens; identical to SEQ ID NO: 265500
  misc_feature (415)..(415): n is a, c, g, or t

SEQ ID NO: 280274 - DNA, 529 bp, Homo Sapiens; identical to SEQ ID NO: 265502
  misc_feature (23)..(23): n is a, c, g, or t
  misc_feature (34)..(34): n is a, c, g, or t
  misc_feature (233)..(258): n is a, c, g, or t
  misc_feature (324)..(336): n is a, c, g, or t
  misc_feature (479)..(479): n is a, c, g, or t
  misc_feature (481)..(481): n is a, c, g, or t

SEQ ID NO: 280275 - DNA, 522 bp, Homo Sapiens; identical to SEQ ID NO: 265503
  misc_feature (265)..(290): n is a, c, g, or t

SEQ ID NO: 280276 - DNA, 738 bp, Homo Sapiens; identical to SEQ ID NO: 265534
  misc_feature (361)..(413): n is a, c, g, or t

SEQ ID NO: 280277 - DNA, 440 bp, Homo Sapiens; identical to SEQ ID NO: 265535
  misc_feature (35)..(35): n is a, c, g, or t

SEQ ID NO: 280278 - DNA, 373 bp, Homo Sapiens; identical to SEQ ID NO: 265536
  misc_feature (34)..(34): n is a, c, g, or t
  misc_feature (69)..(69): n is a, c, g, or t
  misc_feature (74)..(74): n is a, c, g, or t
  misc_feature (91)..(91): n is a, c, g, or t
  misc_feature (134)..(134): n is a, c, g, or t

SEQ ID NO: 280279 - DNA, 360 bp, Homo Sapiens; identical to SEQ ID NO: 265545
  misc_feature (85)..(85): n is a, c, g, or t

SEQ ID NO: 280280 - DNA, 897 bp, Homo Sapiens; identical to SEQ ID NO: 265546

SEQ ID NO: 280281 - DNA, 832 bp, Homo Sapiens; identical to SEQ ID NO: 265552
  misc_feature (812)..(812): n is a, c, g, or t

SEQ ID NO: 280282 - DNA, 438 bp, Homo Sapiens; identical to SEQ ID NO: 265553

SEQ ID NO: 280283 - DNA, 710 bp, Homo Sapiens; identical to SEQ ID NO: 265563

SEQ ID NO: 280284 - DNA, 411 bp, Homo Sapiens; identical to SEQ ID NO: 265564
  misc_feature (372)..(372): n is a, c, g, or t

SEQ ID NO: 280285 - DNA, 781 bp, Homo Sapiens; identical to SEQ ID NO: 265590

SEQ ID NO: 280286 - DNA, 441 bp, Homo Sapiens; identical to SEQ ID NO: 265591
  misc_feature (28)..(28): n is a, c, g, or t

SEQ ID NO: 280287 - DNA, 575 bp, Homo Sapiens; identical to SEQ ID NO: 265615
  misc_feature (38)..(38): n is a, c, g, or t
  misc_feature (52)..(108): n is a, c, g, or t
  misc_feature (129)..(157): n is a, c, g, or t

SEQ ID NO: 280288 - DNA, 589 bp, Homo Sapiens; identical to SEQ ID NO: 265616
  misc_feature (121)..(140): n is a, c, g, or t
  misc_feature (143)..(143): n is a, c, g, or t
  misc_feature (171)..(452): n is a, c, g, or t
  misc_feature (479)..(479): n is a, c, g, or t
  misc_feature (488)..(488): n is a, c, g, or t
  misc_feature (540)..(540): n is a, c, g, or t
  misc_feature (545)..(545): n is a, c, g, or t
  misc_feature (550)..(550): n is a, c, g, or t
  misc_feature (561)..(561): n is a, c, g, or t

SEQ ID NO: 280289 - DNA, 615 bp, Homo Sapiens; identical to SEQ ID NO: 265622
  misc_feature (403)..(403): n is a, c, g, or t

SEQ ID NO: 280290 - DNA, 649 bp, Homo Sapiens; identical to SEQ ID NO: 265623

SEQ ID NO: 280291 - DNA, 765 bp, Homo Sapiens; identical to SEQ ID NO: 265631
  misc_feature (288)..(288): n is a, c, g, or t

SEQ ID NO: 280292 - DNA, 554 bp, Homo Sapiens; identical to SEQ ID NO: 265632
  misc_feature (11)..(11): n is a, c, g, or t
  misc_feature (31)..(31): n is a, c, g, or t
  misc_feature (39)..(39): n is a, c, g, or t
  misc_feature (48)..(48): n is a, c, g, or t
  misc_feature (63)..(63): n is a, c, g, or t
  misc_feature (230)..(230): n is a, c, g, or t

SEQ ID NO: 280293 - DNA, 655 bp, Homo Sapiens; identical to SEQ ID NO: 265690

SEQ ID NO: 280294 - DNA, 373 bp, Homo Sapiens; identical to SEQ ID NO: 265691
  misc_feature (302)..(302): n is a, c, g, or t
  misc_feature (351)..(351): n is a, c, g, or t

SEQ ID NO: 280295 - DNA, 390 bp, Homo Sapiens; identical to SEQ ID NO: 265701
  misc_feature (54)..(54): n is a, c, g, or t

SEQ ID NO: 280296 - DNA, 677 bp, Homo Sapiens; identical to SEQ ID NO: 265702
  misc_feature (105)..(105): n is a, c, g, or t
  misc_feature (643)..(643): n is a, c, g, or t

SEQ ID NO: 280297 - DNA, 842 bp, Homo Sapiens; identical to SEQ ID NO: 265703
  misc_feature (715)..(738): n is a, c, g, or t

SEQ ID NO: 280298 - DNA, 926 bp, Homo Sapiens; identical to SEQ ID NO: 265708
  misc_feature (780)..(780): n is a, c, g, or t
  misc_feature (782)..(782): n is a, c, g, or t
  misc_feature (787)..(787): n is a, c, g, or t
  misc_feature (836)..(836): n is a, c, g, or t
  misc_feature (884)..(884): n is a, c, g, or t

SEQ ID NO: 280299 - DNA, 450 bp, Homo Sapiens; identical to SEQ ID NO: 265709
  misc_feature (85)..(85): n is a, c, g, or t
  misc_feature (380)..(380): n is a, c, g, or t

SEQ ID NO: 280300 - DNA, 768 bp, Homo Sapiens; identical to SEQ ID NO: 265731
  misc_feature (488)..(688): n is a, c, g, or t
  misc_feature (717)..(717): n is a, c, g, or t
  misc_feature (742)..(742): n is a, c, g, or t

SEQ ID NO: 280301 - DNA, 479 bp, Homo Sapiens; identical to SEQ ID NO: 265732

SEQ ID NO: 280302 - DNA, 601 bp, Homo Sapiens; identical to SEQ ID NO: 265745
  misc_feature (422)..(479): n is a, c, g, or t

SEQ ID NO: 280303 - DNA, 400 bp, Homo Sapiens; identical to SEQ ID NO: 265746
  misc_feature (67)..(67): n is a, c, g, or t

SEQ ID NO: 280304 - DNA, 666 bp, Homo Sapiens; identical to SEQ ID NO: 265762
  misc_feature (229)..(298): n is a, c, g, or t

SEQ ID NO: 280305 - DNA, 497 bp, Homo Sapiens; identical to SEQ ID NO: 265763
  misc_feature (14)..(14): n is a, c, g, or t
  misc_feature (37)..(37): n is a, c, g, or t

SEQ ID NO: 280306 - DNA, 779 bp, Homo Sapiens; identical to SEQ ID NO: 265773
  misc_feature (345)..(345): n is a, c, g, or t

SEQ ID NO: 280307 - DNA, 422 bp, Homo Sapiens; identical to SEQ ID NO: 265774
  misc_feature (342)..(342): n is a, c, g, or t
  misc_feature (402)..(402): n is a, c, g, or t
  misc_feature (407)..(407): n is a, c, g, or t

SEQ ID NO: 280308 - DNA, 436 bp, Homo Sapiens; identical to SEQ ID NO: 265775

SEQ ID NO: 280309 - DNA, 402 bp, Homo Sapiens; identical to SEQ ID NO: 265803
  misc_feature (335)..(335): n is a, c, g, or t
  misc_feature (392)..(392): n is a, c, g, or t

SEQ ID NO: 280310 - DNA, 913 bp, Homo Sapiens; identical to SEQ ID NO: 265804
  misc_feature (358)..(358): n is a, c, g, or t
  misc_feature (367)..(367): n is a, c, g, or t
  misc_feature (378)..(378): n is a, c, g, or t

SEQ ID NO: 280311 - DNA, 788 bp, Homo Sapiens; identical to SEQ ID NO: 265812
  misc_feature (52)..(52): n is a, c, g, or t
  misc_feature (92)..(240): n is a, c, g, or t
  misc_feature (695)..(743): n is a, c, g, or t

SEQ ID NO: 280312 - DNA, 440 bp, Homo Sapiens; identical to SEQ ID NO: 265813
  misc_feature (60)..(60): n is a, c, g, or t

SEQ ID NO: 280313 - DNA, 460 bp, Homo Sapiens; identical to SEQ ID NO: 265816
  misc_feature (23)..(23): n is a, c, g, or t
  misc_feature (30)..(30): n is a, c, g, or t
  misc_feature (41)..(41): n is a, c, g, or t
  misc_feature (56)..(56): n is a, c, g, or t
  misc_feature (109)..(109): n is a, c, g, or t
  misc_feature (118)..(226): n is a, c, g, or t
  misc_feature (341)..(377): n is a, c, g, or t
  misc_feature (449)..(449): n is a, c, g, or t

SEQ ID NO: 280314 - DNA, 305 bp, Homo Sapiens; identical to SEQ ID NO: 265817
  misc_feature (13)..(13): n is a, c, g, or t
  misc_feature (22)..(22): n is a, c, g, or t

SEQ ID NO: 280315 - DNA, 492 bp, Homo Sapiens; identical to SEQ ID NO: 265831

SEQ ID NO: 280316 - DNA, 613 bp, Homo Sapiens; identical to SEQ ID NO: 265832

SEQ ID NO: 280317 - DNA, 780 bp, Homo Sapiens; identical to SEQ ID NO: 265843
  misc_feature (76)..(76): n is a, c, g, or t

SEQ ID NO: 280318 - DNA, 453 bp, Homo Sapiens; identical to SEQ ID NO: 265844
  misc_feature (37)..(37): n is a, c, g, or t
  misc_feature (51)..(51): n is a, c, g, or t
  misc_feature (63)..(63): n is a, c, g, or t
  misc_feature (68)..(68): n is a, c, g, or t
  misc_feature (84)..(84): n is a, c, g, or t
  misc_feature (92)..(92): n is a, c, g, or t
  misc_feature (107)..(142): n is a, c, g, or t
  misc_feature (162)..(162): n is a, c, g, or t

SEQ ID NO: 280319 - DNA, 798 bp, Homo Sapiens; identical to SEQ ID NO: 265852
  misc_feature (755)..(755): n is a, c, g, or t

SEQ ID NO: 280320 - DNA, 483 bp, Homo Sapiens; identical to SEQ ID NO: 265853
  misc_feature (70)..(70): n is a, c, g, or t

SEQ ID NO: 280321 - DNA, 786 bp, Homo Sapiens; identical to SEQ ID NO: 265858

SEQ ID NO: 280322 - DNA, 402 bp, Homo Sapiens; identical to SEQ ID NO: 265859
  misc_feature (116)..(116): n is a, c, g, or t
  misc_feature (125)..(125): n is a, c, g, or t
  misc_feature (324)..(324): n is a, c, g, or t
  misc_feature (382)..(382): n is a, c, g, or t

SEQ ID NO: 280323 - DNA, 818 bp, Homo Sapiens; identical to SEQ ID NO: 265860

SEQ ID NO: 280324 - DNA, 454 bp, Homo Sapiens; identical to SEQ ID NO: 265861
  misc_feature (161)..(161): n is a, c, g, or t

SEQ ID NO: 280325 - DNA, 1039 bp, Homo Sapiens; identical to SEQ ID NO: 265865
  misc_feature (889)..(889): n is a, c, g, or t
  misc_feature (898)..(898): n is a, c, g, or t
  misc_feature (904)..(904): n is a, c, g, or t
  misc_feature (912)..(912): n is a, c, g, or t
  misc_feature (942)..(942): n is a, c, g, or t
  misc_feature (1019)..(1019): n is a, c, g, or t

SEQ ID NO: 280326 - DNA, 394 bp, Homo Sapiens; identical to SEQ ID NO: 265866
  misc_feature (357)..(357): n is a, c, g, or t
  misc_feature (366)..(366): n is a, c, g, or t
  misc_feature (376)..(376): n is a, c, g, or t

SEQ ID NO: 280327 - DNA, 459 bp, Homo Sapiens; identical to SEQ ID NO: 265872
  misc_feature (432)..(432): n is a, c, g, or t

SEQ ID NO: 280328 - DNA, 409 bp, Homo Sapiens; identical to SEQ ID NO: 265873
  misc_feature (48)..(48): n is a, c, g, or t

SEQ ID NO: 280329 - DNA, 610 bp, Homo Sapiens; identical to SEQ ID NO: 265882

SEQ ID NO: 280330 - DNA, 402 bp, Homo Sapiens; identical to SEQ ID NO: 265883
  misc_feature (100)..(100): n is a, c, g, or t
  misc_feature (139)..(139): n is a, c, g, or t

SEQ ID NO: 280331 - DNA, 804 bp, Homo Sapiens; identical to SEQ ID NO: 265887
  misc_feature (273)..(273): n is a, c, g, or t

SEQ ID NO: 280332 - DNA, 577 bp, Homo Sapiens; identical to SEQ ID NO: 265888
  misc_feature (344)..(344): n is a, c, g, or t
  misc_feature (540)..(540): n is a, c, g, or t
  misc_feature (549)..(549): n is a, c, g, or t
  misc_feature (556)..(556): n is a, c, g, or t

SEQ ID NO: 280333 - DNA, 505 bp, Homo Sapiens; identical to SEQ ID NO: 265889
  misc_feature (401)..(401): n is a, c, g, or t
  misc_feature (442)..(442): n is a, c, g, or t
  misc_feature (460)..(460): n is a, c, g, or t
  misc_feature (482)..(483): n is a, c, g, or t

SEQ ID NO: 280334 - DNA, 681 bp, Homo Sapiens; identical to SEQ ID NO: 265890

SEQ ID NO: 280335 - DNA, 565 bp, Homo Sapiens; identical to SEQ ID NO: 265892
  misc_feature (69)..(69): n is a, c, g, or t
  misc_feature (82)..(82): n is a, c, g, or t
  misc_feature (112)..(112): n is a, c, g, or t
  misc_feature (158)..(158): n is a, c, g, or t
  misc_feature (174)..(174): n is a, c, g, or t
  misc_feature (214)..(214): n is a, c, g, or t

SEQ ID NO: 280336 - DNA, 682 bp, Homo Sapiens; identical to SEQ ID NO: 265893
  misc_feature (520)..(520): n is a, c, g, or t

SEQ ID NO: 280337 - DNA, 627 bp, Homo Sapiens; identical to SEQ ID NO: 265895
  misc_feature (413)..(430): n is a, c, g, or t
  misc_feature (512)..(561): n is a, c, g, or t

SEQ ID NO: 280338 - DNA, 358 bp, Homo Sapiens; identical to SEQ ID NO: 265896

SEQ ID NO: 280339 - DNA, 800 bp, Homo Sapiens; identical to SEQ ID NO: 265920
  misc_feature (699)..(699): n is a, c, g, or t
  misc_feature (701)..(744): n is a, c, g, or t

SEQ ID NO: 280340 - DNA, 432 bp, Homo Sapiens; identical to SEQ ID NO: 265921
  misc_feature (47)..(47): n is a, c, g, or t

SEQ ID NO: 280341 - DNA, 1270 bp, Homo Sapiens; identical to SEQ ID NO: 265928

SEQ ID NO: 280342 - DNA, 457 bp, Homo Sapiens; identical to SEQ ID NO: 265929

SEQ ID NO: 280343 - DNA, 714 bp, Homo Sapiens; identical to SEQ ID NO: 265944

SEQ ID NO: 280344 - DNA, 500 bp, Homo Sapiens; identical to SEQ ID NO: 265945

SEQ ID NO: 280345 - DNA, 468 bp, Homo Sapiens; identical to SEQ ID NO: 265949
  misc_feature (394)..(394): n is a, c, g, or t
  misc_feature (402)..(402): n is a, c, g, or t
  misc_feature (416)..(416): n is a, c, g, or t
  misc_feature (434)..(434): n is a, c, g, or t

SEQ ID NO: 280346 - DNA, 424 bp, Homo Sapiens; identical to SEQ ID NO: 265950

SEQ ID NO: 280347 - DNA, 623 bp, Homo Sapiens; identical to SEQ ID NO: 265974

SEQ ID NO: 280348 - DNA, 409 bp, Homo Sapiens; identical to SEQ ID NO: 265975
  misc_feature (180)..(180): n is a, c, g, or t
  misc_feature (366)..(366): n is a, c, g, or t
  misc_feature (392)..(392): n is a, c, g, or t

SEQ ID NO: 280349 - DNA, 442 bp, Homo Sapiens; identical to SEQ ID NO: 265976

SEQ ID NO: 280350 - DNA, 809 bp, Homo Sapiens; identical to SEQ ID NO: 265981

SEQ ID NO: 280351 - DNA, 424 bp, Homo Sapiens; identical to SEQ ID NO: 265982
  misc_feature (31)..(31): n is a, c, g, or t

SEQ ID NO: 280352 - DNA, 748 bp, Homo Sapiens; identical to SEQ ID NO: 265984

SEQ ID NO: 280353 - DNA, 426 bp, Homo Sapiens; identical to SEQ ID NO: 265985
  misc_feature (250)..(250): n is a, c, g, or t
  misc_feature (296)..(296): n is a, c, g, or t
  misc_feature (372)..(372): n is a, c, g, or t
  misc_feature (383)..(383): n is a, c, g, or t
  misc_feature (395)..(395): n is a, c, g, or t
  misc_feature (410)..(410): n is a, c, g, or t

SEQ ID NO: 280354 - DNA, 714 bp, Homo Sapiens; identical to SEQ ID NO: 265992
  misc_feature (431)..(587): n is a, c, g, or t

SEQ ID NO: 280355 - DNA, 419 bp, Homo Sapiens; identical to SEQ ID NO: 265993
  misc_feature (294)..(294): n is a, c, g, or t
  misc_feature (329)..(329): n is a, c, g, or t
  misc_feature (396)..(396): n is a, c, g, or t

SEQ ID NO: 280356 - DNA, 968 bp, Homo Sapiens; identical to SEQ ID NO: 266007
  misc_feature (62)..(108): n is a, c, g, or t

SEQ ID NO: 280357 - DNA, 412 bp, Homo Sapiens; identical to SEQ ID NO: 266008

SEQ ID NO: 280358 - DNA, 520 bp, Homo Sapiens; identical to SEQ ID NO: 266014

SEQ ID NO: 280359 - DNA, 452 bp, Homo Sapiens; identical to SEQ ID NO: 266015

SEQ ID NO: 280360 - DNA, 834 bp, Homo Sapiens; identical to SEQ ID NO: 266017

SEQ ID NO: 280361 - DNA, 525 bp, Homo Sapiens; identical to SEQ ID NO: 266018
  misc_feature (441)..(441): n is a, c, g, or t
  misc_feature (450)..(450): n is a, c, g, or t
  misc_feature (502)..(502): n is a, c, g, or t

SEQ ID NO: 280362 - DNA, 1084 bp, Homo Sapiens; identical to SEQ ID NO: 266027
  misc_feature (12)..(12): n is a, c, g, or t
  misc_feature (374)..(374): n is a, c, g, or t

SEQ ID NO: 280363 - DNA, 361 bp, Homo Sapiens; identical to SEQ ID NO: 266028
  misc_feature (323)..(323): n is a, c, g, or t
  misc_feature (328)..(328): n is a, c, g, or t
  misc_feature (339)..(339): n is a, c, g, or t

SEQ ID NO: 280364 - DNA, 639 bp, Homo Sapiens; identical to SEQ ID NO: 266037

SEQ ID NO: 280365 - DNA, 497 bp, Homo Sapiens; identical to SEQ ID NO: 266038
  misc_feature (297)..(297): n is a, c, g, or t
  misc_feature (325)..(325): n is a, c, g, or t
  misc_feature (378)..(378): n is a, c, g, or t
  misc_feature (383)..(383): n is a, c, g, or t
  misc_feature (390)..(390): n is a, c, g, or t
  misc_feature (425)..(425): n is a, c, g, or t
  misc_feature (438)..(438): n is a, c, g, or t
  misc_feature (458)..(458): n is a, c, g, or t

SEQ ID NO: 280366 - DNA, 690 bp, Homo Sapiens; identical to SEQ ID NO: 266040

SEQ ID NO: 280367 - DNA, 413 bp, Homo Sapiens; identical to SEQ ID NO: 266041

SEQ ID NO: 280368 - DNA, 408 bp, Homo Sapiens; identical to SEQ ID NO: 266047
  misc_feature (170)..(170): n is a, c, g, or t
  misc_feature (295)..(295): n is a, c, g, or t

SEQ ID NO: 280369 - DNA, 786 bp, Homo Sapiens; identical to SEQ ID NO: 266048
  misc_feature (477)..(510): n is a, c, g, or t

SEQ ID NO: 280370 - DNA, 705 bp, Homo Sapiens; identical to SEQ ID NO: 266059
  misc_feature (198)..(257): n is a, c, g, or t
  misc_feature (266)..(300): n is a, c, g, or t

SEQ ID NO: 280371 - DNA, 491 bp, Homo Sapiens; identical to SEQ ID NO: 266060
  misc_feature (102)..(102): n is a, c, g, or t
  misc_feature (106)..(106): n is a, c, g, or t
  misc_feature (129)..(138): n is a, c, g, or t
  misc_feature (352)..(352): n is a, c, g, or t

SEQ ID NO: 280372 - DNA, 776 bp, Homo Sapiens; identical to SEQ ID NO: 266067
  misc_feature (382)..(382): n is a, c, g, or t
  misc_feature (491)..(491): n is a, c, g, or t
  misc_feature (498)..(619): n is a, c, g, or t
  misc_feature (632)..(632): n is a, c, g, or t

SEQ ID NO: 280373 - DNA, 402 bp, Homo Sapiens; identical to SEQ ID NO: 266068
  misc_feature (365)..(365): n is a, c, g, or t

SEQ ID NO: 280374 - DNA, 567 bp, Homo Sapiens; identical to SEQ ID NO: 266077
  misc_feature (448)..(448): n is a, c, g, or t
  misc_feature (455)..(455): n is a, c, g, or t
  misc_feature (463)..(463): n is a, c, g, or t
  misc_feature (483)..(483): n is a, c, g, or t
  misc_feature (492)..(492): n is a, c, g, or t
  misc_feature (503)..(503): n is a, c, g, or t
  misc_feature (510)..(510): n is a, c, g, or t
  misc_feature (542)..(542): n is a, c, g, or t

SEQ ID NO: 280375 - DNA, 559 bp, Homo Sapiens; identical to SEQ ID NO: 266078
  misc_feature (449)..(449): n is a, c, g, or t
  misc_feature (525)..(525): n is a, c, g, or t
  misc_feature (537)..(537): n is a, c, g, or t
  misc_feature (547)..(547): n is a, c, g, or t

SEQ ID NO: 280376 - DNA, 716 bp, Homo Sapiens; identical to SEQ ID NO: 266083
  misc_feature (73)..(82): n is a, c, g, or t

SEQ ID NO: 280377 - DNA, 428 bp, Homo Sapiens; identical to SEQ ID NO: 266084
  misc_feature (26)..(26): n is a, c, g, or t
  misc_feature (71)..(71): n is a, c, g, or t
  misc_feature (345)..(354): n is a, c, g, or t

SEQ ID NO: 280378 - DNA, 1090 bp, Homo Sapiens; identical to SEQ ID NO: 266125

SEQ ID NO: 280379 - DNA, 459 bp, Homo Sapiens; identical to SEQ ID NO: 266126
  misc_feature (335)..(335): n is a, c, g, or t
  misc_feature (351)..(351): n is a, c, g, or t
  misc_feature (356)..(356): n is a, c, g, or t
  misc_feature (379)..(379): n is a, c, g, or t
  misc_feature (387)..(387): n is a, c, g, or t
  misc_feature (400)..(400): n is a, c, g, or t
  misc_feature (407)..(407): n is a, c, g, or t
  misc_feature (413)..(413): n is a, c, g, or t
  misc_feature (419)..(419): n is a, c, g, or t
  misc_feature (441)..(441): n is a, c, g, or t

SEQ ID NO: 280380 - DNA, 548 bp, Homo Sapiens; identical to SEQ ID NO: 266128

SEQ ID NO: 280381 - DNA, 475 bp, Homo Sapiens; identical to SEQ ID NO: 266129
  misc_feature (23)..(23): n is a, c, g, or t
  misc_feature (75)..(75): n is a, c, g, or t

SEQ ID NO: 280382 - DNA, 775 bp, Homo Sapiens; identical to SEQ ID NO: 266162

SEQ ID NO: 280383 - DNA, 456 bp, Homo Sapiens; identical to SEQ ID NO: 266163
  misc_feature (441)..(441): n is a, c, g, or t

SEQ ID NO: 280384 - DNA, 674 bp, Homo Sapiens; identical to SEQ ID NO: 266181

SEQ ID NO: 280385 - DNA, 491 bp, Homo Sapiens; identical to SEQ ID NO: 266182

SEQ ID NO: 280386 - DNA, 641 bp, Homo Sapiens; identical to SEQ ID NO: 266189
  misc_feature (156)..(210): n is a, c, g, or t
  misc_feature (351)..(393): n is a, c, g, or t

SEQ ID NO: 280387 - DNA, 462 bp, Homo Sapiens; identical to SEQ ID NO: 266190
  misc_feature (20)..(20): n is a, c, g, or t
  misc_feature (34)..(34): n is a, c, g, or t

SEQ ID NO: 280388 - DNA, 801 bp, Homo Sapiens; identical to SEQ ID NO: 266207
  misc_feature (12)..(12): n is a, c, g, or t

SEQ ID NO: 280389 - DNA, 500 bp, Homo Sapiens; identical to SEQ ID NO: 266208
  misc_feature (326)..(326): n is a, c, g, or t
  misc_feature (405)..(405): n is a, c, g, or t
  misc_feature (422)..(422): n is a, c, g, or t
  misc_feature (448)..(448): n is a, c, g, or t
  misc_feature (475)..(475): n is a, c, g, or t

SEQ ID NO: 280390 - DNA, 224 bp, Homo Sapiens; identical to SEQ ID NO: 266260
  misc_feature (48)..(48): n is a, c, g, or t
  misc_feature (143)..(154): n is a, c, g, or t

SEQ ID NO: 280391 - DNA, 297 bp, Homo Sapiens; identical to SEQ ID NO: 266261
  misc_feature (41)..(81): n is a, c, g, or t
  misc_feature (199)..(200): n is a, c, g, or t
  misc_feature (206)..(206): n is a, c, g, or t

SEQ ID NO: 280392 - DNA, 1095 bp, Homo Sapiens; identical to SEQ ID NO: 266283
  misc_feature (38)..(38): n is a, c, g, or t
  misc_feature (373)..(373): n is a, c, g, or t
  misc_feature (404)..(404): n is a, c, g, or t
  misc_feature (429)..(429): n is a, c, g, or t
  misc_feature (589)..(589): n is a, c, g, or t
  misc_feature (602)..(645): n is a, c, g, or t
  misc_feature (697)..(697): n is a, c, g, or t
  misc_feature (740)..(740): n is a, c, g, or t
  misc_feature (1079)..(1079): n is a, c, g, or t

SEQ ID NO: 280393 - DNA, 562 bp, Homo Sapiens; identical to SEQ ID NO: 266284
  misc_feature (54)..(110): n is a, c, g, or t

SEQ ID NO: 280394 - DNA, 717 bp, Homo Sapiens; identical to SEQ ID NO: 266291
  misc_feature (268)..(395): n is a, c, g, or t

SEQ ID NO: 280395 - DNA, 431 bp, Homo Sapiens; identical to SEQ ID NO: 266292

SEQ ID NO: 280396 - DNA, 577 bp, Homo Sapiens; identical to SEQ ID NO: 266293

SEQ ID NO: 280397 - DNA, 435 bp, Homo Sapiens; identical to SEQ ID NO: 266294
  misc_feature (24)..(24): n is a, c, g, or t
  misc_feature (42)..(42): n is a, c, g, or t

SEQ ID NO: 280398 - DNA, 939 bp, Homo Sapiens; identical to SEQ ID NO: 266312
  misc_feature (579)..(579): n is a, c, g, or t

SEQ ID NO: 280399 - DNA, 501 bp, Homo Sapiens; identical to SEQ ID NO: 266313
  misc_feature (424)..(424): n is a, c, g, or t
  misc_feature (462)..(462): n is a, c, g, or t

SEQ ID NO: 280400 - DNA, 693 bp, Homo Sapiens; identical to SEQ ID NO: 266328
  misc_feature (33)..(33): n is a, c, g, or t

SEQ ID NO: 280401 - DNA, 352 bp, Homo Sapiens; identical to SEQ ID NO: 266329
  misc_feature (117)..(117): n is a, c, g, or t

SEQ ID NO: 280402 - DNA, 603 bp, Homo Sapiens; identical to SEQ ID NO: 266336
  misc_feature (143)..(143): n is a, c, g, or t

SEQ ID NO: 280403 - DNA, 1105 bp, Homo Sapiens; identical to SEQ ID NO: 266337
  misc_feature (1034)..(1034): n is a, c, g, or t
  misc_feature (1084)..(1084): n is a, c, g, or t

SEQ ID NO: 280404 - DNA, 850 bp, Homo Sapiens; identical to SEQ ID NO: 266355
  misc_feature (89)..(89): n is a, c, g, or t
  misc_feature (262)..(382): n is a, c, g, or t

SEQ ID NO: 280405 - DNA, 560 bp, Homo Sapiens; identical to SEQ ID NO: 266356
  misc_feature (22)..(22): n is a, c, g, or t
  misc_feature (65)..(65): n is a, c, g, or t
  misc_feature (141)..(141): n is a, c, g, or t
  misc_feature (390)..(504): n is a, c, g, or t

SEQ ID NO: 280406 - DNA, 388 bp, Homo Sapiens; identical to SEQ ID NO: 266386

SEQ ID NO: 280407 - DNA, 789 bp, Homo Sapiens; identical to SEQ ID NO: 266387
  misc_feature (290)..(290): n is a, c, g, or t
  misc_feature (465)..(465): n is a, c, g, or t
  misc_feature (480)..(480): n is a, c, g, or t
  misc_feature (495)..(495): n is a, c, g, or t

SEQ ID NO: 280408 - DNA, 653 bp, Homo Sapiens; identical to SEQ ID NO: 266388

SEQ ID NO: 280409 - DNA, 440 bp, Homo Sapiens; identical to SEQ ID NO: 266389
  misc_feature (164)..(172): n is a, c, g, or t
  misc_feature (274)..(274): n is a, c, g, or t
  misc_feature (302)..(302): n is a, c, g, or t

SEQ ID NO: 280410 - DNA, 610 bp, Homo Sapiens; identical to SEQ ID NO: 266394
  misc_feature (196)..(390): n is a, c, g, or t

SEQ ID NO: 280411 - DNA, 453 bp, Homo Sapiens; identical to SEQ ID NO: 266395

SEQ ID NO: 280412 - DNA, 986 bp, Homo Sapiens; identical to SEQ ID NO: 266396
  misc_feature (13)..(13): n is a, c, g, or t
  misc_feature (52)..(52): n is a, c, g, or t
  misc_feature (58)..(58): n is a, c, g, or t
  misc_feature (81)..(81): n is a, c, g, or t

SEQ ID NO: 280413 - DNA, 457 bp, Homo Sapiens; identical to SEQ ID NO: 266397
  misc_feature (26)..(26): n is a, c, g, or t

SEQ ID NO: 280414 - DNA, 440 bp, Homo Sapiens; identical to SEQ ID NO: 266398

SEQ ID NO: 280415 - DNA, 576 bp, Homo Sapiens; identical to SEQ ID NO: 266399

SEQ ID NO: 280416 - DNA, 591 bp, Homo Sapiens; identical to SEQ ID NO: 266417

SEQ ID NO: 280417 - DNA, 431 bp, Homo Sapiens; identical to SEQ ID NO: 266418
  misc_feature (395)..(395): n is a, c, g, or t

SEQ ID NO: 280418 - DNA, 513 bp, Homo Sapiens; identical to SEQ ID NO: 266421
  misc_feature (107)..(107): n is a, c, g, or t
  misc_feature (499)..(499): n is a, c, g, or t

SEQ ID NO: 280419 - DNA, 366 bp, Homo Sapiens; identical to SEQ ID NO: 266422
  misc_feature (12)..(12): n is a, c, g, or t
  misc_feature (59)..(59): n is a, c, g, or t

SEQ ID NO: 280420 - DNA, 454 bp, Homo Sapiens; identical to SEQ ID NO: 266423
  misc_feature (50)..(50): n is a, c, g, or t
  misc_feature (55)..(55): n is a, c, g, or t
  misc_feature (65)..(65): n is a, c, g, or t

SEQ ID NO: 280421 - DNA, 494 bp, Homo Sapiens; identical to SEQ ID NO: 266458
  misc_feature (475)..(475): n is a, c, g, or t

SEQ ID NO: 280422 - DNA, 796 bp, Homo Sapiens; identical to SEQ ID NO: 266459

SEQ ID NO: 280423 - DNA, 653 bp, Homo Sapiens; identical to SEQ ID NO: 266490

SEQ ID NO: 280424 - DNA, 376 bp, Homo Sapiens; identical to SEQ ID NO: 266491
  misc_feature (311)..(311): n is a, c, g, or t
  misc_feature (352)..(352): n is a, c, g, or t
  misc_feature (358)..(358): n is a, c, g, or t

SEQ ID NO: 280425 - DNA, 904 bp, Homo Sapiens; identical to SEQ ID NO: 266495

SEQ ID NO: 280426 - DNA, 368 bp, Homo Sapiens; identical to SEQ ID NO: 266496
  misc_feature (171)..(171): n is a, c, g, or t

SEQ ID NO: 280427 - DNA, 827 bp, Homo Sapiens; identical to SEQ ID NO: 266500

SEQ ID NO: 280428 - DNA, 426 bp, Homo Sapiens; identical to SEQ ID NO: 266501
  misc_feature (407)..(407): n is a, c, g, or t

SEQ ID NO: 280429 - DNA, 456 bp, Homo Sapiens; identical to SEQ ID NO: 266507

SEQ ID NO: 280430 - DNA, 439 bp, Homo Sapiens; identical to SEQ ID NO: 266508
  misc_feature (394)..(394): n is a, c, g, or t
  misc_feature (425)..(425): n is a, c, g, or t

SEQ ID NO: 280431 - DNA, 527 bp, Homo Sapiens; identical to SEQ ID NO: 266518
  misc_feature (202)..(248): n is a, c, g, or t
  misc_feature (296)..(437): n is a, c, g, or t

SEQ ID NO: 280432 - DNA, 183 bp, Homo Sapiens; identical to SEQ ID NO: 266519
  misc_feature (163)..(163): n is a, c, g, or t

SEQ ID NO: 280433 - DNA, 762 bp, Homo Sapiens; identical to SEQ ID NO: 266523

SEQ ID NO: 280434 - DNA, 476 bp, Homo Sapiens; identical to SEQ ID NO: 266524
  misc_feature (343)..(343): n is a, c, g, or t
  misc_feature (367)..(367): n is a, c, g, or t
  misc_feature (376)..(376): n is a, c, g, or t

SEQ ID NO: 280435 - DNA, 521 bp, Homo Sapiens; identical to SEQ ID NO: 266526
  misc_feature (359)..(359): n is a, c, g, or t
  misc_feature (409)..(409): n is a, c, g, or t
  misc_feature (419)..(419): n is a, c, g, or t

SEQ ID NO: 280436 - DNA, 304 bp, Homo Sapiens; identical to SEQ ID NO: 266527
  misc_feature (54)..(54): n is a, c, g, or t
  misc_feature (76)..(134): n is a, c, g, or t

SEQ ID NO: 280437 - DNA, 439 bp, Homo Sapiens; identical to SEQ ID NO: 266548

SEQ ID NO: 280438 - DNA, 386 bp, Homo Sapiens; identical to SEQ ID NO: 266549
  misc_feature (33)..(33): n is a, c, g, or t
  misc_feature (74)..(74): n is a, c, g, or t

SEQ ID NO: 280439 - DNA, 509 bp, Homo Sapiens; identical to SEQ ID NO: 266553
  misc_feature (29)..(29): n is a, c, g, or t

SEQ ID NO: 280440 - DNA, 520 bp, Homo Sapiens; identical to SEQ ID NO: 266554
  misc_feature (48)..(48): n is a, c, g, or t

SEQ ID NO: 280441 - DNA, 623 bp, Homo Sapiens; identical to SEQ ID NO: 266573
  misc_feature (232)..(290): n is a, c, g, or t

SEQ ID NO: 280442 - DNA, 370 bp, Homo Sapiens; identical to SEQ ID NO: 266574
  misc_feature (20)..(20): n is a, c, g, or t
  misc_feature (167)..(167): n is a, c, g, or t

SEQ ID NO: 280443 - DNA, 840 bp, Homo Sapiens; identical to SEQ ID NO: 266583
  misc_feature (717)..(725): n is a, c, g, or t
  misc_feature (772)..(772): n is a, c, g, or t
  misc_feature (798)..(798): n is a, c, g, or t
  misc_feature (808)..(808): n is a, c, g, or t

SEQ ID NO: 280444 - DNA, 462 bp, Homo Sapiens; identical to SEQ ID NO: 266584
  misc_feature (21)..(21): n is a, c, g, or t
  misc_feature (47)..(47): n is a, c, g, or t
  misc_feature (64)..(64): n is a, c, g, or t

SEQ ID NO: 280445 - DNA, 616 bp, Homo Sapiens; identical to SEQ ID NO: 266593
  misc_feature (60)..(93): n is a, c, g, or t
  misc_feature (479)..(487): n is a, c, g, or t

SEQ ID NO: 280446 - DNA, 193 bp, Homo Sapiens; identical to SEQ ID NO: 266594
  misc_feature (113)..(113): n is a, c, g, or t
  misc_feature (134)..(134): n is a, c, g, or t
  misc_feature (148)..(148): n is a, c, g, or t
  misc_feature (162)..(162): n is a, c, g, or t

SEQ ID NO: 280447 - DNA, 775 bp, Homo Sapiens; identical to SEQ ID NO: 266602

SEQ ID NO: 280448 - DNA, 463 bp, Homo Sapiens; identical to SEQ ID NO: 266603
  misc_feature (12)..(12): n is a, c, g, or t
  misc_feature (26)..(26): n is a, c, g, or t
  misc_feature (44)..(44): n is a, c, g, or t
  misc_feature (191)..(248): n is a, c, g, or t

SEQ ID NO: 280449 - DNA, 965 bp, Homo Sapiens; identical to SEQ ID NO: 266620
  misc_feature (456)..(456): n is a, c, g, or t
  misc_feature (469)..(469): n is a, c, g, or t
  misc_feature (561)..(561): n is a, c, g, or t

SEQ ID NO: 280450 - DNA, 456 bp, Homo Sapiens; identical to SEQ ID NO: 266621

SEQ ID NO: 280451 - DNA, 444 bp, Homo Sapiens; identical to SEQ ID NO: 266622

SEQ ID NO: 280452 - DNA, 738 bp, Homo Sapiens; identical to SEQ ID NO: 266638

SEQ ID NO: 280453 - DNA, 528 bp, Homo Sapiens; identical to SEQ ID NO: 266639
  misc_feature (491)..(491): n is a, c, g, or t

SEQ ID NO: 280454 - DNA, 804 bp, Homo Sapiens; identical to SEQ ID NO: 266648
  misc_feature (731)..(731): n is a, c, g, or t

SEQ ID NO: 280455 - DNA, 239 bp, Homo Sapiens; identical to SEQ ID NO: 266649
  misc_feature (107)..(107): n is a, c, g, or t
  misc_feature (212)..(212): n is a, c, g, or t

SEQ ID NO: 280456 - DNA, 771 bp, Homo Sapiens; identical to SEQ ID NO: 266655

SEQ ID NO: 280457 - DNA, 514 bp, Homo Sapiens; identical to SEQ ID NO: 266656

SEQ ID NO: 280458 - DNA, 761 bp, Homo Sapiens; identical to SEQ ID NO: 266669
  misc_feature (21)..(21): n is a, c, g, or t

SEQ ID NO: 280459 - DNA, 380 bp, Homo Sapiens; identical to SEQ ID NO: 266670
  misc_feature (316)..(316): n is a, c, g, or t

SEQ ID NO: 280460 - DNA, 317 bp, Homo Sapiens; identical to SEQ ID NO: 266671

SEQ ID NO: 280461 - DNA, 787 bp, Homo Sapiens; identical to SEQ ID NO: 266672
  misc_feature (13)..(13): n is a, c, g, or t
  misc_feature (33)..(33): n is a, c, g, or t
  misc_feature (79)..(79): n is a, c, g, or t
  misc_feature (358)..(358): n is a, c, g, or t

SEQ ID NO: 280462 - DNA, 816 bp, Homo Sapiens; identical to SEQ ID NO: 266673
  misc_feature (184)..(604): n is a, c, g, or t

SEQ ID NO: 280463 - DNA, 403 bp, Homo Sapiens; identical to SEQ ID NO: 266674

SEQ ID NO: 280464 - DNA, 776 bp, Homo Sapiens; identical to SEQ ID NO: 266677

SEQ ID NO: 280465 - DNA, 426 bp, Homo Sapiens; identical to SEQ ID NO: 266678
  misc_feature (45)..(45): n is a, c, g, or t
  misc_feature (81)..(81): n is a, c, g, or t
  misc_feature (85)..(85): n is a, c, g, or t
  misc_feature (87)..(87): n is a, c, g, or t

SEQ ID NO: 280466 - DNA, 782 bp, Homo Sapiens; identical to SEQ ID NO: 266686
  misc_feature (737)..(737): n is a, c, g, or t

SEQ ID NO: 280467 - DNA, 366 bp, Homo Sapiens; identical to SEQ ID NO: 266687
  misc_feature (44)..(44): n is a, c, g, or t
  misc_feature (67)..(67): n is a, c, g, or t
  misc_feature (105)..(105): n is a, c, g, or t
  misc_feature (111)..(111): n is a, c, g, or t
  misc_feature (119)..(119): n is a, c, g, or t

SEQ ID NO: 280468 - DNA, 631 bp, Homo Sapiens; identical to SEQ ID NO: 266700
  misc_feature (141)..(215): n is a, c, g, or t

SEQ ID NO: 280469 - DNA, 443 bp, Homo Sapiens; identical to SEQ ID NO: 266701
  misc_feature (14)..(14): n is a, c, g, or t
  misc_feature (24)..(24): n is a, c, g, or t
  misc_feature (34)..(34): n is a, c, g, or t
  misc_feature (44)..(44): n is a, c, g, or t

SEQ ID NO: 280470 - DNA, 364 bp, Homo Sapiens; identical to SEQ ID NO: 266713
  misc_feature (135)..(154): n is a, c, g, or t

SEQ ID NO: 280471 - DNA, 758 bp, Homo Sapiens; identical to SEQ ID NO: 266714
  misc_feature (596)..(615): n is a, c, g, or t

SEQ ID NO: 280472 - DNA, 546 bp, Homo Sapiens; identical to SEQ ID NO: 266720
  misc_feature (107)..(205): n is a, c, g, or t
  misc_feature (239)..(247): n is a, c, g, or t
  misc_feature (427)..(471): n is a, c, g, or t
  misc_feature (489)..(489): n is a, c, g, or t

SEQ ID NO: 280473 - DNA, 409 bp, Homo Sapiens; identical to SEQ ID NO: 266721
  misc_feature (107)..(205): n is a, c, g, or t
  misc_feature (225)..(225): n is a, c, g, or t
  misc_feature (239)..(247): n is a, c, g, or t
  misc_feature (332)..(332): n is a, c, g, or t
  misc_feature (359)..(359): n is a, c, g, or t

SEQ ID NO: 280474 - DNA, 434 bp, Homo Sapiens; identical to SEQ ID NO: 266722
  misc_feature (332)..(382): n is a, c, g, or t

SEQ ID NO: 280475 - DNA, 366 bp, Homo Sapiens; identical to SEQ ID NO: 266735

SEQ ID NO: 280476 - DNA, 499 bp, Homo Sapiens; identical to SEQ ID NO: 266736
  misc_feature (11)..(11): n is a, c, g, or t
  misc_feature (27)..(27): n is a, c, g, or t
  misc_feature (52)..(52): n is a, c, g, or t
  misc_feature (64)..(64): n is a, c, g, or t
  misc_feature (93)..(93): n is a, c, g, or t
  misc_feature (118)..(118): n is a, c, g, or t

SEQ ID NO: 280477 - DNA, 612 bp, Homo Sapiens; identical to SEQ ID NO: 266743

SEQ ID NO: 280478 - DNA, 478 bp, Homo Sapiens; identical to SEQ ID NO: 266744
  misc_feature (42)..(42): n is a, c, g, or t

SEQ ID NO: 280479 - DNA, 515 bp, Homo Sapiens; identical to SEQ ID NO: 266746

SEQ ID NO: 280480 - DNA, 462 bp, Homo Sapiens; identical to SEQ ID NO: 266747
  misc_feature (22)..(22): n is a, c, g, or t

SEQ ID NO: 280481 - DNA, 584 bp, Homo Sapiens; identical to SEQ ID NO: 266748
  misc_feature (290)..(374): n is a, c, g, or t

SEQ ID NO: 280482 - DNA, 328 bp, Homo Sapiens; identical to SEQ ID NO: 266749
  misc_feature (41)..(41): n is a, c, g, or t

SEQ ID NO: 280483 - DNA, 551 bp, Homo Sapiens; identical to SEQ ID NO: 266751

SEQ ID NO: 280484 - DNA, 488 bp, Homo Sapiens; identical to SEQ ID NO: 266752
  misc_feature (82)..(82): n is a, c, g, or t
  misc_feature (91)..(91): n is a, c, g, or t
  misc_feature (186)..(186): n is a, c, g, or t
  misc_feature (464)..(464): n is a, c, g, or t

SEQ ID NO: 280485 - DNA, 729 bp, Homo Sapiens; identical to SEQ ID NO: 266756
  misc_feature (84)..(84): n is a, c, g, or t

SEQ ID NO: 280486 - DNA, 399 bp, Homo Sapiens; identical to SEQ ID NO: 266757

SEQ ID NO: 280487 - DNA, 819 bp, Homo Sapiens; identical to SEQ ID NO: 266765
  misc_feature (17)..(17): n is a, c, g, or t
  misc_feature (25)..(25): n is a, c, g, or t
  misc_feature (71)..(71): n is a, c, g, or t
  misc_feature (171)..(225): n is a, c, g, or t
  misc_feature (374)..(382): n is a, c, g, or t

SEQ ID NO: 280488 - DNA, 464 bp, Homo Sapiens; identical to SEQ ID NO: 266766
  misc_feature (148)..(178): n is a, c, g, or t

SEQ ID NO: 280489 - DNA, 863 bp, Homo Sapiens; identical to SEQ ID NO: 266770
  misc_feature (244)..(365): n is a, c, g, or t

SEQ ID NO: 280490 - DNA, 452 bp, Homo Sapiens; identical to SEQ ID NO: 266771
  misc_feature (14)..(14): n is a, c, g, or t
  misc_feature (45)..(45): n is a, c, g, or t
  misc_feature (101)..(101): n is a, c, g, or t
  misc_feature (139)..(139): n is a, c, g, or t

SEQ ID NO: 280491 - DNA, 1063 bp, Homo Sapiens; identical to SEQ ID NO: 266773
  misc_feature (31)..(31): n is a, c, g, or t
  misc_feature (43)..(43): n is a, c, g, or t
  misc_feature (126)..(152): n is a, c, g, or t
  misc_feature (367)..(407): n is a, c, g, or t

SEQ ID NO: 280492 - DNA, 358 bp, Homo Sapiens; identical to SEQ ID NO: 266774

SEQ ID NO: 280493 - DNA, 522 bp, Homo Sapiens; identical to SEQ ID NO: 266777

SEQ ID NO: 280494 - DNA, 457 bp, Homo Sapiens; identical to SEQ ID NO: 266778
  misc_feature (18)..(18): n is a, c, g, or t

SEQ ID NO: 280495 - DNA, 357 bp, Homo Sapiens; identical to SEQ ID NO: 266781

SEQ ID NO: 280496 - DNA, 284 bp, Homo Sapiens; identical to SEQ ID NO: 266782
  misc_feature (250)..(250): n is a, c, g, or t

SEQ ID NO: 280497 - DNA, 717 bp, Homo Sapiens; identical to SEQ ID NO: 266786
  misc_feature (18)..(18): n is a, c, g, or t

SEQ ID NO: 280498 - DNA, 457 bp, Homo Sapiens; identical to SEQ ID NO: 266787
  misc_feature (31)..(31): n is a, c, g, or t
  misc_feature (37)..(37): n is a, c, g, or t

SEQ ID NO: 280499 - DNA, 451 bp, Homo Sapiens; identical to SEQ ID NO: 266797
  misc_feature (83)..(186): n is a, c, g, or t

SEQ ID NO: 280500 - DNA, 425 bp, Homo Sapiens; identical to SEQ ID NO: 266798
  misc_feature (67)..(67): n is a, c, g, or t
  misc_feature (83)..(186): n is a, c, g, or t
  misc_feature (371)..(371): n is a, c, g, or t
  misc_feature (398)..(398): n is a, c, g, or t

SEQ ID NO: 280501 - DNA, 972 bp, Homo Sapiens; identical to SEQ ID NO: 266804
  misc_feature (479)..(479): n is a, c, g, or t

SEQ ID NO: 280502 - DNA, 372 bp, Homo Sapiens; identical to SEQ ID NO: 266805
  misc_feature (36)..(36): n is a, c, g, or t
  misc_feature (41)..(41): n is a, c, g, or t
  misc_feature (346)..(346): n is a, c, g, or t

SEQ ID NO: 280503 - DNA, 447 bp, Homo Sapiens; identical to SEQ ID NO: 266813
  misc_feature (398)..(398): n is a, c, g, or t
  misc_feature (407)..(407): n is a, c, g, or t
  misc_feature (412)..(412): n is a, c, g, or t
  misc_feature (421)..(421): n is a, c, g, or t
  misc_feature (427)..(427): n is a, c, g, or t

SEQ ID NO: 280504 - DNA, 281 bp, Homo Sapiens; identical to SEQ ID NO: 266814
  misc_feature (58)..(201): n is a, c, g, or t

SEQ ID NO: 280505 - DNA, 629 bp, Homo Sapiens; identical to SEQ ID NO: 266822
  misc_feature (425)..(484): n is a, c, g, or t

SEQ ID NO: 280506 - DNA, 339 bp, Homo Sapiens; identical to SEQ ID NO: 266823

SEQ ID NO: 280507 - DNA, 515 bp, Homo Sapiens; identical to SEQ ID NO: 266824
  misc_feature (189)..(189): n is a, c, g, or t

SEQ ID NO: 280508 - DNA, 443 bp, Homo Sapiens; identical to SEQ ID NO: 266831
  misc_feature (116)..(116): n is a, c, g, or t
  misc_feature (289)..(289): n is a, c, g, or t
  misc_feature (328)..(328): n is a, c, g, or t
  misc_feature (400)..(400): n is a, c, g, or t
  misc_feature (415)..(415): n is a, c, g, or t

SEQ ID NO: 280509 - DNA, 1141 bp, Homo Sapiens; identical to SEQ ID NO: 266832
  misc_feature (265)..(265): n is a, c, g, or t
  misc_feature (982)..(1036): n is a, c, g, or t

SEQ ID NO: 280510 - DNA, 873 bp, Homo Sapiens; identical to SEQ ID NO: 266839
  misc_feature (346)..(346): n is a, c, g, or t

SEQ ID NO: 280511 - DNA, 416 bp, Homo Sapiens; identical to SEQ ID NO: 266840
  misc_feature (35)..(35): n is a, c, g, or t
  misc_feature (51)..(51): n is a, c, g, or t
  misc_feature (222)..(222): n is a, c, g, or t

SEQ ID NO: 280512 - DNA, 612 bp, Homo Sapiens; identical to SEQ ID NO: 266912

SEQ ID NO: 280513 - DNA, 457 bp, Homo Sapiens; identical to SEQ ID NO: 266913
  misc_feature (365)..(365): n is a, c, g, or t
  misc_feature (393)..(393): n is a, c, g, or t
  misc_feature (401)..(401): n is a, c, g, or t
  misc_feature (406)..(406): n is a, c, g, or t
  misc_feature (434)..(434): n is a, c, g, or t
  misc_feature (446)..(446): n is a, c, g, or t

SEQ ID NO: 280514 - DNA, 710 bp, Homo Sapiens; identical to SEQ ID NO: 266914

SEQ ID NO: 280515 - DNA, 468 bp, Homo Sapiens; identical to SEQ ID NO: 266915
  misc_feature (69)..(69): n is a, c, g, or t

SEQ ID NO: 280516 - DNA, 809 bp, Homo Sapiens; identical to SEQ ID NO: 266947
  misc_feature (23)..(23): n is a, c, g, or t
  misc_feature (94)..(94): n is a, c, g, or t
  misc_feature (98)..(98): n is a, c, g, or t

SEQ ID NO: 280517 - DNA, 373 bp, Homo Sapiens; identical to SEQ ID NO: 266948
  misc_feature (137)..(137): n is a, c, g, or t
  misc_feature (171)..(171): n is a, c, g, or t

SEQ ID NO: 280518 - DNA, 467 bp, Homo Sapiens; identical to SEQ ID NO: 266949
  misc_feature (67)..(128): n is a, c, g, or t

SEQ ID NO: 280519 - DNA, 746 bp, Homo Sapiens; identical to SEQ ID NO: 266956

SEQ ID NO: 280520 - DNA, 468 bp, Homo Sapiens; identical to SEQ ID NO: 266957
  misc_feature (201)..(201): n is a, c, g, or t

SEQ ID NO: 280521 - DNA, 403 bp, Homo Sapiens; identical to SEQ ID NO: 266967
  misc_feature (368)..(368): n is a, c, g, or t

SEQ ID NO: 280522 - DNA, 465 bp, Homo Sapiens; identical to SEQ ID NO: 266968
  misc_feature (27)..(27): n is a, c, g, or t
  misc_feature (32)..(32): n is a, c, g, or t
  misc_feature (48)..(48): n is a, c, g, or t
  misc_feature (115)..(115): n is a, c, g, or t
  misc_feature (140)..(140): n is a, c, g, or t

SEQ ID NO: 280523 - DNA, 780 bp, Homo Sapiens; identical to SEQ ID NO: 266984
  misc_feature (749)..(749): n is a, c, g, or t

SEQ ID NO: 280524 - DNA, 371 bp, Homo Sapiens; identical to SEQ ID NO: 266985

SEQ ID NO: 280525 - DNA, 786 bp, Homo Sapiens; identical to SEQ ID NO: 266988
  misc_feature (544)..(664): n is a, c, g, or t
  misc_feature (758)..(758): n is a, c, g, or t

SEQ ID NO: 280526 - DNA, 334 bp, Homo Sapiens; identical to SEQ ID NO: 266989
  misc_feature (280)..(280): n is a, c, g, or t

SEQ ID NO: 280527 - DNA, 853 bp, Homo Sapiens; identical to SEQ ID NO: 266993

SEQ ID NO: 280528 - DNA, 433 bp, Homo Sapiens; identical to SEQ ID NO: 266994
  misc_feature (66)..(66): n is a, c, g, or t
  misc_feature (75)..(75): n is a, c, g, or t

SEQ ID NO: 280529 - DNA, 809 bp, Homo Sapiens; identical to SEQ ID NO: 266998
  misc_feature (765)..(765): n is a, c, g, or t
  misc_feature (799)..(799): n is a, c, g, or t

SEQ ID NO: 280530 - DNA, 373 bp, Homo Sapiens; identical to SEQ ID NO: 266999
  misc_feature (283)..(283): n is a, c, g, or t

SEQ ID NO: 280531 - DNA, 1080 bp, Homo Sapiens; identical to SEQ ID NO: 267018

SEQ ID NO: 280532 - DNA, 512 bp, Homo Sapiens; identical to SEQ ID NO: 267019

SEQ ID NO: 280533 - DNA, 587 bp, Homo Sapiens; identical to SEQ ID NO: 267029
  misc_feature (27)..(27): n is a, c, g, or t
  misc_feature (33)..(33): n is a, c, g, or t
  misc_feature (385)..(411): n is a, c, g, or t

SEQ ID NO: 280534 - DNA, 639 bp, Homo Sapiens; identical to SEQ ID NO: 267030
  misc_feature (52)..(52): n is a, c, g, or t
  misc_feature (78)..(78): n is a, c, g, or t
  misc_feature (104)..(104): n is a, c, g, or t

SEQ ID NO: 280535 - DNA, 711 bp, Homo Sapiens; identical to SEQ ID NO: 267040

SEQ ID NO: 280536 - DNA, 351 bp, Homo Sapiens; identical to SEQ ID NO: 267041
  misc_feature (336)..(336): n is a, c, g, or t

SEQ ID NO: 280537 - DNA, 749 bp, Homo Sapiens; identical to SEQ ID NO: 267046
  misc_feature (194)..(194): n is a, c, g, or t
  misc_feature (431)..(460): n is a, c, g, or t

SEQ ID NO: 280538 - DNA, 726 bp, Homo Sapiens; identical to SEQ ID NO: 267047
  misc_feature (252)..(252): n is a, c, g, or t
  misc_feature (265)..(294): n is a, c, g, or t
  misc_feature (465)..(557): n is a, c, g, or t

SEQ ID NO: 280539 - DNA, 359 bp, Homo Sapiens; identical to SEQ ID NO: 267051

SEQ ID NO: 280540 - DNA, 500 bp, Homo Sapiens; identical to SEQ ID NO: 267052
  misc_feature (305)..(413): n is a, c, g, or t

SEQ ID NO: 280541 - DNA, 752 bp, Homo Sapiens; identical to SEQ ID NO: 267057
  misc_feature (255)..(266): n is a, c, g, or t
  misc_feature (605)..(694): n is a, c, g, or t
  misc_feature (718)..(718): n is a, c, g, or t

SEQ ID NO: 280542 - DNA, 407 bp, Homo Sapiens; identical to SEQ ID NO: 267058
  misc_feature (284)..(284): n is a, c, g, or t

SEQ ID NO: 280543 - DNA, 726 bp, Homo Sapiens; identical to SEQ ID NO: 267064
  misc_feature (404)..(444): n is a, c, g, or t

SEQ ID NO: 280544 - DNA, 622 bp, Homo Sapiens; identical to SEQ ID NO: 267065

SEQ ID NO: 280545 - DNA, 709 bp, Homo Sapiens; identical to SEQ ID NO: 267073
  misc_feature (11)..(11): n is a, c, g, or t
  misc_feature (400)..(400): n is a, c, g, or t

SEQ ID NO: 280546 - DNA, 296 bp, Homo Sapiens; identical to SEQ ID NO: 267074

SEQ ID NO: 280547 - DNA, 773 bp, Homo Sapiens; identical to SEQ ID NO: 267091

SEQ ID NO: 280548 - DNA, 393 bp, Homo Sapiens; identical to SEQ ID NO: 267092

SEQ ID NO: 280549 - DNA, 807 bp, Homo Sapiens; identical to SEQ ID NO: 267093
  misc_feature (422)..(476): n is a, c, g, or t
  misc_feature (778)..(778): n is a, c, g, or t

SEQ ID NO: 280550 - DNA, 465 bp, Homo Sapiens; identical to SEQ ID NO: 267094
  misc_feature (17)..(17): n is a, c, g, or t
  misc_feature (26)..(26): n is a, c, g, or t
  misc_feature (92)..(92): n is a, c, g, or t

SEQ ID NO: 280551 - DNA, 791 bp, Homo Sapiens; identical to SEQ ID NO: 267102

SEQ ID NO: 280552 - DNA, 462 bp, Homo Sapiens; identical to SEQ ID NO: 267103
  misc_feature (20)..(20): n is a, c, g, or t
  misc_feature (58)..(58): n is a, c, g, or t
  misc_feature (442)..(442): n is a, c, g, or t

SEQ ID NO: 280553 - DNA, 993 bp, Homo Sapiens; identical to SEQ ID NO: 267107
  misc_feature (830)..(927): n is a, c, g, or t

SEQ ID NO: 280554 - DNA, 495 bp, Homo Sapiens; identical to SEQ ID NO: 267108
  misc_feature (429)..(429): n is a, c, g, or t
  misc_feature (467)..(467): n is a, c, g, or t

SEQ ID NO: 280555 - DNA, 638 bp, Homo Sapiens; identical to SEQ ID NO: 267110
  misc_feature (172)..(326): n is a, c, g, or t
  misc_feature (331)..(331): n is a, c, g, or t
  misc_feature (351)..(351): n is a, c, g, or t

SEQ ID NO: 280556 - DNA, 410 bp, Homo Sapiens; identical to SEQ ID NO: 267111

SEQ ID NO: 280557 - DNA, 597 bp, Homo Sapiens; identical to SEQ ID NO: 267118

SEQ ID NO: 280558 - DNA, 312 bp, Homo Sapiens; identical to SEQ ID NO: 267119
  misc_feature (13)..(13): n is a, c, g, or t
  misc_feature (22)..(22): n is a, c, g, or t
  misc_feature (38)..(38): n is a, c, g, or t
  misc_feature (70)..(70): n is a, c, g, or t
  misc_feature (78)..(78): n is a, c, g, or t
  misc_feature (122)..(122): n is a, c, g, or t
  misc_feature (141)..(141): n is a, c, g, or t
  misc_feature (175)..(175): n is a, c, g, or t

SEQ ID NO: 280559 - DNA, 351 bp, Homo Sapiens; identical to SEQ ID NO: 267124
  misc_feature (18)..(18): n is a, c, g, or t

SEQ ID NO: 280560 - DNA, 278 bp, Homo Sapiens; identical to SEQ ID NO: 267125

SEQ ID NO: 280561 - DNA, 1413 bp, Homo Sapiens; identical to SEQ ID NO: 267127
  misc_feature (101)..(101): n is a, c, g, or t

SEQ ID NO: 280562 - DNA, 456 bp, Homo Sapiens; identical to SEQ ID NO: 267128
  misc_feature (22)..(22): n is a, c, g, or t
  misc_feature (70)..(70): n is a, c, g, or t

SEQ ID NO: 280563 - DNA, 455 bp, Homo Sapiens; identical to SEQ ID NO: 267129
  misc_feature (41)..(41): n is a, c, g, or t

SEQ ID NO: 280564 - DNA, 812 bp, Homo Sapiens; identical to SEQ ID NO: 267130
  misc_feature (314)..(344): n is a, c, g, or t

SEQ ID NO: 280565 - DNA, 457 bp, Homo Sapiens; identical to SEQ ID NO: 267131
  misc_feature (38)..(38): n is a, c, g, or t

SEQ ID NO: 280566 - DNA, 779 bp, Homo Sapiens; identical to SEQ ID NO: 267142
  misc_feature (382)..(622): n is a, c, g, or t

SEQ ID NO: 280567 - DNA, 299 bp, Homo Sapiens; identical to SEQ ID NO: 267143
  misc_feature (21)..(21): n is a, c, g, or t
  misc_feature (28)..(28): n is a, c, g, or t
  misc_feature (36)..(36): n is a, c, g, or t
  misc_feature (44)..(44): n is a, c, g, or t
  misc_feature (57)..(57): n is a, c, g, or t
  misc_feature (169)..(169): n is a, c, g, or t

SEQ ID NO: 280568 - DNA, 850 bp, Homo Sapiens; identical to SEQ ID NO: 267162

SEQ ID NO: 280569 - DNA, 1092 bp, Homo Sapiens; identical to SEQ ID NO: 267163
  misc_feature (14)..(14): n is a, c, g, or t
  misc_feature (38)..(38): n is a, c, g, or t
  misc_feature (44)..(44): n is a, c, g, or t
  misc_feature (68)..(68): n is a, c, g, or t
  misc_feature (75)..(75): n is a, c, g, or t
  misc_feature (96)..(96): n is a, c, g, or t
  misc_feature (117)..(117): n is a, c, g, or t

SEQ ID NO: 280570 - DNA, 577 bp, Homo Sapiens; identical to SEQ ID NO: 267165
  misc_feature (380)..(405): n is a, c, g, or t

SEQ ID NO: 280571 - DNA, 604 bp, Homo Sapiens; identical to SEQ ID NO: 267166

SEQ ID NO: 280572 - DNA, 680 bp, Homo Sapiens; identical to SEQ ID NO: 267171
  misc_feature (625)..(625): n is a, c, g, or t

SEQ ID NO: 280573 - DNA, 479 bp, Homo Sapiens; identical to SEQ ID NO: 267172
  misc_feature (158)..(158): n is a, c, g, or t
  misc_feature (188)..(188): n is a, c, g, or t

SEQ ID NO: 280574 - DNA, 635 bp, Homo Sapiens; identical to SEQ ID NO: 267178
  misc_feature (496)..(529): n is a, c, g, or t
  misc_feature (538)..(538): n is a, c, g, or t
  misc_feature (556)..(556): n is a, c, g, or t
  misc_feature (568)..(568): n is a, c, g, or t

SEQ ID NO: 280575 - DNA, 427 bp, Homo Sapiens; identical to SEQ ID NO: 267179
  misc_feature (96)..(96): n is a, c, g, or t
  misc_feature (292)..(320): n is a, c, g, or t

SEQ ID NO: 280576 - DNA, 690 bp, Homo Sapiens; identical to SEQ ID NO: 267200
  misc_feature (617)..(626): n is a, c, g, or t

SEQ ID NO: 280577 - DNA, 470 bp, Homo Sapiens; identical to SEQ ID NO: 267201
  misc_feature (98)..(98): n is a, c, g, or t
  misc_feature (103)..(103): n is a, c, g, or t
  misc_feature (409)..(418): n is a, c, g, or t

SEQ ID NO: 280578 - DNA, 773 bp, Homo Sapiens; identical to SEQ ID NO: 267205
  misc_feature (157)..(297): n is a, c, g, or t

SEQ ID NO: 280579 - DNA, 752 bp, Homo Sapiens; identical to SEQ ID NO: 267206
  misc_feature (61)..(61): n is a, c, g, or t
  misc_feature (337)..(337): n is a, c, g, or t
  misc_feature (485)..(625): n is a, c, g, or t

SEQ ID NO: 280580 - DNA, 510 bp, Homo Sapiens; identical to SEQ ID NO: 267213
  misc_feature (190)..(190): n is a, c, g, or t

SEQ ID NO: 280581 - DNA, 551 bp, Homo Sapiens; identical to SEQ ID NO: 267214
  misc_feature (397)..(397): n is a, c, g, or t
  misc_feature (472)..(472): n is a, c, g, or t
  misc_feature (479)..(479): n is a, c, g, or t
  misc_feature (513)..(513): n is a, c, g, or t
  misc_feature (525)..(525): n is a, c, g, or t
  misc_feature (535)..(535): n is a, c, g, or t

SEQ ID NO: 280582 - DNA, 731 bp, Homo Sapiens; identical to SEQ ID NO: 267219
  misc_feature (271)..(271): n is a, c, g, or t

SEQ ID NO: 280583 - DNA, 413 bp, Homo Sapiens; identical to SEQ ID NO: 267220
  misc_feature (335)..(335): n is a, c, g, or t

SEQ ID NO: 280584 - DNA, 473 bp, Homo Sapiens; identical to SEQ ID NO: 267221
  misc_feature (351)..(351): n is a, c, g, or t
  misc_feature (371)..(371): n is a, c, g, or t
  misc_feature (380)..(380): n is a, c, g, or t
  misc_feature (392)..(392): n is a, c, g, or t
  misc_feature (403)..(403): n is a, c, g, or t
  misc_feature (447)..(447): n is a, c, g, or t
  misc_feature (453)..(453): n is a, c, g, or t

SEQ ID NO: 280585 - DNA, 457 bp, Homo Sapiens; identical to SEQ ID NO: 267222

SEQ ID NO: 280586 - DNA, 616 bp, Homo Sapiens; identical to SEQ ID NO: 267223
  misc_feature (54)..(247): n is a, c, g, or t

SEQ ID NO: 280587 - DNA, 746 bp, Homo Sapiens; identical to SEQ ID NO: 267230
  misc_feature (678)..(678): n is a, c, g, or t

SEQ ID NO: 280588 - DNA, 442 bp, Homo Sapiens; identical to SEQ ID NO: 267231
  misc_feature (391)..(391): n is a, c, g, or t
  misc_feature (407)..(407): n is a, c, g, or t
  misc_feature (412)..(412): n is a, c, g, or t
  misc_feature (426)..(426): n is a, c, g, or t

SEQ ID NO: 280589 - DNA, 529 bp, Homo Sapiens; identical to SEQ ID NO: 267232
  misc_feature (47)..(47): n is a, c, g, or t

SEQ ID NO: 280590 - DNA, 907 bp, Homo Sapiens; identical to SEQ ID NO: 267252

SEQ ID NO: 280591 - DNA, 387 bp, Homo Sapiens; identical to SEQ ID NO: 267253
  misc_feature (25)..(25): n is a, c, g, or t
  misc_feature (67)..(67): n is a, c, g, or t

SEQ ID NO: 280592 - DNA, 395 bp, Homo Sapiens; identical to SEQ ID NO: 267254
  misc_feature (378)..(378): n is a, c, g, or t

SEQ ID NO: 280593 - DNA, 782 bp, Homo Sapiens; identical to SEQ ID NO: 267262
  misc_feature (127)..(137): n is a, c, g, or t
  misc_feature (417)..(417): n is a, c, g, or t
  misc_feature (580)..(595): n is a, c, g, or t
  misc_feature (597)..(738): n is a, c, g, or t

SEQ ID NO: 280594 - DNA, 349 bp, Homo Sapiens; identical to SEQ ID NO: 267263
  misc_feature (45)..(45): n is a, c, g, or t
  misc_feature (71)..(122): n is a, c, g, or t
  misc_feature (256)..(256): n is a, c, g, or t

SEQ ID NO: 280595 - DNA, 741 bp, Homo Sapiens; identical to SEQ ID NO: 267292
  misc_feature (291)..(299): n is a, c, g, or t
  misc_feature (340)..(340): n is a, c, g, or t

SEQ ID NO: 280596 - DNA, 395 bp, Homo Sapiens; identical to SEQ ID NO: 267293
  misc_feature (271)..(271): n is a, c, g, or t
  misc_feature (350)..(350): n is a, c, g, or t
  misc_feature (367)..(367): n is a, c, g, or t
  misc_feature (384)..(384): n is a, c, g, or t

SEQ ID NO: 280597 - DNA, 912 bp, Homo Sapiens; identical to SEQ ID NO: 267294
  misc_feature (155)..(155): n is a, c, g, or t
  misc_feature (512)..(590): n is a, c, g, or t
  misc_feature (720)..(752): n is a, c, g, or t

SEQ ID NO: 280598 - DNA, 457 bp, Homo Sapiens; identical to SEQ ID NO: 267295
  misc_feature (29)..(29): n is a, c, g, or t
  misc_feature (81)..(81): n is a, c, g, or t
  misc_feature (93)..(93): n is a, c, g, or t
  misc_feature (95)..(95): n is a, c, g, or t
  misc_feature (111)..(170): n is a, c, g, or t
  misc_feature (283)..(315): n is a, c, g, or t

SEQ ID NO: 280599 - DNA, 386 bp, Homo Sapiens; identical to SEQ ID NO: 267324

SEQ ID NO: 280600 - DNA, 423 bp, Homo Sapiens; identical to SEQ ID NO: 267325

SEQ ID NO: 280601 - DNA, 737 bp, Homo Sapiens; identical to SEQ ID NO: 267357
  misc_feature (372)..(372): n is a, c, g, or t
  misc_feature (463)..(471): n is a, c, g, or t
  misc_feature (682)..(682): n is a, c, g, or t

SEQ ID NO: 280602 - DNA, 485 bp, Homo Sapiens; identical to SEQ ID NO: 267358
  misc_feature (12)..(12): n is a, c, g, or t
  misc_feature (430)..(430): n is a, c, g, or t

SEQ ID NO: 280603 - DNA, 729 bp, Homo Sapiens; identical to SEQ ID NO: 267361

SEQ ID NO: 280604 - DNA, 472 bp, Homo Sapiens; identical to SEQ ID NO: 267362
  misc_feature (20)..(20): n is a, c, g, or t
  misc_feature (36)..(36): n is a, c, g, or t
  misc_feature (73)..(73): n is a, c, g, or t
  misc_feature (114)..(114): n is a, c, g, or t
  misc_feature (133)..(133): n is a, c, g, or t

SEQ ID NO: 280605 - DNA, 492 bp, Homo Sapiens; identical to SEQ ID NO: 267385
  misc_feature (96)..(358): n is a, c, g, or t
  misc_feature (449)..(449): n is a, c, g, or t

SEQ ID NO: 280606 - DNA, 863 bp, Homo Sapiens; identical to SEQ ID NO: 267386
  misc_feature (543)..(805): n is a, c, g, or t

SEQ ID NO: 280607 - DNA, 683 bp, Homo Sapiens; identical to SEQ ID NO: 267388

SEQ ID NO: 280608 - DNA, 322 bp, Homo Sapiens; identical to SEQ ID NO: 267389

SEQ ID NO: 280609 - DNA, 449 bp, Homo Sapiens; identical to SEQ ID NO: 267399

SEQ ID NO: 280610 - DNA, 403 bp, Homo Sapiens; identical to SEQ ID NO: 267400

SEQ ID NO: 280611 - DNA, 773 bp, Homo Sapiens; identical to SEQ ID NO: 267404

SEQ ID NO: 280612 - DNA, 457 bp, Homo Sapiens; identical to SEQ ID NO: 267405

SEQ ID NO: 280613 - DNA, 482 bp, Homo Sapiens; identical to SEQ ID NO: 267406
  misc_feature (447)..(447): n is a, c, g, or t
  misc_feature (460)..(460): n is a, c, g, or t

SEQ ID NO: 280614 - DNA, 780 bp, Homo Sapiens; identical to SEQ ID NO: 267414

SEQ ID NO: 280615 - DNA, 790 bp, Homo Sapiens; identical to SEQ ID NO: 267415
  misc_feature (466)..(466): n is a, c, g, or t
  misc_feature (468)..(468): n is a, c, g, or t
  misc_feature (472)..(473): n is a, c, g, or t
  misc_feature (476)..(478): n is a, c, g, or t
  misc_feature (481)..(482): n is a, c, g, or t

SEQ ID NO: 280616 - DNA, 595 bp, Homo Sapiens; identical to SEQ ID NO: 267419

SEQ ID NO: 280617 - DNA, 490 bp, Homo Sapiens; identical to SEQ ID NO: 267420
  misc_feature (40)..(40): n is a, c, g, or t
  misc_feature (50)..(50): n is a, c, g, or t
  misc_feature (59)..(59): n is a, c, g, or t
  misc_feature (64)..(64): n is a, c, g, or t
  misc_feature (69)..(69): n is a, c, g, or t
  misc_feature (161)..(161): n is a, c, g, or t

SEQ ID NO: 280618 - DNA, 1027 bp, Homo Sapiens; identical to SEQ ID NO: 267458
  misc_feature (305)..(363): n is a, c, g, or t

SEQ ID NO: 280619 - DNA, 388 bp, Homo Sapiens; identical to SEQ ID NO: 267459

SEQ ID NO: 280620 - DNA, 1023 bp, Homo Sapiens; identical to SEQ ID NO: 267471
  misc_feature (11)..(11): n is a, c, g, or t
  misc_feature (52)..(89): n is a, c, g, or t

SEQ ID NO: 280621 - DNA, 573 bp, Homo Sapiens; identical to SEQ ID NO: 267472
  misc_feature (271)..(271): n is a, c, g, or t
  misc_feature (278)..(278): n is a, c, g, or t

SEQ ID NO: 280622 - DNA, 727 bp, Homo Sapiens; identical to SEQ ID NO: 267477

SEQ ID NO: 280623 - DNA, 451 bp, Homo Sapiens; identical to SEQ ID NO: 267478

SEQ ID NO: 280624 - DNA, 373 bp, Homo Sapiens; identical to SEQ ID NO: 267486
  misc_feature (85)..(199): n is a, c, g, or t

SEQ ID NO: 280625 - DNA, 377 bp, Homo Sapiens; identical to SEQ ID NO: 267487
  misc_feature (46)..(47): n is a, c, g, or t
  misc_feature (49)..(49): n is a, c, g, or t
  misc_feature (84)..(198): n is a, c, g, or t
  misc_feature (364)..(364): n is a, c, g, or t

SEQ ID NO: 280626 - DNA, 780 bp, Homo Sapiens; identical to SEQ ID NO: 267512

SEQ ID NO: 280627 - DNA, 387 bp, Homo Sapiens; identical to SEQ ID NO: 267513
  misc_feature (28)..(28): n is a, c, g, or t
  misc_feature (38)..(38): n is a, c, g, or t
  misc_feature (44)..(44): n is a, c, g, or t

SEQ ID NO: 280628 - DNA, 754 bp, Homo Sapiens; identical to SEQ ID NO: 267517
  misc_feature (415)..(415): n is a, c, g, or t

SEQ ID NO: 280629 - DNA, 404 bp, Homo Sapiens; identical to SEQ ID NO: 267518

SEQ ID NO: 280630 - DNA, 988 bp, Homo Sapiens; identical to SEQ ID NO: 267536
  misc_feature (284)..(284): n is a, c, g, or t
  misc_feature (737)..(782): n is a, c, g, or t

SEQ ID NO: 280631 - DNA, 412 bp, Homo Sapiens; identical to SEQ ID NO: 267537
  misc_feature (336)..(336): n is a, c, g, or t
  misc_feature (354)..(354): n is a, c, g, or t

SEQ ID NO: 280632 - DNA, 447 bp, Homo Sapiens; identical to SEQ ID NO: 267540

SEQ ID NO: 280633 - DNA, 574 bp, Homo Sapiens; identical to SEQ ID NO: 267541

SEQ ID NO: 280634 - DNA, 833 bp, Homo Sapiens; identical to SEQ ID NO: 267551

SEQ ID NO: 280635 - DNA, 558 bp, Homo Sapiens; identical to SEQ ID NO: 267552
  misc_feature (21)..(21): n is a, c, g, or t
  misc_feature (155)..(155): n is a, c, g, or t
  misc_feature (185)..(185): n is a, c, g, or t
  misc_feature (426)..(426): n is a, c, g, or t
  misc_feature (522)..(522): n is a, c, g, or t

SEQ ID NO: 280636 - DNA, 536 bp, Homo Sapiens; identical to SEQ ID NO: 267562

SEQ ID NO: 280637 - DNA, 404 bp, Homo Sapiens; identical to SEQ ID NO: 267563

SEQ ID NO: 280638 - DNA, 640 bp, Homo Sapiens; identical to SEQ ID NO: 267581
  misc_feature (292)..(292): n is a, c, g, or t

SEQ ID NO: 280639 - DNA, 457 bp, Homo Sapiens; identical to SEQ ID NO: 267582
  misc_feature (428)..(428): n is a, c, g, or t
  misc_feature (441)..(441): n is a, c, g, or t

SEQ ID NO: 280640 - DNA, 746 bp, Homo Sapiens; identical to SEQ ID NO: 267586
  misc_feature (91)..(172): n is a, c, g, or t

SEQ ID NO: 280641 - DNA, 268 bp, Homo Sapiens; identical to SEQ ID NO: 267587

SEQ ID NO: 280642 - DNA, 923 bp, Homo Sapiens; identical to SEQ ID NO: 267595
  misc_feature (404)..(404): n is a, c, g, or t
  misc_feature (407)..(407): n is a, c, g, or t

SEQ ID NO: 280643 - DNA, 711 bp, Homo Sapiens; identical to SEQ ID NO: 267596

SEQ ID NO: 280644 - DNA, 277 bp, Homo Sapiens; identical to SEQ ID NO: 267599
  misc_feature (11)..(11): n is a, c, g, or t
  misc_feature (138)..(138): n is a, c, g, or t

SEQ ID NO: 280645 - DNA, 544 bp, Homo Sapiens; identical to SEQ ID NO: 267600
  misc_feature (28)..(28): n is a, c, g, or t
  misc_feature (38)..(38): n is a, c, g, or t
  misc_feature (47)..(47): n is a, c, g, or t
  misc_feature (56)..(56): n is a, c, g, or t
  misc_feature (80)..(80): n is a, c, g, or t

SEQ ID NO: 280646 - DNA, 546 bp, Homo Sapiens; identical to SEQ ID NO: 267604
  misc_feature (514)..(514): n is a, c, g, or t

SEQ ID NO: 280647 - DNA, 477 bp, Homo Sapiens; identical to SEQ ID NO: 267605
  misc_feature (174)..(222): n is a, c, g, or t
  misc_feature (262)..(426): n is a, c, g, or t
  misc_feature (433)..(433): n is a, c, g, or t

SEQ ID NO: 280648 - DNA, 519 bp, Homo Sapiens; identical to SEQ ID NO: 267610
  misc_feature (47)..(47): n is a, c, g, or t
  misc_feature (50)..(75): n is a, c, g, or t
  misc_feature (424)..(424): n is a, c, g, or t
  misc_feature (460)..(460): n is a, c, g, or t
  misc_feature (471)..(471): n is a, c, g, or t
  misc_feature (498)..(498): n is a, c, g, or t

SEQ ID NO: 280649 - DNA, 471 bp, Homo Sapiens; identical to SEQ ID NO: 267611
  misc_feature (22)..(22): n is a, c, g, or t
  misc_feature (27)..(27): n is a, c, g, or t
  misc_feature (362)..(409): n is a, c, g, or t

SEQ ID NO: 280650 - DNA, 542 bp, Homo Sapiens; identical to SEQ ID NO: 267614

SEQ ID NO: 280651 - DNA, 488 bp, Homo Sapiens; identical to SEQ ID NO: 267615
  misc_feature (345)..(345): n is a, c, g, or t
  misc_feature (434)..(434): n is a, c, g, or t
  misc_feature (440)..(440): n is a, c, g, or t
  misc_feature (446)..(446): n is a, c, g, or t
  misc_feature (467)..(467): n is a, c, g, or t

SEQ ID NO: 280652 - DNA, 457 bp, Homo Sapiens; identical to SEQ ID NO: 267637
  misc_feature (391)..(391): n is a, c, g, or t

SEQ ID NO: 280653 - DNA, 416 bp, Homo Sapiens; identical to SEQ ID NO: 267638

SEQ ID NO: 280654 - DNA, 485 bp, Homo Sapiens; identical to SEQ ID NO: 267644
  misc_feature (57)..(200): n is a, c, g, or t

SEQ ID NO: 280655 - DNA, 776 bp, Homo Sapiens; identical to SEQ ID NO: 267645
  misc_feature (142)..(142): n is a, c, g, or t
  misc_feature (190)..(190): n is a, c, g, or t
  misc_feature (227)..(227): n is a, c, g, or t
  misc_feature (667)..(687): n is a, c, g, or t

SEQ ID NO: 280656 - DNA, 501 bp, Homo Sapiens; identical to SEQ ID NO: 267685

SEQ ID NO: 280657 - DNA, 419 bp, Homo Sapiens; identical to SEQ ID NO: 267686

SEQ ID NO: 280658 - DNA, 608 bp, Homo Sapiens; identical to SEQ ID NO: 267687
  misc_feature (160)..(160): n is a, c, g, or t
  misc_feature (451)..(453): n is a, c, g, or t
  misc_feature (455)..(455): n is a, c, g, or t
  misc_feature (567)..(568): n is a, c, g, or t

SEQ ID NO: 280659 - DNA, 723 bp, Homo Sapiens; identical to SEQ ID NO: 267713
  misc_feature (297)..(297): n is a, c, g, or t

SEQ ID NO: 280660 - DNA, 424 bp, Homo Sapiens; identical to SEQ ID NO: 267714
  misc_feature (97)..(97): n is a, c, g, or t

SEQ ID NO: 280661 - DNA, 557 bp, Homo Sapiens; identical to SEQ ID NO: 267720

SEQ ID NO: 280662 - DNA, 265 bp, Homo Sapiens; identical to SEQ ID NO: 267721

SEQ ID NO: 280663 - DNA, 557 bp, Homo Sapiens; identical to SEQ ID NO: 267722

SEQ ID NO: 280664 - DNA, 449 bp, Homo Sapiens; identical to SEQ ID NO: 267723
  misc_feature (287)..(287): n is a, c, g, or t
  misc_feature (307)..(307): n is a, c, g, or t
  misc_feature (381)..(381): n is a, c, g, or t
  misc_feature (390)..(390): n is a, c, g, or t
  misc_feature (402)..(402): n is a, c, g, or t

SEQ ID NO: 280665 - DNA, 979 bp, Homo Sapiens; identical to SEQ ID NO: 267728
  misc_feature (62)..(72): n is a, c, g, or t
  misc_feature (85)..(319): n is a, c, g, or t

SEQ ID NO: 280666 - DNA, 428 bp, Homo Sapiens; identical to SEQ ID NO: 267729
  misc_feature (110)..(344): n is a, c, g, or t
  misc_feature (357)..(367): n is a, c, g, or t

SEQ ID NO: 280667 - DNA, 949 bp, Homo Sapiens; identical to SEQ ID NO: 267760
  misc_feature (898)..(898): n is a, c, g, or t

SEQ ID NO: 280668 - DNA, 415 bp, Homo Sapiens; identical to SEQ ID NO: 267761

SEQ ID NO: 280669 - DNA, 945 bp, Homo Sapiens; identical to SEQ ID NO: 267762

SEQ ID NO: 280670 - DNA, 425 bp, Homo Sapiens; identical to SEQ ID NO: 267763
  misc_feature (356)..(356): n is a, c, g, or t
  misc_feature (390)..(390): n is a, c, g, or t

SEQ ID NO: 280671 - DNA, 965 bp, Homo Sapiens; identical to SEQ ID NO: 267764
  misc_feature (344)..(344): n is a, c, g, or t
  misc_feature (408)..(408): n is a, c, g, or t
  misc_feature (947)..(947): n is a, c, g, or t

SEQ ID NO: 280672 - DNA, 428 bp, Homo Sapiens; identical to SEQ ID NO: 267765
  misc_feature (256)..(256): n is a, c, g, or t
  misc_feature (310)..(310): n is a, c, g, or t
  misc_feature (341)..(341): n is a, c, g, or t
  misc_feature (367)..(367): n is a, c, g, or t
  misc_feature (378)..(378): n is a, c, g, or t
  misc_feature (411)..(411): n is a, c, g, or t

SEQ ID NO: 280673 - DNA, 294 bp, Homo Sapiens; identical to SEQ ID NO: 267766
  misc_feature (33)..(33): n is a, c, g, or t

SEQ ID NO: 280674 - DNA, 1041 bp, Homo Sapiens; identical to SEQ ID NO: 267767

SEQ ID NO: 280675 - DNA, 606 bp, Homo Sapiens; identical to SEQ ID NO: 267790

SEQ ID NO: 280676 - DNA, 429 bp, Homo Sapiens; identical to SEQ ID NO: 267791

SEQ ID NO: 280677 - DNA, 553 bp, Homo Sapiens; identical to SEQ ID NO: 267793

SEQ ID NO: 280678 - DNA, 453 bp, Homo Sapiens; identical to SEQ ID NO: 267794
  misc_feature (21)..(21): n is a, c, g, or t
  misc_feature (31)..(31): n is a, c, g, or t
  misc_feature (53)..(53): n is a, c, g, or t
  misc_feature (86)..(86): n is a, c, g, or t
  misc_feature (132)..(132): n is a, c, g, or t

SEQ ID NO: 280679 - DNA, 976 bp, Homo Sapiens; identical to SEQ ID NO: 267798
  misc_feature (779)..(779): n is a, c, g, or t
  misc_feature (783)..(830): n is a, c, g, or t
  misc_feature (859)..(860): n is a, c, g, or t
  misc_feature (958)..(958): n is a, c, g, or t

SEQ ID NO: 280680 - DNA, 492 bp, Homo Sapiens; identical to SEQ ID NO: 267799
  misc_feature (376)..(376): n is a, c, g, or t
  misc_feature (438)..(438): n is a, c, g, or t
  misc_feature (444)..(444): n is a, c, g, or t
  misc_feature (472)..(472): n is a, c, g, or t

SEQ ID NO: 280681 - DNA, 624 bp, Homo Sapiens; identical to SEQ ID NO: 267804

SEQ ID NO: 280682 - DNA, 561 bp, Homo Sapiens; identical to SEQ ID NO: 267805
  misc_feature (40)..(40): n is a, c, g, or t
  misc_feature (51)..(51): n is a, c, g, or t
  misc_feature (129)..(129): n is a, c, g, or t
  misc_feature (162)..(162): n is a, c, g, or t
  misc_feature (288)..(288): n is a, c, g, or t
  misc_feature (397)..(397): n is a, c, g, or t
  misc_feature (419)..(419): n is a, c, g, or t
  misc_feature (526)..(526): n is a, c, g, or t

SEQ ID NO: 280683 - DNA, 651 bp, Homo Sapiens; identical to SEQ ID NO: 267811
  misc_feature (35)..(35): n is a, c, g, or t
  misc_feature (221)..(261): n is a, c, g, or t

SEQ ID NO: 280684 - DNA, 752 bp, Homo Sapiens; identical to SEQ ID NO: 267812
  misc_feature (243)..(244): n is a, c, g, or t
  misc_feature (247)..(247): n is a, c, g, or t
  misc_feature (254)..(254): n is a, c, g, or t
  misc_feature (258)..(258): n is a, c, g, or t
  misc_feature (574)..(574): n is a, c, g, or t
  misc_feature (614)..(614): n is a, c, g, or t
  misc_feature (641)..(641): n is a, c, g, or t

SEQ ID NO: 280685 - DNA, 390 bp, Homo Sapiens; identical to SEQ ID NO: 267839

SEQ ID NO: 280686 - DNA, 467 bp, Homo Sapiens; identical to SEQ ID NO: 267840
  misc_feature (18)..(18): n is a, c, g, or t

SEQ ID NO: 280687 - DNA, 528 bp, Homo Sapiens; identical to SEQ ID NO: 267841

SEQ ID NO: 280688 - DNA, 719 bp, Homo Sapiens; identical to SEQ ID NO: 267842
  misc_feature (517)..(657): n is a, c, g, or t

SEQ ID NO: 280689 - DNA, 496 bp, Homo Sapiens; identical to SEQ ID NO: 267843
  misc_feature (75)..(75): n is a, c, g, or t

SEQ ID NO: 280690 - DNA, 582 bp, Homo Sapiens; identical to SEQ ID NO: 267845
  misc_feature (12)..(12): n is a, c, g, or t
  misc_feature (55)..(55): n is a, c, g, or t
  misc_feature (99)..(99): n is a, c, g, or t
  misc_feature (130)..(130): n is a, c, g, or t
  misc_feature (155)..(155): n is a, c, g, or t
  misc_feature (401)..(401): n is a, c, g, or t

SEQ ID NO: 280691 - DNA, 495 bp, Homo Sapiens; identical to SEQ ID NO: 267846

SEQ ID NO: 280692 - DNA, 1112 bp, Homo Sapiens; identical to SEQ ID NO: 267855

SEQ ID NO: 280693 - DNA, 417 bp, Homo Sapiens; identical to SEQ ID NO: 267856
  misc_feature (19)..(19): n is a, c, g, or t
  misc_feature (71)..(71): n is a, c, g, or t
  misc_feature (84)..(84): n is a, c, g, or t
  misc_feature (111)..(111): n is a, c, g, or t
  misc_feature (182)..(182): n is a, c, g, or t

SEQ ID NO: 280694 - DNA, 807 bp, Homo Sapiens; identical to SEQ ID NO: 267890

SEQ ID NO: 280695 - DNA, 391 bp, Homo Sapiens; identical to SEQ ID NO: 267891

SEQ ID NO: 280696 - DNA, 479 bp, Homo Sapiens; identical to SEQ ID NO: 267892
  misc_feature (441)..(441): n is a, c, g, or t

SEQ ID NO: 280697 - DNA, 403 bp, Homo Sapiens; identical to SEQ ID NO: 267893
  misc_feature (38)..(38): n is a, c, g, or t
  misc_feature (323)..(323): n is a, c, g, or t
  misc_feature (388)..(388): n is a, c, g, or t

SEQ ID NO: 280698 - DNA, 572 bp, Homo Sapiens; identical to SEQ ID NO: 267920
  misc_feature (137)..(137): n is a, c, g, or t

SEQ ID NO: 280699 - DNA, 351 bp, Homo Sapiens; identical to SEQ ID NO: 267921
  misc_feature (81)..(81): n is a, c, g, or t

SEQ ID NO: 280700 - DNA, 548 bp, Homo Sapiens; identical to SEQ ID NO: 267936
  misc_feature (530)..(530): n is a, c, g, or t

SEQ ID NO: 280701 - DNA, 526 bp, Homo Sapiens; identical to SEQ ID NO: 267937
  misc_feature (403)..(403): n is a, c, g, or t
  misc_feature (451)..(451): n is a, c, g, or t
  misc_feature (515)..(515): n is a, c, g, or t

SEQ ID NO: 280702 - DNA, 481 bp, Homo Sapiens; identical to SEQ ID NO: 267948
  misc_feature (128)..(128): n is a, c, g, or t

SEQ ID NO: 280703 - DNA, 412 bp, Homo Sapiens; identical to SEQ ID NO: 267949

SEQ ID NO: 280704 - DNA, 696 bp, Homo Sapiens; identical to SEQ ID NO: 267961
  misc_feature (457)..(457): n is a, c, g, or t

SEQ ID NO: 280705 - DNA, 721 bp, Homo Sapiens; identical to SEQ ID NO: 267962
  misc_feature (671)..(671): n is a, c, g, or t

SEQ ID NO: 280706 - DNA, 679 bp, Homo Sapiens; identical to SEQ ID NO: 267987

SEQ ID NO: 280707 - DNA, 369 bp, Homo Sapiens; identical to SEQ ID NO: 267988
  misc_feature (11)..(11): n is a, c, g, or t
  misc_feature (26)..(26): n is a, c, g, or t
  misc_feature (32)..(32): n is a, c, g, or t
  misc_feature (42)..(42): n is a, c, g, or t
  misc_feature (50)..(50): n is a, c, g, or t
  misc_feature (75)..(75): n is a, c, g, or t

SEQ ID NO: 280708 - DNA, 826 bp, Homo Sapiens; identical to SEQ ID NO: 268017

SEQ ID NO: 280709 - DNA, 429 bp, Homo Sapiens; identical to SEQ ID NO: 268018
  misc_feature (45)..(45): n is a, c, g, or t
  misc_feature (364)..(364): n is a, c, g, or t
  misc_feature (390)..(390): n is a, c, g, or t
  misc_feature (397)..(397): n is a, c, g, or t
  misc_feature (410)..(410): n is a, c, g, or t

SEQ ID NO: 280710 - DNA, 567 bp, Homo Sapiens; identical to SEQ ID NO: 268020

SEQ ID NO: 280711 - DNA, 445 bp, Homo Sapiens; identical to SEQ ID NO: 268021
  misc_feature (391)..(391): n is a, c, g, or t

SEQ ID NO: 280712 - DNA, 787 bp, Homo Sapiens; identical to SEQ ID NO: 268028
  misc_feature (766)..(766): n is a, c, g, or t

SEQ ID NO: 280713 - DNA, 465 bp, Homo Sapiens; identical to SEQ ID NO: 268029
  misc_feature (12)..(12): n is a, c, g, or t
  misc_feature (47)..(47): n is a, c, g, or t

SEQ ID NO: 280714 - DNA, 696 bp, Homo Sapiens; identical to SEQ ID NO: 268072

SEQ ID NO: 280715 - DNA, 481 bp, Homo Sapiens; identical to SEQ ID NO: 268073
  misc_feature (432)..(432): n is a, c, g, or t
  misc_feature (447)..(447): n is a, c, g, or t
  misc_feature (454)..(454): n is a, c, g, or t
  misc_feature (470)..(470): n is a, c, g, or t

SEQ ID NO: 280716 - DNA, 903 bp, Homo Sapiens; identical to SEQ ID NO: 268082

SEQ ID NO: 280717 - DNA, 554 bp, Homo Sapiens; identical to SEQ ID NO: 268083
  misc_feature (18)..(18): n is a, c, g, or t
  misc_feature (51)..(51): n is a, c, g, or t

SEQ ID NO: 280718 - DNA, 479 bp, Homo Sapiens; identical to SEQ ID NO: 268084
  misc_feature (311)..(358): n is a, c, g, or t

SEQ ID NO: 280719 - DNA, 500 bp, Homo Sapiens; identical to SEQ ID NO: 268096

SEQ ID NO: 280720 - DNA, 373 bp, Homo Sapiens; identical to SEQ ID NO: 268097
  misc_feature (61)..(61): n is a, c, g, or t
  misc_feature (87)..(87): n is a, c, g, or t

SEQ ID NO: 280721 - DNA, 943 bp, Homo Sapiens; identical to SEQ ID NO: 268115
  misc_feature (108)..(192): n is a, c, g, or t

SEQ ID NO: 280722 - DNA, 487 bp, Homo Sapiens; identical to SEQ ID NO: 268116
  misc_feature (14)..(14): n is a, c, g, or t
  misc_feature (110)..(110): n is a, c, g, or t
  misc_feature (334)..(390): n is a, c, g, or t

SEQ ID NO: 280723 - DNA, 394 bp, Homo Sapiens; identical to SEQ ID NO: 268134

SEQ ID NO: 280724 - DNA, 355 bp, Homo Sapiens; identical to SEQ ID NO: 268135
  misc_feature (281)..(281): n is a, c, g, or t
  misc_feature (288)..(288): n is a, c, g, or t
  misc_feature (293)..(293): n is a, c, g, or t
  misc_feature (310)..(310): n is a, c, g, or t
  misc_feature (320)..(320): n is a, c, g, or t
  misc_feature (329)..(329): n is a, c, g, or t

SEQ ID NO: 280725 - DNA, 924 bp, Homo Sapiens; identical to SEQ ID NO: 268167

SEQ ID NO: 280726 - DNA, 593 bp, Homo Sapiens; identical to SEQ ID NO: 268168
  misc_feature (135)..(135): n is a, c, g, or t
  misc_feature (149)..(149): n is a, c, g, or t
  misc_feature (454)..(454): n is a, c, g, or t
  misc_feature (497)..(497): n is a, c, g, or t
  misc_feature (560)..(560): n is a, c, g, or t

SEQ ID NO: 280727 - DNA, 516 bp, Homo Sapiens; identical to SEQ ID NO: 268170

SEQ ID NO: 280728 - DNA, 429 bp, Homo Sapiens; identical to SEQ ID NO: 268171
  misc_feature (329)..(329): n is a, c, g, or t
  misc_feature (344)..(344): n is a, c, g, or t
  misc_feature (397)..(397): n is a, c, g, or t
  misc_feature (407)..(407): n is a, c, g, or t
  misc_feature (417)..(417): n is a, c, g, or t

SEQ ID NO: 280729 - DNA, 812 bp, Homo Sapiens; identical to SEQ ID NO: 268183

SEQ ID NO: 280730 - DNA, 395 bp, Homo Sapiens; identical to SEQ ID NO: 268184
  misc_feature (92)..(92): n is a, c, g, or t
  misc_feature (265)..(265): n is a, c, g, or t
  misc_feature (268)..(268): n is a, c, g, or t

SEQ ID NO: 280731 - DNA, 637 bp, Homo Sapiens; identical to SEQ ID NO: 268204
  misc_feature (359)..(399): n is a, c, g, or t
  misc_feature (532)..(546): n is a, c, g, or t

SEQ ID NO: 280732 - DNA, 602 bp, Homo Sapiens; identical to SEQ ID NO: 268205
  misc_feature (57)..(71): n is a, c, g, or t
  misc_feature (204)..(244): n is a, c, g, or t
  misc_feature (470)..(470): n is a, c, g, or t

SEQ ID NO: 280733 - DNA, 528 bp, Homo Sapiens; identical to SEQ ID NO: 268214

SEQ ID NO: 280734 - DNA, 497 bp, Homo Sapiens; identical to SEQ ID NO: 268215
  misc_feature (27)..(27): n is a, c, g, or t
  misc_feature (30)..(30): n is a, c, g, or t
  misc_feature (399)..(427): n is a, c, g, or t
  misc_feature (432)..(432): n is a, c, g, or t
  misc_feature (444)..(444): n is a, c, g, or t
  misc_feature (470)..(470): n is a, c, g, or t
  misc_feature (475)..(475): n is a, c, g, or t

SEQ ID NO: 280735 - DNA, 708 bp, Homo Sapiens; identical to SEQ ID NO: 268229
  misc_feature (328)..(328): n is a, c, g, or t
  misc_feature (577)..(633): n is a, c, g, or t

SEQ ID NO: 280736 - DNA, 452 bp, Homo Sapiens; identical to SEQ ID NO: 268230
  misc_feature (30)..(30): n is a, c, g, or t
  misc_feature (37)..(37): n is a, c, g, or t
  misc_feature (52)..(52): n is a, c, g, or t

SEQ ID NO: 280737 - DNA, 1008 bp, Homo Sapiens; identical to SEQ ID NO: 268233
  misc_feature (898)..(898): n is a, c, g, or t

SEQ ID NO: 280738 - DNA, 433 bp, Homo Sapiens; identical to SEQ ID NO: 268234
  misc_feature (271)..(271): n is a, c, g, or t
  misc_feature (333)..(333): n is a, c, g, or t
  misc_feature (386)..(386): n is a, c, g, or t
  misc_feature (398)..(398): n is a, c, g, or t
  misc_feature (416)..(416): n is a, c, g, or t

SEQ ID NO: 280739 - DNA, 513 bp, Homo Sapiens; identical to SEQ ID NO: 268262
  misc_feature (302)..(302): n is a, c, g, or t

SEQ ID NO: 280740 - DNA, 466 bp, Homo Sapiens; identical to SEQ ID NO: 268263
  misc_feature (427)..(427): n is a, c, g, or t
  misc_feature (434)..(434): n is a, c, g, or t
  misc_feature (442)..(442): n is a, c, g, or t

SEQ ID NO: 280741 - DNA, 514 bp, Homo Sapiens; identical to SEQ ID NO: 268285
  misc_feature (24)..(24): n is a, c, g, or t
  misc_feature (40)..(40): n is a, c, g, or t
  misc_feature (49)..(49): n is a, c, g, or t
  misc_feature (54)..(54): n is a, c, g, or t

SEQ ID NO: 280742 - DNA, 459 bp, Homo Sapiens; identical to SEQ ID NO: 268286

SEQ ID NO: 280743 - DNA, 668 bp, Homo Sapiens; identical to SEQ ID NO: 268322
  misc_feature (139)..(240): n is a, c, g, or t
  misc_feature (336)..(336): n is a, c, g, or t
  misc_feature (511)..(554): n is a, c, g, or t

SEQ ID NO: 280744 - DNA, 693 bp, Homo Sapiens; identical to SEQ ID NO: 268323
  misc_feature (130)..(173): n is a, c, g, or t
  misc_feature (432)..(432): n is a, c, g, or t
  misc_feature (440)..(541): n is a, c, g, or t

SEQ ID NO: 280745 - DNA, 499 bp, Homo Sapiens; identical to SEQ ID NO: 268343
  misc_feature (15)..(15): n is a, c, g, or t
  misc_feature (26)..(26): n is a, c, g, or t
  misc_feature (53)..(53): n is a, c, g, or t
  misc_feature (59)..(59): n is a, c, g, or t
  misc_feature (96)..(96): n is a, c, g, or t
  misc_feature (141)..(141): n is a, c, g, or t
  misc_feature (194)..(194): n is a, c, g, or t
  misc_feature (417)..(417): n is a, c, g, or t
  misc_feature (419)..(419): n is a, c, g, or t

SEQ ID NO: 280746 - DNA, 501 bp, Homo Sapiens; identical to SEQ ID NO: 268344
  misc_feature (42)..(42): n is a, c, g, or t

SEQ ID NO: 280747 - DNA, 840 bp, Homo Sapiens; identical to SEQ ID NO: 268345
  misc_feature (16)..(16): n is a, c, g, or t

SEQ ID NO: 280748 - DNA, 752 bp, Homo Sapiens; identical to SEQ ID NO: 268348
  misc_feature (698)..(698): n is a, c, g, or t
  misc_feature (703)..(703): n is a, c, g, or t

SEQ ID NO: 280749 - DNA, 489 bp, Homo Sapiens; identical to SEQ ID NO: 268349
  misc_feature (61)..(61): n is a, c, g, or t
  misc_feature (79)..(79): n is a, c, g, or t
  misc_feature (98)..(98): n is a, c, g, or t
  misc_feature (117)..(117): n is a, c, g, or t
  misc_feature (127)..(127): n is a, c, g, or t
  misc_feature (146)..(146): n is a, c, g, or t
  misc_feature (148)..(148): n is a, c, g, or t
  misc_feature (160)..(160): n is a, c, g, or t
  misc_feature (256)..(256): n is a, c, g, or t

SEQ ID NO: 280750 - DNA, 470 bp, Homo Sapiens; identical to SEQ ID NO: 268355
  misc_feature (445)..(445): n is a, c, g, or t
  misc_feature (460)..(460): n is a, c, g, or t

SEQ ID NO: 280751 - DNA, 444 bp, Homo Sapiens; identical to SEQ ID NO: 268356
  misc_feature (19)..(19): n is a, c, g, or t
  misc_feature (91)..(91): n is a, c, g, or t
  misc_feature (196)..(196): n is a, c, g, or t

SEQ ID NO: 280752 - DNA, 490 bp, Homo Sapiens; identical to SEQ ID NO: 268369

SEQ ID NO: 280753 - DNA, 518 bp, Homo Sapiens; identical to SEQ ID NO: 268370
  misc_feature (454)..(454): n is a, c, g, or t
  misc_feature (469)..(469): n is a, c, g, or t
  misc_feature (486)..(486): n is a, c, g, or t
  misc_feature (499)..(499): n is a, c, g, or t

SEQ ID NO: 280754 - DNA, 451 bp, Homo Sapiens; identical to SEQ ID NO: 268378
  misc_feature (27)..(27): n is a, c, g, or t

SEQ ID NO: 280755 - DNA, 890 bp, Homo Sapiens; identical to SEQ ID NO: 268379

SEQ ID NO: 280756 - DNA, 430 bp, Homo Sapiens; identical to SEQ ID NO: 268467
  misc_feature (17)..(17): n is a, c, g, or t
  misc_feature (33)..(33): n is a, c, g, or t
  misc_feature (52)..(52): n is a, c, g, or t

SEQ ID NO: 280757 - DNA, 476 bp, Homo Sapiens; identical to SEQ ID NO: 268468

SEQ ID NO: 280758 - DNA, 597 bp, Homo Sapiens; identical to SEQ ID NO: 268510
  misc_feature (41)..(41): n is a, c, g, or t
  misc_feature (52)..(52): n is a, c, g, or t
  misc_feature (99)..(99): n is a, c, g, or t

SEQ ID NO: 280759 - DNA, 475 bp, Homo Sapiens; identical to SEQ ID NO: 268511
  misc_feature (378)..(378): n is a, c, g, or t
  misc_feature (453)..(453): n is a, c, g, or t

SEQ ID NO: 280760 - DNA, 427 bp, Homo Sapiens; identical to SEQ ID NO: 268512

SEQ ID NO: 280761 - DNA, 636 bp, Homo Sapiens; identical to SEQ ID NO: 268551

SEQ ID NO: 280762 - DNA, 414 bp, Homo Sapiens; identical to SEQ ID NO: 268552

SEQ ID NO: 280763 - DNA, 456 bp, Homo Sapiens; identical to SEQ ID NO: 268554
  misc_feature (14)..(14): n is a, c, g, or t
  misc_feature (32)..(32): n is a, c, g, or t
  misc_feature (41)..(41): n is a, c, g, or t
  misc_feature (47)..(47): n is a, c, g, or t
  misc_feature (79)..(79): n is a, c, g, or t

SEQ ID NO: 280764 - DNA, 563 bp, Homo Sapiens; identical to SEQ ID NO: 268555
  misc_feature (471)..(471): n is a, c, g, or t
  misc_feature (488)..(488): n is a, c, g, or t
  misc_feature (547)..(547): n is a, c, g, or t

SEQ ID NO: 280765 - DNA, 569 bp, Homo Sapiens; identical to SEQ ID NO: 268579
  misc_feature (351)..(401): n is a, c, g, or t
  misc_feature (490)..(490): n is a, c, g, or t
  misc_feature (517)..(517): n is a, c, g, or t
  misc_feature (557)..(557): n is a, c, g, or t

SEQ ID NO: 280766 - DNA, 486 bp, Homo Sapiens; identical to SEQ ID NO: 268580

SEQ ID NO: 280767 - DNA, 424 bp, Homo Sapiens; identical to SEQ ID NO: 268584
  misc_feature (66)..(66): n is a, c, g, or t
  misc_feature (73)..(73): n is a, c, g, or t

SEQ ID NO: 280768 - DNA, 1252 bp, Homo Sapiens; identical to SEQ ID NO: 268585
  misc_feature (35)..(35): n is a, c, g, or t
  misc_feature (59)..(59): n is a, c, g, or t
  misc_feature (74)..(74): n is a, c, g, or t
  misc_feature (91)..(91): n is a, c, g, or t
  misc_feature (102)..(102): n is a, c, g, or t
  misc_feature (213)..(213): n is a, c, g, or t
  misc_feature (1233)..(1233): n is a, c, g, or t

SEQ ID NO: 280769 - DNA, 773 bp, Homo Sapiens; identical to SEQ ID NO: 268601
  misc_feature (12)..(12): n is a, c, g, or t
  misc_feature (37)..(37): n is a, c, g, or t
  misc_feature (61)..(61): n is a, c, g, or t
  misc_feature (97)..(97): n is a, c, g, or t
  misc_feature (679)..(712): n is a, c, g, or t
  misc_feature (754)..(754): n is a, c, g, or t

SEQ ID NO: 280770 - DNA, 441 bp, Homo Sapiens; identical to SEQ ID NO: 268602
  misc_feature (23)..(23): n is a, c, g, or t
  misc_feature (50)..(50): n is a, c, g, or t

SEQ ID NO: 280771 - DNA, 676 bp, Homo Sapiens; identical to SEQ ID NO: 268623
  misc_feature (242)..(250): n is a, c, g, or t

SEQ ID NO: 280772 - DNA, 412 bp, Homo Sapiens; identical to SEQ ID NO: 268624
  misc_feature (362)..(362): n is a, c, g, or t
  misc_feature (401)..(401): n is a, c, g, or t

SEQ ID NO: 280773 - DNA, 495 bp, Homo Sapiens; identical to SEQ ID NO: 268693
  misc_feature (347)..(347): n is a, c, g, or t
  misc_feature (383)..(383): n is a, c, g, or t

SEQ ID NO: 280774 - DNA, 541 bp, Homo Sapiens; identical to SEQ ID NO: 268694
  misc_feature (66)..(66): n is a, c, g, or t
  misc_feature (73)..(73): n is a, c, g, or t

SEQ ID NO: 280775 - DNA, 435 bp, Homo Sapiens; identical to SEQ ID NO: 268770
  misc_feature (11)..(11): n is a, c, g, or t
  misc_feature (91)..(91): n is a, c, g, or t
  misc_feature (138)..(138): n is a, c, g, or t

SEQ ID NO: 280776 - DNA, 379 bp, Homo Sapiens; identical to SEQ ID NO: 268771

SEQ ID NO: 280777 - DNA, 402 bp, Homo Sapiens; identical to SEQ ID NO: 268783
  misc_feature (33)..(33): n is a, c, g, or t
  misc_feature (221)..(221): n is a, c, g, or t

SEQ ID NO: 280778 - DNA, 483 bp, Homo Sapiens; identical to SEQ ID NO: 268784
  misc_feature (12)..(12): n is a, c, g, or t
  misc_feature (21)..(21): n is a, c, g, or t
  misc_feature (31)..(31): n is a, c, g, or t
  misc_feature (41)..(41): n is a, c, g, or t
  misc_feature (84)..(84): n is a, c, g, or t
  misc_feature (101)..(101): n is a, c, g, or t

SEQ ID NO: 280779 - DNA, 705 bp, Homo Sapiens; identical to SEQ ID NO: 268789

SEQ ID NO: 280780 - DNA, 476 bp, Homo Sapiens; identical to SEQ ID NO: 268790
  misc_feature (73)..(99): n is a, c, g, or t
  misc_feature (402)..(402): n is a, c, g, or t
  misc_feature (407)..(407): n is a, c, g, or t
  misc_feature (447)..(447): n is a, c, g, or t
  misc_feature (462)..(462): n is a, c, g, or t

SEQ ID NO: 280781 - DNA, 351 bp, Homo Sapiens; identical to SEQ ID NO: 268803
  misc_feature (19)..(19): n is a, c, g, or t
  misc_feature (29)..(29): n is a, c, g, or t
  misc_feature (46)..(56): n is a, c, g, or t
  misc_feature (59)..(59): n is a, c, g, or t

SEQ ID NO: 280782 - DNA, 388 bp, Homo Sapiens; identical to SEQ ID NO: 268804
  misc_feature (316)..(324): n is a, c, g, or t

SEQ ID NO: 280783 - DNA, 668 bp, Homo Sapiens; identical to SEQ ID NO: 268807
  misc_feature (142)..(142): n is a, c, g, or t
  misc_feature (151)..(151): n is a, c, g, or t

SEQ ID NO: 280784 - DNA, 456 bp, Homo Sapiens; identical to SEQ ID NO: 268808
  misc_feature (47)..(47): n is a, c, g, or t

SEQ ID NO: 280785 - DNA, 187 bp, Homo Sapiens; identical to SEQ ID NO: 268833
  misc_feature (154)..(154): n is a, c, g, or t

SEQ ID NO: 280786 - DNA, 378 bp, Homo Sapiens; identical to SEQ ID NO: 268834
  misc_feature (45)..(100): n is a, c, g, or t

SEQ ID NO: 280787 - DNA, 510 bp, Homo Sapiens; identical to SEQ ID NO: 268845
  misc_feature (178)..(187): n is a, c, g, or t

SEQ ID NO: 280788 - DNA, 1039 bp, Homo Sapiens; identical to SEQ ID NO: 268846
  misc_feature (43)..(43): n is a, c, g, or t

SEQ ID NO: 280789 - DNA, 596 bp, Homo Sapiens; identical to SEQ ID NO: 268847
  misc_feature (29)..(29): n is a, c, g, or t
  misc_feature (41)..(41): n is a, c, g, or t
  misc_feature (50)..(50): n is a, c, g, or t
  misc_feature (58)..(58): n is a, c, g, or t
  misc_feature (67)..(67): n is a, c, g, or t
  misc_feature (81)..(81): n is a, c, g, or t
  misc_feature (89)..(89): n is a, c, g, or t
  misc_feature (201)..(201): n is a, c, g, or t
  misc_feature (585)..(585): n is a, c, g, or t

SEQ ID NO: 280790 - DNA, 713 bp, Homo Sapiens; identical to SEQ ID NO: 268848

SEQ ID NO: 280791 - DNA, 595 bp, Homo Sapiens; identical to SEQ ID NO: 268850
  misc_feature (191)..(191): n is a, c, g, or t

SEQ ID NO: 280792 - DNA, 625 bp, Homo Sapiens; identical to SEQ ID NO: 268851

SEQ ID NO: 280793 - DNA, 507 bp, Homo Sapiens; identical to SEQ ID NO: 268852
  misc_feature (381)..(394): n is a, c, g, or t

SEQ ID NO: 280794 - DNA, 449 bp, Homo Sapiens; identical to SEQ ID NO: 268857
  misc_feature (31)..(31): n is a, c, g, or t

SEQ ID NO: 280795 - DNA, 495 bp, Homo Sapiens; identical to SEQ ID NO: 268858
  misc_feature (12)..(12): n is a, c, g, or t
  misc_feature (37)..(37): n is a, c, g, or t
  misc_feature (54)..(54): n is a, c, g, or t
  misc_feature (59)..(59): n is a, c, g, or t
  misc_feature (136)..(136): n is a, c, g, or t

SEQ ID NO: 280796 - DNA, 522 bp, Homo Sapiens; identical to SEQ ID NO: 268926
  misc_feature (32)..(32): n is a, c, g, or t
  misc_feature (89)..(89): n is a, c, g, or t
  misc_feature (101)..(101): n is a, c, g, or t
  misc_feature (115)..(115): n is a, c, g, or t
  misc_feature (121)..(121): n is a, c, g, or t
  misc_feature (127)..(127): n is a, c, g, or t
  misc_feature (400)..(400): n is a, c, g, or t
  misc_feature (403)..(403): n is a, c, g, or t

SEQ ID NO: 280797 - DNA, 532 bp, Homo Sapiens; identical to SEQ ID NO: 268927

SEQ ID NO: 280798 - DNA, 387 bp, Homo Sapiens; identical to SEQ ID NO: 268980
  misc_feature (92)..(310): n is a, c, g, or t
  misc_feature (314)..(314): n is a, c, g, or t
  misc_feature (321)..(321): n is a, c, g, or t
  misc_feature (371)..(371): n is a, c, g, or t

SEQ ID NO: 280799 - DNA, 471 bp, Homo Sapiens; identical to SEQ ID NO: 268981

SEQ ID NO: 280800 - DNA, 483 bp, Homo Sapiens; identical to SEQ ID NO: 269004
  misc_feature (92)..(92): n is a, c, g, or t

SEQ ID NO: 280801 - DNA, 357 bp, Homo Sapiens; identical to SEQ ID NO: 269005

SEQ ID NO: 280802 - DNA, 826 bp, Homo Sapiens; identical to SEQ ID NO: 269045
  misc_feature (768)..(768): n is a, c, g, or t

SEQ ID NO: 280803 - DNA, 327 bp, Homo Sapiens; identical to SEQ ID NO: 269046
  misc_feature (260)..(260): n is a, c, g, or t

SEQ ID NO: 280804 - DNA, 437 bp, Homo Sapiens; identical to SEQ ID NO: 269063

SEQ ID NO: 280805 - DNA, 489 bp, Homo Sapiens; identical to SEQ ID NO: 269064
  misc_feature (243)..(243): n is a, c, g, or t
  misc_feature (255)..(255): n is a, c, g, or t

SEQ ID NO: 280806 - DNA, 427 bp, Homo Sapiens; identical to SEQ ID NO: 269086
  misc_feature (17)..(17): n is a, c, g, or t
  misc_feature (24)..(24): n is a, c, g, or t
  misc_feature (58)..(58): n is a, c, g, or t

SEQ ID NO: 280807 - DNA, 386 bp, Homo Sapiens; identical to SEQ ID NO: 269087
  misc_feature (11)..(11): n is a, c, g, or t
  misc_feature (336)..(336): n is a, c, g, or t
  misc_feature (365)..(365): n is a, c, g, or t
  misc_feature (370)..(370): n is a, c, g, or t

SEQ ID NO: 280808 - DNA, 340 bp, Homo Sapiens; identical to SEQ ID NO: 269096

SEQ ID NO: 280809 - DNA, 558 bp, Homo Sapiens; identical to SEQ ID NO: 269097
  misc_feature (74)..(74): n is a, c, g, or t

SEQ ID NO: 280810 - DNA, 604 bp, Homo Sapiens; identical to SEQ ID NO: 269099
  misc_feature (80)..(80): n is a, c, g, or t
  misc_feature (153)..(153): n is a, c, g, or t
  misc_feature (381)..(381): n is a, c, g, or t
  misc_feature (383)..(383): n is a, c, g, or t
  misc_feature (389)..(389): n is a, c, g, or t
  misc_feature (393)..(393): n is a, c, g, or t
  misc_feature (396)..(396): n is a, c, g, or t
  misc_feature (400)..(400): n is a, c, g, or t
  misc_feature (406)..(406): n is a, c, g, or t
  misc_feature (408)..(408): n is a, c, g, or t
  misc_feature (410)..(410): n is a, c, g, or t
  misc_feature (417)..(417): n is a, c, g, or t
  misc_feature (443)..(444): n is a, c, g, or t
  misc_feature (461)..(461): n is a, c, g, or t
  misc_feature (467)..(467): n is a, c, g, or t
  misc_feature (469)..(469): n is a, c, g, or t

SEQ ID NO: 280811 - DNA, 477 bp, Homo Sapiens; identical to SEQ ID NO: 269100
  misc_feature (83)..(83): n is a, c, g, or t

SEQ ID NO: 280812 - DNA, 993 bp, Homo Sapiens; identical to SEQ ID NO: 269112

SEQ ID NO: 280813 - DNA, 496 bp, Homo Sapiens; identical to SEQ ID NO: 269113
  misc_feature (19)..(19): n is a, c, g, or t
  misc_feature (53)..(53): n is a, c, g, or t

SEQ ID NO: 280814 - DNA, 455 bp, Homo Sapiens; identical to SEQ ID NO: 269144
  misc_feature (419)..(419): n is a, c, g, or t

SEQ ID NO: 280815 - DNA, 591 bp, Homo Sapiens; identical to SEQ ID NO: 269145

SEQ ID NO: 280816 - DNA, 297 bp, Homo Sapiens; identical to SEQ ID NO: 269185

SEQ ID NO: 280817 - DNA, 491 bp, Homo Sapiens; identical to SEQ ID NO: 269186
  misc_feature (146)..(166): n is a, c, g, or t

SEQ ID NO: 280818 - DNA, 435 bp, Homo Sapiens; identical to SEQ ID NO: 269203
  misc_feature (13)..(13): n is a, c, g, or t
  misc_feature (171)..(171): n is a, c, g, or t
  misc_feature (288)..(288): n is a, c, g, or t
  misc_feature (292)..(292): n is a, c, g, or t

SEQ ID NO: 280819 - DNA, 541 bp, Homo Sapiens; identical to SEQ ID NO: 269204

SEQ ID NO: 280820 - DNA, 493 bp, Homo Sapiens; identical to SEQ ID NO: 269212
  misc_feature (340)..(340): n is a, c, g, or t

SEQ ID NO: 280821 - DNA, 537 bp, Homo Sapiens; identical to SEQ ID NO: 269213
  misc_feature (53)..(53): n is a, c, g, or t
  misc_feature (117)..(117): n is a, c, g, or t
  misc_feature (165)..(165): n is a, c, g, or t

SEQ ID NO: 280822 - DNA, 473 bp, Homo Sapiens; identical to SEQ ID NO: 269214
  misc_feature (19)..(19): n is a, c, g, or t

SEQ ID NO: 280823 - DNA, 625 bp, Homo Sapiens; identical to SEQ ID NO: 269215
  misc_feature (476)..(476): n is a, c, g, or t
  misc_feature (539)..(539): n is a, c, g, or t
  misc_feature (598)..(598): n is a, c, g, or t

SEQ ID NO: 280824 - DNA, 944 bp, Homo Sapiens; identical to SEQ ID NO: 269221
  misc_feature (78)..(119): n is a, c, g, or t

SEQ ID NO: 280825 - DNA, 399 bp, Homo Sapiens; identical to SEQ ID NO: 269222
  misc_feature (21)..(21): n is a, c, g, or t
  misc_feature (87)..(87): n is a, c, g, or t

SEQ ID NO: 280826 - DNA, 508 bp, Homo Sapiens; identical to SEQ ID NO: 269228
  misc_feature (171)..(199): n is a, c, g, or t
  misc_feature (487)..(487): n is a, c, g, or t
  misc_feature (491)..(491): n is a, c, g, or t

SEQ ID NO: 280827 - DNA, 431 bp, Homo Sapiens; identical to SEQ ID NO: 269229
  misc_feature (369)..(369): n is a, c, g, or t
  misc_feature (412)..(412): n is a, c, g, or t

SEQ ID NO: 280828 - DNA, 457 bp, Homo Sapiens; identical to SEQ ID NO: 269230

SEQ ID NO: 280829 - DNA, 540 bp, Homo Sapiens; identical to SEQ ID NO: 269231
  misc_feature (55)..(55): n is a, c, g, or t
  misc_feature (105)..(105): n is a, c, g, or t

SEQ ID NO: 280830 - DNA, 647 bp, Homo Sapiens; identical to SEQ ID NO: 269232
  misc_feature (505)..(505): n is a, c, g, or t
  misc_feature (597)..(597): n is a, c, g, or t
  misc_feature (605)..(605): n is a, c, g, or t
  misc_feature (621)..(621): n is a, c, g, or t
  misc_feature (634)..(634): n is a, c, g, or t

SEQ ID NO: 280831 - DNA, 404 bp, Homo Sapiens; identical to SEQ ID NO: 269240
  misc_feature (294)..(294): n is a, c, g, or t
  misc_feature (302)..(302): n is a, c, g, or t
  misc_feature (370)..(370): n is a, c, g, or t
  misc_feature (378)..(378): n is a, c, g, or t
  misc_feature (392)..(392): n is a, c, g, or t

SEQ ID NO: 280832 - DNA, 484 bp, Homo Sapiens; identical to SEQ ID NO: 269241

SEQ ID NO: 280833 - DNA, 623 bp, Homo Sapiens; identical to SEQ ID NO: 269294
  misc_feature (151)..(151): n is a, c, g, or t
  misc_feature (487)..(487): n is a, c, g, or t
  misc_feature (600)..(600): n is a, c, g, or t

SEQ ID NO: 280834 - DNA, 634 bp, Homo Sapiens; identical to SEQ ID NO: 269295

SEQ ID NO: 280835 - DNA, 533 bp, Homo Sapiens; identical to SEQ ID NO: 269308
  misc_feature (15)..(15): n is a, c, g, or t
  misc_feature (55)..(55): n is a, c, g, or t
  misc_feature (510)..(510): n is a, c, g, or t

SEQ ID NO: 280836 - DNA, 578 bp, Homo Sapiens; identical to SEQ ID NO: 269309
  misc_feature (142)..(142): n is a, c, g, or t
  misc_feature (532)..(532): n is a, c, g, or t
  misc_feature (550)..(550): n is a, c, g, or t
  misc_feature (561)..(561): n is a, c, g, or t

SEQ ID NO: 280837 - DNA, 436 bp, Homo Sapiens; identical to SEQ ID NO: 269315
  misc_feature (22)..(22): n is a, c, g, or t
  misc_feature (29)..(29): n is a, c, g, or t
  misc_feature (47)..(47): n is a, c, g, or t

SEQ ID NO: 280838 - DNA, 716 bp, Homo Sapiens; identical to SEQ ID NO: 269316

SEQ ID NO: 280839 - DNA, 438 bp, Homo Sapiens; identical to SEQ ID NO: 269360
  misc_feature (38)..(38): n is a, c, g, or t
  misc_feature (71)..(71): n is a, c, g, or t
  misc_feature (89)..(89): n is a, c, g, or t
  misc_feature (152)..(152): n is a, c, g, or t

SEQ ID NO: 280840 - DNA, 583 bp, Homo Sapiens; identical to SEQ ID NO: 269361

SEQ ID NO: 280841 - DNA, 369 bp, Homo Sapiens; identical to SEQ ID NO: 269433

SEQ ID NO: 280842 - DNA, 532 bp, Homo Sapiens; identical to SEQ ID NO: 269434
  misc_feature (468)..(468): n is a, c, g, or t
  misc_feature (484)..(484): n is a, c, g, or t
  misc_feature (514)..(514): n is a, c, g, or t

SEQ ID NO: 280843 - DNA, 503 bp, Homo Sapiens; identical to SEQ ID NO: 269439
  misc_feature (50)..(50): n is a, c, g, or t
  misc_feature (90)..(90): n is a, c, g, or t
  misc_feature (116)..(116): n is a, c, g, or t

SEQ ID NO: 280844 - DNA, 505 bp, Homo Sapiens; identical to SEQ ID NO: 269440
  misc_feature (80)..(80): n is a, c, g, or t

SEQ ID NO: 280845 - DNA, 419 bp, Homo Sapiens; identical to SEQ ID NO: 269470
  misc_feature (18)..(18): n is a, c, g, or t
  misc_feature (39)..(39): n is a, c, g, or t
  misc_feature (57)..(57): n is a, c, g, or t
  misc_feature (77)..(77): n is a, c, g, or t
  misc_feature (90)..(90): n is a, c, g, or t

SEQ ID NO: 280846 - DNA, 539 bp, Homo Sapiens; identical to SEQ ID NO: 269471
  misc_feature (18)..(18): n is a, c, g, or t
  misc_feature (26)..(26): n is a, c, g, or t
  misc_feature (43)..(43): n is a, c, g, or t
  misc_feature (66)..(66): n is a, c, g, or t

SEQ ID NO: 280847 - DNA, 719 bp, Homo Sapiens; identical to SEQ ID NO: 269479
  misc_feature (26)..(26): n is a, c, g, or t

SEQ ID NO: 280848 - DNA, 605 bp, Homo Sapiens; identical to SEQ ID NO: 269480

SEQ ID NO: 280849 - DNA, 430 bp, Homo Sapiens; identical to SEQ ID NO: 269535
  misc_feature (41)..(41): n is a, c, g, or t
  misc_feature (57)..(57): n is a, c, g, or t

SEQ ID NO: 280850 - DNA, 686 bp, Homo Sapiens; identical to SEQ ID NO: 269536

SEQ ID NO: 280851 - DNA, 407 bp, Homo Sapiens; identical to SEQ ID NO: 269547
  misc_feature (355)..(355): n is a, c, g, or t

SEQ ID NO: 280852 - DNA, 991 bp, Homo Sapiens; identical to SEQ ID NO: 269548

SEQ ID NO: 280853 - DNA, 418 bp, Homo Sapiens; identical to SEQ ID NO: 269566
  misc_feature (144)..(144): n is a, c, g, or t

SEQ ID NO: 280854 - DNA, 533 bp, Homo Sapiens; identical to SEQ ID NO: 269567
  misc_feature (19)..(19): n is a, c, g, or t
  misc_feature (23)..(23): n is a, c, g, or t
  misc_feature (90)..(90): n is a, c, g, or t

SEQ ID NO: 280855 - DNA, 657 bp, Homo Sapiens; identical to SEQ ID NO: 269579
  misc_feature (74)..(74): n is a, c, g, or t

SEQ ID NO: 280856 - DNA, 462 bp, Homo Sapiens; identical to SEQ ID NO: 269580
  misc_feature (349)..(349): n is a, c, g, or t
  misc_feature (400)..(400): n is a, c, g, or t

SEQ ID NO: 280857 - DNA, 566 bp, Homo Sapiens; identical to SEQ ID NO: 269598

SEQ ID NO: 280858 - DNA, 611 bp, Homo Sapiens; identical to SEQ ID NO: 269599

SEQ ID NO: 280859 - DNA, 586 bp, Homo Sapiens; identical to SEQ ID NO: 269622
  misc_feature (415)..(415): n is a, c, g, or t

SEQ ID NO: 280860 - DNA, 571 bp, Homo Sapiens; identical to SEQ ID NO: 269623

SEQ ID NO: 280861 - DNA, 726 bp, Homo Sapiens; identical to SEQ ID NO: 269633
  misc_feature (122)..(122): n is a, c, g, or t
  misc_feature (128)..(128): n is a, c, g, or t
  misc_feature (292)..(292): n is a, c, g, or t
  misc_feature (303)..(303): n is a, c, g, or t

SEQ ID NO: 280862 - DNA, 428 bp, Homo Sapiens; identical to SEQ ID NO: 269634
  misc_feature (416)..(416): n is a, c, g, or t

SEQ ID NO: 280863 - DNA, 631 bp, Homo Sapiens; identical to SEQ ID NO: 269646
  misc_feature (468)..(508): n is a, c, g, or t
  misc_feature (611)..(611): n is a, c, g, or t

SEQ ID NO: 280864 - DNA, 357 bp, Homo Sapiens; identical to SEQ ID NO: 269647
  misc_feature (17)..(17): n is a, c, g, or t
  misc_feature (210)..(250): n is a, c, g, or t

SEQ ID NO: 280865 - DNA, 420 bp, Homo Sapiens; identical to SEQ ID NO: 269708

SEQ ID NO: 280866 - DNA, 420 bp, Homo Sapiens; identical to SEQ ID NO: 269709

SEQ ID NO: 280867 - DNA, 966 bp, Homo Sapiens; identical to SEQ ID NO: 269721
  misc_feature (38)..(38): n is a, c, g, or t
  misc_feature (158)..(158): n is a, c, g, or t

SEQ ID NO: 280868 - DNA, 409 bp, Homo Sapiens; identical to SEQ ID NO: 269722

SEQ ID NO: 280869 - DNA, 432 bp, Homo Sapiens; identical to SEQ ID NO: 269751
  misc_feature (45)..(45): n is a, c, g, or t

SEQ ID NO: 280870 - DNA, 420 bp, Homo Sapiens; identical to SEQ ID NO: 269752
  misc_feature (78)..(78): n is a, c, g, or t

SEQ ID NO: 280871 - DNA, 366 bp, Homo Sapiens; identical to SEQ ID NO: 269759

SEQ ID NO: 280872 - DNA, 517 bp, Homo Sapiens; identical to SEQ ID NO: 269760

SEQ ID NO: 280873 - DNA, 452 bp, Homo Sapiens; identical to SEQ ID NO: 269770
  misc_feature (60)..(60): n is a, c, g, or t
  misc_feature (291)..(291): n is a, c, g, or t
  misc_feature (427)..(427): n is a, c, g, or t

SEQ ID NO: 280874 - DNA, 448 bp, Homo Sapiens; identical to SEQ ID NO: 269771
  misc_feature (16)..(16): n is a, c, g, or t
  misc_feature (26)..(26): n is a, c, g, or t
  misc_feature (37)..(37): n is a, c, g, or t
  misc_feature (44)..(44): n is a, c, g, or t

SEQ ID NO: 280875 - DNA, 558 bp, Homo Sapiens; identical to SEQ ID NO: 269827
  misc_feature (512)..(512): n is a, c, g, or t

SEQ ID NO: 280876 - DNA, 445 bp, Homo Sapiens; identical to SEQ ID NO: 269828
  misc_feature (11)..(11): n is a, c, g, or t

SEQ ID NO: 280877 - DNA, 466 bp, Homo Sapiens; identical to SEQ ID NO: 269866

SEQ ID NO: 280878 - DNA, 443 bp, Homo Sapiens; identical to SEQ ID NO: 269867
  misc_feature (19)..(19): n is a, c, g, or t
  misc_feature (37)..(37): n is a, c, g, or t
  misc_feature (87)..(87): n is a, c, g, or t
  misc_feature (122)..(122): n is a, c, g, or t

SEQ ID NO: 280879 - DNA, 498 bp, Homo Sapiens; identical to SEQ ID NO: 269877
  misc_feature (23)..(23): n is a, c, g, or t
  misc_feature (47)..(47): n is a, c, g, or t

SEQ ID NO: 280880 - DNA, 621 bp, Homo Sapiens; identical to SEQ ID NO: 269878
  misc_feature (71)..(71): n is a, c, g, or t
  misc_feature (84)..(84): n is a, c, g, or t
  misc_feature (106)..(106): n is a, c, g, or t

SEQ ID NO: 280881 - DNA, 450 bp, Homo Sapiens; identical to SEQ ID NO: 269885

SEQ ID NO: 280882 - DNA, 402 bp, Homo Sapiens; identical to SEQ ID NO: 269886

SEQ ID NO: 280883 - DNA, 469 bp, Homo Sapiens; identical to SEQ ID NO: 269897
  misc_feature (33)..(33): n is a, c, g, or t

SEQ ID NO: 280884 - DNA, 506 bp, Homo Sapiens; identical to SEQ ID NO: 269898
  misc_feature (422)..(422): n is a, c, g, or t

SEQ ID NO: 280885 - DNA, 523 bp, Homo Sapiens; identical to SEQ ID NO: 269905

SEQ ID NO: 280886 - DNA, 472 bp, Homo Sapiens; identical to SEQ ID NO: 269906
  misc_feature (40)..(40): n is a, c, g, or t
  misc_feature (63)..(63): n is a, c, g, or t
  misc_feature (212)..(212): n is a, c, g, or t

SEQ ID NO: 280887 - DNA, 360 bp, Homo Sapiens; identical to SEQ ID NO: 269924

SEQ ID NO: 280888 - DNA, 471 bp, Homo Sapiens; identical to SEQ ID NO: 269925

SEQ ID NO: 280889 - DNA, 524 bp, Homo Sapiens; identical to SEQ ID NO: 269948
  misc_feature (18)..(18): n is a, c, g, or t
  misc_feature (33)..(33): n is a, c, g, or t
  misc_feature (40)..(40): n is a, c, g, or t
  misc_feature (48)..(48): n is a, c, g, or t
  misc_feature (55)..(55): n is a, c, g, or t
  misc_feature (78)..(78): n is a, c, g, or t
  misc_feature (83)..(83): n is a, c, g, or t
  misc_feature (346)..(346): n is a, c, g, or t

SEQ ID NO: 280890 - DNA, 330 bp, Homo Sapiens; identical to SEQ ID NO: 269949

SEQ ID NO: 280891 - DNA, 395 bp, Homo Sapiens; identical to SEQ ID NO: 270085
  misc_feature (374)..(374): n is a, c, g, or t

SEQ ID NO: 280892 - DNA, 683 bp, Homo Sapiens; identical to SEQ ID NO: 270086

SEQ ID NO: 280893 - DNA, 654 bp, Homo Sapiens; identical to SEQ ID NO: 270111
  misc_feature (537)..(537): n is a, c, g, or t
  misc_feature (636)..(636): n is a, c, g, or t

SEQ ID NO: 280894 - DNA, 419 bp, Homo Sapiens; identical to SEQ ID NO: 270112
  misc_feature (16)..(16): n is a, c, g, or t
  misc_feature (96)..(96): n is a, c, g, or t
  misc_feature (110)..(110): n is a, c, g, or t

SEQ ID NO: 280895 - DNA, 408 bp, Homo Sapiens; identical to SEQ ID NO: 270126
  misc_feature (73)..(73): n is a, c, g, or t
  misc_feature (93)..(93): n is a, c, g, or t
  misc_feature (124)..(124): n is a, c, g, or t
  misc_feature (139)..(139): n is a, c, g, or t
  misc_feature (206)..(206): n is a, c, g, or t

SEQ ID NO: 280896 - DNA, 737 bp, Homo Sapiens; identical to SEQ ID NO: 270127

SEQ ID NO: 280897 - DNA, 580 bp, Homo Sapiens; identical to SEQ ID NO: 270217
  misc_feature (19)..(19): n is a, c, g, or t
  misc_feature (450)..(450): n is a, c, g, or t
  misc_feature (469)..(469): n is a, c, g, or t

SEQ ID NO: 280898 - DNA, 402 bp, Homo Sapiens; identical to SEQ ID NO: 270218
  misc_feature (226)..(226): n is a, c, g, or t
  misc_feature (269)..(269): n is a, c, g, or t
  misc_feature (357)..(357): n is a, c, g, or t
  misc_feature (367)..(367): n is a, c, g, or t
  misc_feature (372)..(372): n is a, c, g, or t
  misc_feature (379)..(379): n is a, c, g, or t

SEQ ID NO: 280899 - DNA, 517 bp, Homo Sapiens; identical to SEQ ID NO: 270240
  misc_feature (31)..(31): n is a, c, g, or t
  misc_feature (78)..(78): n is a, c, g, or t
  misc_feature (506)..(506): n is a, c, g, or t

SEQ ID NO: 280900 - DNA, 525 bp, Homo Sapiens; identical to SEQ ID NO: 270241

SEQ ID NO: 280901 - DNA, 430 bp, Homo Sapiens; identical to SEQ ID NO: 270248

SEQ ID NO: 280902 - DNA, 729 bp, Homo Sapiens; identical to SEQ ID NO: 270249
  misc_feature (194)..(224): n is a, c, g, or t

SEQ ID NO: 280903 - DNA, 531 bp, Homo Sapiens; identical to SEQ ID NO: 270313

SEQ ID NO: 280904 - DNA, 496 bp, Homo Sapiens; identical to SEQ ID NO: 270314
  misc_feature (36)..(36): n is a, c, g, or t
  misc_feature (66)..(66): n is a, c, g, or t
  misc_feature (305)..(305): n is a, c, g, or t

SEQ ID NO: 280905 - DNA, 762 bp, Homo Sapiens; identical to SEQ ID NO: 270317

SEQ ID NO: 280906 - DNA, 428 bp, Homo Sapiens; identical to SEQ ID NO: 270318
  misc_feature (75)..(75): n is a, c, g, or t

SEQ ID NO: 280907 - DNA, 466 bp, Homo Sapiens; identical to SEQ ID NO: 270371
  misc_feature (45)..(45): n is a, c, g, or t
  misc_feature (69)..(69): n is a, c, g, or t
  misc_feature (99)..(99): n is a, c, g, or t

SEQ ID NO: 280908 - DNA, 576 bp, Homo Sapiens; identical to SEQ ID NO: 270372

SEQ ID NO: 280909 - DNA, 590 bp, Homo Sapiens; identical to SEQ ID NO: 270424

SEQ ID NO: 280910 - DNA, 617 bp, Homo Sapiens; identical to SEQ ID NO: 270425

SEQ ID NO: 280911 - DNA, 512 bp, Homo Sapiens; identical to SEQ ID NO: 270533

SEQ ID NO: 280912 - DNA, 354 bp, Homo Sapiens; identical to SEQ ID NO: 270534

SEQ ID NO: 280913 - DNA, 486 bp, Homo Sapiens; identical to SEQ ID NO: 270599
  misc_feature (30)..(30): n is a, c, g, or t
  misc_feature (67)..(67): n is a, c, g, or t
  misc_feature (151)..(151): n is a, c, g, or t
  misc_feature (233)..(233): n is a, c, g, or t

SEQ ID NO: 280914 - DNA, 625 bp, Homo Sapiens; identical to SEQ ID NO: 270600

SEQ ID NO: 280915 - DNA, 416 bp, Homo Sapiens; identical to SEQ ID NO: 270614

SEQ ID NO: 280916 - DNA, 646 bp, Homo Sapiens; identical to SEQ ID NO: 270615
  misc_feature (101)..(102): n is a, c, g, or t
  misc_feature (114)..(114): n is a, c, g, or t

SEQ ID NO: 280917 - DNA, 392 bp, Homo Sapiens; identical to SEQ ID NO: 270735

SEQ ID NO: 280918 - DNA, 478 bp, Homo Sapiens; identical to SEQ ID NO: 270736
  misc_feature (370)..(370): n is a, c, g, or t
  misc_feature (415)..(415): n is a, c, g, or t
  misc_feature (454)..(454): n is a, c, g, or t

SEQ ID NO: 280919 - DNA, 537 bp, Homo Sapiens; identical to SEQ ID NO: 270795
  misc_feature (29)..(29): n is a, c, g, or t
  misc_feature (53)..(53): n is a, c, g, or t
  misc_feature (97)..(97): n is a, c, g, or t

SEQ ID NO: 280920 - DNA, 448 bp, Homo Sapiens; identical to SEQ ID NO: 270796
  misc_feature (22)..(22): n is a, c, g, or t
  misc_feature (28)..(28): n is a, c, g, or t
  misc_feature (46)..(46): n is a, c, g, or t
  misc_feature (55)..(55): n is a, c, g, or t

SEQ ID NO: 280921 - DNA, 699 bp, Homo Sapiens; identical to SEQ ID NO: 270897
  misc_feature (25)..(25): n is a, c, g, or t
  misc_feature (37)..(37): n is a, c, g, or t
  misc_feature (83)..(83): n is a, c, g, or t
  misc_feature (115)..(115): n is a, c, g, or t
  misc_feature (473)..(482): n is a, c, g, or t

SEQ ID NO: 280922 - DNA, 821 bp, Homo Sapiens; identical to SEQ ID NO: 270898
  misc_feature (414)..(423): n is a, c, g, or t

SEQ ID NO: 280923 - DNA, 396 bp, Homo Sapiens; identical to SEQ ID NO: 271003
  misc_feature (349)..(349): n is a, c, g, or t

SEQ ID NO: 280924 - DNA, 460 bp, Homo Sapiens; identical to SEQ ID NO: 271004
  misc_feature (22)..(22): n is a, c, g, or t
  misc_feature (59)..(59): n is a, c, g, or t
  misc_feature (72)..(72): n is a, c, g, or t
  misc_feature (89)..(114): n is a, c, g, or t
  misc_feature (249)..(249): n is a, c, g, or t

SEQ ID NO: 280925 - DNA, 751 bp, Homo Sapiens; identical to SEQ ID NO: 271032

SEQ ID NO: 280926 - DNA, 845 bp, Homo Sapiens; identical to SEQ ID NO: 271033
  misc_feature (587)..(587): n is a, c, g, or t

SEQ ID NO: 280927 - DNA, 471 bp, Homo Sapiens; identical to SEQ ID NO: 271075

SEQ ID NO: 280928 - DNA, 515 bp, Homo Sapiens; identical to SEQ ID NO: 271076
  misc_feature (465)..(465): n is a, c, g, or t

SEQ ID NO: 280929 - DNA, 489 bp, Homo Sapiens; identical to SEQ ID NO: 271099

SEQ ID NO: 280930 - DNA, 612 bp, Homo Sapiens; identical to SEQ ID NO: 271100
  misc_feature (258)..(258): n is a, c, g, or t
  misc_feature (267)..(267): n is a, c, g, or t
  misc_feature (275)..(275): n is a, c, g, or t
  misc_feature (288)..(288): n is a, c, g, or t
  misc_feature (290)..(291): n is a, c, g, or t
  misc_feature (302)..(303): n is a, c, g, or t
  misc_feature (310)..(310): n is a, c, g, or t
  misc_feature (314)..(314): n is a, c, g, or t
  misc_feature (321)..(321): n is a, c, g, or t
  misc_feature (323)..(323): n is a, c, g, or t
  misc_feature (326)..(329): n is a, c, g, or t
  misc_feature (335)..(335): n is a, c, g, or t
  misc_feature (337)..(337): n is a, c, g, or t
  misc_feature (340)..(341): n is a, c, g, or t
  misc_feature (347)..(347): n is a, c, g, or t
  misc_feature (351)..(351): n is a, c, g, or t
  misc_feature (356)..(356): n is a, c, g, or t
  misc_feature (363)..(364): n is a, c, g, or t
  misc_feature (368)..(368): n is a, c, g, or t
  misc_feature (371)..(372): n is a, c, g, or t
  misc_feature (380)..(382): n is a, c, g, or t
  misc_feature (385)..(385): n is a, c, g, or t
  misc_feature (390)..(390): n is a, c, g, or t
  misc_feature (394)..(394): n is a, c, g, or t
  misc_feature (404)..(404): n is a, c, g, or t
  misc_feature (406)..(406): n is a, c, g, or t
  misc_feature (408)..(409): n is a, c, g, or t
  misc_feature (411)..(411): n is a, c, g, or t
  misc_feature (419)..(420): n is a, c, g, or t
  misc_feature (424)..(424): n is a, c, g, or t
  misc_feature (426)..(428): n is a, c, g, or t
  misc_feature (430)..(431): n is a, c, g, or t
  misc_feature (437)..(437): n is a, c, g, or t
  misc_feature (439)..(439): n is a, c, g, or t
  misc_feature (442)..(442): n is a, c, g, or t
  misc_feature (447)..(447): n is a, c, g, or t
  misc_feature (452)..(452): n is a, c, g, or t
  misc_feature (456)..(456): n is a, c, g, or t
  misc_feature (459)..(459): n is a, c, g, or t
  misc_feature (461)..(461): n is a, c, g, or t
  misc_feature (467)..(468): n is a, c, g, or t
  misc_feature (472)..(473): n is a, c, g, or t
  misc_feature (477)..(477): n is a, c, g, or t
  misc_feature (487)..(487): n is a, c, g, or t
  misc_feature (593)..(593): n is a, c, g, or t

SEQ ID NO: 280931 - DNA, 462 bp, Homo Sapiens; identical to SEQ ID NO: 271126
  misc_feature (434)..(434): n is a, c, g, or t

SEQ ID NO: 280932 - DNA, 512 bp, Homo Sapiens; identical to SEQ ID NO: 271127
  misc_feature (469)..(469): n is a, c, g, or t

SEQ ID NO: 280933 - DNA, 438 bp, Homo Sapiens; identical to SEQ ID NO: 271128
  misc_feature (11)..(11): n is a, c, g, or t
  misc_feature (34)..(34): n is a, c, g, or t
  misc_feature (39)..(39): n is a, c, g, or t
  misc_feature (46)..(46): n is a, c, g, or t
  misc_feature (69)..(69): n is a, c, g, or t
  misc_feature (74)..(74): n is a, c, g, or t
  misc_feature (90)..(90): n is a, c, g, or t

SEQ ID NO: 280934 - DNA, 508 bp, Homo Sapiens; identical to SEQ ID NO: 271144

SEQ ID NO: 280935 - DNA, 405 bp, Homo Sapiens; identical to SEQ ID NO: 271145
  misc_feature (24)..(24): n is a, c, g, or t
  misc_feature (59)..(59): n is a, c, g, or t
  misc_feature (77)..(77): n is a, c, g, or t
  misc_feature (91)..(91): n is a, c, g, or t
  misc_feature (184)..(184): n is a, c, g, or t

SEQ ID NO: 280936 - DNA, 376 bp, Homo Sapiens; identical to SEQ ID NO: 271334
  misc_feature (121)..(121): n is a, c, g, or t
  misc_feature (131)..(131): n is a, c, g, or t

SEQ ID NO: 280937 - DNA, 483 bp, Homo Sapiens; identical to SEQ ID NO: 271335
  misc_feature (264)..(264): n is a, c, g, or t
  misc_feature (274)..(274): n is a, c, g, or t
  misc_feature (279)..(279): n is a, c, g, or t
  misc_feature (285)..(285): n is a, c, g, or t
  misc_feature (288)..(288): n is a, c, g, or t
  misc_feature (300)..(300): n is a, c, g, or t
  misc_feature (316)..(316): n is a, c, g, or t
  misc_feature (331)..(331): n is a, c, g, or t
  misc_feature (333)..(333): n is a, c, g, or t
  misc_feature (340)..(340): n is a, c, g, or t
  misc_feature (345)..(345): n is a, c, g, or t
  misc_feature (354)..(354): n is a, c, g, or t
  misc_feature (380)..(380): n is a, c, g, or t
  misc_feature (384)..(384): n is a, c, g, or t
  misc_feature (396)..(396): n is a, c, g, or t
  misc_feature (404)..(404): n is a, c, g, or t
  misc_feature (419)..(419): n is a, c, g, or t
  misc_feature (421)..(421): n is a, c, g, or t
  misc_feature (455)..(455): n is a, c, g, or t

SEQ ID NO: 280938 - DNA, 597 bp, Homo Sapiens; identical to SEQ ID NO: 271356
  misc_feature (527)..(527): n is a, c, g, or t
  misc_feature (548)..(548): n is a, c, g, or t
  misc_feature (571)..(571): n is a, c, g, or t

SEQ ID NO: 280939 - DNA, 525 bp, Homo Sapiens; identical to SEQ ID NO: 271357
  misc_feature (24)..(24): n is a, c, g, or t
  misc_feature (97)..(97): n is a, c, g, or t
  misc_feature (399)..(399): n is a, c, g, or t
  misc_feature (445)..(445): n is a, c, g, or t
  misc_feature (458)..(458): n is a, c, g, or t
  misc_feature (511)..(511): n is a, c, g, or t

SEQ ID NO: 280940 - DNA, 895 bp, Homo Sapiens; identical to SEQ ID NO: 271416

SEQ ID NO: 280941 - DNA, 458 bp, Homo Sapiens; identical to SEQ ID NO: 271417
  misc_feature (48)..(48): n is a, c, g, or t

SEQ ID NO: 280942 - DNA, 596 bp, Homo Sapiens; identical to SEQ ID NO: 271436
  misc_feature (27)..(27): n is a, c, g, or t
  misc_feature (43)..(43): n is a, c, g, or t
  misc_feature (48)..(48): n is a, c, g, or t
  misc_feature (56)..(56): n is a, c, g, or t
  misc_feature (63)..(63): n is a, c, g, or t
  misc_feature (68)..(68): n is a, c, g, or t
  misc_feature (76)..(76): n is a, c, g, or t
  misc_feature (90)..(90): n is a, c, g, or t
  misc_feature (95)..(95): n is a, c, g, or t
  misc_feature (160)..(160): n is a, c, g, or t
  misc_feature (264)..(264): n is a, c, g, or t

SEQ ID NO: 280943 - DNA, 504 bp, Homo Sapiens; identical to SEQ ID NO: 271437
  misc_feature (83)..(83): n is a, c, g, or t
  misc_feature (94)..(94): n is a, c, g, or t
  misc_feature (158)..(158): n is a, c, g, or t
  misc_feature (162)..(162): n is a, c, g, or t
  misc_feature (428)..(428): n is a, c, g, or t
  misc_feature (430)..(430): n is a, c, g, or t
  misc_feature (434)..(434): n is a, c, g, or t
  misc_feature (436)..(436): n is a, c, g, or t
  misc_feature (454)..(455): n is a, c, g, or t
  misc_feature (457)..(457): n is a, c, g, or t

SEQ ID NO: 280944 - DNA, 642 bp, Homo Sapiens; identical to SEQ ID NO: 271536
  misc_feature (363)..(363): n is a, c, g, or t
  misc_feature (386)..(506): n is a, c, g, or t
  misc_feature (623)..(623): n is a, c, g, or t

SEQ ID NO: 280945 - DNA, 392 bp, Homo Sapiens; identical to SEQ ID NO: 271537
  misc_feature (17)..(17): n is a, c, g, or t
  misc_feature (205)..(325): n is a, c, g, or t

SEQ ID NO: 280946 - DNA, 403 bp, Homo Sapiens; identical to SEQ ID NO: 271538
  misc_feature (356)..(356): n is a, c, g, or t

SEQ ID NO: 280947 - DNA, 528 bp, Homo Sapiens; identical to SEQ ID NO: 271541
  misc_feature (378)..(378): n is a, c, g, or t
  misc_feature (495)..(495): n is a, c, g, or t
  misc_feature (510)..(510): n is a, c, g, or t

SEQ ID NO: 280948 - DNA, 578 bp, Homo Sapiens; identical to SEQ ID NO: 271542
  misc_feature (27)..(27): n is a, c, g, or t
  misc_feature (46)..(46): n is a, c, g, or t
  misc_feature (64)..(64): n is a, c, g, or t

SEQ ID NO: 280949 - DNA, 490 bp, Homo Sapiens; identical to SEQ ID NO: 271567
  misc_feature (395)..(395): n is a, c, g, or t
  misc_feature (469)..(469): n is a, c, g, or t
  misc_feature (475)..(475): n is a, c, g, or t

SEQ ID NO: 280950 - DNA, 490 bp, Homo Sapiens; identical to SEQ ID NO: 271568
  misc_feature (431)..(431): n is a, c, g, or t
  misc_feature (444)..(444): n is a, c, g, or t
  misc_feature (460)..(460): n is a, c, g, or t
  misc_feature (472)..(472): n is a, c, g, or t

SEQ ID NO: 280951 - DNA, 521 bp, Homo Sapiens; identical to SEQ ID NO: 271605
  misc_feature (77)..(77): n is a, c, g, or t
  misc_feature (155)..(155): n is a, c, g, or t
  misc_feature (224)..(224): n is a, c, g, or t
  misc_feature (252)..(252): n is a, c, g, or t

SEQ ID NO: 280952 - DNA, 417 bp, Homo Sapiens; identical to SEQ ID NO: 271606

SEQ ID NO: 280953 - DNA, 433 bp, Homo Sapiens; identical to SEQ ID NO: 271639
  misc_feature (27)..(27): n is a, c, g, or t
  misc_feature (52)..(52): n is a, c, g, or t

SEQ ID NO: 280954 - DNA, 413 bp, Homo Sapiens; identical to SEQ ID NO: 271640

SEQ ID NO: 280955 - DNA, 401 bp, Homo Sapiens; identical to SEQ ID NO: 271684
  misc_feature (33)..(33): n is a, c, g, or t
  misc_feature (54)..(54): n is a, c, g, or t

SEQ ID NO: 280956 - DNA, 434 bp, Homo Sapiens; identical to SEQ ID NO: 271685
  misc_feature (383)..(383): n is a, c, g, or t
  misc_feature (392)..(392): n is a, c, g, or t

SEQ ID NO: 280957 - DNA, 437 bp, Homo Sapiens; identical to SEQ ID NO: 271686

SEQ ID NO: 280958 - DNA, 459 bp, Homo Sapiens; identical to SEQ ID NO: 271711
  misc_feature (27)..(27): n is a, c, g, or t
  misc_feature (83)..(83): n is a, c, g, or t
  misc_feature (404)..(404): n is a, c, g, or t

SEQ ID NO: 280959 - DNA, 461 bp, Homo Sapiens; identical to SEQ ID NO: 271712
  misc_feature (397)..(409): n is a, c, g, or t

SEQ ID NO: 280960 - DNA, 397 bp, Homo Sapiens; identical to SEQ ID NO: 271791
  misc_feature (286)..(286): n is a, c, g, or t
  misc_feature (308)..(308): n is a, c, g, or t
  misc_feature (354)..(354): n is a, c, g, or t
  misc_feature (362)..(362): n is a, c, g, or t
  misc_feature (371)..(371): n is a, c, g, or t

SEQ ID NO: 280961 - DNA, 478 bp, Homo Sapiens; identical to SEQ ID NO: 271792
  misc_feature (310)..(310): n is a, c, g, or t
  misc_feature (382)..(382): n is a, c, g, or t
  misc_feature (395)..(395): n is a, c, g, or t
  misc_feature (413)..(413): n is a, c, g, or t
  misc_feature (432)..(432): n is a, c, g, or t
  misc_feature (437)..(437): n is a, c, g, or t

SEQ ID NO: 280962 - DNA, 497 bp, Homo Sapiens; identical to SEQ ID NO: 271794

SEQ ID NO: 280963 - DNA, 425 bp, Homo Sapiens; identical to SEQ ID NO: 271795
  misc_feature (82)..(82): n is a, c, g, or t
  misc_feature (337)..(337): n is a, c, g, or t

SEQ ID NO: 280964 - DNA, 396 bp, Homo Sapiens; identical to SEQ ID NO: 271882

SEQ ID NO: 280965 - DNA, 293 bp, Homo Sapiens; identical to SEQ ID NO: 271883

SEQ ID NO: 280966 - DNA, 390 bp, Homo Sapiens; identical to SEQ ID NO: 271937
  misc_feature (22)..(22): n is a, c, g, or t
  misc_feature (75)..(75): n is a, c, g, or t

SEQ ID NO: 280967 - DNA, 532 bp, Homo Sapiens; identical to SEQ ID NO: 271938

SEQ ID NO: 280968 - DNA, 416 bp, Homo Sapiens; identical to SEQ ID NO: 271953
  misc_feature (24)..(24): n is a, c, g, or t
  misc_feature (270)..(270): n is a, c, g, or t

SEQ ID NO: 280969 - DNA, 525 bp, Homo Sapiens; identical to SEQ ID NO: 271954
  misc_feature (298)..(298): n is a, c, g, or t

SEQ ID NO: 280970 - DNA, 343 bp, Homo Sapiens; identical to SEQ ID NO: 271959
  misc_feature (66)..(66): n is a, c, g, or t
  misc_feature (76)..(76): n is a, c, g, or t
  misc_feature (243)..(243): n is a, c, g, or t
  misc_feature (296)..(296): n is a, c, g, or t

SEQ ID NO: 280971 - DNA, 438 bp, Homo Sapiens; identical to SEQ ID NO: 271960
  misc_feature (24)..(24): n is a, c, g, or t
  misc_feature (39)..(39): n is a, c, g, or t
  misc_feature (49)..(49): n is a, c, g, or t
  misc_feature (54)..(54): n is a, c, g, or t
  misc_feature (65)..(65): n is a, c, g, or t
  misc_feature (114)..(114): n is a, c, g, or t
  misc_feature (163)..(163): n is a, c, g, or t
  misc_feature (260)..(260): n is a, c, g, or t

SEQ ID NO: 280972 - DNA, 454 bp, Homo Sapiens; identical to SEQ ID NO: 272016
  misc_feature (21)..(21): n is a, c, g, or t
  misc_feature (100)..(100): n is a, c, g, or t
  misc_feature (284)..(284): n is a, c, g, or t

SEQ ID NO: 280973 - DNA, 430 bp, Homo Sapiens; identical to SEQ ID NO: 272017

SEQ ID NO: 280974 - DNA, 333 bp, Homo Sapiens; identical to SEQ ID NO: 272266
  misc_feature (29)..(29): n is a, c, g, or t

SEQ ID NO: 280975 - DNA, 330 bp, Homo Sapiens; identical to SEQ ID NO: 272267

SEQ ID NO: 280976 - DNA, 459 bp, Homo Sapiens; identical to SEQ ID NO: 272359
  misc_feature (430)..(430): n is a, c, g, or t
  misc_feature (444)..(444): n is a, c, g, or t

SEQ ID NO: 280977 - DNA, 689 bp, Homo Sapiens; identical to SEQ ID NO: 272360
  misc_feature (328)..(371): n is a, c, g, or t

SEQ ID NO: 280978 - DNA, 466 bp, Homo Sapiens; identical to SEQ ID NO: 272378
  misc_feature (24)..(24): n is a, c, g, or t
  misc_feature (46)..(46): n is a, c, g, or t
  misc_feature (74)..(74): n is a, c, g, or t
  misc_feature (81)..(81): n is a, c, g, or t

SEQ ID NO: 280979 - DNA, 404 bp, Homo Sapiens; identical to SEQ ID NO: 272379
  misc_feature (73)..(73): n is a, c, g, or t
  misc_feature (91)..(91): n is a, c, g, or t

SEQ ID NO: 280980 - DNA, 445 bp, Homo Sapiens; identical to SEQ ID NO: 272390
  misc_feature (400)..(400): n is a, c, g, or t

SEQ ID NO: 280981 - DNA, 614 bp, Homo Sapiens; identical to SEQ ID NO: 272391

SEQ ID NO: 280982 - DNA, 351 bp, Homo Sapiens; identical to SEQ ID NO: 272516

SEQ ID NO: 280983 - DNA, 421 bp, Homo Sapiens; identical to SEQ ID NO: 272517
  misc_feature (386)..(386): n is a, c, g, or t
  misc_feature (392)..(392): n is a, c, g, or t
  misc_feature (406)..(406): n is a, c, g, or t

SEQ ID NO: 280984 - DNA, 599 bp, Homo Sapiens; identical to SEQ ID NO: 272518
  misc_feature (310)..(310): n is a, c, g, or t

SEQ ID NO: 280985 - DNA, 385 bp, Homo Sapiens; identical to SEQ ID NO: 272531

SEQ ID NO: 280986 - DNA, 412 bp, Homo Sapiens; identical to SEQ ID NO: 272532

SEQ ID NO: 280987 - DNA, 424 bp, Homo Sapiens; identical to SEQ ID NO: 272533

SEQ ID NO: 280988 - DNA, 629 bp, Homo Sapiens; identical to SEQ ID NO: 272691

SEQ ID NO: 280989 - DNA, 361 bp, Homo Sapiens; identical to SEQ ID NO: 272692

SEQ ID NO: 280990 - DNA, 418 bp, Homo Sapiens; identical to SEQ ID NO: 272833
  misc_feature (13)..(13): n is a, c, g, or t
  misc_feature (35)..(35): n is a, c, g, or t

SEQ ID NO: 280991 - DNA, 591 bp, Homo Sapiens; identical to SEQ ID NO: 272834

SEQ ID NO: 280992 - DNA, 337 bp, Homo Sapiens; identical to SEQ ID NO: 273431
  misc_feature (151)..(235): n is a, c, g, or t

SEQ ID NO: 280993 - DNA, 960 bp, Homo Sapiens; identical to SEQ ID NO: 273432
  misc_feature (288)..(352): n is a, c, g, or t
  misc_feature (777)..(870): n is a, c, g, or t
  misc_feature (921)..(921): n is a, c, g, or t

SEQ ID NO: 280994 - DNA, 455 bp, Homo Sapiens; identical to SEQ ID NO: 273593
  misc_feature (300)..(341): n is a, c, g, or t

SEQ ID NO: 280995 - DNA, 354 bp, Homo Sapiens; identical to SEQ ID NO: 273594
  misc_feature (204)..(261): n is a, c, g, or t
  misc_feature (280)..(280): n is a, c, g, or t
  misc_feature (292)..(292): n is a, c, g, or t

SEQ ID NO: 280996 - DNA, 714 bp, Homo Sapiens; identical to SEQ ID NO: 273759
  misc_feature (118)..(476): n is a, c, g, or t

SEQ ID NO: 280997 - DNA, 372 bp, Homo Sapiens; identical to SEQ ID NO: 273760
  misc_feature (311)..(311): n is a, c, g, or t
  misc_feature (322)..(322): n is a, c, g, or t
  misc_feature (326)..(326): n is a, c, g, or t

SEQ ID NO: 280998 - DNA, 441 bp, Homo Sapiens; identical to SEQ ID NO: 273816
  misc_feature (28)..(28): n is a, c, g, or t

SEQ ID NO: 280999 - DNA, 406 bp, Homo Sapiens; identical to SEQ ID NO: 273817

SEQ ID NO: 281000 - DNA, 774 bp, Homo Sapiens; identical to SEQ ID NO: 273944
  misc_feature (88)..(170): n is a, c, g, or t
  misc_feature (525)..(525): n is a, c, g, or t
  misc_feature (677)..(705): n is a, c, g, or t

SEQ ID NO: 281001 - DNA, 536 bp, Homo Sapiens; identical to SEQ ID NO: 273945

SEQ ID NO: 281002 - DNA, 1462 bp, Homo Sapiens
  misc_feature (1267)..(1294): n is a, c, g, or t
  misc_feature (1312)..(1392): n is a, c, g, or t
aaagtagcgaggcctgggtggcgaattcggcacgagggaagttctacgcacgcgtctgcagaagtggctcaggcctggttggccgccagcttgaggagttcctgaaccagagctcgcccttctacttctggatgaatggtgaccgcatcgactccctgctggagaacgaccggcagcagacgcacatgctggatgtcatgcaggaccacttcagccgcgcgtccagcatcatagacgagctcttccaggacaggttcttcacccgggagccccaggatacctaccactacctgcccttcagcctgccccaccggaggcctcacttcttctttcccaagtcccgcatcgtccgcagcttgatgcccttctctccgtacgagcccctgaacttccacgccatgttccagcccttccttgagatgatacacgaggctcagcaggccatggacatccacttccacagcccggccttccagcacccgccaacagaattcatacgagaaggcgacgatgaccggactgtgtgccgggagatccgccacaactccacgggctgcctgcggatgaaggaccagtgtgacaagtgccgggagatcttgtctgtggactgttccaccaacaacccctcccaggctaagctgcggcgggagctcgacgaatccctccaggtcgctgagaggttgaccaggaaatacaacgagctgctaaagtcctaccagtggaagatgctcaacacctcctccttgctggagcagctgaacgagcagtttaactgggtgtcccggctggcaaacctcacgcaaggcgaagaccagtactatctgcgggtcaccacggtggcttcccacacttctgactcggacgttccttccggtgtcactgaggtggtcgtgaagctctttgactctgatcccatcactgtgacggtccctgtagaagtctccaggaagaaccctaaatttatggagaccgtggcggagaaagcgctgcaggaataccgcaaaaagcaccgggaggagtgagatgtggatgttgcttttgcacctacgggggcatctgagtccagctccccccaagatgagctgcagccccccagagagagctctgcacgtcaccaagtaaccaggccccagcctccaggcccccaactccgcccagcctctccccgctctggatcctgcactctaacactcgactctgctgctcatgggaagaacagaattgctcctgcatgcaactaattcaataaaactgtcttgtgagctgnnnnnnnnnnnnnnnnnnnnnnnnnnnnccccactttcttgtacannnnnnnnnnnnnnnnnnnnnnnnnnnnnnnnnnnnnnnnnnnnnnnnnnnnnnnnnnnnnnnnnnnnnnnnnnnnnnnnnccatccagctgatatcccctatagtgagtcgtattacatggtcatagctgtttcctggcagctctggccc

SEQ ID NO: 281003 - DNA, 548 bp, Homo Sapiens
tacttgtggttctgcgtttatttctagactgtattaataaacatacaacacaagctggccttgtgttgctgggtcctattcagtatttcctggggattgtttgctttttaagtaaaacacttctgacccatagctcagtatgtctgaattccagaggtcacatcagcatctttctgctttgaaaactctcacagctgtggctgcttcacttagatgcagtgagacacatagttggtgttccgattttcacatccttccatgtatttatcttgaagagataagcacagaagagaaggtgctcactaacagaggtacattactgcaatgttctcttaacagttaaacaagctgtttacagtttaaactgctgaatattatttgagctatttaaagcttattataagtatgaactaaatgaaggttaaaacatgcttaagaaaaatgcactgatttctgcattatgtgtacagtattggacaaaggattttattcattttgttgcattattttgaatattgtcttttcattttaataaagttataatactt

SEQ ID NO: 281004 - DNA, 679 bp, Homo Sapiens
  misc_feature (71)..(142): n is a, c, g, or t
  misc_feature (172)..(199): n is a, c, g, or t
gggccagagctgccaggaaacagctatgtccatgtaatacgactcactataggggatatcagctggatggnnnnnnnnnnnnnnnnnnnnnnnnnnnnnnnnnnnnnnnnnnnnnnnnnnnnnnnnnnnnnnnnnnnnnnnnggccaattagtacaagaaagttgggtttcnnnnnnnnnnnnnnnnnnnnnnnnnnnncaagctgctgggaatatttatttatttatttggtctattaacaccaagatctgcaaaaaacaacctctaaacacaagataagaaaactcgaacattaacattcttcaattttgtgtaagctctgcagtacggaaaatatacaaacttcaaacagctgcaaaaatagtgtctttgggagaaaatagagtctctacatcgatacaagaaaaataggcatttttctaatccatccagccctggggcgggcggagagtatagagtcgccatttgccacctggaggaatgccagctctcctccccactacccacctggggctgggcgggctgggctgctacttaagacaatctttagtcagggtgaaagcgagatgaaaatgccacttgggaaaacacttgtttcctccctctgccagcagctgaattggtcaagtgttatggcccgttagggctgctttggtcagctcctccaatgagagccaa

SEQ ID NO: 281005 - DNA, 516 bp, Homo Sapiens
  misc_feature (79)..(160): n is a, c, g, or t
  misc_feature (178)..(194): n is a, c, g, or t
tgagacatgggccagagctgccaggaaacagctatgaccatgtaatacgactcactataggggatatcaggtggatggnnnnnnnnnnnnnnnnnnnnnnnnnnnnnnnnnnnnnnnnnnnnnnnnnnnnnnnnnnnnnnnnnnnnnnnnnnnnnnnnnntgtacaagaaagttgggnnnnnnnnnnnnnnnnnataatgcaatccagtatgcctttgtgtcaaacttcattttctaagaaaagcatctttttgaaacaaactatccctgtagtaaagaggaaaatactaaatcagaaaaataccaactttatagatggactagaaattttagggacttctttgcagtctcaacaatgaaatatagccatgaatgcatatgccttcttaagcttgagtggcttattataatcagactaagttctcataccatgtaattccattgtagtttatgacttaattccgtaagaattataactgaaagagccttgcctaatcaaaataaaatttaatccaa

SEQ ID NO: 281006 - DNA, 706 bp, Homo Sapiens
  misc_feature (71)..(152): n is a, c, g, or t
  misc_feature (170)..(321): n is a, c, g, or t
gggccagagctgccaggaaacagctatgaccatgtaatacgactcactataggggatatcagctggatggnnnnnnnnnnnnnnnnnnnnnnnnnnnnnnnnnnnnnnnnnnnnnnnnnnnnnnnnnnnnnnnnnnnnnnnnnnnnnnnnnntgtacaagaaagttgggnnnnnnnnnnnnnnnnnnnnnnnnnnnnnnnnnnnnnnnnnnnnnnnnnnnnnnnnnnnnnnnnnnnnnnnnnnnnnnnnnnnnnnnnnnnnnnnnnnnnnnnnnnnnnnnnnnnnnnnnnnnnnnnnnnnnnnnnnnnnnnnnnnnnnnnnaacacttgttagattcctaagtgaatggtaggtatggtagagaactcctctgccattctcctattgcaatccacacccacacatatctccacctcccctaatacacataaaagcacactacatatacaagttttgttttgagtatagtttttttcttgtggctaagtaataaaccactttaaactgatgtgtctaggaggacggccatgatctatccaaattttcttctctcctatctggcatttcctaccatttcatttgtccttcgactttatgagatttattattaggccataaagatgtcataatcctggaatagaaagggaaaagtcatcaactacaacagttcccagaacattctcactcacggcaatattaaacccaa

SEQ ID NO: 281007 - DNA, 739 bp, Homo Sapiens
  misc_feature (71)..(152): n is a, c, g, or t
  misc_feature (170)..(471): n is a, c, g, or t
gggccagagctgccaggaaacagctatgaccatgtaatacgactcactataggggatatcagctggatggnnnnnnnnnnnnnnnnnnnnnnnnnnnnnnnnnnnnnnnnnnnnnnnnnnnnnnnnnnnnnnnnnnnnnnnnnnnnnnnnnntgtacaagaaagttgggnnnnnnnnnnnnnnnnnnnnnnnnnnnnnnnnnnnnnnnnnnnnnnnnnnnnnnnnnnnnnnnnnnnnnnnnnnnnnnnnnnnnnnnnnnnnnnnnnnnnnnnnnnnnnnnnnnnnnnnnnnnnnnnnnnnnnnnnnnnnnnnnnnnnnnnnnnnnnnnnnnnnnnnnnnnnnnnnnnnnnnnnnnnnnnnnnnnnnnnnnnnnnnnnnnnnnnnnnnnnnnnnnnnnnnnnnnnnnnnnnnnnnnnnnnnnnnnnnnnnnnnnnnnnnnnnnnnnnnnnnnnnnnnnnnnnnnnnnnnnnncaattattaattgaataactttgtcattgtcctgtcctgttctacacgaagggaggggcctcactgcacactggaaacagtgcccactgtgcaagggcaggcaggtgtgcacgcacacacacatacgtgtctacaaagccacacatgcacgcctttaacgggagatcctgctggcgaaatctcgttatttgcctagagaggatacttttgaacagccagccaatacatgatgcagatgtaacagcagaagataattaaatatctccaa

SEQ ID NO: 281008 - DNA, 687 bp, Homo Sapiens
  misc_feature (493)..(518): n is a, c, g, or t
  misc_feature (536)..(617): n is a, c, g, or t
actctctaatcagggcccactttgtacaaaaaagttgggttaagtcttcaccctgtaatttttgcttttaattttgatacctctttatgacttaacaataaaaaggatgtatggtttttatcaactgtctccaaaataatctcttgttatgcagggagtacagttcttttcattcatacataagttcagtagttgcttccctaactgcaaaggcaatctcatttagttgagtagctcttgaaagcagctttgagttagaagtatgtgtgttacaccctcacattagtgtgctgtgtggggcagttcaacacaaatgtaacaatgtatttttgtgaatgagagttggcatgtcaaatgcatcctctagaaaaataattagtgttatagtcttaagatttgttttctaaagttgatactgtgggttatttttgtgaacagcctgatgtttgggaccttttttcctcaaaataaacaagtccttattaaaccaggnnnnnnnnnnnnnnnnnnnnnnnnnncccaactttcttgtacannnnnnnnnnnnnnnnnnnnnnnnnnnnnnnnnnnnnnnnnnnnnnnnnnnnnnnnnnnnnnnnnnnnnnnnnnnnnnnnnnccatccagctgatatcccctatagtgagtcgtattacatggtcatagctgtttcctggcagctctggccc

SEQ ID NO: 281009 - DNA, 1403 bp, Homo Sapiens
  misc_feature (1213)..(1233): n is a, c, g, or t
  misc_feature (1251)..(1332): n is a, c, g, or t
caataaagccaactttgtacaaaaaagttgggttaaaacttaaattttaaattgatttatttattcacatcaaaacaaaaaatatctgaaaacattttcattcttccatttaagtaattaagttgaaaactttggacttttcttaaccaattttcctcaagttatcactggttttcattaaatgatattccttttcagctcttatccacaggggtttgcactgttttcacaaaaattgcagataatttaaacctgtggtaggaagcaggggaaggtcagtgaaatagcattatcatatagtgtcttgttcagtgaagtaacacttaaagagaagtgtctgctgaaagccagccaaatcattgtcaactctggaacggtcaggtagttgagtcttccaggttgttattcaagttctcctttgaatttagggaatgctgggatgagtaaatgcctttcagaataagtgaaatttaagagtattgtacagttcaatgtttccattgcacgaaataatcatggtttggtgaataacagcaaaactggaagtgaggaatgctctatatagataagtctgtccaggttttagcctttgactctgtcaaggaacttttccaagaagctttaattaccttacctataaactaggaaaagtaaaatttactcttgttcccagcatggtggttttaggaatcagagggaacacatttgttaaaagagcatttgaaataaaaattgtataacaatgctgttttaattctcacaagatttttgagaatgttaaaacatcagcaatttataatcttcaactttgatccaacaaagttcacaagaagatatattggccatctttaattcatgcaatgattccttaagtcattcaaccattcactgagcagctatgatgtgtaagtgaatatctttacaattaatgtactaaaaatcaaaaagaagaatagctaatatgactaaccatgttgaaatatggttaattaccttaaaggaaatacagttgactcttgaataatgcaaagcattaggagtgccaaccccctgcacagttgaaaatgtgagtataacttttgactccttaaaaacgtaactaatcatagcctagtgttgacgggaagccatactgaaaacttaaacagtcaattaacatatattttttatattatatgtgttataaactttatttttacaataaataaagctnnnnnnnnnnnnnnnnnnnnncccaacattcttgtacannnnnnnnnnnnnnnnnnnnnnnnnnnnnnnnnnnnnnnnnnnnnnnnnnnnnnnnnnnnnnnnnnnnnnnnnnnnnnnnnnccatccagctgatatcccctatagtgagtcgtattacatggtcatagctgtttcctgggcagctctggccc

SEQ ID NO: 281010 - DNA, 914 bp, Homo Sapiens
  misc_feature (548)..(598): n is a, c, g, or t
tgggtatatacccaaaggattataaatcatctgctataaagacacatgcacactatgtttattgctacactgttcacaatagcaaagacttggaaccaacacaaatgtccatcaatgatagactggataaagaaaatgtggcacatataccccatggaatactatgcagccataaaaaaggatcagttcatgttctttgcaggggcatggatgaagctggaaaccatcattctcagcaaactaacacaagaacagaaaaccaaacactgcatgttcccactcataagtgggagttgaacaatgagaacacatggacacagggaggagaacatcacacactggggcctgtcgggggttggggggtagggaagggataacattaggagaaatacctaatgtagatgacaggttgatgggggcagcaaaccacaatggcatgtgtatacctatgtaacaaaactgcatgttctgcacatgtaccccagaacttaaagtataataataataataaacaaggctgaaggacatcaacaatcaacctttggagnnnnnnnnnnnnnnnnnnnnnnnnnnnnnnnnnnnnnnnnnnnnnnnnnnncactgatacagttccattaatgcatttggacagattgaaatttatttttaatgaagaggataaacaagagaacagggatctaagcttttaaattgtatttgataagttgatagatatatcaaacagtaaggtaaagatacctgtaaaaaagtataaatagacaagaaatcagaaaaaaaactggatacttttctttgaatgtgactaaatatcactatggcctgataactgcagagaaaactatgctaaaaacacagttataaatgttagagaaatggatatcagaagtaatatgtttaagcaaagagcaaaccaa

SEQ ID NO: 281011 - DNA, 2001 bp, Homo Sapiens
  misc_feature (65)..(146): n is a, c, g, or t
  misc_feature (164)..(181): n is a, c, g, or t
  misc_feature (1863)..(1886): n is a, c, g, or t
gagctgccaggaaacagctatgaccatgtaatacgactcactataggggatatcagctggatggnnnnnnnnnnnnnnnnnnnnnnnnnnnnnnnnnnnnnnnnnnnnnnnnnnnnnnnnnnnnnnnnnnnnnnnnnnnnnnnnnntgtacaagaaagttgggnnnnnnnnnnnnnnnnnngaaaaaaataattttagagagttgtatttttcagactgcttgaacaatcaccctgtaataattatcaactgcttgccaataattaccaagaacctgttttactttttgcacaataatgcattattttaatgttgagctggatttagtaaaggagaataatatgagtttaaaattgcctcttcgatacaaacaaatggaagaacattccatgctcacagataggaagaataaatactgtgaaaatggccatactgcccaaagtaatttataaattcaatgccatccccatcaagctaccaaagactttcttcacagaattagaaaaaactactttaaagttcatatggaaccaaaaaagagcccgaatagacaagacaatcctaagcaaaaagaacaaagctggaggcatcacactacctgacttcaaactatactacaaggctacagtaaccaaaacagcatggtactgctaccaaaacagagatatagaccaatggaacagaacagagccctcagaaataataccacacatctacaaccatctgatctttgacaaacctgacaaaaacaagcaatggggaaaggattccctatttaataaatggtgctgggaaaactggctagccatatgcagaaaactgaaactggaccccttccttacaccttatacaaaaattaactcaagatggattaaagacttaaacataagacctaaaaccacaaaaaccctagaagaaaacctaggcaataccattcaggacataggcatgggcaaagacttcatgactaaaacaccaaaagcaatggcaacaaaagccaaaattgacaaatgagagctaattaaactaaagagcttctgcacagcaaaagaaactaccatcagagagaacagacaacctacaaaatgggagaaaatttttgcaacctcctctatctgacaaagggctaatatccagaatctacaaagaacttaaacaaatttacaagaaaaaaacgaacaaccccatcaaaaagtggacaaaggatatgaacagacacttctcaaaagaagacatttatgcagccaaaaaacacatgaaaaaaagctcatcatcactggccatcagagaaatgcaaatcaaaaccacaatgagataccatctcataccagttagaatggcaatcattaaaaagtcaggaaacaacaggtgctggagaggatgtggagaaataggaacacttttacactgttggtgggactgtaaactagttcaaccattgtggaagtcagtgtggcaatttctcagggatctagaactagaaataacatttgacccagcaatcccattactgggtatatacccaaaggattataaaacatgctactataaagacacatgaacacgtatgtttattgcagcactattcacaatagcaaagacttggaaccaacccaaatgttcatcaataatagattagataaagaaaatgtggcacatatacaccatggaatactatgcagccataaaaaaggttgagttcatatactttgcggggacatgatgaagctggaaaccatcattctcagcaaactgtcacaagaacagaaaaccaaacaccgcatgttcttactcataagtgggagttgaacaatgagaacacatggagatagggagaggaacatcacacaccagagccttctnnnnnnnnnnnnnnnnnnnnnnnntaacattaggagaaatacctaatgtaggtgatggctatgtgggtgcagcaaaccaccatgacatgtgtatacctatgtaacaaaactgcacattctgcacgtgtacccgagccaa

SEQ ID NO: 281012 - DNA, 603 bp, Homo Sapiens
  misc_feature (229)..(268): n is a, c, g, or t
  misc_feature (418)..(434): n is a, c, g, or t
  misc_feature (452)..(533): n is a, c, g, or t
aaaaaagttggcgcactaagttcggcatcaatatggtgacctcccgggagcgggggaccaccaggttgcctaaggaggggtgaaccggcccaggtcggaaacggagcaggtcagaaactggggccagagtacaattcattggtggctggaggaataagtggcaggggcaagtgggctgtctttaaggtttctgagcacctgtgagtgatgtactgtccttcattgagtnnnnnnnnnnnnnnnnnnnnnnnnnnnnnnnnnnnnnnnncttcaacaagtgttttgagtgtgtccaatgtgccagtgctgttatagctattggggataaagaataatatatcattgtccccactctcaactaccttacgttatcccgcacaggataagcaagtaaatcaaggaatttaaacaacaaccnnnnnnnnnnnnnnnnncccaactttcttgtacannnnnnnnnnnnnnnnnnnnnnnnnnnnnnnnnnnnnnnnnnnnnnnnnnnnnnnnnnnnnnnnnnnnnnnnnnnnnnnnnnccatccagctgatatcccctatagtgagtcgtattacatggtcatagctgtttcctggcagctctggccc

SEQ ID NO: 281013 - DNA, 1011 bp, Homo Sapiens
  misc_feature (436)..(459): n is a, c, g, or t
  misc_feature (730)..(793): n is a, c, g, or t
ggttaactcagaaagatattatgcaaaataagtaaaataatataagtgagcatgcataaatgttcctctgaatttgagggtagaatagtaggcagaaaggattatctggcaaggaagggaaagaggaggcacaaaatagtattataaacaatggaaggaggctcaagaatgaggagaacccacattccttctgaaactttaatacccttctactccaacctctttcttactcaggaatattataacaatcagatatgagaagaaataacaggtcttgtataatttcaaaaaatttctgtatttttattattatactttaagtactagggtacatgtgcacaacatgcaggttttttacatagctatacatgtgccgtgttggtttgctgcacccaccaactcctcatttacattaggtatttctcctaacgctatnnnnnnnnnnnnnnnnnnnnnnnnaacaggccccggtgtgtgatgttccccttcctgtgtccatgtgttctcattgttcaattcccacctatgagtgagaatatgtggtgtttggttttttgtccttgcgatagtttgctgagaatgatggtttccagcttcatccatgtccctacaaaggacatgaactcatcattttttatggctgcatagtattccatggtgtatatgtgccacattttcttaatccagtctatcattgttggacatttgggttggttccaagtctttgctnnnnnnnnnnnnnnnnnnnnnnnnnnnnnnnnnnnnnnnnnnnnnnnnnnnnnnnnnnnnnnnncctttgggtatatacccagtaatgggatggctgggtcaaatggtatttccagttctagatccctgaggaatcgccacactgacttccacaatggttgaactagtttacagtcccaccaacagtgtaaaagtgttcctatttctccacatcctctcagcacctgttgtttcctgactttttaatgatgcattctaactggtgtgaacatttatgcagcc

SEQ ID NO: 281014 - DNA, 816 bp, Homo Sapiens
  misc_feature (71)..(152): n is a, c, g, or t
  misc_feature (170)..(198): n is a, c, g, or t
  misc_feature (270)..(305): n is a, c, g, or t
  misc_feature (803)..(803): n is a, c, g, or t
gggccagagctgccaggaaacagctatgaccatgtaatacgactcactataggggatatcagctggatggnnnnnnnnnnnnnnnnnnnnnnnnnnnnnnnnnnnnnnnnnnnnnnnnnnnnnnnnnnnnnnnnnnnnnnnnnnnnnnnnnntgtacaagaaagttgggnnnnnnnnnnnnnnnnnnnnnnnnnnnnnacagtttgaaacagaaatttattctcagaataatgcacagaagcacaggttgaggctactcttgggaagctnnnnnnnnnnnnnnnnnnnnnnnnnnnnnnnnnnnngaatgccagggagaacacagttgaaggaaggaaacatgcaatcacaaacaatgaacaactctaaagacaaaaaggtttggtccaaaagaactcaacataattaatccaatgactgtgaagagcttcactgagtaggattaagatattgcagatgtagtgtttccacagggtggctcttcagtgcaccagcggggcctgcttgagggagatgaggactgagcgcatgcgggagacatctttggcctgcttgctagacttggggttaaagtcacacagccgggccacccgttcccactcagtgccctggggacgactcgtcaatgtcatttacaaaggcttcttctgctgccctgttgtttgcttttgttttctgtagctgctcgtcctgtcttgcataccattcttctagctcctttattgccttttctttccactctgcttcttgcttccgagaattggcatcaagggcttccaagcgttccatttgttcttctctcncctgtgccgaaat

SEQ ID NO: 281015 - DNA, 1177 bp, Homo Sapiens
  misc_feature (71)..(152): n is a, c, g, or t
  misc_feature (170)..(189): n is a, c, g, or t
  misc_feature (416)..(419): n is a, c, g, or t
  misc_feature (424)..(424): n is a, c, g, or t
  misc_feature (435)..(435): n is a, c, g, or t
  misc_feature (458)..(458): n is a, c, g, or t
  misc_feature (460)..(460): n is a, c, g, or t
  misc_feature (467)..(468): n is a, c, g, or t
  misc_feature (470)..(470): n is a, c, g, or t
  misc_feature (472)..(472): n is a, c, g, or t
  misc_feature (479)..(480): n is a, c, g, or t
  misc_feature (482)..(482): n is a, c, g, or t
  misc_feature (484)..(484): n is a, c, g, or t
  misc_feature (503)..(503): n is a, c, g, or t
  misc_feature (513)..(513): n is a, c, g, or t
  misc_feature (522)..(523): n is a, c, g, or t
  misc_feature (525)..(525): n is a, c, g, or t
  misc_feature (533)..(533): n is a, c, g, or t
  misc_feature (537)..(537): n is a, c, g, or t
  misc_feature (552)..(552): n is a, c, g, or t
  misc_feature (561)..(561): n is a, c, g, or t
  misc_feature (566)..(567): n is a, c, g, or t
  misc_feature (570)..(570): n is a, c, g, or t
  misc_feature (587)..(643): n is a, c, g, or t
  misc_feature (651)..(651): n is a, c, g, or t
  misc_feature (656)..(657): n is a, c, g, or t
  misc_feature (663)..(665): n is a, c, g, or t
  misc_feature (668)..(668): n is a, c, g, or t
  misc_feature (675)..(675): n is a, c, g, or t
  misc_feature (679)..(679): n is a, c, g, or t
  misc_feature (681)..(681): n is a, c, g, or t
  misc_feature (688)..(688): n is a, c, g, or t
  misc_feature (702)..(702): n is a, c, g, or t
  misc_feature (707)..(707): n is a, c, g, or t
  misc_feature (717)..(717): n is a, c, g, or t
  misc_feature (719)..(719): n is a, c, g, or t
  misc_feature (723)..(723): n is a, c, g, or t
  misc_feature (727)..(728): n is a, c, g, or t
  misc_feature (732)..(795): n is a, c, g, or t
  misc_feature (854)..(854): n is a, c, g, or t
  misc_feature (889)..(889): n is a, c, g, or t
  misc_feature (975)..(975): n is a, c, g, or t
  misc_feature (994)..(994): n is a, c, g, or t
  misc_feature (1146)..(1146): n is a, c, g, or t
gggccagagctgccaggaaacagctatgaccatgtaatacgactcactataggggatatcagctggatggnnnnnnnnnnnnnnnnnnnnnnnnnnnnnnnnnnnnnnnnnnnnnnnnnnnnnnnnnnnnnnnnnnnnnnnnnnnnnnnnnntgtacaagaaagttgggnnnnnnnnnnnnnnnnnnnncaccattcactgacttttattgccagaggagctcccaggaatccacagttctggaagagaggggctctaagtctttattggggagaatacccacccaccttccctcactgcagacgatagacacactcagtgtcagggtagggtggcaggttcagctggtacttcttttccagagcaggtggcacaaaacgaccccccaggtaatggtagcaaccggtaaactgggnnnnagaanttatgggggcngtaaagaaaaagaacaaatatancnggatcannanancattaanntncnacacgaaccaacctgaagnaatatagatnaaagaaatnnanaaaaaaanaaantaaaggaaaataagnatgcagaanaacanntancgaacatacgccacttnnnnnnnnnnnnnnnnnnnnnnnnnnnnnnnnnnnnnnnnnnnnnnnnnnnnnnnnntgggcaanacagnnatttannnaangaaaagnatgnanatatacnaaaaatgggtaacnaatanagtaaaaaangnattntaanncctnnnnnnnnnnnnnnnnnnnnnnnnnnnnnnnnnnnnnnnnnnnnnnnnnnnnnnnnnnnnnnnnatctactccattattccccgggccacaaatgaacaggacagttggggggctcctggacntggacgtggggggatatgccttggcgatggctgtngcacagctcagcccggccagttccataagttggtccacgctgaactggtattcgttaaatagctcctggtccacggcctgggcctnctcctggctcaggtacttnaccaccgtgctcgccatgacctctgagttccagcggccacccgagtgcagccgctgcggtccccaccaggtgggttccgagcgacaagcgatggtctggcttttgatccgcggcaggcgcgacccgccaccagcagcccgaggccagcagcncccgcggcttggacatccagctcgcagagcg

SEQ ID NO: 281016 - DNA, 633 bp, Homo Sapiens
  misc_feature (71)..(152): n is a, c, g, or t
  misc_feature (170)..(301): n is a, c, g, or t
gggccagagctgccaggaaacagctatgaccatgtaatacgactcactataggggatatcagctggatggnnnnnnnnnnnnnnnnnnnnnnnnnnnnnnnnnnnnnnnnnnnnnnnnnnnnnnnnnnnnnnnnnnnnnnnnnnnnnnnnnntgtacaagaaagttgggnnnnnnnnnnnnnnnnnnnnnnnnnnnnnnnnnnnnnnnnnnnnnnnnnnnnnnnnnnnnnnnnnnnnnnnnnnnnnnnnnnnnnnnnnnnnnnnnnnnnnnnnnnnnnnnnnnnnnnnnnnnnnnnnnnnncctgccttcttatattaataagaaaaacaaaacaaaatagtagtgaagtgttggggccacgaaaatttttgaggggtggtatggagagagaatgggcgatgtttctcagggctgcttcgagcgggattaggggcagcatgggaacctagagtgggagaaattaaactgaagaaagatctcggggtaaggggtgatattgtggagatgttagaagaaacatttgtcatatagaatgactggtgatgacctggatgcggttttgtatgaattgagaaactaatcggaagacacaaggtccaaataagaaaaggagaaaaacaggtattagccaa

SEQ ID NO: 281017 - DNA, 723 bp, Homo Sapiens
  misc_feature (417)..(534): n is a, c, g, or t
  misc_feature (536)..(553): n is a, c, g, or t
  misc_feature (571)..(652): n is a, c, g, or t
ttggatttcaggagacgatcatagcctgtataggtatcagattagaacatacggatttacgatgaagttctgtcttcaacacccagcattgtctaaagggctactgtcccaaatcctgtgtgtcccttcagcttgtctgatcacccaacggaagtggatacttgtaaagtctacaccactgtacttggcgttaaatcttgctgaattcgtggtaagctattaccatgtctacattttgtagaatgattttggtctgcagcaaaattcgatttcacttctcacacccctttccttccacttgaaatgcaatttagacagaggccctgtggtgaaagttgcaatattaagcttacctttagaagatcccttctcaaactcagaaccctagcagcgttaccttaaaaatgagctcgagannnnnnnnnnnnnnnnnnnnnnnnnnnnnnnnnnnnnnnnnnnnnnnnnnnnnnnnnnnnnnnnnnnnnnnnnnnnnnnnnnnnnnnnnnnnnnnnnnnnnnnnnnnnnnnnnnnnnncnnnnnnnnnnnnnnnnnncccaactttcttgtacannnnnnnnnnnnnnnnnnnnnnnnnnnnnnnnnnnnnnnnnnnnnnnnnnnnnnnnnnnnnnnnnnnnnnnnnnnnnnnnnnccatccagctgatatcccctatagtgagtcgtattacatggtcatagctgtttcctgggcagctctggccc

SEQ ID NO: 281018 - DNA, 666 bp, Homo Sapiens
  misc_feature (469)..(497): n is a, c, g, or t
  misc_feature (515)..(596): n is a, c, g, or t
ttggggagagcgccgtggacacgcccttcccagctggaatatttgtgaggctggaatttaagctgcagcagacaagctgccggaagagggactggaagaaacccgagtgcaaagtcaggcccaatgggaggaaacggaaatgcctggcctgcatcaaactgggctctgaggacaaagttctgggccggttggtccactgccccatagagacccaagttctgcgggaggctgaggagcaccaggagacccagtgcctcagggtgcagcgggctggtgaggacccccacagcttctacttccctggacagttcgccttctccaaggccctgccccgcagctaagccagcactgagatgcgtggtgcctccaggaccgctgcgggtggtaaccagtggaagaccccagcccccagggagaggaacccgttctatccccagccatgataataaagctgctctcccagctgccnnnnnnnnnnnnnnnnnnnnnnnnnnnnncccacctttcttgtacannnnnnnnnnnnnnnnnnnnnnnnnnnnnnnnnnnnnnnnnnnnnnnnnnnnnnnnnnnnnnnnnnnnnnnnnnnnnnnnnnccatccagctgatatcccctatagtgagtcgtattacatggtcatagctgtttcctggcagctctggccc

SEQ ID NO: 281019 - DNA, 783 bp, Homo Sapiens
  misc_feature (71)..(152): n is a, c, g, or t
  misc_feature (170)..(475): n is a, c, g, or t
gggccagagctgccaggaaacagctatgaccatgtaatacgactcactataggggatatcagctggatggnnnnnnnnnnnnnnnnnnnnnnnnnnnnnnnnnnnnnnnnnnnnnnnnnnnnnnnnnnnnnnnnnnnnnnnnnnnnnnnnnntgtacaagaaagttgggnnnnnnnnnnnnnnnnnnnnnnnnnnnnnnnnnnnnnnnnnnnnnnnnnnnnnnnnnnnnnnnnnnnnnnnnnnnnnnnnnnnnnnnnnnnnnnnnnnnnnnnnnnnnnnnnnnnnnnnnnnnnnnnnnnnnnnnnnnnnnnnnnnnnnnnnnnnnnnnnnnnnnnnnnnnnnnnnnnnnnnnnnnnnnnnnnnnnnnnnnnnnnnnnnnnnnnnnnnnnnnnnnnnnnnnnnnnnnnnnnnnnnnnnnnnnnnnnnnnnnnnnnnnnnnnnnnnnnnnnnnnnnnnnnnnnnnnnnnnnnnnnnnggagttctgagctaaggaatctgggagtggccaacccagaaattcatttcttatttatgaagaacatctgaacctctggctcatcccatgaaacacaggctgtatgaaggatcaaggccctttgttttgggttaagtgaaggttgccaggtggagggtgccatataatttgcatggtttttacaaatggtagtgattctctgtccagcccaccaccactggaccaccctgtatgtaaggtcccttaataaaccctatgtcttgtttgctcactccgggtctttttttcagccccttgagcatggtgcc

SEQ ID NO: 281020 - DNA, 918 bp, Homo Sapiens
  misc_feature (71)..(152): n is a, c, g, or t
  misc_feature (170)..(485): n is a, c, g, or t
  misc_feature (487)..(538): n is a, c, g, or t
gggccagagctgccaggaaacagctatgaccatgtaatacgactcactataggggatatcagctggatgcnnnnnnnnnnnnnnnnnnnnnnnnnnnnnnnnnnnnnnnnnnnnnnnnnnnnnnnnnnnnnnnnnnnnnnnnnnnnnnnnnntgtacaagaaagttgggnnnnnnnnnnnnnnnnnnnnnnnnnnnnnnnnnnnnnnnnnnnnnnnnnnnnnnnnnnnnnnnnnnnnnnnnnnnnnnnnnnnnnnnnnnnnnnnnnnnnnnnnnnnnnnnnnnnnnnnnnnnnnnnnnnnnnnnnnnnnnnnnnnnnnnnnnnnnnnnnnnnnnnnnnnnnnnnnnnnnnnnnnnnnnnnnnnnnnnnnnnnnnnnnnnnnnnnnnnnnnnnnnnnnnnnnnnnnnnnnnnnnnnnnnnnnnnnnnnnnnnnnnnnnnnnnnnnnnnnnnnnnnnnnnnnnnnnnnnnnnnnnnnnnnnnnnnnnannnnnnnnnnnnnnnnnnnnnnnnnnnnnnnnnnnnnnnnnnnnnnnnnnnncaggtcaaatacgttctatattcttaaaacaatctccagaaatcacctaataaggatgctttgtaaacatctctgggagagaatttggggatgactgattcttcatcatcacacaacaaatttgctgcagtcttctaaatggcctcacttgaacatattcataatctaaattagtttgggttagtaaaaagatgcttaccttgctctaacccaggggtttgggtgtgcatgtccaaaccacttccccagctgccatgtttttctgaaggctgggtgggcaaaaagcccctttctgggggccaaggctcctctggcaattgccctgatgtgggagggggcttcaaatccacaggcacccgccaatggtacctggaccccgg

SEQ ID NO: 281021 - DNA, 669 bp, Homo Sapiens
  misc_feature (71)..(152): n is a, c, g, or t
  misc_feature (170)..(190): n is a, c, g, or t
gggccagagctgccaggaaacagctatgaccatgtaatacgactcactataggggatatcagctggatggnnnnnnnnnnnnnnnnnnnnnnnnnnnnnnnnnnnnnnnnnnnnnnnnnnnnnnnnnnnnnnnnnnnnnnnnnnnnnnnnnntgtacaagaaagttgggnnnnnnnnnnnnnnnnnnnnngaggagacaaacaaatggaagaacattccatgctcatggataggaagaatcaatatcgtgaaaatggccatactgcccaaggtaatttatagattcaaggccatccctatcaagctaccaatgactttcttcacagaattggaaaaaactactttaaagttcatatggaaccaaaaaagagcccgcattgccaagtcaatcctaagcaaaaagaacaaagctggaggcatcatgctaccagacttcaaactatactacaaggctacaataaccaaaacaacatggtactggtaccaaaacagagatatagagcaatagaacagaacagagccctcagaaataataccacacatctacaaccatctgatctttgagaaacctgacaaaaacaagcaatggggaaaggattcctatttaataaatggttctgtgaaaactggctagccatatgtagaaagctgaaactggatcccctccaa

SEQ ID NO: 281022 - DNA, 781 bp, Homo Sapiens
  misc_feature (586)..(612): n is a, c, g, or t
  misc_feature (630)..(711): n is a, c, g, or t
cttttaaaagccaactttgtacaaaaaagttgggggttatgtttctggctgggggcgaaatgccaattttaaatttactgaccatctgaagtatgtcatgctgcctgtggctgaccaagaccaatgcataaggcattatgaaggcagcacagtccccgaaaagaagacaccgaagagccctgtaggggtgcagcccatactgaatgaacacaccttctgtgctggcatgtctaagtaccaagaagacacctgctatggcgatgcgggcagtgcctttgccgttcacgacctggaggaggacacctggtatgcgactgggatcttaagctttgataagagctgtgctgtggctgagtatggtgtgtatgtgaaggtgacttccatccaggactgggttcagaagaccatagctgagaactaatgcaaggctggccggaagcccttgcctgaaagcaagatttcagcctggaagagggcaaagtggacgggagtggacaggagtggatgcgataagatgtggtttgaagctgatgggtgccagccctgcattgctgagtcaatcaataaagagctttcttttgacccnnnnnnnnnnnnnnnnnnnnnnnnnnncccaactttcttgtacannnnnnnnnnnnnnnnnnnnnnnnnnnnnnnnnnnnnnnnnnnnnnnnnnnnnnnnnnnnnnnnnnnnnnnnnnnnnnnnnnccatccagctgatatcccctatagtgagtcgtattacatggtcatagctgtttcctggcagctctggccc

SEQ ID NO: 281023 - DNA, 1209 bp, Homo Sapiens
  misc_feature (72)..(154): n is a, c, g, or t
  misc_feature (172)..(198): n is a, c, g, or t
  misc_feature (1110)..(1133): n is a, c, g, or t
gggccaggagctgccaggaaacagctatgaccatgtaatacgactcactataggggatatcagctggatggnnnnnnnnnnnnnnnnnnnnnnnnnnnnnnnnnnnnnnnnnnnnnnnnnnnnnnnnnnnnnnnnnnnnnnnnnnnnnnnnnnntgtacaagaaaggtgggnnnnnnnnnnnnnnnnnnnnnnnnnnngcattaaactcctttattttgttaatattattcttaaacattgaacaattattaattattgttatttggcaaaatatcaaacatgcacatagtattcctacaagaatattgccttaatattgtcaatattaacgctaagcttattcctctccaaaattcaatgagttatggttccgctctctatatgtattagtgttagtggtaatatgcaaaactgattttgttttcagggttaagtagcagattgacttcgcatttggtggccagctgtgtaccctaatttttcatctattttcttaataaatttaattacatttcataagccctgagataacgtgctaaggattgtatacttttaatctatactttattccactcaatttgaaccccacataataagtcttttaagttatttacagatggttgtaactaaagcaatgacaaaatttactacttgtataggtaagactgataataaggcctttaactaagagttgcatattttatatgcacttttaacttgctaggagcaactcttaaaattacatctataattctgtcagaaagcaataagtgcttttcattttgcttacttccatatgtgtaaccagattcacttttttcctcccttgtaaaacaactactttcttttccttccccaaatattaatacgtcttccaactgaacaattgctaaaaggaacttagcatttgcacagcacattgacaactatggtgcttagcagagacatatgcccataataggcatctgataaatgtttgttccacatggaatgagtgaattgtaaggcagctgtttgagtcatacactgttcatcatatactgcaactaattttatttaactaggaaattcagtttaccagatttaatttaccctcaagtgtaaatccnnnnnnnnnnnnnnnnnnnnnnnngatttactaatcctcagaaaaagtaaacaagttaatcatagttgttactatactattagttgatagaaaattaaaa

SEQ ID NO: 281024 - DNA, 996 bp, Homo Sapiens
  misc_feature (71)..(152): n is a, c, g, or t
  misc_feature (171)..(204): n is a, c, g, or t
gggccagagctgccaggaaacagctatgaccatgtaatacgactcactataggggatatcagctggatggnnnnnnnnnnnnnnnnnnnnnnnnnnnnnnnnnnnnnnnnnnnnnnnnnnnnnnnnnnnnnnnnnnnnnnnnnnnnnnnnnntgtacaagaaagttggggnnnnnnnnnnnnnnnnnnnnnnnnnnnnnnnnnnataggtaaagtactttattgttgcaaaactttagaacattggtattgcaagttcttggcctccatgactgcgttattaaaacctgaaaatcttccttgcttcttctaaagatttctcatccatgggaggcttccttgggctgccaggctgtagaaacttcttcactgtgggcaggttgctgattctggttttcagggccttcagcagagggaagctggagataagactggagtcaagctcctcgacgtagtagagaagttccaccagatgaatgtcagcccggctcagcttgttgccaacaaggtagtcttgtccatggctctttaagactttttcaaaggcagggaagtagcgattttttattttctccttgatcaaggcaagcttggcatctttttcctcaggtggacatacgggcagaaggaggatcatttcacccaaatctgctataccttctatatacatatcaatcagggctctctcctttatgtctttcccatagaggttgtatttgctggcaatgtagttgagaatggctctggtctgcaccagcttcatcccatcaatctcaaccattggcacttgctggaacatcaaatatccatcatttcttaacttgtccaaatcttctgcagattttataaatttctcttcaaactctactccagctgcagccaggagccaccgggtggactccattctgccccgtgcattgaagtagtggagcttgggcttctctgccatgatagcagtctcctggaggtttctctaagctttgttacacgctgtcac

SEQ ID NO: 281025 - DNA, 675 bp, Homo Sapiens
  misc_feature (19)..(19): n is a, c, g, or t
  misc_feature (28)..(28): n is a, c, g, or t
  misc_feature (95)..(95): n is a, c, g, or t
  misc_feature (99)..(99): n is a, c, g, or t
  misc_feature (116)..(116): n is a, c, g, or t
  misc_feature (195)..(195): n is a, c, g, or t
  misc_feature (212)..(212): n is a, c, g, or t
ttggttgaagaagtcctcntaagcttantttcaggggatcctgtgttctttacaaaggtttgaagaagaagttctgaaggactctgattagagcnagtntcatgttcatgagagcnaacctcatgccaatgcagtttctgggtccacttccaaagggtgtgtatatgtaaggatctatgttgtccctgttcttcntgctgaatctttcaggnaggaacttctcaggctctgtccagtactttgggtcacggtgaagagcatagcttggattgcagaccctctcaagtctcatagcaattgggaataatctgagcgtttcattcaccaccatgtcaagatactccatctgtagcacagtatcataggtgggtggtgccttattgggtaaaactgcatcaatttcctcctgcagtttctgctggacatcagggtgagtggccagttcatacataatgaaggagagaacactgctcgtggtttcatagccagcaaaaataaagataattgattgggccacgagctccagatcggacagagctttgtgggactcagtttcttttgaattctgagagtcaatcatcagctgaaggaaatccactcggtgcttttgtgtatcttcgaggcgactttctttcatcctttttacagattttcttaaaaaatttgtaacttctc

SEQ ID NO: 281026 - DNA, 1538 bp, Homo Sapiens
  misc_feature (1379)..(1379): n is a, c, g, or t
ttggtgctgcctcacccacagcttttgatatctaggaggactcttctctcccaaactacctgtcaccatggcccaccgatttccagccctcacccaggagcagaagaaggagctctcagaaattgcccagagcattgttgccaatggaaaggggatcctggctgcagatgaatctgtaggtaccatggggaaccgcctgcagaggatcaaggtggaaaacactgaagagaaccgccggcagttccgagaaatcctcttctctgtggacagttccatcaaccagagcatcgggggtgtgatccttttccacgagaccctctaccagaaggacagccagggaaagctgttcagaaacatcctcaaggaaaaggggatcgtggtgggaatcaagttagaccaaggaggtgctcctcttgcaggaacaaacaaagaaaccaccattcaagggcttgatggcctctcagagcgctgtgctcagtacaagaaagatggtgttgactttgggaagtggcgtgctgcgctgaggattgccgaccagtgtccatccagcctcgctatccaggaaaacgccaacgccctggctcgctacgccagcatctgtcagcagaatggactggtacctattgttgaaccagaggtaattcctgatggagaccatgacctggaacactgccagtatgttactgagaaggtcctggctgctgtctacaaggccctgaatgaccatcatgtttacctggagggcaccctgctaaagcccaacatggtgactgctggacatgcctgcaccaagaagtatactccagaacaagtagctatggccaccgtaacagctctccaccgtactgttcctgcagctgttcctggcatctgcgttttgtctggtggcatgagtgaagaggatgccactctcaacctcaatgctatcaacctttgccctctaccaaagccctggaaactaagtttctcttatggacgggccctgcaggccagtgcactggctgcctggggtggcaaggctgcaaacaaaggacagtatgttcacacgggttcttctggggctgcttccacccagtcgctcttcacagcctgctatacctactagggtccaatgcccgccagcctagctccagtgcttctagtaggagggctgaaagggagcaacttttcctccaatcctggaaattcgacacaattagatttgaactgctggaaatacaacacatgttaaatcttaagtacaagggggaaaaaataaatcagttattgaaacataaaaatgaataccaaggacctgatcaaatttcacacagcagtttccttgcaacactttcagctccccatgctccagaatacccacccaagaaaataataggctntaaaacaatatcggctcctcatccaaagaacaactgctgattgaaacacctcattagctgagtgtagagaagtgcatcttatgaaacagtcttagcagtggtaggttgggaaggagatagctgcaaccaaaaaagaaataaatattctataaaccttca

SEQ ID NO: 281027 - DNA, 1016 bp, Homo Sapiens
tgggtggaaccagcccctaaaaaccggggagaacatattgcctttggcccccttgccataaacccaggccccgtttattatagcgtctcgggtgccttcttagtaagaacctttgccaccccaggcagccagtgcattggcttgcagggccattccataaaagatccttagtttccagggctttggtataggtctaaggtcgatagctctaaggttgagattggcatcatgttcactcatgccacctgacagatagcagatgccaggaacatctgcaggagcagtggtgcaggcatgtcctgcagtctccatgttgggctttagcagggtgccctccaggtatacatgatggtcattcaaggcattgtagacagcaggcagcactttctcagtaacaaacggacagtgttccaggtcatggtctccatcagaaataacctctggttcaacaataggaaccagtcaattctgctgacagatgctggagaagcgaagacagggcgttggcgttcatcttgaaaagcgaggcctgaatgaacagtggtcggcaatcctcagcacagcacgccacttcccaaagtcaacaccatctttcttgtttgttcttgcaagaggagcacctccttggtctaacttgattcccaccacgatccccttttccttgaggatgtttctgaacagctttccctggctgtccttctggtagagggtctcgtggaaaaggatcacacccccgatgctctggttgatggaactgtccacagagaagaggatttctcggaactgccggcggttctcttcagtgttttccaccttgatcctctgcaggcggttccccatggtacctacagattcatctgcagccaggatcccctttccattggcaacaatgctctgggcaatttctgagagctccttcttctgctcctgggtgagggctggaaatcggtgggccatggtgacaggtagtttgggagagaagagtcctcctagatatcaaaagctgtgggtgaggc

SEQ ID NO: 281028 - DNA, 672 bp, Homo Sapiens
cccaggctcacaccacctttctttatttgtaatgagtgggactcttcctccccatggtggtccaggccccagaagcggccctgcagttgcagggggaagccaagtgtacagggtgggcacagctccttccatcagaactacagctccacagaccagcaggaaatctccactcccgggggcccctcctggtaatccagcctgcgctctctggtggcagagtggtcattgccctgaaccctcagcgtgcgtctgccgtcatctgatgctgcaggagacccgtcttgtccatggtcatcttcaggccgggcatcactgagaatagcgtctccttccacttgtacgcagagcttcttcggttccgagtcaccaccacgtgttcaggggatgcgtgaacccataccagggggttcttgaaggtcacttcgatccaggagaacccagccttctccctctcatactggccagtcacctcaaccccttgctcagggtctgagagcaggttcactggcccctggcggtgtctggggtccacacagagccgctccacactctgcccaggcagtggcaggatggcagacatattcatgacacgagacacagctggatcaggagaggtggctggtgttgctgaagcaggcactagggcaggaacatccggaaacagaaagggag

SEQ ID NO: 281029 - DNA, 1284 bp, Homo Sapiens
  misc_feature (224)..(224): n is a, c, g, or t
  misc_feature (276)..(276): n is a, c, g, or t
  misc_feature (1205)..(1205): n is a, c, g, or t
  misc_feature (1210)..(1210): n is a, c, g, or t
  misc_feature (1212)..(1212): n is a, c, g, or t
  misc_feature (1266)..(1266): n is a, c, g, or t
tcaggccctgtccccagcactaagaatacagtccccatccaagtggggccacaggaaggtgggtgcaagatgcaaacccaggtcccactgatttccaggttccactttcttcaaatattatctccagggagcaaaaataccaaaaccaggtgacaaagtaggaggtggggggaggggagattgacagattgggctcagtcctggctgtggagggtagtgccttncccagctcctctggctggtgacagccctcgggcctcagttcagttgtatctnatcaggacttgaccacacagaggcttccttttctccaagaagaggatggaatagacaagctggagctgctggctcccggatgaatttcagacctggggttctcagctccaggcaacttggactcccaggacctcctgatgttcctgaccatgctgcttaccaccccttccgccgtctggccatcttgcctgcttcagcaccaccagccacctcaaatcctgatccagctgtgtctcgtgtcatgaatatgaaaatcgaagaaacaaccatgacaacccaaaccccagcccccatacaggctccctctgccatcctgccactgcctgggcagagtgtggagcggctctgtgtggaccccagacaccgccaggggccagtgaacctgctctcagaccctgagcaaggggttgaggtgactggccagtatgagagggagaaggctgggttctcatggatcgaagtgaccttcaagaaccccctggtatgggttcacgcatcccctgaacacgtggtggtgactcggaaccgaagaagctctgcgtacaagtggaaggagacgctattctcagtgatgcccggcctgaagatgaccatggacaagacgggtctcctgctgctcagtgacccagacaaagtgaccatcggcctgttgttctgggatggccgtggggaggggctccggctccttctgcgtgacacatgaccgcttctccagccacgttggagggacccttggccagttttaccaggaggtgctctggggatctccagcagcatcagatgacggcaaacgcacgctgagggttcagggcaatgaccactctgccaccagagagcgcaggctggattaccaggaggggcccccgggagtggagatttcctgctggtctgtggagctgtagttttgatggaaggagctgtgcccaccntgtananttggcttccccctgcaactgcagggccgcttctggggcctggaccaccatgggnggaagatccaaataatta

SEQ ID NO: 281030 - DNA, 1134 bp, Homo Sapiens
  misc_feature (316)..(363): n is a, c, g, or t
  misc_feature (369)..(424): n is a, c, g, or t
  misc_feature (446)..(446): n is a, c, g, or t
  misc_feature (1026)..(1051): n is a, c, g, or t
ctatgctcatactttgactctatgagtactttcctataagtctttgcttgtgttcacctgctagcaaactggagtgtttccctccccaagggggtgtcagtctttgtcgactgactctgtcatcacccttatgatgtcctgaatggaaggatccctttgggaaattctcaggagggggacctgggccaagggcttggccagcatcctgctggcaactccaaggccctgggtgggcttctggaatgagcatgctactgaatcaccaaaggcacgccccacctctctgaagatcttcctatccttttctgggggaatnnnnnnnnnnnnnnnnnnnnnnnnnnnnnnnnnnnnnnnnnnnnnnnnatgagnnnnnnnnnnnnnnnnnnnnnnnnnnnnnnnnnnnnnnnnnnnnnnnnnnnnnnnnctccaacagcactccaggcagnccctgtccacgggctcttcttgcatcagccaagcttcttgaaaggcctgtctacacttgctgtcttccttcctcacctccaatttcctcttcaacccactgcttcctaactcgctctactccgtggaagcacgctcacaaaggcacgtgggccgtggcccggctgggtcggctgaagaactgcggatggaagctgcggaagaggccctgatggggcccaccatcccggacccaagtcttcttcctggcgggcctctcgtctccttcctggtttgggcggaagccatcacctggatgcctacgtgggaagggacctcgaatgtgggaccccagcccctctccagctcgaaatccctccacagccacggggacaccctgcacctattcccacgggacaggctggacccagagactctggacccggggcctccccttgagtagagacccgccctctgactgatggacgccgctgacctggggtcagacccgtgggctggacccctgcccaccccgcaggaaccctgaggcctaggggagctgttgagccttcagtgtctgcatgtgggaagtgggctccttcnnnnnnnnnnnnnnnnnnnnnnnnnnggcgctgtgatgcggttccaaagcacagggcttggcgcaccccactgtgctctcaataaatgtgtttcctgtcttaacaaaaa

SEQ ID NO: 281031 - DNA, 1210 bp, Homo Sapiens
  misc_feature (378)..(378): n is a, c, g, or t
  misc_feature (405)..(455): n is a, c, g, or t
  misc_feature (465)..(512): n is a, c, g, or t
  misc_feature (961)..(961): n is a, c, g, or t
  misc_feature (965)..(965): n is a, c, g, or t
  misc_feature (1133)..(1133): n is a, c, g, or t
tgtggagggatttcgagctggagaggggctggggtcccacattcgaggtcccttcccacgtaggcatccaggtgatggcttccgcccaaaccaggaaggagacgagaggcccgccaggaagaagacttgggtccgggatggtgggccccatcagggcctcttccgcagcttccatccgcagttcttcagtccttcgcagacaaagaaggatccttatgcgacgaatactggaatccagcagctaacctcattaacgtctgcagcctcttccttcgacaaggcccgagattagccgtgatgcaaggagagcccgtgaacaagggctgcctggagtgctgttggagaataaataagacaagtaagacaagcaagagggtngggaagggactgacctgtcaaaccttnnnnnnnnnnnnnnnnnnnnnnnnnnnnnnnnnnnnnnnnnnnnnnnnnnnctcttttttnnnnnnnnnnnnnnnnnnnnnnnnnnnnnnnnnnnnnnnnnnnnnnnnattcccccagaaaaggataggaagatcttcagagaggtggggcgtgcctttggtgattcagtagcatgctcattccagaagcccacccagggccttggagttgccagcaggatgctggccaagcccttgacccaggtccccctcctgagaatttcccaaagggatccttccattcaggacatcataagggtgatgacagagtcagtcgacaaagactgacacccccttggggagggaaacactccagtttgctagcaggtgaacacaagcaaagacttataggaaagaactcatagagtcaaagtatgagcatagcaaaggtcagggcttaatgcccaatgccccctcactagggcattggtttaagtctttaggtaagagggacagctggctggtcagttccggtcctcttcatcctttgccatcctggtcctgggggtcagtgagtngctnctttgtatgttggtgggatccaggaaaccgtgctcctagtgccctcgtgaggtgtagatgggcagcaggccccttggcagcagctcagcatggagaggaggtggtccttgaagacaaggaggtggacggatgatgtcatccctgaggagagacccgggtgagggatcntctcgtgggcgccccagctctcctgaggagccgccgccaaggccagcgagccaaggcgcgctccctctctgatcccg

SEQ ID NO: 281032 - DNA, 515 bp, Homo Sapiens
  misc_feature (20)..(20): n is a, c, g, or t
agaatcgggccagaacttgnagtttaatcctcatgtcatggtaaggccctctgaaattctctctacgcctttgagagactcagcatttagtttctgactcctagagtcccttagtagccagtcaacgtaagagttagtagctacagccgtcaggcacacaattacaccatgaacagtgaagtaaaaaaatgtcctttcttgctttcttcctctaatctcaatcccagaggcatgaaaacctttatcagtcatcgaatacagtaagaaattaagatgatcattccaacaacaacaagcatcacctcaaaaataacacgagccatcgcccaccaattaatgagtgttatcccatttgtctgtgatgagatgtaactctttgtgactgaagaagaggttgaagtgtgcattgccacaccagtggtacttgatgctgatatgctcacaatttctgacaatagtaatacaaagattatttttccatacatcctgagatcacgagctggctcctgaagtta

SEQ ID NO: 281033 - DNA, 408 bp, Homo Sapiens
  misc_feature (15)..(15): n is a, c, g, or t
ccgaatactgttaanaaatttaagaggaacgttcccaataataccagcccatcacacacaaaaataatgaagtattaatcactacaggagctggtacagtgaaaacgatggacaagttgtcccgtttcctcccatttgtctgtgatgagatgtaactctttgtgactgaagaagaggttgaagtgtgcattgccacctcagtggtacttaatgctgatatgctcacaatttctttgctcatctcttggagacattcaaatgaggggaatggcacccaagtgcagtggagtggaggtggaagggcttcttctcagaggcagccaacttggcccctcagctgaatgctcaaagtttcctgacaatagtaatacaaagattatttttccatacatcctgagatcatgagct

SEQ ID NO: 281034 - DNA, 665 bp, Homo Sapiens
  misc_feature (418)..(439): n is a, c, g, or t
gtcttggtgagagcgtgagctgctgagatttgggagtctgcgctaggcccgcttggagttctgagccgatggaagagttcactcatgtttgcacccgcggtgatgcgtgcttttcgcaagaacaagactctcggctatggagtccccatgttgttgctgattgttggaggttcttttggtcttcgtgagttttctcaaatccgatatgatgctgtgaagagtaaaatggatcctgagcttgaaaaaaaactgaaagagaataaaatatctttagagtcggaatatgagaaaatcaaagactccaagtttgatgactggaagaatattcgaggacccaggccttgggaagatcctgacctcctccaaggaagaaatccagaaagccttaagactaagacaacttgactctgctgattcnnnnnnnnnnnnnnnnnnnnnnaaataaaaatactattaactggacttcctaatatatacttctatcaagtggaaaggaaattccaggcccatggaaacttggatatgggtaatttgatgacaaataatcttcactaaaggtcatgtacaggtttttatacttcccagctattccatctgtggatgaaagttacaatgttggccacgtatattttacacctcgaaataaaaaatgtgaatactgctcc

SEQ ID NO: 281035 - DNA, 805 bp, Homo Sapiens
  misc_feature (203)..(304): n is a, c, g, or t
  misc_feature (569)..(590): n is a, c, g, or t
  misc_feature (635)..(635): n is a, c, g, or t
  misc_feature (761)..(761): n is a, c, g, or t
gggaaggaaaaggaagtgagttaaggacgtactcgtcttggtgagagcgtgagctgctgagatttgggagtctgcgctaggcccgcttggagttctgagccgatggaagagttcactcatgtttgcacccgcggtgatgcgtgcttttcgcaagaacaagactctcggctatggagtccccatgttgagtctcactctgtcannnnnnnnnnnnnnnnnnnnnnnnnnnnnnnnnnnnnnnnnnnnnnnnnnnnnnnnnnnnnnnnnnnnnnnnnnnnnnnnnnnnnnnnnnnnnnnnnnnnnnttgctgattgttggaggttcttttggtcttcgtgagttttctcaaatccgatatgatgctgtgaagagtaaaatggatcctgagcttgaaaaaaaactgaaagagaataaaatatctttagagtcggaatatgagaaaatcaaagactccaagtttgatgactggaagaatattcgaggacccaggccttgggaagatcctgacctcctccaaggaagaaatccagaaagccttaagactaagacaacttgactctgctgattcnnnnnnnnnnnnnnnnnnnnnnaaataaaaatactattaactggacttcctaatatatacttctatncagtggaaaggaaattccaggcccatggaaacttggatatgggtaatttgatgacaaataatctttcactaaaggtcatgtacaggttttttatactttccccagctatttccatcttgtgggatngaaaagtaacaattgttgggcccacgctatattttttacaactc

SEQ ID NO: 281036 - DNA, 526 bp, Homo Sapiens
tacctctctgactgtcagggtcacttacatggatcgaagtccctgttacggctaccagtgcacgtcagaggagcacgacaaggcacatcacactgcttatctcgagttctccccaagcaagagcttagtgcaccttgagcccatgtctaatgaactaccctgtggccttactcagacagaccaggcacattatatgctgaatggaggcaccctgctggggctgaagaagctctacttctattatctgataatggcaaagggaggcattgcccgaactgcaactcatggactgctcgtgaagcaggaagacatgaagggccatgctgccatctcaatccatgtgaagacagacattgctcctggcgatagagtgctcatctatgctgctttacctaccggggacgacattggggattctgctatgatgttgcagcctcacacgcccacctgcgagtcacagcggctcctcagtccgtctgcgccctccgtgctgtggaccgcgtgctgctcatggcctgatgctggc

SEQ ID NO: 281037 - DNA, 760 bp, Homo Sapiens
  misc_feature (677)..(677): n is a, c, g, or t
  misc_feature (729)..(729): n is a, c, g, or t
gaggcattgtccgaactgggactcatggactgcttgtgaagcaggaagacatgaagggccatttttccatctcaatccctgtgaagtcagacattgctcctgtcgctcggttgctcatctatgctgttttacctaccggggacgtgattggggattctgcaaaatatgatgttgaaaattgtctggccaacaaggtggatttgagcttcagcccatcacaaagtctcccagcctcacacgcccacctgcgagtcacagcggctcctcagtccgtctgcgccctccgtgctgtggaccaaagcgtgctgctcatgaagcctgatgctgagctctcggcgtcctcggtttacaacctgctaccagaaaaggacctcactggcttccctgggcctttgaatgaccaggacgatgaagactgcatcaatcgtcataatgtctatattaatggaatcacatatactccagtatcaagtacaaatgggatatgtacaggcttcctagaggacatgggcttaaaggcattcaccaactcaaagattcgtaaacccgtaggtttttatgagtcagatgtaatgggaagaagccatgcacgcctggtgcatgttgaagagccttacacggagaccgtacgaaagtacttccctgagacatggatctgggatttggtggtgtctcangcagtgttgctgaggtaggagtaacagttcctgacaccatcacgagtggaanggcagggccctttgcctgtctggatgctggc

SEQ ID NO: 281038 - DNA, 484 bp, Homo Sapiens
tcaagtggaaaatctgaatacattgacgttataaaggtctcatgcttgtgcttcccaagtttgagacctttataacgtcaagtggaaaatctgaatacattgaacctgccaaaagagctcatgttgtgccaccaccaagaggaaggggcaggggaggatttggacagggtatacgacctcatgatatttttcgtcagagaaaacagaacacaagtagaccaccatctatgcatgtggatgactttgttgctgctgaaagtaaagaagtggttcctcaagatggaatacctccaccaaaacggccactcaaagtatcacagaagatttcttcccgtggtgggttttcaggcaatagaggaggacggggtgctttccacagtcagaataggtttttcacaccacctgcttcgaatactcctcgaggaaattacaatgaaagtcgtggaggccagagcaattttaacagaggccctcttccaccatt

SEQ ID NO: 281039 - DNA, 586 bp, Homo Sapiens
cagagaaaacagaacacaagtagaccaccatctatgcatgtggatgactttgttgctgctgaaagtaaagaagtggttcctcaagatggaatacctccaccaaaacggccactcaaagtatcacagaagatttcttcccgtggtgggttttcaggcaatagaggaggacggggtgctttccacagtcagaataggtttttcacaccacctgcttcaaaaggaaactacagtcgtcgggaaggaacaagaggctccagttggagtgctcagaatactcctcgaggaaattacaatgaaagtcgtggaggccagagcaattttaacagaggccctcttccaccattacgaccccttagttctacaggttaccgcccaagtcctcgggaccgtgcttctagaggtcgtgggggacttggaccttcctgggctagtgcaaatagcggcagtggaggctcaagaggaaagtttgttagtggaggcagtggtagaggtcgtcatgtacgctcctttacacgataaaaatccttttgggaacatcttaactgtatatgaacatttcacgaggacaataaaaataagacattga

SEQ ID NO: 281040 - DNA, 619 bp, Homo Sapiens
  misc_feature (143)..(174): n is a, c, g, or t
ggtggcaagctggagggagggacacatcccgtgttccatccactccctcccttctcagcagtcctcgcctgttctcacgtgctcacaggcagttaggcagaagtgatccccgtggctctgccaaagacaagcctgttgggttnnnnnnnnnnnnnnnnnnnnnnnnnnnnnnnnctcaggcaaagtcacagcctcaaaattgttcactgaaagaagcgtgagtggagaagtgtgagaagatgaatggaccggtggatggcttgtgtgaccactctctaagtgaaggagtcttcatgttcacatcggagtctgtgggagagggacacccggataagatctgtgaccagatcagtgatgcagtgctggatgcccatctcaagcaagaccccaatgccaaggtggcctgtgagacagtgtgcaagaccggcatggtgctgctgtgtggtgagatcacctcaatggccatggtggactaccagcgggtggtgagggacaccatcaagcacatcggctacgatgactcagccaagggctttgacttcaagacttgcaacgtgctggtggctttggagcagcaatccccagatattgcccagtgcgtccatctggacagaaatga

SEQ ID NO: 281041 - DNA, 985 bp, Homo Sapiens
  misc_feature (130)..(164): n is a, c, g, or t
  misc_feature (856)..(856): n is a, c, g, or t
  misc_feature (881)..(881): n is a, c, g, or t
  misc_feature (901)..(901): n is a, c, g, or t
  misc_feature (907)..(907): n is a, c, g, or t
  misc_feature (937)..(937): n is a, c, g, or t
  misc_feature (941)..(941): n is a, c, g, or t
  misc_feature (948)..(948): n is a, c, g, or t
  misc_feature (967)..(967): n is a, c, g, or t
  misc_feature (974)..(974): n is a, c, g, or t
  misc_feature (980)..(980): n is a, c, g, or t
gggatgggacacatcccgtgttccatccactccctcccttctcagcagtcctcgcctgttctcacgtgctcacaggcagttaggcagaagtgatccccgtggctctgccaaagacaagcctgttgggttnnnnnnnnnnnnnnnnnnnnnnnnnnnnnnnnnnnctcaggcaaagtcacagcctcaaaattgttcactgaaagaagcgtgagtggagaagtgtgagaagatgaatggaccggtggatggcttgtgtgaccactctctaagtgaaggagtcttcatgttcacatcggagtctgtgggagagggacacccggataaaatctgtgaccagatcagtgatgcagtgctggatgcccatctcaagcaagaccccaatgccaaggtggcctgtgagacaatgtgcaaaaccggcatggtgctgctgtgtggtgagatcacctcaatggccatggtggactaccagcgggtggtgagggacaccatcaagcacatcggctacgatgactcagccaagggctttgacttcaaagacttgcaacgtgctggtggcttttggagcagcaatccccagatattgcccagtgcgtccatctggacagaaatgaggaggatgtgggggcaggagatcagggtttgatgttcggctatgccaccgacgagacagaggagtgcatgcccctcaccatcatccttgctcacaagctcaacgcccggatggcagacctcaggcgctccggcctcctcccctggctgcggcctgactctaagactcaggtgacagttcagtacatgcaggacaatggcgcagtcatccctgtgcgcatccacaccatcgtcatctctgtgcagncaacgaagacatcacgctggagganatgcgcaggccctgaaggangcagtnatcagggcgtggtgccgccaagtacttgangaanaaccgtntacacctgcagccaatggnggttttnatcgangtccc

SEQ ID NO: 281042 - DNA, 786 bp, Homo Sapiens
  misc_feature (98)..(183): n is a, c, g, or t
  misc_feature (333)..(359): n is a, c, g, or t
ggggcatttgtccccgcgacagcaccgctgccgccgtctctaaggtcgcccgggtcccaccgccgccaccatgcctcggggaagccgcagcgcggccnnnnnnnnnnnnnnnnnnnnnnnnnnnnnnnnnnnnnnnnnnnnnnnnnnnnnnnnnnnnnnnnnnnnnnnnnnnnnnnnnnnnnnttcgggccagccggggctcatggctcagatggcgaccacggccgcaggggtagccgtgggctcggctgtgggacacgtcatgggcagcgccctgaccggagccttcagcggggggagctcggagccctcccagcctgctgtccagcaggnnnnnnnnnnnnnnnnnnnnnnnnnnntgcagatggggccctgcgcctatgagatcaggcagttcctggactgttccaccactcagagtgacctgtccctgtgtgagggcttcagcgaggccctgaagcagtgcaagtactaccatgggctgagctccctgccctgaagaggtcggtgcagactcggggggccagtcctggacccacctctacccctcgccgacagccagaccacaacaccagaattgtaccccgaatactggggattggaaatggaggagggtttctcaccccaacagataaacccaaggacacagaatggtgccaatttaaaaaggtttattttccccggggagggggggagacacgacacgcaggagcggggcccgtgttggggggccgcgccttcctggcgcctcttcgaagaaaaaccttttgtctagagagacccata

SEQ ID NO: 281043 - DNA, 893 bp, Homo Sapiens
  misc_feature (97)..(149): n is a, c, g, or t
  misc_feature (299)..(325): n is a, c, g, or t
gggctctaaggtcgcccgggtcccaccgccgccaccatgcctcggggaagccgcagcgcggcctcccggccagccagccgcccagccgcgccctctnnnnnnnnnnnnnnnnnnnnnnnnnnnnnnnnnnnnnnnnnnnnnnnnnnnnnttcgggccagccggggctcatggctcagatggcgaccacggccgcaggggtagccgtgggctcggctgtgggacacgtcatgggcagcgccctgaccggagccttcagcggggggagctcggagccctcccagcctgctgtccagcaggnnnnnnnnnnnnnnnnnnnnnnnnnnntgcagatggggccctgcgcctacgagatcaggcagttcctggactgttccaccactcagagtgacctgtccctgtgtgagggcttcagcgaggccctgaagcagtgcaagtactaccatggtctgagctccctgccctgaagaggtcggtgcagactcgggggccagtcctgcacccacctctacccctcggcgaaagccagaccacaacaccagattgtaccccgatagctggggattggaagtgaggagggtttctcaccccaccagataacccaagaccccaattgtgccattaaaaattttatttttagccccgcgtcctacaacggggtggcaaacaactgcaggaaccaggaaaggccccgacctgggaacgtattctcttgtcatcgcaatctatggactacagctcgggaaaattgtgtgggggcgccccccgggcccctttgaaaaaaagttttttctagaccatatttctggttgggggcgcgcgggcggccccccgtgtgggtcaagggtgcacccgtggggcacatataccttggttttccccaaggagaaaaacc

SEQ ID NO: 281044 - DNA, 198 bp, Homo Sapiens
agtgttgtgggccatttgtccagaaggggacggcagcagctgtagctggctcctccggggtccaggcagcaggccacagggcagaactgaccatctgggcaccgcgttccagccaccagccctgctgttaaggccacccagctcaccagggtccacatggtctgcctgcgtccgactccgcggtccttgggcagcagc

SEQ ID NO: 281045 - DNA, 985 bp, Homo Sapiens
  misc_feature (739)..(739): n is a, c, g, or t
  misc_feature (867)..(867): n is a, c, g, or t
  misc_feature (897)..(897): n is a, c, g, or t
  misc_feature (930)..(930): n is a, c, g, or t
ggtagcgaggcctgggtggcgaattcggcacgaggagtctgagcgctacccggttgctgctgcccaaggaccgcggagtcggacgcaggcagaccatgtggaccctggtgagctgggtggccttgtccagctcggtcatgtgtccggacgcacggtcccggtgccctgatggttctacctgctgtgagctgcccagtgggaagtatggctgctgcccaatgcccaacgccacctgctgctccgatcacctgcactgctgcccccaagacactgtgtgtgacctgatccagagtaagtgcctctccaaggagaacgctaccacggacctcctcactaagctgcctgcgcacacagtgggggatgtgaaatgtgacatggaggtgagctgcccagatggctatacctgctgacgtctacagctcgggggcctggggctgctgcccttttacccaggctgtgtgctgtgaggaccacatacactgctgtcccgcggggtttacgtgtgacacgcagaagggtacctgtgaacaggggccccaccaggtgccctggatggagaaggccccagctcacctcagcctgccagacccacaagccttgaagagagatgtaccctgtgataatgtcagcagctgtaccctcctccgatacctgctgccaactcacgtctggggagtggggctgctgtccaatcccagaggctgtctgctgctcggaccaccagcactgctgcccccanggctacacgtgtgtagctgaagggcagtgtcagcgaggaagcgagatcctggctggactggagaagatgcctgcccgccgggcttccttatcccaccccagagacatcggctgtgaacagcacacaanctggcccggtggggcagaactgctgccccnaccctgggggtgggaactgggccctcctgccanttgccccatgctggggtggcttgcaagaattcccagcactggctgcccggttggt

SEQ ID NO: 281046 - DNA, 884 bp, Homo Sapiens
  misc_feature (698)..(698): n is a, c, g, or t
gccatcttcaaagcctttgctatgatcattgacaaactggaagaggacataagcagctctatgaccaatagcacagctgccagtagacccccggtcaccctgaggctggtggtccctgctagtcagtgtggctctctcattggggtggcaggggatatgctacccaactcaactgagcgggccatcactattgctggcattccacaatccatcattgagtgtgtcaaacagatctgcgtggtcatgttggagactctctcccagtcccccccgaagggcgtgaccatcccgtaccggcccaagccgtccagctctccggtcatctttgcaggtggtcaggacaggtacagcacaggcagcgacagtgcgagctttccccacaccaccccgtccatgtgcctcaaccctgacctggagggaccacctctagaggcctataccattcaaggacagtatgccattccacagccagatttgaccaagctgcaccagttggcaatgcaacagtctcattttcccatgacgcatggcaacaccggattcagtggcattgaatccagctctccagaggtgaaaggctattgggcaggtttggatgcatctgctcagactacttctcatgaactcaccattcccgatttgattggctgcataatcgggcgtcaaggcgcctcaatgagatccgtcagatgtctggngcgcagatctctgctgccagcattagcctggctcaatatctaatcaatgtcaggctttccctcgagacgggtggcatggggagcaactagacaatgcagattatccataatccctttctgctgtcaccacaaccatgatcatctgggggagttcttgaacagcagcgattcagggtttaattgttg

SEQ ID NO: 281047 - DNA, 866 bp, Homo Sapiens
  misc_feature (572)..(603): n is a, c, g, or t
  misc_feature (716)..(732): n is a, c, g, or t
  misc_feature (734)..(735): n is a, c, g, or t
  misc_feature (737)..(751): n is a, c, g, or t
  misc_feature (753)..(754): n is a, c, g, or t
  misc_feature (756)..(766): n is a, c, g, or t
  misc_feature (768)..(772): n is a, c, g, or t
  misc_feature (774)..(784): n is a, c, g, or t
ggagatttgaccaagctgcaccagttggcaatgcaacagtctcattttcccatgacgcatggcaacaccggattcagtgcaggtttggatgcatctgctcagactacttctcatgaactcaccattccaaacgatttgattggctgcataatcgggcgtcaaggcgccaaaatcaatgagatccgtcagatgtctggggcgcagatcaaaattgcgaacccagtggaaggatctactgataggcaggttaccatcactggatctgctgccagcattagcctggctcaatatctaatcaatgtcaggctttcctcggagacgggtggcatggggagcagctagaacaatgcagattcatccataatccctttctgctgttcaccaccacccatgatccatctgtgtagtttctgaacagtcagcgattccaggttttaaatagtttgtaaattttcagtttctacacactttatcatccactcgtgattttttaattaaagcgttttaattcctttctctgttcagctgttgatgctgagatccatatttagttttataagcttctccctggnnnnnnnnnnnnnnnnnnnnnnnnnnnnnnnnggctcatgaatttttctgtttgtcatggaaatgtaagagtggaatattaatacatttcagtttagttctgtaatgtcagggattttttcaaaaaattaaaagatggactgggnnnnnnnnnnnnnnnnnannannnnnnnnnnnnnnnanntnnnnnnnnnnnannnnnannnnnnnnnnncatgttgggcccccctcggccccctgaaaaatttttctaaaaccatttctttggccgcggggggccacaaaaggaaaatgaa

SEQ ID NO: 281048 - DNA, 579 bp, Homo Sapiens
  misc_feature (452)..(515): n is a, c, g, or t
ccaagagagaaatgaaatgttctctttcagacttgcacacctacccctgtggagcgtgcaccctataagggagaagtcgccacactgaaatccagagtgacaaaagaagatgccacagcagggaccaggaaacaggcccacccctgaagtgtgtgccatcggtaaaaaaatcagaggaaaggaggctgccattcccttcacagccaaacattgtcaacccatggagaagcaggccttattcaactccctaggatcctttagaaaaaattcaccactataggcttctttgattttctttcagaagcaattgctgtctttctcactgtgtttttgttgctgcataagattgaaggtataaatttatattattgtgatggaaaggctgtgtggaaattcattgatgatactttaaaatgtcatctttgcttgtactagatttcttacttagaatnnnnnnnnnnnnnnnnnnnnnnnnnnnnnnnnnnnnnnnnnnnnnnnnnnnnnnnnnnnnnnnnaaaatagctctgtgattttactttttattgtaattaataaacattgagatcttcattttaaaaa

SEQ ID NO: 281049 - DNA, 467 bp, Homo Sapiens
  misc_feature (26)..(26): n is a, c, g, or t
  misc_feature (95)..(95): n is a, c, g, or t
  misc_feature (340)..(403): n is a, c, g, or t
cccccacccccgaagtgtgtgccccncggtaaaaaaaatccagaggaaaggaggcctgcccatcccccctcacagcccaaacattgtcaaccccntggagaagcaggcccctattccaacctcccccaggatccccttagaaaaaattcaccccacctataggcttcctttgattttccttccagaagcaattggctgtcctatcctcactgtgtttttgttgcctgcataagattgaaggtataaatttatattattgtgatggaaaggctgtgtggaaattcattgatgatactttaaaatgtcatctttgcttgtactagatttcttacttagaatnnnnnnnnnnnnnnnnnnnnnnnnnnnnnnnnnnnnnnnnnnnnnnnnnnnnnnnnnnnnnnnnaaaatagctctgtgattttactttttattgtaattaataaacattgagatcttcattttaaaaa

SEQ ID NO: 281050 - DNA, 651 bp, Homo Sapiens
  misc_feature (146)..(180): n is a, c, g, or t
  misc_feature (376)..(406): n is a, c, g, or t
  misc_feature (547)..(547): n is a, c, g, or t
  misc_feature (604)..(604): n is a, c, g, or t
  misc_feature (609)..(609): n is a, c, g, or t
  misc_feature (616)..(616): n is a, c, g, or t
  misc_feature (636)..(636): n is a, c, g, or t
aaaaaagtaaaaaatagaaattatctcactacttaaatcccatttttttcacttcatatgaaagaacatattgatagtgtattctatattatttcatagatctgtctgaaagagattgggaacaaaaatatctaattgagatattnnnnnnnnnnnnnnnnnnnnnnnnnnnnnnnnnnnttctgtagtatcagcgaaatcagtcatgtttataccttgaatataaatatcaggaatcatgcaattatttctactatgtatttagtagtatcttatatttgtataacattattacattttgcaaattagtatcacaactgctaagtagatgtttctgagtattagaaaaatcagtgttattacctgcaggatattnnnnnnnnnnnnnnnnnnnnnnnnnnnnnnntcagtgtttaggaaatgttgatagttattgaatctttgaattgaattttaaaaatccattctaggtaatcagagtatactttttttataggaccagggtggccgggtgggggagcccctttaccccttctgggtgaggttnaacccttgggaggtttaccatttggcccttcaccaacctgggccgtcccggctgggngggcnttggccngtggtccccggctgtggggnggccccgtggggttg

SEQ ID NO: 281051 - DNA, 603 bp, Homo Sapiens
  misc_feature (144)..(144): n is a, c, g, or t
  misc_feature (163)..(163): n is a, c, g, or t
  misc_feature (367)..(397): n is a, c, g, or t
aatagaaattatctcactacttaaatcccatttttttcacttcatatgaaagaacatattgcatagtatattcctatattatttcatagatctgtctgaaagagattgggaacaaaaatatcctaattgagatattctttaatnttttacatagcagctttantttttttattctgtagtatcagcgaaatcagtcatgtttataccttgaatataaatatcaggaatcatgcaattatttctactatgtatttagtagtatcttatatttgtataacattattacattttgcaaattagtatcacaactgctaagtagatgtttctgagtattagaaaaatcagtgttattacctgcaggatattnnnnnnnnnnnnnnnnnnnnnnnnnnnnnnntcagtgtttagaaatgttgatagttattgaatctttgaattgaattttaaaaatccattctagtaatcagagtatactttttttatagaacaaggtggcaggtggggagccctttacccttctggtgaagttaaaccatagaagtttacaatttgcctttcacaaacattagcagtccgggcatggtggctgaagcctgtgatccc

SEQ ID NO: 281052 - DNA, 553 bp, Homo Sapiens
cccgctctgtccatcggcttctttcctgaaaaaaagcctggtccctggactatcagatgccccagcatcctcctctggggtctgcccatacccaattttgtcttttagtttctcttcttactagaggtgcctttatatgtaaatgttcgaaagttaacattttcatggaggacaccctctccccagctccctctttgtctgtggcacctcccatcccatctcctatttattcttactttacacagaattctataatctggctatattgtttcttatcccgtggcagatttaaagaagcaaattagaagcagggagagagacttctacaggcagggtcacagaggtgatgtgtggtgattataagcctgggctttggggtcagacctattgggttcaagtggcagccctgtcacttactactgaatggccttggtcaaagctcttgactgcctgagctggtttcctaaactgcaaaatgagaataataaaaggacataccttgtgagaattaaatgagcgaatacacaaaaaatccttagcgcagtgcttggag

SEQ ID NO: 281053 - DNA, 872 bp, Homo Sapiens
ggcacagggtcagtgctaggcaggggtgtttgatggtgagcaagagtcacttcctgtcaaccaggtggctttgagggagaggccagaactgagctgacttagagtgagtaggagcttgccaggcagagggtgtggtaggggaatggaagtggtggcattccaggtagagcgacgtgatgtgcaaatgtcaggagggagggatggtatgagagagtcagaacagtgtgttggcgtaactgcaagcagtgcggtgtggttggagctcaggcattgggagcggggagcagcgggttgtggggagagtaaggctgcagagatgtggggaggtcctggatcctgcaggggctgtgggtttcccacagaaggcagggaggtgggccggggtgtggtggcgagctgggagagaagctcctgggggaagagtcgggatcaggctttgcttggaggagggatggctaaagctgggtggagtcacagtggggttgccatctccacaggagctctgtcccagctgggaacctcttggggacttcttctttttggggtcagctttgataagggagggtaggccaggggaggatgtggctcctctgggaaagcccagctccagcctccctgaccccctggctgggagcatatcagcaatgcagatggaagaccctacctggaggccctaagaccacttctgttacacgccagggtccaacacagactcccacttggatgggatcaagagctttaagaagtgagagtttggcttcacgtcatgtgccctgagaggcttacagaagtgttttggggatttccaggcagaagtgaaaggtgttttagacacacttacgtggcacctggcatttaccttcaagcaccaa

SEQ ID NO: 281054 - DNA, 722 bp, Homo Sapiens
cccttcacttggcttggcagtttcctccactgtcaccaccaccacacaggggcttggcactctcctgtctcacctccagagtacctatggaagctccgaaggggcagaccttggtgttgtacccacttttcatccctgggaggaatatggcctcaggcaggccaaggggtccccagctgaggtgtgaacctgaggggcccagacccacaggcctctggcagctatgagctctgggaggctgaaccgaggctgagtcctggtcctgccttggcctggtgctcaggacctctcctgcccaggtgacggggtttgacagcgtggatgatgagtccaagcacagcgaccacatgttttccgacaagagcccaaacccggacgtctggaccagtgagcagaacccaccctacagctactacctgtactacatgtatgccaacatcatggtgctcaacaacctccgcaggtgcgtgaggcctgccctcgcacatgcttgggttcatgtgttagtacatgcacgcatgcacacacatgcacacacacatgcatgtgatccttgtgtccgtgtgcacctgaaccaacatgcatgtccatgtgcccacacacctcaaaacacacagcactttccagcctgctatatgaggcatgtctccacatgatcacacacatgcaaacatgcccaccataacacacatgccagtacagacatatgtcatgtacagtat

SEQ ID NO: 281055 - DNA, 645 bp, Homo Sapiens
gatcgaatggaatcgaatgtaatcatcatcaaatggaatcaaaaataaccatcatcaattggtattgaatggaattgtcatcaaatggaattcaaaggaatcatcatcaaatggaaccgaatggaatcctcattgaatggaaatgaaaggggtcatcatctaatggaatcgtatggaatcatcatcaaatggaatcgaatggaatcatcatcaaatggaatctaatggaatcattgaacagaattgaatggaatcgtcttcgaatgaattgaatgcaatcatcgaatggtctcgaatggaatcatcttcaaatggaatggaatggaatcatcgcatagaatcgaatggaattatcatcgaatggaatcgaatggaatcaacatcaaacggaaaaaaacggaattatcgaatggaatcgaagagaatcatcgaatggacccgattggaatcatttaatggaatggaatggaataatccttggactcgaatgcaatcatcatcgaatggaatcgaatggaatcatcgaatggactcgaatggaataatcattgaacggaatcgaatggaatcgtcatcggatgggaatgaatggaatcatcatcgaatggaatcgaatagaattatggaatgaaatccagtatgatc

SEQ ID NO: 281056 - DNA, 1000 bp, Homo Sapiens
agcttttttaggagaaggaggacttgctggaatccaagatgtgaagaactcttggtgactggctggctggccagcgggcaccacacctgcacttgagtgcctcgggcttgcttattaataacgcacagaagaagcatcacttctcaccatctcctggcatgtatggagcagggagcaaggctatgttcccgaaagccctgattagcttgtcttgctctacgctcgacctcgaacaatacagcttgtaagacctcagtcagtcctggtacactggggtaaatcagtgtggtggtggaagaaaagccgggaggcctatttttataggaaaatagtaccattaaaggtgcaatgctgtcattttggacaaaaggaaagaaatttggaagagctgggattattggcaaaaacttgctgaggggtgaatctttagagctaatcactgcagaatcagagttgcagcaatatgattgcaagcaagtctgaatgcatagttttactttaattcggcttgacaatttgaataggtaaccccctcgggactgactgaatcgttatgcatgtgtcaatcaatgggaggtgtgcattctctagaagtagttttaggctgtttggtttggttttggttttgttttttaaatgcagcctgttgaggcactgtcatgtggtgtgaaagatttaaatgtagcaacgctaaagagtaataatttggggataagaagtggggacattggccgggcgcggtggctcacgcctgtaattccagcactttgggaggcctaggtgggcggatcagctgaggtcgagagttcgaggccagtctgaccaacatggtgaaaccccatctctactaaaaatacagaaaattagctgggtctggtggtggatgcctgtaatcccagctactcgggaggctgaggcaggagaattgcttgaacccaggaggtggacggtgcagtgagctattactccagcctgggcaacaagagcgaaactctgtctc

SEQ ID NO: 281057 - DNA, 1000 bp, Homo Sapiens
gattcttccctttaggattcagcaagttaatggcttcctcgctatagaagtgagactttgacttgatgcctcttggtatatcaaaaagatattcatccagaaagtaccaaatgttctgaaagacccgctcttcactccagttttccctagggtgtttctggcagggcgtttttaaaaggcatctacctgagttgacgctaatacttgtcaccacctggaacgtagttatcggtcggcaggctgaacatactccagattccccagaggccacttctgtagcccagcgatgcatctgagcctctctgcgtggtttatgcttgaaaaatagataatgcttttagatggttcactgccaggccatgggccccacacatctcaggccctgtgtgagggagcacactgagatggtgcaggagtgaatgggcatggcttggcctcgctacctcggggacctgttggagttctggcagcagggtgtctgcaggtgggacggcgttctgggcagagtcagaatggtcagaatgaaacagaacagccaactcacccacaggacagcttattttgaggcaaggttttggattttggaggaagcagccagatgaggcggtgagcctccagaaggtcagcctttggagcacgtaagatactgttacagggtccagaaatcgtgttcacatgggggctttgactcttcaaacagcttttgcagatcgtaaattgcatttgcctagtcgtgtgacctcaaaagaagtcagacatatttaatccagaaatagtttcgtttgagggagggcttgcaggtctgtaaatagcatttgctttcctggttagagattgggatgcagaaggagttttcagtattttttttaaaacactaatgatcattgaagagtatttatgtaaacatacaacgtataatgggtgggggatccgatcatggtgatgtacggggtgaattctcttgccgtgttgcaaatgtgtaaaataaagattatctggc

SEQ ID NO: 281058 - DNA, 1000 bp, Homo Sapiens
tagtaagctgataggtcatggggaattaggttggaagccattgctttttaatttacagaagtccattctccccaggcacttctttctaagtctcattgatcagaactcaaccacgtggccaccatcagcagaaacatctctctgtagcaccgtgaaacacatgagaacataactggggatgaccgttgttacttgaactattttgaaagatctgacataaaggtcatcgccttgtgcacttcaatgggtgttactgcaaaactcccagggctaggcatggcgacatacacccgaaatctcagctatctgggaggctgaggtgggaggattgcttgagcccacgagtttgaggctgaagtgtgcctgtgaatagctactgcactccagtgcctaggacacatagggagacctcacttttttatggctgcatagtattccatggtaaagaaatgtaccacattttctttatccacttcactgttgatgggcatttatccacttcactgttggtgggaatttaggttgaatccatgtctttgctattgaagtcacactttttaatcaagttatttaactttcctgtgttcatttgtgttatataccagaacatttttatttctatggttttaatgccacctaatatgattatcaatgtgtcattctccataaatcattgtgttatacatgttaaacgattaggtattaagtgtataggtataaatcacttagaataatgactaacacattgtatgaactaaataagtactgattcatctgattcatcaaatttccattattcataccattcattatttattaagtggtgtagtatttgttcttatcaacatttgcttttctgtcctatctaaatattaatgaaacagtggatgtgggctcagtgtgctgtcttgaaataatccaaagtcaaatggcatgcttcactggtttcctttagatgcaataactcatttgactcacacaataaaaatgagtattaagt

SEQ ID NO: 281059 - DNA, 1000 bp, Homo Sapiens
ctccctcctttaccaacttcccctgggtgtctgaagcccttccatcatgattcacttctttgagtagtgtttgctaaattcatacctttgaattaagcacttccttttagggacctctcttcattaatatccactagaaaggagagactcattatgtgtgagtttcaataagtttatccaatccctttgttttcaactgaaaggagggaaacggacaagtgaagaaggtaggggcccaggagtgaaggaacaagggtgggaatagtaataatgttgtactttgaaaatctactgggaaaatgatgaacttagactgctgggagaggctaatagaaaatcgggcagtgagcttgatagtaggcaaaggactatcaggccacggggtcaagttaaagcagcacattcattaaaaaaaaaaaataagcgtttgggccaggcgtggtggctcaagcctgtaatcccagcactttggaggccaaggtgggtggatcacctgaggtcaggagttcgagaccagcctggccaacagggcgaaaccccatctctactaaaaatacaaacaaattagctgggcatggtggtgcacgcctgtaatcccagctacttggggggctgaggcaggagaatcttttgaatccaggtggtggaggttgcagtgagccaagatcgcgccactgcactccagcctgggcaacagagcaagagtccatctcaattaaaaagaaaaaaaaattaaaataagcatttgaccatcacagagcaggttcaggaggcctggggtatgcagatttcaaccctcttggcctttgtttccttgtctgtaaaatgtggttagctggtatcagcttgagagctcggaggggagacgtgacttcccatctaactctaagtgacaaggctgagactctccagccctaggattctcatccaaaacccctcgaggctcagacctttggagcaggagtgtgattctgccaaccacctctctctggcccccagg

SEQ ID NO: 281060 - DNA, 1000 bp, Homo Sapiens
tgaggaaggtggtcttcatacccacttccagacagcatggcaggtgcctagaattccaccagcagagctgcaggaggagcctgccaccggggaggttgttattaaatataatgttattaataggaagttctgaggtccagtaaggccaccagctcaggagacacctgccattgtgaatagcttctcatatacacagatccctagagagaggacacatcacagctgggggccacctggggaagcaccagggtctgttatgagtcagagtggtggggaggggggactgtgggccagagcctttattatggtttctgtggaaaggaaaggtcaaggccaggtgaacaggcttaggattgggaagtgtgaagcattttttgggctctggggcacaggggctgcccctcgctgtctgacacctggccttggggtgattagtacaggatagtggcttggagtacaagagcccagtaaggcaggtcgctggaggtgtggactccagactggttggcttgtatttgaaaatcacacactcaataggtggagtccacccaaggacaggttgtgagaagagaggcaggaactcaaggcatcgtgagtcaggcatattatcaggtatgcagagggattcaagtccagcatacacacgcagggcagatgttaaggcatcaagatgacagaaggtagaaacacagctcatgtagctggcggggacagaggctcacattccgcatgggctttgcagcttcaagcagtattggaacagaggagagcccaacaacgttggggaggaagactgcgcggaatttagtggcaatggctggaacgacgacaaatgtaatcttgccaaattctggatctgcaaaaagtccgcagcctcctgctccagggatgaagaacagtttctttctccagcccctgccaccccaaacccccctcctgcgtagcagaacttcacccccttttaagctacagttccttctctccatccttcgacctttag

SEQ ID NO: 281061 - DNA, 1000 bp, Homo Sapiens
  misc_feature (784)..(784): n is a, c, g, or t
  misc_feature (806)..(806): n is a, c, g, or t
  misc_feature (899)..(899): n is a, c, g, or t
  misc_feature (936)..(937): n is a, c, g, or t
  misc_feature (968)..(969): n is a, c, g, or t
  misc_feature (971)..(971): n is a, c, g, or t
  misc_feature (975)..(975): n is a, c, g, or t
  misc_feature (986)..(986): n is a, c, g, or t
  misc_feature (988)..(988): n is a, c, g, or t
cagagtattaatcaccatgttgttccttgggtcctggggtccctagcttgtctgcctatttctttacactttcagagtcttttatttatttacttataatgtccaacatgtgaggttgtatttaatagctttacaggaaaaaacacatctacttcatcttcccagaagcaaaaatcttgatattgtgacttttataattagtggactcctctaattttacctgtaaaaacaaaacaggtaaactaatttttctctcaaaagaaaagtggggagaaaatttaacaagtaattctgttgttttatcccaaaagcttaattgttatggttaatatatcatcaaagaatgttgccccaatcaaaataattatttattttcctaatggcccaatttttcttcctatgcatttaacggtagtcaactgtggcaaaaagactctgtgggtattacagaaatatattagtgattaaagaagcaagtggaaagattgtatctcttttggattttggaaaaactgtttagtaaaagaaataggaaataacactcatttactgaatatctgatatatttaaggtatgggagacacagaaagtaaaacctaaagaaaatgcaaaccataaaacaaataaaacaaaatcaaatatatgtgattcagtgttatgggaatatagagaatgaatgagtaattatgaataaaaattttaggtaagaaattaatataaaggcatttgagctggattggggaaaaagttcactcaatacttatcatctgcctactttatgganaaaaaacagtgctagatgcagnataaatagtattttgaccgagtctgggaaatggggtggggtggagtgggagggtaggcatttcagtagggggatagctaaagctgacacatanaaatgtggggagcaggccgggcgcggggctcacgccnnaaatcccagcacttgggaggccgaggcggtnncncccnaaaaagagttntncccccaagttat

SEQ ID NO: 281062 - DNA, 1000 bp, Homo Sapiens
attgaatgcagggccaatgtagaccgctaaatcactgttgaccatttttttttctcagagagcaagcatcttgtcttatatgatttggatttaggacttgagattgtagtaaaaggaaattattttctctaaaattgtgataacacatctggattccaatataagtcagttaaaagcctgtaatacaagtattccacttctaaaatgggataagatagaatttctaatgtcctcaatttaaatgtttatcaactttgtgaatattatatatcttaacacaaccaatgaaactttatgacattaaggagctcagaacccaacctgtggctgcatgaattgttaccctaaattcaacaaactaatattttatggtcttcagcaaaaagaaccacaaagacatgctctgtctaaacacactttgcttgaacattcttacagataggaagtataccttctcacaaggcatgcaatccatttatattatcatttgatctttgattggtaaaatcaatttggatagaatttcctaaactaaacgaccaggtgctttcttctctggggaatcttacagaaggagactgcagttagttgcaacagattttttattaaagagaatttctgtagctagaacaacaaagcttgttccctgtgaaccaaatctaccaataatagctctattaaaagagtttcctatttacatagattttataccaaatatatttggtaattcataaaccttacaaacatttacttaacacttaccatgaattgggtaatgtgctcaacacattatcccactaaatcttagtaatagccctattaagtaaataccatatcataagtattatctctcttttactgacatggataatggaactcaaggagattgagtaacttgtactgaatcacacagccagtaaattgtaaagatgggactcaaacctagggagatggactccagagccttaacaactatttatttatacattctccaattgag

SEQ ID NO: 281063 - DNA, 1000 bp, Homo Sapiens
tcaccaacttgtcagaggacacgcgtgagaccgacctgcaggagctcttccggcctttcggctccatctcccgcatctacctggctaaggacaagaccactggccaatccaaggtgggcaggcaggcaggcacggtggggtctgtgtgagggtcacttgtcctagggtcgcctgtcctagctcgtgcccgaccccatcccgcccctccacagggctttgccttcatcagcttccaccgccgcgaggatgctgcgcgtgccattgccggggtgtccggctttggctacgaccacctcatcctcaacgtcgagtgggccaagtaagactccatccctgccccagcccctgctccctgccttgtcccagcaccttcacggagtgttgggccaaccaatagccctgagccaatttaacagtcccctggctggttttgaggggacagtcctttattgtttttttccaaaaccgggcagaggggtggcagctcttgtgcctggggtccctgccagtccgtggaccaggcctggagactggccatctggctccgtgcccgcttcgtcctcacattaccccgtcctctgcccacccacccccaagatgccacttgggtgtctggggtcttggggtgcccccagaagtcttatacctgccaccctcccctaccccaggccgtccaccaactaagccagctgccaccgtgtactcggtccgggacccttggcgacagaagacagcctccgagagcgcgggctccaagggcaataaagcagctccactctctcctacttggttgtttttgttcttgcgtctccagtcctgtggagggggccagtgcctcccctcctctgggcgtggtctggtccctgaccctgcagggagccctgtggccagcgctgtgggtgggaaaggcgactgctcctgcctgggctgcagctgggcctgacctggctgcaagcacaggtgttgctttttgggggaagggatgtgtcggctcgggccc

SEQ ID NO: 281064 - DNA, 1000 bp, Homo Sapiens; identical to SEQ ID NO: 201557

SEQ ID NO: 281065 - DNA, 1000 bp, Homo Sapiens
ttttgctcaaagaagctttcacattgcaacaccagcttctaaggattttttaaggagggaatatatatgtgtgtgtgtatataagctcccacatagatacatgtaaaacatattcacacccatgcacgcacacacatacacactgaaggccacgattgctggctccacaatttagtaacatttatattaagatatatatatagtggtcactgtgatataataaatcataaaggaaaccaaatcacaaaggagatggtgtggcttagcaaggaaacagtgcaggaaatgtaggttaccaactaagcagcttttgctcttagtactgagggatgaaagttccagagcattatttgaattctgatacatcctgccaacactgtgtgtgtgtgtgtgtgtgtgtgtgtgtgtgtgtgtgtgtgtgaaagagagacagaagggatggtttgagaggggtcgcttgtgtgcatgtgtgtgctatatgtaaagagatttttgtggtttaagtaactcagaatagctgtagcaaatgactgaatacatgtgaacaaacagaaggaagttcactctggagtgtctttgggaggcaggctattccaaatgccctcgtcgatttagcttcaataaagggccttttgctggtggagggcactcaagggctccctcagagggccacgtgtttggtattacattactgctatgcaccacttgaaggagctctatcaccagcctgaaacccgaagactgaggcattttccaggtctacttgcctaatgaatgtataggaactgtctatgagtatggatgtcactcaactaagatcaaatcaccatttaagggggatggcattctttatacctaaacacctaagagctgaagtcaggtcttttaatcaggttagaattctaaatgatgccagagaaggcttgggaaattgtacttcagggtgatagcctgtgtcttcttaatttactgggaaatatgtggtagagaaaggaaagga

SEQ ID NO: 281066 - DNA, 1000 bp, Homo Sapiens
ctcctccatctcctgctgttgtcctagtggctatcacaggcctgggtgggtgggttgggggaagtgtcagtcaccttgttggtaacactaaagttgttttgttggttttttaaaaacccaatactgaggttcttcctgttccctcaagttttcttatgggcttccaggctttaagctaattccagaagtaaaactgatcttgggtttcctattctgcctcccctagaagggcaggggtgataacccagctacagggaaatcccggcccagctttccacaggcatcacaggcatcttccgcggattctagggtgggctgcccagccttctggtctgaggcgcagctccctctgcccaggtgctgtgcctattcaagtggccttcaggcagagcagcaagtggcccttagcgccccttcccataagcagctgtggtggcagtgagggaggttgggtagccctggactggtcccctcctcagatcacccttgcaaatctggcctcatcttgtattccaacccgacatccctaaaagtacctccacccgttccgggtctggaaggcgttggcaccacaagcactgtccctgtgggaggagcacaaccttctcgggacaggatctgatggggtcttgggctaaaggaggtccctgctgtcctggagaaagtcctagaggttatctcaggaatgactggtggccctgccccaacgtggaaaggtgggaaggaagccttctcccattagccccaatgagagaactcaacgtgccggagctgagtgggccttgcacgagacactggccccactttcaggcctggaggaagcatgcacacatggagacggcgcctgcctgtagatgtttggatcttcgagatctccccaggcatcttgtctcccacaggatcgtgtgtgtaggtggtgttgtgtggttttcctttgtgaaggagagagggaaactatttgtagcttgttttataaaaaataaaaaatgggtaaatcttg

SEQ ID NO: 281067 - DNA, 1000 bp, Homo Sapiens
ccccagggattatgatagaaatatgaagccaccaagtctagacttgatggtgttcaagaataaataatactgattgcctccctagtccttgtccagctaactcagctgtttataattgaagggattcaacaaaattatctctagcatcaggtgctagacatggttagaatctcaccatggtttagtgactggtagatagctattaggtaggtagataaataaatgatgctagaggcaacaggtctagggttaaggattaaggcctgggaattggagtctcaccatggctccccttccttgtctggggcctggacacactgaggacaatgcggctatagcagatggccatggcagtcagtggcagcagaaagaggcagcagaaggtgaagaggttataggtggtctcttgccattgagccttgaagctgcctttggtgacacactgagtgaaagggactgggccagctcagtggaccgtgtggaacaggaacagctggagtggagttgaggactattagaactggttcccctcaccacccaacctacccacctatgtcatactgtctcctcccaattcatccttaattccaagtgaagcagcacagtgctgagaaacagtttcatccatggtgccatgttaaagaagttggaaatatatcttgaaaatcctatcttccttttaggcttgaatatgatgctgaacagtaagtttgttaaatcttggaacttaaaacaatcctgctttctcaagtactattctaacattgcgctttataagggatgatatttctaccacctcactcatatttttagctgaaatgattttcctggtatgtctgttattttgtggaaaaagaaatattgtgtaaaatgggtgctgccaaaattccaggccattttgcagggactctgaagtgacctttagtagtaatagtcttatgtgcagtaactataatggtaaagaatgttaaataataaaatttaacattttccaaatgct

SEQ ID NO: 281068 - DNA, 1000 bp, Homo Sapiens
caaccctcctctgaggccctggggtctgctgcttggtccccaggctccaggaccatcaatgtcctttcctactgtaatgacgtggtgtgtggggaccatatcatcattagtggccacaatgaccagaagatccggttctgggacagcagggggccccactgcacccaggtcatccctgtgcagggccgggtcacctccctgagcctcagccacgaccaactgcacctgctcagctgttcccgagacaacacactcaaggtcatcgacctgcgtgtcagcaacatccgccaggtgttcaggtaccagcctcatgcctgctgaccctgtggcctttgctgggacagctgagcctctcttctcctgtaatagaccctcttggagccctccctggaggcccctccagaccaggtcctgctgaggtaccaaacccctcgacaaagaggaagctctggaagctcactgcagagggcagagactagtgatgacctctgttctgaccccagccctgtctgtcctcagggccgatggcttcaagtgtggttctgactggaccaaagctgtgttcagcccggacagaagctatgcactggcaggctcctgtgatgggcccctttacatctgggatgtggacaccgggaaactggagagcagactacagggaccccattgcgctgccgtcaacgccgtggcctggtgctactccgggagccacatggtgagcgtggaccagggcaggaaggttgtgctctggcagtagggccacgacctgcctgcctgggctggagctcttgcccgaagcctgaagcttccttcggcgccatgcaggggttggggttgggactggagctggccttgggatttaatggggaagaaggcctggcaggacctggcctgtttgtttaaaaatgaagtatgggttgggggattacgctagtttttctttgtatttttatctctatctcctcactttttctcccaaagtagaaaaaaatgatatctg

SEQ ID NO: 281069 - DNA, 1000 bp, Homo Sapiens
atgagccattgccatcttatgggcccgatttgggtactctgaattatgtcatggagtagacagttacttctaaatcccagcaaccaagttgcgtatccttccttatagctagtttctatagagaagtgaaaaagaaatctggcttccttaataagatagttgagcctatgacattaaggagcagcgctgctggccgaagattctagattcactggtggtttaagaggcccagggatttagttcttactggtgcgtaagtgttttcccatcctaaccggaaaaccactcacccaggcttcccccacttcccctcaaattttctcagctctgccgctggtctccatgaacggcaaggggaaccaccactcattcactgtcagtgtaggtaagacagaggatgcccttgcaaaaattgggactgaggacagtagcacacggaatggtggatcgtacatttgcacccagagctactaaacgctcagtgaccccagagaccattaatttcccggagtgaaggggatgggggtagagctaattggaatttttattatcaggactcatcctaagaagaatgttggcctctcttcatccctggcttagccgtcaggtagaacgcttactcacctgacaccgacttcttagagaagcgagttttttttgaatggaggagcgatggtaaccccactagggggcgcccatgatcggctcccagtgcacccccttaagggtaagcaggccacatatctagagtctgatagtctgtgtgtacataaggtctagaagtctgtggaaacgccctgaaacctgtagtattatcttaactaccctcttatgttaaggtttacataataggatttttaaacaaatgtgtttaattttttaagatctcttgtattaaaattttcttttggaataagctgtggaaattttgttacaacctggttgagatcaacctctttacaatgacacaaattgtgacattttataaattagatacttc

SEQ ID NO: 281070 - DNA, 1000 bp, Homo Sapiens
ggtcatccacacccatgagcagcttcagcagagtgtaggtcccacttcaccccattctcctctcctctgacccctcagctccttggaagtcttggggtggggatctgagggggtgggtgggctgcaggaaattcagaaatgtggtgggtgggggaagggacaaggcgcattagggagggaacaagctgggctctggggataggctctgattaattagttactctgactctggtctgccgagatccatttccaacccagttgcgttgggagagggttgggaggcagcagagcatgggtgacagtgggagcacacgacttccttggagcctgggcctttgcgggtcccaggtggtcaggcagctggagcagaagtggaaatggcttaagatgctcatagcccagccccggctgtgtctactccaggccaagcctgggctgcagtccttgctatgttccccccagggccctggggggagggatcagggtgctgggggtttcctaggacaggggtcttcccccttgagacaccaagctctggctctagaagagctctctcctggagtggggagtctggaggggactgggtgggtgcaggtaaagccagattctctctggaagggaattttctatgaatggatgatttccaggctcagggtgggctgtgtgttagttctgagcaaatccctcaccaagacccttccctcccaagccctcaaagaaatgaggcaaagcccttccctgcaagaccccttgtggatgtttttgcatctacctgatttttagccccacccagggagactttataccccatgatcctgccccaccgttgctgttgtctgccagctgggtctagcatcacagggaagggggggatttatactcatggaaagactactgatcctaccggaaaccaacctgtttactgtactgttgtaaatatcatgccctttatatcctgtatattggcttcttttaaataaagtgaaatgtcttagaactg

SEQ ID NO: 281071 - DNA, 1000 bp, Homo Sapiens; identical to SEQ ID NO: 114722

SEQ ID NO: 281072 - DNA, 1000 bp, Homo Sapiens
accagctaattttttaaattttctgtagaaaagcagtcttcctatgttgcccaggctggtctccaactcctgggctcaagcaatcctcctgcttcaacctcccaaagtgctagaattatggacgtgagccacctcacccagcccctgtgttgattttctcaacccactctgtagcatgcaaaataaccctgcttgatataaccagagagtcaaacaaaagttaaggtgcattttccaaatgacccaagaatcttttttcaaacacccctgaagcttgactcttttctggattcagtcctagcccttcttttcttctcatgcttcacggtgtctttgggaagctcatccacttccacagtatggtgtgccttgtgagttagctatctttttccttttcctgacagaatgtcagttctcattcaaccgtccatctctccctcatgtgcctagaacagtgggcccacccagagcttgggaggtgggcctggtcttaggctaatttgtcttctttgccagtgacaggttcaggaaccgcagtgatctgttgacccagtaaattgattcagaaatgggcatgggacccatggtcagtgtcctggaaaaggcttctgtgcattgttcttttaagagagacatttcaaaatatggtctcttttctggggggcattgttgaatgcacccattgatgaggcgtggagctaatggaaccatcagcccccagtcagaggagaaggcaacacagagaaggcatgcagaggccagaggacatcagaaaagcaaggctggagccccaagtgaaataagactgaccaccaccttacctctggtgccctttaatttttctgagctgataaatctcttctgttttttgggttgtatttctgcaattacttgcggtccaaagtactctgatgcatatggcttcaattgccacccatagctgatgagttcaaatttatatctccagcaagaaccgttttcctaagcttgcatgcctgca

SEQ ID NO: 281073 - DNA, 1000 bp, Homo Sapiens; identical to SEQ ID NO: 114724

SEQ ID NO: 281074 - DNA, 1000 bp, Homo Sapiens
ggaccacctgttcgtacagaatacaggcttattgtagaaaatctttctagtcggtgcagttggcaagatttaaaggattttatgcgacaagcaggtgaagtaacctatgcggatgcccacaaggaacgaacaaatgagggtgtaattgagtttcgctcctactctgacatgaagcgtgctttggacaaactggatggcacagaaataaatggcagaaatattaggcttattgaagataagccacgcacaagccataggcgatcttactctggaagcagatccaggtctcgatctagaagacggtcacgaagtaggagtcgcaggagcagccgcagtagatctcgaagtatctcaaaaagtcgctcccgttccaggtcgcggagcaaaggtcgatcacgttctcgatcaaaaggcaggaaatctagatcaaagagcaaatctaagcccaagtctgatcggggctcccattcacattctcgaagcagatctaaggatgagtatgagaaatctcgaagcaggtctcggtcccgatcccccaaagaaaatggaaagggtgatataaagtcaaaatccagatcaaggagccagtcccgttccaattcgccgctacctgttccaccctcaaaggcccgttctgtgtcccctccaccaaaaagagctacttcaagatcccgttctagatctcgctcaaagtcaagatcaaggtccaggtcgagttccagagattaactcagaactccttgtttgcacattattatggaacactttcctacttaggcagttactcttccatgtttatacttggcctcttctgcaagaggaatctcttgaaaacaggggcacacagaaatttgatttgtggccaaattggatgaaaaagatgaggctctaaggaaatggtggcatgaagaccctctcccttctttgtagaattaagataactttgattttatagcttttgagctaacgtaacttttgtaaagattaagctcatttagtg

SEQ ID NO: 281075 - DNA, 1000 bp, Homo Sapiens; identical to SEQ ID NO: 207032

SEQ ID NO: 281076 - DNA, 1000 bp, Homo Sapiens
cttatgggattttgcagacatatatttcaagtgtctatttgcattgaattattcaaacactgaagcataagctattgtagaccctagttcaaacagcaaagaatgattattccttttaggaaaaaatgctataatgttgacaattcttacactcagagacttattctaacttagttctgttctgatctttacaatttcttctaaaaatcacattgaatctaccctttgctttataagtcttgcaatggcctttggccaaaagcaatacaatcctgacctgaagatatataataaggaatgctttgctgttctttccccagaaatctaataaaagccatagcactgtgagcaaaagtctttatactcttttcaagatgccaaatcagtggcatttccccaggttggtggcagtggtttttaaaatgtagaaaaacaagcagtgacaaggaattttcctctctctgtattctccctcagaaatagtctgtgcctaggtcctcctaagtctgcagaaggaaggtatttgtgagatgctttcaataagccttctccaaaccatttaccaaattcaaagccattaagccagcaatgctgagtcccaagggcaagtaatacaagttacagttaatattggctaagccctcttataagatgttggagctaaaatggccttttaagataataaggtctaaccttctccttgcacacatgtccaaatgaggtacagagaagggcaaggatttgtccaaagttacacaagatcagaacccaatcttcctggtgtttcactccttttctttctatttggctgtagttgaaacccagacatccagaaagataatgaggcctagctctagaaaacagataatcttcaaaacctgaaatctcttccatgcctgtgatgatgatgataatggtcactgctgagtgtgaagcaaaggattctggggtaggtcctcaggcttccagccataattctagtgctgcttcctttaaagct

SEQ ID NO: 281077 - DNA, 1000 bp, Homo Sapiens; identical to SEQ ID NO: 114725

SEQ ID NO: 281078 - DNA, 1000 bp, Homo Sapiens
tacttacaccaatataatcaccttttctgcatcctcaacttctgaagtgatcacccgtcagaaacaactccagattattgtgaagtgtgaaatgggacataattctacagtggagataatatacataacagaagatgatgtaatacaaagtcaaaatgcactgggcaaatataacaccagcatggctctttttgaatccaattcatttgaaaagactatacttgaatcaccatattatgtggatttgaaccaaactctttttgttcaagttagtctgcacacctcagatccaaatttggtggtgtttcttgatacctgtagagcctctcccacctctgactttgcatctccaacctacgacctaatcaagagtggatgtagtcgagatgaaacttgtaaggtgtatcccttatttggacactatgggagattccagtttaatgcctttaaattcttgagaagtatgagctccgcgtgtctgcagtgtaaagttttgatatgtgatagcagtgaccaccagtctcgctgcaatcaaggttgtgtctccagaagcaaacgagacatttcttcatataaatggaaaacagattccatcataggacccattcgtctgaaaagggatcgaagtgcaagtggcaattcaggatttcagcatgaaacacatgcggaagaaactccaaaccagcctttcaacagtgtgcatctgttttccttcatggttctagctctgaatgtggtgactgtagcgacaatcacagtgaggcattttgtaaatcaacgggcagactacaaataccagaagctgcagaactattaactaacaggtccaaccctaagtgagacatgtttctccaggatgccaaaggaaatgctacctcgtggctacacatattatgaataaatgaggaagggcctgaaagtgacacacaggcctgcaaaaaaaaaaaaaaaaaaaaaaaaaaaaaaaaaaaaaaaaaaaaaaaaaaaaaaaaaaaaaaaa

SEQ ID NO: 281079 - DNA, 1000 bp, Homo Sapiens
tttatttatatggagcactagaaatgtaaactatactgactttatggtatggttgtgatatagaccaatcatttgcattttctgtgtgtaggaatccattagaggacacactggttaaaaattaaacataaaaggtaaataaaaataaattttatgttcatatatttaagttgtttaaaactataatgcaattcattttttaaaaaattttacagaaattgcatcgatgtaatcagaatgaagaccgcatgccatcccaagattatgtcctcacttataactatgagggaagaggatctccagctggttctgtgggctgctgcagtgaaaagcaggaagaagatggccttgactttttaaataatttggaacccaaatttattacattagcagaagcatgcacaaagagataatgtcacagtgctacaattaggtctttgtcagacattctggaggtttccaaaaataatattgtaaagttcaatttcaacatgtatgtatatgatgatttttttctcaattttgaattatgctactcaccaattatatttttaaagcaagttgttgcttatcttttccaaaaagtgaaaaatgttaaaacagacaactggtaaatctcaaactccagcactggaattaaggtctctaaagcatctgctctttttttttttacggatattttagtaataaatatgctggataaatattagtccaacaatagctaagttatgctaatatcacattattatgtattcactttaagtgatagtttaaaaaataaacaagaaatattgagtatcactatgtgaagaaagttttggaaaagaaacaatgaagactgaattaaattaaaaatgttgcagctcataaagaattgggactcacccctactgcactaccaaattcatttgactttggaggcaaaatgtgttgaagtgccctatgaagtagcaattttctataggaatatagttggaagtaaacggaatccgcggaattc

SEQ ID NO: 281080 - DNA, 593 bp, Homo Sapiens
agaactgagaaagcagccactcgaatcattttctgtgttctgggatttagaggaggaacactggttgagaaagggaatatttttaaggctcttgacacatattgcagatggcttttaaaaataattccttgagtaagtacttcagtaccaagcatttgattctttgtaattcttggtagtatggttattattgtgaaaaatataggttatttctatcatctgaagtgtttcttcttggagggtgggatgtggctagaatacagtatgattgtgaagtaataagactaattttgacatgtggtttgtggaactggtttcattacttatagtcacatttgaggctttacaatatttctcacagtatctactacactgccttgaatgtagttcaatgcatgttctctgaaggaatttgaacatccaacctgtagagtaaaaaggaataagagaacacttcgtaggaccctaaaatgaatttttatattcaatttgtacagaagaatggtgaaagaatggagaaaaaatgaaactgagagaccctaactgtcccatttccatctctcacacttataataaaattcctctttgagtcc

SEQ ID NO: 281081 - DNA, 1000 bp, Homo Sapiens
gtttcgctcctgttgtccaggctggagtgcaatggcccgatctcagctcaccacaacctctgcctcctgggttcaagctattctcctgcctcagcctctaaaaggctggtattacaggcatgcgccaccatgcctggctaatttttgtatttttagtagagacagggtttctccatgttgatcaggctggtctcgaactctgacctcaggtgatccgcccaccttggcctcccaaagtgctgggattacaggcatgtgacactgcgcccagcccatgtcatcaacttctaaagaacttggaccaggcgcagtggctcatgcctgtaatctcagcactttgggaggctgaggcaggaggatcgctggagtccaggagttcaagaccagcctgggcaacatagcgagatctcatctctactgtgtattttaaaattgaacaacaaacaaaactaaagacctcaaaagtgcctaaaagacacctccgtggaatctgtacaaggatctccctgctccttgttcttctttccttaaatttagttttccttaagaaccaaaaagaaggttaaaataaagaaagaacttcgaatcagtctcattgtcagccccctccccacccctaagccgtcgtgtagcacttaacaacgctgtgttctacagctttcgtttcagatgttttagtttatcacatttatttctgtgggttaggaaatatattctaagttccaaaccaccagctcacagatgaacatttggagcccagaccgctgatgggtgtgcctgccagtacttgtttcaaagtctgaaagcccatcccgggctctttaatcctgggcatgtcagtctcttcctgtccatagtccatgaaaatgactgttaaggcagccctcctcctctgcccacaagatgcacagccaatcttcccgatgggtgaggcagggagggacagggccccttagaatagaaccctgatcccatttgacttaactccagggaggagaga

SEQ ID NO: 281082 - DNA, 1000 bp, Homo Sapiens
cagaagcaagatggacctaactatggcaatgagcggcaaagcccaagtggcacaggaaggccctgcctgagtaatactatggagatggttaaaggaccaaggtcttccttccaagacagaggggcagcaaacacaggaattctttaatgtatatacactgtatatcagtataaatttaggggttgattgggaggtggagagcaactggcccaataaaaagttttgattttgcccgtttttcatacctgagctacttctcagggccaaactccattgactgaaggaaagcctgtgtccctgtgagtaaggaccctgcaactctgaagcagctatactcagtagtaatgatgccagatctttctcaaagtggcttatggccatttactgaggtaaccatgcattgggaagaatactcagacttctcaaaaacctgaaaacatttttcagccttttcacagggtctgaactgacattgatacccagggacccagtgggccataataactcttctagaatggggacacatgaggtccatgcatgaagtccatctaataaaggaagtccttgcctagatctagctcacagtgggtccactggatccgtggatccagctgatggccatttccccaggccctaaatgtataattagagtggacctcttggtagtttgcagaaccctcacatgggatccttgacctgttgagtaacaactcaactagtgagaaaagacaagtaaaaggctctgaaactgcctttctccctgaccaagatagtatatttaaaaaaaatacctcatcttgggaggtactgacatttgactgagattgtgctaagacaaagaacctaaaaaatgccataccctattttattcaccagcccaacacctactatagtatggattgctggattctgagggacagtactgttaccacacacttaaccaatgataaagtctgaccaggccacctagcctgttgaaactggtcagacctggggatga

SEQ ID NO: 281083 - DNA, 1000 bp, Homo Sapiens
agaatttggggttgggactagactgggggtgagctggggagatggaagatggaagtggggtcagtgggaggcaatgatggtaggtatcttggaagaaggatgcttaattttaacacggaaagactggaagaagggaagatacaaagaggtggtctccagaagacagtcagacaaataacagagccttagaaataaaaccttttgggctgggtggcccaggttctcaattgctgcctctacaggaaagtctttgggttcggaggattccagaaacatgaaggagaagttggaggacatggagagtgtcctcaaggacctgacagaggagaagagaaaagatgtgctaaactccctcgctaagtgcctcggcaaggaggatattcggcaggatctagagcaaagagtatctgaggtcctgatttccggggagctacacatggaggacccagacaagcctctcctaagcagcctttttaatgctgctggggtcttggtagaagcgcgtgcaaaagccattctggacttcctggatgccctgctagagctgtctgaagagcagcagtttgtggctgaggccctggagaaggggacccttcctctgttgaaggaccaggtgaaatctgtcatggagcagaactgggatgagctggccagcagtcctcctgacatggactatgaccctgaggcacgaattctctgtgcgctgtatgttgttgtctctatcctgctggagctggctgaggggcctacctctgtctcttcctaactacaaaagccctttctccccacaagcctctgggttttccctttaccagtctgtcctcactgccatcgccactaccatcctgtcaccagtgggacctctttaaaacaagcagccaaccattctttgatgtatcccattcgctccatgttaacatccaaaaccagcctggatttcatacatggacttctgattaaaagtggcaggttgtgcatgttaaaaaaaaaaaaaaaaaaa

SEQ ID NO: 281084 - DNA, 1000 bp, Homo Sapiens
tcaaggtggcagaagcttgaaaagcaactgggagcccgcggagagggattttatccacacggcctccatcagcttcctcacacccttgcgcaacttcctggagggggactggaagaccatctcgaaggagaggcggctcctccaaaaccggcgtctggacttggatgcctgcaaagcgaggctgaagaaggccaaggctgcagaagccaaagccacgacggtgcctgactttcaggagactagacctcgtaattacattctctcggccagcgcctccgcgctctggaatgatgaagtggacaaggccgagcaggagctccgcgtggcccagacagagtttgaccggcaagcagaagtgacccgtctcttgctggagggaatcagtagcactcacgtgaaccacctgcgctgcctccacgagttcgtcaagtctcagacaacctactacgcacatgctaccgccacatgctggacttgcagaagcagctgggcagatttcccggcaccttcgtgggcaccacagagcccgcctccccacccctgagcagcacctcacccaccactgctgcggccactatgcctgtggtgccctctgtggccagcctggcccctccgggggaggcctcgctctgcctggaagaggtggccccccctgccagtgggacccgcaaagctcgggtgctctatgactacgaggcagccgacagcagtgagctggccctgctggctgatgagctcatcactgtttacagcctgcctggcatggaccctgactggctcattggcgagagaggcaacaagaagggcaaggtccctgtcacctacttggaactgctcagctagctcaagccaagtccagcggccgcagttttcacctctccacactcactttttatctggtgtttttacttctgcctgcgtttgctctctagccaataaaccgtccttgtgtgcgagtccaaaaaaaaaaaaaaaaaaaaaaaaaaaaaaaaaaaaaaaa

SEQ ID NO: 281085 - DNA, 660 bp, Homo Sapiens; identical to SEQ ID NO: 114726

SEQ ID NO: 281086 - DNA, 342 bp, Homo Sapiens
accggaaatcgcggggagggtcaaaggagacccggtctccgaggctcatggcgatgctggtcctagtacccggacgagttatgcggcctctgggtggccaactttggcgcttcttgcctcgcggactcgagttttggggcccagccgaggggactgcgagagtcttgctgaggcagttctgcgcgcggcaagcggaggcgtggcgtgcctcggggcgccctggctattgcctgggaacccggcccctcagcactgcgaggccgccacccccgtggtcgcagaagggccccggagactccacgcgcccctcgaagcccggggtgagtgcacacctggaaccct

SEQ ID NO: 281087 - DNA, 1000 bp, Homo Sapiens; identical to SEQ ID NO: 201569

SEQ ID NO: 281088 - DNA, 1000 bp, Homo Sapiens
tgagtttttttttcctagtatttaagttaccaacttggtaccagtttgttttattttagatgattgtctttttcctcttgccctttttaaattagggggactacaggccattgcagaattattgcaagtggactgtgaaatgtacgggcttactaatgaccactacagtattacactaagacgatatgctggaatggctttgacaaacttgacttttggagatgtagccaacaaggtatgtttttataacatgtatttcttaagatagctcaggtatgagttaatttactttcatacaaatacattttactgattttcttttttttcactctcctcattaaacaatgactgataaaaacctgtgcttcacattcgcttatctttactcatttgtttgtcttatgcctaaacaaaggcaaaggtacatctacagatggaacacagtagtgaatttatgtaattgcattaaaaacaccattcataagaatatacttgtagggatcatttctgtgatccattactagagaagttttaactgtgtagaattaaaaaataaaagataaaacacttcctaggaatgggattaaaaatctaaaaattcttaagaccaaggcaagtgttacacacacattgattccatccaaataagaggctttactctaaaacctgttgcttatcatttctcaccacttattcactttatttctctagtttgacaaaggaagaacagatagcaaagaattaggagaatatttgtcttttatttaggtaatcttattctagatttttatgagtgaagtatcagttatgattaaaaccaaattatgaaaactggaattagacatttagtagccaaaaataaagcttggcttcaagttgtctttttaatgatcctctattctgtatttaatttacaggctacgctatgctctatgaaaggctgcatgagagcacttgtggcccaactaaaatctgaaagtgaagacttacagcaggtact

SEQ ID NO: 281089 - DNA, 1000 bp, Homo Sapiens
tgctgcaccagtggcccacctgttagcctctccgtgtacctcaagacctatgttaaagcatccaacttataatatctcccatcccagtggcatagttcaccaagtcccagtgggcttaaatccccgtctgttaccatccccaaccattcatcagactcagtacaaaccaatcttcccaccacattcttacattgcagcatcacctgcatatactggatttccactgagtccaacaaaactcagccagtatccatatatgtgaaaaacagtatattggggaagctcaatgatacaaacatttgattaaaaataaaaacatggtatttaatattagccatggcacaagaaaattatttttggaatcatgtagacttgggtgcaatttaaacaactttgagctttaaaaactcacttttgatgtgttttgcacatttggtataacttgtctttggtcatgttatcttcttatgtagtaactctagacaggtgacttatgggagcagaagtccagttttgctcctgctattttttataaattgccttctaactagtgcaagacacgtctacatttgggaagccattctgtgtacagacttagagcaacagatgcacatatgtcagaattacagcatacaagtgaattgtattatccgtgtcttagtgtataaatgttgggtcacttacctaagaaattgagctattgttctttacatttgcatgtgtcttttgcatgggcaaaatgttgcctagactttgctcttaaatgttgttctaataatctcagctgcattgtaaaccgttcctacacatagtgccttaaatatttgaggttgttaatgttattacctatatataaatgttgaggactgcagcacttaaaattcagacctactatttagtttccttttgatagcgtaatgttcatttttgtttttgtgtggtatgatttcaggtagtagctgtttttttccttattaagagggcagcatgtttgctatag

SEQ ID NO: 281090 - DNA, 1000 bp, Homo Sapiens
ccaggaatgcgctcaacgtctcccaggcctggcgccatgcgctgccctttgccaagatccgccgcgtgcaggaactgtgcgctggtgcgctgcagctgctgggctaccggcctgtgtactctgaggacgagcagcgcaacctcgcccttgatctggtgctgccacgaggcctgaacggcttcacttgggcatcatccaccgcctcgcacccccgaaattagtggaggccacagttgtagcaggcgctaggcccgggaggagagtgcatggtgcagagggggctggggcgcacggagaagcaggtccctatattgaccaaggagtttgtggtacgacccctccccctccccaagtaggcaaggactgcacgtttctttctctcttgattcttggttttcctttgagtcctctggagctgccttctcatcaggtgcactcttcatggaaagcaactcttgcccctcctcctctgggcacagggtgtgcgttcagatgacttggctcctactcaagggctttcttcccctttaactctctccttctggtgacacatcctgcagcagctgagggggtgccctggcactggctgggagtggagaggcactgtggtgaaatggctccagaggtctgtacatcacatacatatgcacacaggcacacatggcaaaactcggaagtgaaaggacttgtctgaaatcacatggtgagaaggaggatgaagggaggagagagcttttgctctgggtctccagtggataggagaggacctgcctcctgggtgagaagggtcagattttcctattttaattgctttagggaagagcaagcagagtcatgaccagggacacagctgagagatagaggaggctgtgaatgctgagaccagagtttatcatgctggacaagcctggaaggaggcaataagtgggaaaggtaggaggagagaaggctggggagggctgggcagcaagccaggcacagtgagtggcagagccagagg

SEQ ID NO: 281091 - DNA, 1000 bp, Homo Sapiens
aatttagcttcatcattatcaatttagtcgcttgttggttaaccctacaacttgcagtgacatttatttgcaatagggtttccaatgtacatctttctaacaactagcatttaaggcaggcatccatatgggttgaaatgggaaacatttctatcccatggctacctcagaggcaggaattactcaccacttcctccccccattgcttgacagaaagaaacttattattggtgatatactcctggaacttgtgttaatttaagtaactggccatatatggtcaaggtaaaaataatagaactactcaatgattttcaaattcacagataattgctttaggatgtgtttaagcttatattccttaatagaatgtaggcagttcacacacggtgccagcagtgagttgtctgcaacttccttatttgcaaattctttccctagaaagtggaggcagatcagtgagccatgggggtggtttcccccatgctgttttcatgatagtgagttcttacgagatctgatggttttatagagggctcttaccccttcacttggcacttctccttcctgccaccttgtaaagaaggtgccttgcttcccctttgccttctgccatgattgtaagtttcctgaggcctctccagccatgtggaactgtgagtcaattaagcctctttccttcataaaggaaagggcaaattggaaaagagtctctggcagttctttatagtagtgtgaaaatggactaatacaaggggtcctagccaggagagttgggaaactcagcttggagaatacaggctaatctccaggcactcaggctacttagatttccagacatacaacagggcaaatgcattcctttgcttccttccagagccagccacccagggaatattccaaagaggctccaggggaatgagcggggtcagagctgtgattccagccagcccaagcatcactgagcgacagccaccagggcaaggctctgggaaacagg

SEQ ID NO: 281092 - DNA, 990 bp, Homo Sapiens
tttcaccatgttagccaggccggtctggaactcctgacctcaggtgatctgcccaccttggcctcccaaagtgctgggattacgggtgcccggcctgtaaagcctatttctaaaaggaaaatggtaagagggacagcaaagcaaaaaaaaaaaaaaaaaatctgactcagaaacaacacttataggctctgaagggaaatccccactaattgtttcgtgaattttagggacccgtttgagggactagaacttgctgattcctaagactgtcatattttcagggagctcagagttatgaaaagaaatggaatgtgataaaggataaaccgtcaactttctgtttaaattgtctttgtcttgttattacagatcaaaggcagaaatgagacatacctgccgtggtaccatcaacctcgccacagccaacatcaccgtggaggactcctgcaacttcatcatttccaatgggggtgctcagacctaccatctgaaagctagttcagaagttgagcggcagcgctgggtgacggccctggaactggccaaggccaaagctgtgaagatgctggcagagtcaggtcaggaacaaagaacacctgcctggggaactttctttttgccccttttatgcacagattttgtttgtcatcattatgctgtgtcatttgattatcacctatttcctagaggtctcaagcttctcgtcttcatgcagtatttctgctggagtgatggttctcaaccagggttgattctcctccccaggggacatttggcaatgtctggagacatttttggttgtcacagctgaagggagggaggtgctatggcatctagagagtagaggcctgggatgctgctgaacctcctataatataccaaacagccgccaaaacaaagaattatctggccaaggttgaaaaattctgtcctagaggcgtaacagttggtcttttgccttttaattggctaccttaaaattttgagaaa

SEQ ID NO: 281093 - DNA, 1000 bp, Homo Sapiens; identical to SEQ ID NO: 201587

SEQ ID NO: 281094 - DNA, 1000 bp, Homo Sapiens
ggtgataccctgtctctactaaaaatacaaaaatgagccaggtgtggtggtgtgtgcctgtagtcccagctactcaggaggcagagatgagagaataattgcttgaacctgggaggcagaggttgcagtgagctgagatcacgccattgcactccagcctgggtgacagagggagactccatctcagaaaaaaaaaaaaaaaaaaaattagccaggcatggtggtgcatgcctgtagtaccagctatttggtaggctgagcagggggattgcttgagctcaagagttcaaggctgcagtgagctatgatcacactactgcactccagcctaggtgacagcaataccccatctctaaaaaaaaacaaaaacaaaaacaaaaagacttactaaataatgaagttctccaaacagaaagaaaatgatttttaaaaatgaaggaatcttggaacatcaggagacagaaaatataatgagcaaaactgtgggtaaatacaataggctttccttctcttgagttttctaaaatatgtttgatggttaaagcaaaaactataacactgtatgatgtggttctaaatgtatgaagaggaaatagctaagataattatataaacagggaaaagtagagacataatggaagctaagagttctatactttactcaaactggtaaaatgacatcaatacactgtattaagtcatatatacaaaatgtaatacctggagcaaccactaaaaaagctataccaaatatatatgtttatcatcaaaaactataaataattcaaaatggaattctaaaaaatgtttcaggaacaagcatgaaattaggaaaaagaaaacagaaatttaaaaaacagagaaaacaaaatgaaaaggaagacttaagccctaatatagcaataattacattaaatgtaaatggtctagatacaccagttaggccgggcgcagtgtctcacacctgtaatcccagcactttgggaggccgaagcaagca

SEQ ID NO: 281095 - DNA, 1000 bp, Homo Sapiens
  misc_feature (397)..(397): n is a, c, g, or t
  misc_feature (399)..(399): n is a, c, g, or t
  misc_feature (709)..(709): n is a, c, g, or t
aaattaaaaaaaaatggtggttcagggaaaaaaaaagaagaaagaaaaattaaaaaggaaagaggtccagattcaagacttaggcccaagtcttcagaccttccaaaacatacctctaatgaaaatgtccatgacattttgaatgacttcttgcaacttcttttatttatgtaacagtttcctgagcacctgctatttgcaaggcatagcagtaagatgcacaacatcaatgacatcatggaatttactctccggcagggagaccaacattaaaactaatcacatcgttagtaattgatgttactacagggtatttatctagttcagattcaggtaatgcttctgcaggagtgagtttctagatttgaacataaaagatgagaaggcaataaacagncnaaaagagaattagtctagaataatggggggaaatgtctagaaaggactctcttgtatcaggaaattatcatggaagcctatgtgaccaaggttacaggagttgaagcaatggatcaaagattggataaaattctcccttcagacttctgcagagaatttgaggcctgtgaatccttactgcataaaactttcaggtcaaatgagatggagaggagcagggacttcatgcattcttctctgaccctaaccatatgagtatcacaatgcatggtagcattctaaaatgcctttaagagagaagcctgtttanatattcattttagcagtgagccctaactcacttgcctatagaacctttcattcttcataatttttgttatagttctgaggataaactttttaaagtactagactagattatcctgacaggtccatcctaactctgaggtccttttgatttgtagtcaactttgtgctctcctccattagtgatgttttctcaaataaatcagtatctgaacacttacttcccaagtataaatgacattcaaacaagtaatattcaaagagagcaaagcactcaagatatgaagtggaattc

SEQ ID NO: 281096 - DNA, 1000 bp, Homo Sapiens; identical to SEQ ID NO: 114727

SEQ ID NO: 281097 - DNA, 460 bp, Homo Sapiens
ttatactcctcactactctgcaaaaatatctgtgaccactcttctgttcggtgcccagatggatcacaatgaagtattgagcaaatgcttttagcgttggttttggcatccagccccttttggtaaatctgctccaaattcaccttttgctcaaaaatttgtcttctcccagaagtagatttattctctcccattttatatttatttggtgtgagcctttttgttattatttcctttctctttacaaaggcggaagagacggaatttcaacaagcaagcgacagaaatcctgaatgaatatttctattcccatctcagcaacccttaccccagtgaggaagccaaagaggagttagccaagaagtgtggcatcacagtctcccaggtaagcagcacctcaaaagcctcagcctgtagcctggccatggcggggcctccggggcaggctcttagaggtctt

SEQ ID NO: 281098 - DNA, 363 bp, Homo Sapiens
gatggcatttaatatggcatgcccaaatgggggcctgcctgatgatgatctgcctcccttttcctacacctctctagactaattttctctctgttattgttcatcggtttaggtggatacccttcgccatgttatcagccagacaggaggatacagtgatggactcgcagccagtcagatgtacagtccgcagggcatcagtgtaagaaaacaagcccccccaccccctgctttgtttttattctttcactaccaattatttcaaagccatagggcccagaatgccacttagtagggcttatcttagctttacggtcacctagtttcttgtttctgtatcggtcatgccatcggcagcattct

SEQ ID NO: 281099 - DNA, 1000 bp, Homo Sapiens
tcacatgaacataattccctatactgacaaagaactatagctacctatgggcttgtcaagttcctacgcttcattcagcatgaaattgcacttttcttgatatgtataaattaaaatctatgcaactgtctgtgcttgtgttgcctcatatcacatctataaaaacagcatttaaagtttgtaggaaatagaattttggccttttacaaagcaaatactttgtttctttaactcagaattctggaaatgcaatccagttctggtattgtgactgccaaaatatttttgtcttcaaacattagtttttttcaagtgtctgactctatacaagaaaataataaaaagagtatcagaagtttcctgtaactaccataaaaaaaacttcagtatccacggggctgttcctaacggtttgttaggatgctccttcctgatccaagtccatccagtctgaggctatttttcaattccatgcttctatctgccagaagagtctttttaggtaaagaagccatctaaataaagcagaagtattaattttagtatcttttttaaaagaaaagccactagtaaaatgatgtattatgtaactactcagtgaagaaaggactataagcagtatcagtgtcttaagtatttattccagtggtgccatcttcaagtacaaagaaaatggaggtgaattttctatcttttaagaacgttataaatgtttcctacatttccatttggttatgacaaaccttataccagaattactaacatctgtttaaatgtatgttgtcagagttctacacaaattatatttctaacttattgtgttaggcagtgtgctagtaagtgctttacacatattgtttaattcttcccataaccctatgaagcaggtaataccgacttaactgacagatagggaaactgaaggaagtttgagaaagcaactcgcaagggccatagtgcctgtgacaacttaatcccaggcgctctgactttagggccc

SEQ ID NO: 281100 - DNA, 1000 bp, Homo Sapiens; identical to SEQ ID NO: 204997

SEQ ID NO: 281101 - DNA, 1000 bp, Homo Sapiens
  misc_feature (194)..(194): n is a, c, g, or t
  misc_feature (196)..(196): n is a, c, g, or t
gtagtttttttattagaaattgttattcaataatagtacatgttacaaataaattccattttaaactgaaaaaattgtagactttcaaatcagttagggtggtcaccctaaaaaagggcatttttttccccttagtctccttgttcatgttgctcacaacaagaaatgggctaatgctatgaataataatagcnancactgccttctgtcaggccctgtgctgaataccgtctgcatatgtataggaaagggttaactcagcaggtcttgtttgcccagactctgtacatttccaagaaaggtctgcctttaggactggtccttggccagctcctggagaatgagctctcagcttttagaaaattctatctgctaagaatagttttgcatgtctcaggtcttgggccacaaaatatcagtttaatcagatggtttatgttaacaagtatgatttatggcaaacatagatctctaatctccatttctctctcatatatctatatttatctatccatatatatgtacctatatatatcaaatataaagatatgtttatagcaattgtatatacgtagagagataatatgtagtatgaagagagacatagatattattcttcattttagaatgttatcttggtatgtttaaaaggaaaaacttaagatgtgttgcaattgcagtatgagtttcaggtatgtacatgttatgtgtgtgtgtgagagacacacacaaacacatttcaaacatgttttatgtttaagctcaatattcaaacacagaaatataacatctattcttaatatgttttatgtaagtacagcagcagcattattaaatactgtatttctatggtgattgaaaattagtaggcagagaatttttgtaatggttcttaataatttttgtaatagtaaatgattactttttgtttagtatagttttataatctatacatgaataaagtggatatttctattcataaaaaaaaaaaaaaaaaaaa

SEQ ID NO: 281102 - DNA, 1000 bp, Homo Sapiens
taatactaatatctgatttgtaaatgacttaatgtatccttgaccctatcagctgaatttaatgaaatattcctctctgctgtgaaattttaccagtatagtatttggtctagtgacaggtgttctatttttttgagacgggtctcactctgtcacccaggctggagtgcagtggctcaatgcaacctctgccccccaagttcaagtgattctcctgcctcagcctcttgagtagctgcgattacaggcacatgcaccacgcccggctgatttttttttgtatttttagtagacagggtttcaccatgttggccaggctggtcttgaactcctgacctcaggtgatccgcccgcctctgcctcccaaagtgctgggattacaggtgtaagccatcacacctggccctagtgacaggtttttatgggtacttttagatgatctaagaaatcatgtgcatatatctttcagatttttattttgggaaaatgaaggtttctacaacatattgtttcagtgttcaaataaactgaaggactcaacattacatttgaactatatccttcctagtgggttagtgtgaaaaagagtttggctgattcctaaaactctgccagccctgcagtaatctccaggcctggttattgttcagacattccatggtgattcctgggaaggaagcttggctgctcagtttctgagtctggggtgagataatgttctggaaggacatctgttctttggtgtaatctctcatggtgaaatctgctctgtacatcagacaattgcattgctaccaagtttcataccaaatatttgaaaggatggtattgaatctaaaccaaatattagtttttattaaactcatgggaaggctaatatattccaacgtaaattattacatatggttaagtaattgcatgttaatttattttaatgtaaatatttttgttactgttctgagccaaattctaaagaaaaaataaatacatttccttgttg

SEQ ID NO: 281103 - DNA, 1000 bp, Homo Sapiens; identical to SEQ ID NO: 201662

SEQ ID NO: 281104 - DNA, 1000 bp, Homo Sapiens
tgcacagcctccttctctctgagattcaagagtctgatcagcagcctcttcctcctccaggacccagaagccctgagcttatccccatggagctctgccgatccctggccctgctggggggctccctgggcctgatgttctgcctgattgctttgagcaccgatttctggtttgaggctgtgggtcccacccactcagctcactcgggcctctggccaacagggcatggggacatcatatcaggtaaggggaatgggtgtcctacagaggggttgccagcggggatgggtgctcagtggtcttctcccgatcaggctacatccacgtgacgcagaccttcagcattatggctgttctgtgggccctggtgtccgtgagcttcctggtcctgtcctgcttcccctcactgttccccccaggccacggcccgcttgtctcaaccaccgcagcctttgctgcaggtaaggactctggactggactggggcatcgcgagccagcgaattcctgccgaggagctgagccatctctcttgtccttgtccccagccatctccatggtggtggccatggcggtgtacaccagcgagcggtgggaccagcctccacacccccagatccagaccttcttctcctggtccttctacctgggctgggtctcagctatcctcttgctctgtacaggtgactatcctgcccactgccctggggagctttgggagggtccagttggggtccctgaggacagagggcaggggcaagtgcttaaactctttctggctccccaggtgccctgagcctgggtgctcactgtggcggtccccgtcctggctatgaaaccttgtgagcagaaggcaagagcggcaagatgagttttgagcgttgtattccaaaggcctcatctggagcctcgggaaagtctggtcctacatctgcccgcccttccagcccttccccagcccctcctcttgtttcttcattcattcaacaaaatttggctgg

SEQ ID NO: 281105 - DNA, 1000 bp, Homo Sapiens; identical to SEQ ID NO: 201650

SEQ ID NO: 281106 - DNA, 1000 bp, Homo Sapiens
aacttgggcctatgcagtcagagccagccttccttccattagttcacagagggcttgtttgaggtctccaaaaaaaaaaaaaagcaaaaagtggaaacaattgtagattttaagaggaaaatgtgttaaggacaaaatagcaaaagaagtaaatctatggcaatgaaagcctccaggctgatgttggttccctggagcgtggtttcagtgaaatacaggttcatcagccccagtggctacattgcagggagacacctatcagcttcctacgtctagaaattcatagccctttctaagagcattcagatacggtttgcaaaatctctgtctggagcataggcagtattatgccaagcacagcaagccccttaaactgcacaaacatctttatccctcctcactcctgtcttgccctgatttcaaatctgcatcctgcctcaggatcctggagagccaatagaagatgctgggtggtgtcctgggtgctggtggttgggcagcagggggaggccagggctgtgggtagtaactgtcacgtggccaaactcagagggggcagcgtcaaagaagtgtgttcccccctccccctccccatccttccttctccctccctgctctgcagcacccagtatgtggggttacatggagaggaaaagatgagatggagaggaggaagaaatgctgcaggaacacaaaggagatgtgttgtgggctcaacagacaatggctctgagaagagcaggggacagctgcacctgtgggtgctcagggcccccagagcctgttagacccaggcagccccagacccctgctccagggatccatggcacgttgcttggctgaagagctctaacagctaaaaagagccgaggcagcctgaccaggaggttcagtcttactgcatccattggcctcttcttaagtttggttgctcacacactgttgttagaattttaataatacagggtgtgtgatgggttcagatactttggtctgatcc

SEQ ID NO: 281107 - DNA, 1000 bp, Homo Sapiens
tcctgagattttgatagctgttgcgttaaacctatagatctattgtctacataaaaccttcctaagattttgatagcaattgcgttaaacaattaactggcatctctacaatgctgagttgctcagttcatgaacatggtaactctccccagtttttaggttgtcttttattttctgggttttgtttttttgagacagagtttgtcacccaggctgaagcgcaatgacgcattctcggctcactgcaacctccgcctcctgggttcaagtgattcccctgctcctgcctcagcctcccgagtagctgggattacaggcacgcgccgccacgcccagctaatttttgtatttttagtagaaacagggtttcaccatgttggccaggctggtctcgaactcctgatctcaggtgatctgcccgcttcagcttcctgaagtgctgggtttacaggcgttgagtcaccatgcctggctttgtctttgattttcatcagcattttcagatttttagcatagcgtttccgtacgttctgttagacttatacctgaatatttcattttctttgtcactattgtaaacgatggcatgtttttcattttggcttccacacagtcatcatctctgagctctttgtgcagcactgtggttggagtagtctgagcttttcatgttcatagcaaaggagagaggagcagtgggagtgtgacacttgagtcacgggcgtgtgaaaatcagatatgcaaacaatgtgggcatgagagcagacagaactggattcagatcccagctctggcactttctagccttgtgttattgggcaggtcatttagtctctctgagcctgtttcctcaaatgtcaaaaaggagaataatactcaggcaatccttttgtaaagctttgagataatatatataaatattgtttgcctaacataggtctcaaaatgtcttagttattatgtctggccacagtggaatcatgtcattcatggttagatc

SEQ ID NO: 281108 - DNA, 1000 bp, Homo Sapiens; identical to SEQ ID NO: 205014

SEQ ID NO: 281109 - DNA, 1000 bp, Homo Sapiens
tgggagggaccatctactgcctgatcgccctctacatggcttcgcagcccaaaaacaaatgagttaggctgcagaggactggtttgttttttggcataaaccctttgaagttcctttttcattgttaaattaaaatttttttttttacttggatggcttaacatttttgcaagaaaaataggaagatatgaagatgatgttttggtttgtttatgaaatgcatatggcttgtcagagctcattcgacagttaaagccattgtttaaaggaacggtgctttgctctgtgtttgtgctcctgatttccctggaggttctggatgaaggctgaacacaggcttgttaatgtcagtctgtgctgaggacctcagggacttgaggttgcatttttgagcatggggtgcaggagcctttctggatttggatgtggctatggaaagaacacagaagccaaggtcatgtgcatgaaatgaggagtttgagttagtcacctcggggattttttccattttgcagtaaaatgttaaattaatgtagcctgcctctatttgttgggcaggtaatttcaaagggttatttgcctcatctcctatctttagtgaaatcttatgtgtaattgtgtgtatttattccaccgtgggaacagagaatacctgtttagtgttgcactttagactggtgtctgttttgttaatgcagctgtgccacaaattctcctttatcttttaaaaatgttatagctttaaattttgatttattttgactgtggaataaatacatgaatgaaaaattttaagtttgaagttctttgaatgacctttcagagtaatttcagaacaccagcagcatcttaaacctgagtctaatttctttcttgttaattaggcaccagataatctttataaaatggttcttaaaagtctagtaataggagtcttaatggcatattgatgattaccacatggttttttataaaaacctgcctgccccttagtgaaagg

SEQ ID NO: 281110 - DNA, 1000 bp, Homo Sapiens
agctaaacctccccacggcctttgggagaaataaaaaaataatgtcttaagctttaaaggagcagcttcaacagcagtaaatgcctgagaaaacagaccacttaggatcccgcctctgggggctgcggccaggcagggcaggagaatgcctacaactggacgcttcaatccacagactcagccctttttcaggcatgctggaaggacaactaagatcactgctaagggacacaaagatgtaggaaaagatatgtgagtagagtgtgtatgcgtatcgggtatcaccatgattacagagttggggacagcaagtgcatggaaaagcagaaagaaaagaaaaacagaaagaacaaactagatgtttcttttctctttcactgaagtccagaccttaaaagacacagaagaagggaacttctaacacaagagttccttgcccggagcccgaggcaagaggctccttcatggaagaatctaggcaacttctgcaacggtggcccccaaaaccacaggtaaaactgcatgagcactgtgtggagtatccagtttggaactggtaacgaccccacctcctaaaaaggcacagcatgagtgacctcccacaacctctcatgactggggcttgcatcctgagcaaggcttgtcttccttcccaggacacctgtttccaggatggctcccgcctctccccaagggcagggaagtgaaaccacagggaccttccctggacaaaccctgcccatcccagagaagaggcatgagacgggtgctcctcgcacacaatgggaaaagtgaagtcatttcgaagacaagtgaggagcctgctgtaggctgaatagcgatccccaaagatatccaggccctaatccctgggactgtgaaagccatacggcaatacggatctgcagatgtgagtaaactaaggctcccaggacaaggagattatcctggaaatttgaacatggcagaagaagacagaagctaggcgcggtggctcgtg

SEQ ID NO: 281111 - DNA, 1000 bp, Homo Sapiens
ccctggcagagctggtggaactcagtgctctagcccctaccctggggttgcgactctggctcaggataccaccacgctcctgggggtgtgagtgaggggcctgtgcgctccatcccgagtgctgcctgtttcacgtaaagcctcaaagcaagagaaaccccctctctaagcggcccctcagccatcgggtgggtcgtttggtttctgggtaggcctcaggggctggccacctgcagggcccagccaacccagggatgcagatgtcccagccacatccctgtcccagtttcctgctccccaaggcatccaccctgctgttggtgcgagggctgatagagggcacgccaagtcactcccctgcccttccctccttccagccctgtgctccggccaggtcttcacccagaggtctggggagctcagcagccctgaatacccacggccgtatcccaaactctccagttgcacttacagcatcagcctggaggaggggttcagtgtcattctggactttgtggagtccttcgatgtggagacacaccctgaaaccctgtgtccctacgactttctcaaggtctggctcctgggcccctcatcttgtcccagatcctcccccttcagcccagctgcaccccctacttcctgcagcatggcccccaccacgttcccgtcaccctcggtgacccccacctcttcaggtgctctatggaggtcaaggctggggcttcgagtacaagtgtgggaggcagagtggggaggggcaccccaatccatggcctgggttggcctcattggctgtccctgaaatgctgaggaggtgggttacttccctccgcccaggccagacccaggcagctgcttccccagctttcatgagcttctttctcagattcaaacagacagagaagaacatggcccattctgtgggaagacattgccccacaggattgaaacaaaaagcaacacggtgaccatcacctttgtcacagatgaatcagga

SEQ ID NO: 281112 - DNA, 1000 bp, Homo Sapiens
ccttacactaatttgaactgttaaagattgctgctttttttttgacattgtcaataacgaaacctaattgtaaaacagtcaccatttactaccaataacttttagttaatgttttacaaggaaaaagacacaagaagagtttaaatttttttgttttgttttgtttttttgagacagtcttgctctgttacccaggctggaggggagtggtgcattcttggctcactgcaacctccgcctcccaggttcaagcaatcctcccacctcagcctcccaactagctgggactgcaggcacacaccaccatgcctgactaatttttgtatgtttagtagagacggggttttgccatgttgcctaggctggggtttaagttaaattttttaaaaaactaaagtgactggcactaagtgaacttgagattatcctcagcttcaagttcctaagataagggctttcttaagctttcaggtgtatgtatcctctagatgtagacaataatgtcccatttctaagtcttttccttttgcttctccttaaattgattgtacttccaaatttgctgttatgtttttttcctaatactgtgatctatctgatctgcagacaagaaccttgtctctgttgaagagcatcaaggggagattatgtacacattgaaactgaagtgtggtgttactgacggaatgtgcagtaactcctcagatatctgttaaggcatttcccagatgtgatgccagccttcttacctgtactgaaagatgcttagcttagaaaaaaacaaaacagatgcaaaatcagataattttattttgtttcatgggttttcttatttactttttaaacaaggaaggaatattagaaaatcacacaaggcctcacatacatgttatttaaagaatgaattgggacggatgtcttagacttcactttcctaggctttttagcaaaacctaaagggtggtatccatattttgcgtgaattatgggtgtaagacct

SEQ ID NO: 281113 - DNA, 1000 bp, Homo Sapiens
tgtttctaggcctaaccattagtacttactgtgcagggaaccaaaccaaggtctgagaaatgcggacaccccgagcgagcaccccaaagtgcacaaagctgagtaaaaagctgcccccttcaaacagaactagactcagttttcaattccatcctaaaactccttttaaccaagcttagcttctcaaaggcctaaccaagccttggcaccgccagatcctttctgtaggctaattcctcttgcccaacggcatatggagtgtccttattgctaaaaaggattccgtctccttcaaagaagttttatttttggtccagagtacttgttttcccgatgtgtccagccagctccgcagcagcttttcaaratgcactatgcctgattgctgatcgtgttttaactttttcttttcctgtttttattttggtattaagtcgttgcctttatttgtaaagctgttataaatatatattatataaatatattaaaaaggaaaatgtttcagatgtttatttgtataattacttgattcacacagtgagaaaaaatgaatgtattcctgtttttgaagagaagaataattttttttttctctagggagaggtacagtgtttatattttggagccttcctgaaggtgtaaaattgtaaatatttttatctatgagtaaatgttaagtagttgttttaaaatacttaataaaataattcttttcctgtggaagagaaagatggtctcctgagttttttaaaatagctcacttggtgtgatatggctgactcccatgtccttctttcttggctgaagcaaaccagttaatctcagtgtaatttcattcagcttttcatgtgctttgtattcaatcagaataagcttagtcaacctggcaggtaaatattggttcaatttttgtttaacccttgccaggggttcatgatcatcctctacctctttccagagttaagtaaaaagcatattttcccttgccctgctttcatcg

SEQ ID NO: 281114 - DNA, 1000 bp, Homo Sapiens
aaacaaaaccaaacttctcaattgacagtgcagtgacccaacaaagacacgggttcttgaattcaaagtggagcaggagagacggtaaatacacatttactttaatatatatatatttattatttatgtgtctaaagcacaaattagtttggtaaaaaacatctcatgtctgttttatttccacatccctgagactgacaatgggatgcctatcaattaattcatttagagagccatacaccccaagaaataaattatttgtcctctggagcttgtcacagggggatttttaaaaaaacattaaacagaaagacaactgtgcatcttagaaagataaaaggccaattcttcctctccggctgataggttcttaataatagtgatatctactaagatgttttacatagtgtaaagcatgttcacatacaaattacttagcctctttgagcctcagttttcttatatgtaaaactggattaatagtacattttgtgtttaaaaagataatgtatatgaagtgtttaccatttttgcttggcatctagttcagttctcagtaactgatgtggtggtggtggtggtggtcatagtagcagtaagatccgtagtaatagtagcagcagttgttttagaaattagtaactgaggcctggcaaagttaaaggctctttcattaacacccagaggggaagaaatgaagctggtcttcagaggcaggctattttacctctgtgtcccaaattttcccccctagaccgtttttatacttctggggctctcagaaaatattctcagctattctgttagattgatctcctaccatctgagagtgggcttccttcaaacaaccaaatttccaggtatttctaaactgcccttcccctacaccattctttgattcagtatttcaagacccctaagagaaatggtacatttacgtgtaagcacaggatagtgaagtatttacaacaagtgctttggagccagcaaatatggatcc

SEQ ID NO: 281115 - DNA, 1000 bp, Homo Sapiens
gtgggcttccttcaaacaaccaaatttccaggtatttctaaactgcccttcccctacaccattctttggttcagtatttcaagacccctaagagaaatggtacatttacatgtaagcacaggatagtgaagtatttacaacaagtgctttggagccagcaaatatgaatcagaatccagctttcctttcctacatacatgacattgggcagctaatttctaagatttttacttctttatctatgaaagtggagtactagtacttgctctgtgcaactgtgatggttgttacatgaggtagcatctagaagcagcttgcacattgccagacacccagtggaaggtcaatgaatgactatttgaggactaactattacagaaatgtttactcttctgagtcctgatttctagtctcctggactaaataggttcactgttttcctcccggttcagtttccagacacatcacagaattataagaatattaaaactcaggcttatacctacacaggattttctataaccctctttctgctttgagctcctaaagctatttcatagaaaaatgaccttatttttaaatagagggggcagttgaaaatcagtgaacgggcctaccccctaatgatttttttctcagacctaattataataattagcattataaagtgctaattatctttggacacagaggacctgcacaccagagacagaggtccgcattaagtaaagtggatttcactttcttcagttgtgagatttctcttttttcttctttgtaatgatgcaaagatatatcttccaccaagcctcatttaaaagctttttccagttaaggaaactatctcttggccatccacagccagactgcatattgagattatggatattcaaagaaattgtctttcctttgtatattgtcataactttttgtgaaatgttcgttttatagttccaggccagcacctagaacctggctagaataaaaaactgcagaaatc

SEQ ID NO: 281116 - DNA, 1000 bp, Homo Sapiens
tctcaacccaacaggaagcgtcacatctcagtgagcttcggctctcacagcccgaaactgcaaggagctcctctgcccggcctctctttactcctcctctctgcccctcagctcgctcatctttcttcccgccccctctcttttccttctttggttctttgaagtgatgagctagcgcaaccacaaaccatacattccttttgtagaaaaacccgtgcctcgaatgaggcgagactcagagaggacccaggcgcggggcggacccctccaattccttcctcgcgcccccgaaagagcggcgcaccagcagccgaactgccggcgcccaggctccctggtccggccgggatgcggccggtacccgctccccgccgggaacaacctctccactcttcctgcagggagctggtgccagccgacagccgcgccagggccgctccgggtaccagggtcggatcgggtgacgtcgcgaacttgcgcctggccgccaagccggcctccaggctgaagaaggacccgccccggccttgacccgggccccgcccctccagccggggcaccgagccccggccctagctgctcgcccctactcgccggcactcgcccggctcgcccgctttcgcacccagttcacgcgccacagctatgtgtccccgagccgcgcgggcgcccgcgacgctactcctcgccctgggcgcggtgctgtggcctgcggctggcgcctgggagcttacgattttgcacaccaacgacgtgcacagccggctggagcagaccagcgaggactccagcaagtgcgtcaacgccagccgctgcatgggtggcgtggctcggctcttcaccaaggttcagcagatccgccgcgccgaacccaacgtgctgctgctggacgccggcgaccagtaccagggcactatctggttcaccgtgtacaagggcgccgaggtggcgcacttcatgaacgccctgcgctacgatgccatggtaagaccgagccgcg

SEQ ID NO: 281117 - DNA, 1000 bp, Homo Sapiens
cagcagaagcagcagcagcagcagcagcaaggccacaaggccccggctgcccaccctgaggggcagctcaagttccacccagacacaggtgctggccctagtgcagggaggaggggctgcagggctggacccctgggtctgaggttggaggggctgggcctggactccagatctgagggaagagggactgggggccagattcccagatctgagggaagagggactgggggtccggactctgggtctgagggaggaggggctgggggctgggacccctgggtgtgagggaggaggggctgggacccctgggtgtgagtgaggaggggctgggggctggacccctgggtgtgagggaggaggggctgggggctggacccctgggtgtgagggaggaggggctgggcctctgggttcgttttgtaggaggggttcggatgtcctgtgccaccattccctccctccatttccagacgatgtacctgtcccagctccagccggtgaccagaaggaggtggacacttcagaaaagaaacttctcgagcggctccctgaggttgaggtgccccagcatctgtgatctcggaccccagccctcaggattcctgatgctccaaggcgactgatgggcgctggatgaagtggcacagtcagcttccctgggggccggtgtcatgttgggctcctggggcggggcacggcctggcatttcaccgattgctgccaccccagatccacctgtctccactttcacagcctccaagtctgtggctcttcccttctgtcctccgaggggcttgccttctctcgtgtccagtgaggtgctcagtgatcggcttaacttagagaagcccgccccctccccttctccgtctgtcccaagagggtctgctctgagcctgcgttcctaggtggctcggcctcagctgcctgggttgtggccgccctagcatcctgtatgcccacagctactggaatcccgctgctgctccgggccaagctt

SEQ ID NO: 281118 - DNA, 1000 bp, Homo Sapiens
atacagacaccagatggtgaggagaggtgagctgagtggttgagggagtggcagtgaaaagcaggtgggagggaccacactgaaactctcctaacctgtccttacccacaggcttgggggagaggctcactccatggtctgggaccccagtggggaacgtctggctgtgcttatgaaaggtgagaggcaaggatgaagggctcagcccacagccatcttcccagttaatctaatgaggccgtgccctggcctggagttctcctctgcccatgtcctgggactctgccttcagagttcctcccctatccctggatccatttcttacaggaaagccaagggtacaggatggtaaaccagtcatcctcctttttcgcactcgaaacagccctgtgtttgagctccttccctggtaagtgccatgtgggcccttaggtctggacttctcaccagccttcctgcacaaacaaacccacatcccactacattcagctcccttcttgcctccggttgcctgctcaccttttcttctagtggcattatccagggggagccaggagcccagccccagctcatcactttccatccttccttcaacaaaggggccctgctcagtgtggtgagtgcgccaggctgctggggcttccaggagttggatggagaagctgagggccttggctgctgtatggctctgccaggtggcccttctttgggcccagactctgatccttttctttcccttctctgcagggctggtccacaggccgaattgcccacatcccgctgtactttgtcaatgcccagtttccacgttttagcccagtgcttgggcgggcccaggaaccccctgctgggggtggaggctctattcatgacctgcccctctttactgagacatccccaacctctgccccttgggaccctctcccagggccaccacctgttctgccccactccccacattcccacctctaagaataaataagttttccttttgttttcc

SEQ ID NO: 281119 - DNA, 1000 bp, Homo Sapiens
tagctaccagaacagtcttctgggtttaggtttctggccagatttttcatacaacctgggtacccttctttggtcttccccaggtctatctgggctagaaagctgcataaatctcagagctctcccaagactcatagcaaacctgggcttagcatgccctttaatgctctaatgctgagacagctgtactggtcttgggctcagggaagacaacagtcagtctccttagagtctgtggaagatctcctgaagaagaatggatataaacaaagccagattggggaaactagaataaatgcctaatccgtcagtgtgcagacattgtcacacatccacaagcatcaagaacatttaggaaaatatgaccttaccaactggacaaaatgaggcaccagggactggccctaaagtgatggggattgtgatctttcagacaaaaaatgtaaaatagctgttttaaggaagatcaatgaacttcaagaatatacagaaaaacaattcagaaatttatcagataatttaatgaagattgaaataataattaaaaaaaccacaaacatgccggagttgaaaaatacagggaacataatgaaaaatgaaatagagaccatcaagagcagaactgatcaaatagaataaaaacattagggaactcaaagacaggctgtttggaaataatcagaggaggtaaaaaaaaaaaagaatgaaaagacagtgaagaaggcttatggaattgatggaacaacattaaaagagaaaatattccagttgttggagttaaagagagagttgagaaagacaaagcagtgtgaaggttattcaaagaaataataataggactttccaaacctggagaaagatataaatatacaggaactggaagatcacagctaatcaatcagattcaacccaaataagaataccccaagatatattataatcaaactttggaaggtcaaagacaaatagaggaccctgaaaatagaaaaaaaaaaaaaaa

SEQ ID NO: 281120 - DNA, 1000 bp, Homo Sapiens
aggtcacagcataactgtttcccttccttattcttctatccctgcaattatcttctctttctaccctctcctttagctatcacatctactgctaccacttcctttttcacttctgcagatgagttcctaattggtttcctgaagtaatttttaaatgacctctaaaatacaggattttccagtatcgacctagtctcctaggactgtattttaacccagcacttccacactggaaagtactattaaaaaaataactaaaaatgtgtaaaacaatttagcttcaagaatattacacaccactgtaaagtcagaaacctaaatgtatgagaatttagtatataaataatagcattaatatcgtagcactttgggaggccaagacagacagatcacctgaggccaagagtacgagaccagcctggcaacacggcaagactccatctctaccaaaaaaaaaaaaaaaactttaaaaactagacgggcatggtggtgtgcacctatagtcctagctactcaggaggctgaggcaggaggatcgcccaggtcaaagttgtagtaagccataagcacaccactgcactccaacctgggcaacagagcaagaccctgtttcaaaaaatatatatagcattaccacttaaagaatattacacagccaataaaaaaggatattatatagaatatctaaggagagaaacaagatggttaggggacagtgatgagacttactttttaccacatactcttttgtaccttttgtatttgtacctcatacatgtattacctagtcaaaaaaaaaaagaaaatttaaaaaaataagcttacttttgaaatactatataggtgtattacttcttgattcacaaagatgtacaacacattgttaggtgaaaaacgaaaccacaaaacagtattacagtattgtaatattaacgtgggcaacgggtgtatacatttaagcataatattcactagaggattgaaaaaaaaaaaaaaaaaa

SEQ ID NO: 281121 - DNA, 1000 bp, Homo Sapiens
gtatgccgcccctgtcttgctgtcatgaaatcagcaagagaggatgacacatcaaataataactcggattccagcccacattggattcatcagcatttggaccaatagcccacagctgagaatgtggaatacctaaggataacaccgcttttgttctcgcaaaaacgtatctcctaatttgaggctcagatgaaatgcatcaggtcctttggggcatagatcagaagactacaaaaatgaagctgctctgaaatctcctttagccatcaccccaaccccccaaaattagtttgtgttacttatggaagatagttttctccttttacttcacttcaaaagctttttactcaaagagtatatgttccctccaggtcagctgcccccaaaccccctccttacgctttgtcacacaaaaagtgtctctgccttgagtcatctattcaagcacttacagctctggccacaacagggcattttacaggtgcgaatgacagtagcattatgagtagtgtgaattcaggtagtaaatatgaaactagggtttgaaattgataatgctttcacaacatttgcagatgttttagaaggaaaaaagttccttcctaaaataatttctctacaattggaagattggaagattcagctagttaggagcccattttttcctaatctgtgtgtgccctgtaacctgactggttaacagcagtcctttgtaaacagtgttttaaactctcctagtcaatatccaccccatccaatttatcaaggaagaaatggttcagaaaatattttcagcctacagttatgttcagtcacacacacatacaaaatgttccttttgcttttaaagtaatttttgactcccagatcagtcagagcccctacagcattgttaagaaagtatttgatttttgtctcaatgaaaataaaactatattcatttccactctattatgctctcaaatacccctaagcatctatactagcctggtatgggtat

SEQ ID NO: 281122 - DNA, 1000 bp, Homo Sapiens
gcctaatagtagataccctatgtgtatgttataactaatacatgggtgccccatacacagggcttacaatgtcggagtgataagagtaacaagaaattgtttagacctcataaaaactaagtgtgattgggcggttcagttttgcaagatgaaaagagttatggagatggatggtggtgatggttccacgacagtgttaatgtgctgaatgccactgatctatacacttacagatggttaagatagtaattttatgtttattttactacaatacaaaaaaattggagtaggccaggcgaggtggctcacatctataatcccagcactttggcaggcccaggtggacggatcgcttgaggtcaggagttcaagaccaacctggccaacatggtaaaaccccgtctctactaaaaatacaaaatctagctgtcaggcctctgagcccaagccaagccatcgcatcccgtgacttgcacatatacacccagatggcctgaagtaactgaagatccacaaaagaagtaaaaatagccttaaggatgacattccaccattgtgatttgttcctgccccaccctaactgatcaatgtactttgtaatctcccccacccttaagaagtttctttgtaattctccccacccttgagaatgtactttgtgagatccacccctgcccgcaaaacattgctcttaacttcaccgcctgacccaaaacctgtaagaactaatgataatccatctcccttcgctgactctcttttcggactcagcccgcctgcatccaggtgaaataaacagccgtgttgctcacacaaagcctgtttggtggtctcttcacacggacgcacatgaaatttggtgccgtgactcggatcgggggacctcccttgggagatcaatccccctgtcctcctgctctttgctccatgagaaagatccacctacgacctcaggtcctcagaccgaccagcccaaaaaacatctcaccaatttcaaatc

SEQ ID NO: 281123 - DNA, 1000 bp, Homo Sapiens; identical to SEQ ID NO: 201665

SEQ ID NO: 281124 - DNA, 1000 bp, Homo Sapiens
ccttgcaagcaggtattttctacagcaaatagtatttcacttcctagtttttgctccatcaggtttttgatctataacacaagaaagtagattgtagtgtgaaaatttctgactaaggtcatcagagtacttcatttaagatgtggactctctctcctctggatagtcacacagtctccctaaatgaagaagtgatataaggatcatcccttattcctgagttctagtttactgtatagtaaaaatataatgtttaagactgaaacaaaactgtaaactcagacatctagtaaacattaaaatcacaaaaagccaaactaaattatttttccccattcaaatatttggactccccaagataatattattcattctaaatgcgcttttctcattgttctttgaactatataataaagcttcccaacgtttttctctctatgcacaaatagaaaattataacatttttatgacatactggatgaggctactctcatatggcagcaaaaaccctggggttctcatccaggcctctcaacacactggtggttgggaaactgctatatagtatgattctttgtctatttatcccctccctgcctcaactgatagttactagataacaagatctggatgttatccatctgtgtatttctggaacttagcaaaatactttatagaatatgtttcataactgttgatttaaattgaatcatctggagatttctcataaaacaaccaaaggtttacaggttgtatttgaggaaccattgattttgatgaatacatttttaggaaaatgttttttcatgtcttaatatctctgacactttgtagtagtagttcactctctttaacagtcttttgtttatctcctaattgtgctagttcattatgctatttggaaaaatgaactatttattcacttagaatgaaagttaattgagttaattctcatgtacattttaagaggcaaatcatgaatatattgtacaaatttttt

SEQ ID NO: 281125 - DNA, 1000 bp, Homo Sapiens
tcttgtgctgttcactatgtaaattgtgtgatggtgggttcagtagttattgctgtaaatgttagggcagggcaatatgttactatgaagtttattgacagtatactccaaatagtgtttgtgattcaaaagcaatatctttgatagttggcatttgcaattcctttatataatcttttatgaaaaaaattgcagagaaagtaaaatgtagcttaaaatacagtatccaaaaaaatggaaaagggcaaaccgtggattagatagaaatggcaattcttataaaaagggttgcatgcttacatgaatggctttccatgtatatactcagtcattcaacagttttttttttagagccccatccttattttttatacactttgagagcataatgaaaagaaaagctacctgcaaaagttttggacttacctcaaagaggatatactacattcctcaaaaggccttcttccaggaatagtatttcataacctggaggttggaaaaatctggattagttacaaaaaaatctgagtgtttctagcggacacagatatttgtctaggaggggactaggttgtagcagtggtagtgccttacaagataaatcatgggctttatttacttacgagtggaaaagttgcggaaggtgccttacagactttttttttgcgttaagtatgtgttttcccataggaattaatttataaatggtggtttgatttcctcaagtcaacctttaaaagtatatttagccaaaatatagcttaaatatattactagtaataaatttagtactgtgggtctctcattctcaaaatgagcatttactaatttctgaacactgtgctaggtcctgggaataccaaattgaataagacatagtctatttttctgaagggtttatagcagagtcccctgtgttaataatgaaggagtgtgtggtatgtgaatcatatatcaatagggttgttaaaaataatgaaaaaaggagaagagggaattc

SEQ ID NO: 281126 - DNA, 1000 bp, Homo Sapiens
aaattggaagggcgattagaatatgctgtgtcttcattaaagttgctctgttaattagttgacacatggttatgctttccagtgggatgaagtgaaactcccaagtgtgttttgtattgttggtgtttttatatttctcagccatcccccaatcacattttagggttattactagattgacttcccccaaataaagtgtctgctgagtgggaggatggaacattctaaactcaatattccagagcctagaatctaattgtttctgccactcacggtgtggccttgggcaagtcccttattctgtctgtgccttcatttccttcccagtccagagagggcagtttgatttgataattttaaaggtgccttttaccaaaattttgtgatttcttgaaaatgatgtttgcgagtcacccacacctttggggatgagagactaatagcagataccctcagagattgggatggagattactgagctttcttatatatgccattggttgtcatttatactcttctgaggttttcagaacaggaaaataggtggggttaactctgcccgtgagaaacatcttgagcgaactatgatttcagttgaaagatgtgtttttgtgagtagagcaccgcagaagaactgaagactgttgtgtgctccccgcagaaggggctaccatgatcctttcctcctgtgagtaagatgggctttgtcatttatttttggggcttgttctggggcctgttattcttgaacagcagaggaagttttttttttccaaggcatagagcttggggacattaaaagataatttcctcagatgttgtgacagagttttgtttcttatttaaagaaccacagtgatgatgtaattctaataaaggttcagcattgagaacataaatgaaagaaaaacagaaagagtgtccagaaatctgcatatgtgtgtgtagaaatgcaatcagtatgaagtacttgtttttagaatgagactgtaatgagctc

SEQ ID NO: 281127 - DNA, 1000 bp, Homo Sapiens
aaccaataaatttccattatagtttaagagaatttaagatagatgtgtgtattagttcattctcacactgctaataaagacaaccaagactgggtaattaacaaagaaaaagagatttaatgggctcacagttccacatggctggggaggcctcacaatcatggcagaaggtgaaagaggagcaaaggcatgtcttacatggcaggaggcaagagagcatgtgcaggggaactgtccttcataaaaccatcagatcttgtgagacttattcactatcacaagagcagcatgggaaaaaaacacccccatgattcaattacctcccactgagtccctcccatgacattggggattgtgggagctacaattcaagatgagatttggttgaggacgcagccaaactatgtcagtctcttatttgccaacaaaagcatcctaactgatagaggccagacagatttgtttctttttgttttttcaatcttttgttgtgaagaagtaagcataaactctcaataggttacgttttacaagcctctgatgaagttcaaaggacaaccatgcttaggatttccaggacaacctggaaaaaaaaacaggttgagaaataggtgtgttaatctcccttccctctgctcctccctctggccttcctttctttgatggaataggccctaggacacctttctaaaaagactccctgtggtgttcagaatcactcctacagtcaggttctccacaatggatctcagtgctgcaagtcaccgcatacctctaagtgatggaaacagcattcccatcatcggacttggtacctactcagaacctaaatcggtaagcttattttttctctctttgcttgcttgtttgtttcttttaacatttgcctatagcataatctgcaatttattttaagcagatctcattgacttactttttgtagtaatggaagcaacctcaatttgtaataatgaaaggactactatttactgaataggta

SEQ ID NO: 281128 - DNA, 1000 bp, Homo Sapiens
caggtaacagtgaggacactctggcccctgtcctgattttcggtatataccattgatttgcagattaactgtgattctcacactccctctgtaaccttctaagcatgcaaacgtcaaggaagcttagtcctcagatctgcccattatcctgcatatggtggttaaaaatacaaaccccagccttaaaactactggataatgggtcaagttactcaacctctctctatttcttcttttctcatctaaaatataggggtaataattataatacctacctcatatggttattgaaggattaaatgagttaatacacatcaagtgcttaagtgttagataatattattttttaagcccctttggcgtgcacacattctcagattgtcaactttgcagttgcaaagcgtagaacatatacctgaaagagacatgactgattggctaaccagcttcttatttctaaagaggagaaaactaaagtccagagaaaagacgggtcttttcccaaaattaaatggctattagggatagtgtgtgagctagcatgcaggctccctgccatctgaggcaactcttcagcattccatggttattgggcaatgagaagatcagatttctatagagtaaataaccatttcctagattaaataatcttactcgcttaggtttttgggatgggcatatagtggaggacttcatagcttaagaatatactgccaattctgagtgtgtgaattcagaaagaaatataaggatttcagagggcaaaatgataagtagccgatggccagagttcccacacttcgagggccatggacttttgctttggcagtaacagatggctggatagtgaccaagggatgctgcctaggaagagcaggtaatgggtttgccagctggagctgaaaacattaaaagaccagtggttcgagtgggcacggtggctcacacctatagtcccagctgaggcaagtggatcgcttgagcccaggagttcaagatc

SEQ ID NO: 281129 - DNA, 1000 bp, Homo Sapiens
ttctgctggtacgatttgattcctgttggaatgtttaaattacactaagtgtactactttatataatcaatgaaattgctagacatgttttagcaggacttttctaggaaagacttatgtataattgctttttaaaatgcagtgctttactttaaactaaggggaactttgcggaggtgaaaacctttgctgggttttctgttcaataaagttttactatgaatgaccctggcagagactcctgtcatcctagcagtttactctgcgtttgttgtatctagacagtcaacaactgagttgtcggtgtttaacctgaatgcttgtttttcagaagaagactgtttgtgccggtaagaatgatcaggtaaggccatgaaagtttttgttggtgtttttgtttttgagatggggtcttgctttgttccttgggccagagtacattggctactcacaagtgggctggtagctggctacagccccagactcctggcttaagccacctcctgcctcagccaccctggcagctgggactacaggcatgcgccatcacactcagcttgaaagttttaatttactaagaatatacctgtgtttccccccatttcctgatttaaacagtactggcttatataggaacccatcaaagttaaattccccaaatttaaatttagtaaatttagtggtttcaccttggcaaatctgcaatagtttcaccagctcaaatttcatgcttttgtaagctgagcttatgtttgtgattttaatcctttaagtactactgtggtaactaatcatttttttgttttttttggtggtgtttttgtttttgttttgagatggagtctcactctgttgcccaggctggagtgctgtggcgcgatctcggctcactgcaacctctacctcctgagttcaagcgattctcctgcctcagcctcccgaatagctgggattacaggtgcccaccacaatgtctggctaattttttgtatttttagta

SEQ ID NO: 281130 - DNA, 1000 bp, Homo Sapiens
gcagcgatggaagctcatgatgtcatatgccaaaccacattacatgttgggtttgctatgcagagtggattgttcacataatatgtttctaatttttcatgcttgatttttgcctgtatgtttgtactctgacatgtttgtattcatccacccgtcaattcatttgttcatccattccacaagtattcacaaagcccctggtcctgtgtgtgttccctgctggtgaggtctcagcgacaggtagtgggcacccttcccaatgcttacggttggtagaagacggggcaattgcatgaaaacactgcacttttataatgtattttttaaaagagcccacatagaccagttttcctaattgtctctggaaagctctggttgattattgataagtaattgaatatcccttgcggatccccggtgacatctaaagatacagggactgacttaccgaagctgcttttgcatgtgttgaagggctgcatgcaggaagggcttggggacgttcacagatttctccttaggaaatggctatgttagaggagcctcctgcagcagggttgatagggagaagcacttggggtttcaaagggggaggagaaaatgggcccattggggtcagatcaaagtaggtagtcaataaaaggtgcattgaaaaggatgcttaaatagacttcttttgctaatctgacctcttcaggctttacctgtagggatctgccaggctcctggaactccaaggcctgagccagcaagccaagggaggctgtctgtcatggcagcccctcctttgatcgaaatctttctggttaaaaaaaaaaaaaaaattagctgggtgcggtgatgcacgcctgtaataccagctacttgggaggctgagacaggagaatcgcttgaacctaggatgtggaggctgaagtgagccaagatagggccagtgcactccagcctgggtgatagagtgacactgtctcaagaaaaaaaaaaaaaaaaaaaaaagctt

SEQ ID NO: 281131 - DNA, 778 bp, Homo Sapiens
ccagcactttgggaggctgaagtgggcagatcacctgaggtcgggagttcgagaccagcctgaccaacatggagaaaccctgtctctactaaaaatacaaaattagccgggtgtggtggtgcatgcctgtaatcccagctactcgggagactgaggcagaagaaccgcttgaacccaggagatggaggtttgcagtgagcagagaacacgccattgcactccaacctgggcaacaagagcaaaactacgtctcaaaaaaaaaaaaatacaaacaattagccaggcatggtggtgctcgcctataatcccagctactcaggaagatgaagcagcagaatcgcttgaacccgggaggcagaggttgcggtgagccgagatcacaccactgcactccagcctgggcgacacagcaagactcagtctcaaaaaaaaaaaaaaaaaaaaaaaaaaaaaaaaaacacacacacatggatgcttattctccaccctgttccacatctggcattttttgtgcatcttccaacttaagtacacagcagcaagtgctctacatctttgggtagctacacagaaccccactgtggctcactgtggacacaccattgaaaaccttgtatgtaggtcacttagtacaaggaggaacacaactgttgaagaagtacctaaaaattgaattacttgaacaagtgtgggacatttgctgttttgatggattttaccacactgtcttcccatttatgcttaccagcaatacataggaacacttgggtccctgcag

SEQ ID NO: 281132 - DNA, 1000 bp, Homo Sapiens
caatcagtgccctgtcaaaacagaccactgggctctaccaatcagcaggatgtgggtggggccagataagagaataaaagcaggctgcccgagccagcagtggcaacccgctcgggtccccttccacactgtggaagctttgttctttcgctctttgcaataaatcttgctgctgctcactgtttgggtctacactgcctttatgagctgtaacgctcaccgcgaaggtctgcagcttcactcttgaagccagcgagaccacgaacccaccgggaggaacgaacaactccagaggcgccgccttaagagctggaacgttcactgtgaaggtctgcagcttcactcctgagccagcgagaccacgaacccatcagaaggaagaaactccgaacacatccaaacatcagaacgaacaaactccacacacgcagcctttaagaactgtaacactcaccacgagggtccccggcttcattcttgaagtcagtgaaacagtgaaaccaagaacccaccaattccggacacagtatgtcagaaacaatatgagtcactaaatcaatatacttctcaacaatttccaacagcccttgcaattaacttggccatgtgactggttgtgactaaaataatgtggagataataatgtgttactccctgaggcagagtgcccttctatcattctctttcccttcctctatgtggcagaaagtaaaagattctgaaatgataaagtcaatcacaggaaggcacctggactcctggcccactgcttggaggagagcactcaggaccatgaacatctgactgtgacgtagcaataaagaaacccacgtttcatatgaaactgcttaaaattaatggcacaagtcatgtttttgatgttgcacatttgtctttatttgtggcttgttttgcttccacatcaatccactcaaggcctacattctgctataatgcaatttcaagttctttacaggccgagaaaaatgaatctgaattc

SEQ ID NO: 281133 - DNA, 1000 bp, Homo Sapiens
ttagaggttgaggtcaagtttaatacccaagtcaccgagaaggtggctttgctttttcagaggcctttgcttttcactgttgcaattgtgtgccatgcgtcgtctgggaatcagtgagtgcccgtggagtgaagtcccgatttctgggtgccttctggatgctttgtaaagaaaggtgttaggatacgttgtctacttgaaaattgcaggctgggcacagtggctcatacctgtaatcctagcactttgggaggctgaggtggatggatcacttggggtcaggagtttgagaccagcctggccaatatggtgaaaccctgtctctactaaaaatacaaaaattacctgggcatggtagtgcacgcctgtaatcccagctactcgggagtctgaggcaggagaatcgcttgaacctgggaggcggaggttgtagtgagccgagattgtgccactgcattccagcctgggcaacagagtgagactccatctcaaaaaaaaaaaaaaatttaaaaatttaaaaaaaagaaaattgctaagagattagattttaagtgttctcaccaaaaaaaaaaaaaagcctaaaataggtttatgaagtaatgcatatgtgaattagcttgatttagccattccactaagtgtaccaaaacatcacgttgtatgccataaatatatacaacttccatttgttaatttagacaattattttatttataaatttttaaaagaaatgcgttaggtaaaaaaaaaaaataatggtttatttgaatttgatattgtggtgagcaaaattgaagggaaacaattgctatcattgaaattaaaaggatttttctatggaaaatatttgcctctgatagacatttgtaagcatacatttttctcctgcatattcgctactgttttcttatttttgcatgttcctgtttttgtttttcaggtggcaccactgtgctggccacagaaaagcccacggtcatagacagcaccatacaatcag

SEQ ID NO: 281134 - DNA, 1000 bp, Homo Sapiens
tagcttgcccaaagttacacagctaggatgcggccaggctgggctttgaacccaggcagtctaattccagagctgctgctgctaactactgtgctctgaagagcctctgggctggggaggctcagtcacttcaccctgacataggcagtgcctgcaatctctcatgaattttatgtatcacagatgaatacgaggtggactggagcaattcttcttctgcaacctcagggtctggcgccccctcgaccgacaaagaaaagagctggctgtacaccctggatcccatcctcatcaccatcatcgccatgagctcactgggcgtcctcctgggggccacctgtgcaggcctcctgctctactgcacctgttcctactcgggcctgagctcccgaagctgcaccacactggagaactacaacttcgagctctacgatggccttaagcacaaggtcaagatgaaccaccaaaagtgctgctccgaggcatgacggattgcacctgaatcctatctgacgtttcattccagcaagaggggctggggaagattacatttttttttcctttggaaactgaatgccataatctcgatcaaaccgatccagaataccgaaggtatggacaggacagaaaagcgagtcgcaggaggaagggagatgcagccgcacaggggatgattaccctcctaggaccgcggtggctaagtcattgcaggaacggggctgtgttctctgctgggacaaaacaggagctcatctctttggggtcacagttctattttgtttgtgagtttgtattattattattattattattattatattttatttctttggtctgtgagcaactcaaagaggcagaagaggagaatgacttttccagaatagaagtggagcagtgatcattattctccgctttctctttctaatcaacacttgaaaagcaaagtgtcttttcagcctttccatctttacaaataaaactcaaaaaagctgtccagctt

SEQ ID NO: 281135 - DNA, 1000 bp, Homo Sapiens
tgggctggaaacggagttgaggttgaaaataactgagcttcctcttgcagctgtgagcacaagccacaccaccatcagtggaggtggcagccgaggaggtggcggcggtggctacggctctggaggtagcagctatggctccggaggtggtagctatggttctggaggtggcggcggcggcggccgtggcagctatggctccggaggtagcagctacggctccggaggtggcagctatggctctggaggtggcggcggcggccatggcagctacggctccggaagcagcagtgggggctacagaggtggctctggaggcggcggcggcggcagctctggcggccggggctctggcggcgggagctctggaggctccataggaggccggggatccagctctgggggtgtcaagtcctctggtggcagttccagcgtgaggtttgtttctaccacttattccggagtaaccagataaagagatgccctctgtttcattagctctagttctcccccatcatcactaacaaatatgcttggcaagaccgaggtcgatttgtcccagccttaccggagaaaagagctatggttagttacactagctcatcctattcccccagctctttcttttctgctgtttcccaatgaagttttcagatcagtggcaatctcagtcccctggctatgaccctgctttgttctttccctgagaaacagttcagcagtgaccaccacccacatgacatttcaaagcacctccttaagccagccagagtaggaccagttagacccagggtgtggacagctccttagcatcttatctctgtgctgttttggttttgtacataaggtgtaagcaagttgtttttcttttgtggagaggtcttaaactccccatttccttgttttgctgcaataaactgcatttgaaattctccatgtctcgatcgcccttgtttacggctctgtctaacctggatgggtgttttgtgaggtaaaagaa

SEQ ID NO: 281136 - DNA, 1000 bp, Homo Sapiens
tagaagaaggagaaatgaaggtaattccccctgaaatgttatagattgccaaaggcgtctctgtttcagtcatattatcattactattgatatgaataaggatagcactttcaacttacctttaaaacaaattattacatgtgatcaaagcagtaccatatattgagcaataaaatgtctttttgcttttctggctttgcctttactaaaggtttttatgattataatataaatatatgattaaacctttctgttttgactaggccatgaagaaaataaaatttagagaattagatatgaccaggtcacaattagctgatggtcctgtatttggatatttccttttgttttgtttttttaacatactgaatgttgtgcctagatgacactttgtttctctccctttttggtctataccctccttcttttcccttctcttactgcacctttaattgatatttggacattggtcagttaatcctggttacatccctaaacacatggacagaaaataagagcagggactgagagatacagagatggattgaaaagcaaaagcaacattgaattttggattttctcattcctaaggaactatgctaaataaagatacaaagataataagacactctccaagctaaagctttagttaaggaaaaagaatattgacatttaaaagatactattggccaggcacagtggctatgcctgtaatcccagcacttttaggaggacatggcaggcggattacttgagctcaggagttcaagtcaaacctgggcaacacggtgaaaccccgtctctaccaaaaatacaaaaattagctgggtgcagtaccacacacttgtagtcccagctacccaggaggctgggcaaaagattccttgagccagggaggtcaaggctgcaatgagccgcgtttgtgccactgcactctagcctgggtcacaaagtgagaccctgtgtgagatatatatatatatatatatatatatatata

SEQ ID NO: 281137 - DNA, 1000 bp, Homo Sapiens
aatataattaaccttatgaaagcacaaccaactcagatattgttgaggctctgaacaagaaggaacacagagggtgcgacagctcagaccctgatacttcatgtgtgctaactccatatacagaagaaaaataattaatgaggaatttgataatatgatgcagaatcataacattgcacctggtttgccacctcagaatttttcaatgtctgtcacagttccagtgaaaagccccaatgctttgtcctacactaacccagggagttcactgttgtccccatctttggcagccagctcaacgttaacagatttaaacacgctctctccacctcaaaccatattacatagaaatgtgtcccctggagctcctcagagaccaccaagtactggcaatgcaggtgggatgttgggcactacagacttcacagtgccaaatggaactggaagcagcccagtggggaatgaatttgtaaactcaagagcttctccaaatttgattagagctactggtgcaaatagtttaggtaaagtcatgcctacaaagtctccccctccaccaggtggcagtaatcttggaatgaacagtggaaaaccagatcttcgagttgtcatccccgcttcaagcaagggcatgacacctccactagtaagttgaacctttcttcaacttcattctttaaaacatgtattttatacatagcctgtagcttcctttggaattttctgcgccaactgtagaatctatacctattcctaatgaatatttccattcaaaattagtatttgaagggacaacactatcttaaatacacaaaaatcagattatggaaatttgcttaatggctatttaaaattaaagctaaatatgaacatggatggaactggagggttattgtgttaaatgaaataagccaggcatggaaagatagatattgcatgttctcactcatgtgtgggacctaaaaaatttgatcttgtgggagatagagaataggatgat

SEQ ID NO: 281138 - DNA, 1000 bp, Homo Sapiens
ctagtagtatgacctgtttgaatataatttattcatttataaatgaataagaaaataaaatccagcttttatgatcttgaagattaaatgaaatggtgcacattaagcaattagcaaagttcctagtaaaatttgctcaataagtaattatattttattaagtaattactttttcaccaaatctgactacaatacgtgaatacacagtcaaatttcacaattcctgacagtctctctaaatgctaattttaaactcaagtacataaaaattaaagtcacaaatttctctgtcacgagctatagtgtaccatactaagtgatttatatagattagttcatttaatccacggaacaaatatatgaagaaattatcagtttgtctacatgttacaaatgtagaaacagaaacatagagaagtcaagtcatcatgccccaagtcaaagagttaataagtggcagaatcacaactcaaaaccagacaatccaactaaaaacctgattctttagcccaccatattatcagtggtcccataacttaaaattcagatttgactttaaaattggaatctgaagaacaccaagcaattctgtaaaccattttctcctttgagattcatgaggacaaaattcactcacctctgtttcctctaattatagtcatatattaataatgtataaatgttttctcaagaggatctttataaaaggggccttcccacattagtttaactgcttaggtactgattctcttctacttcctcaaccaacacttttagaactatcatctaagattacatcggtcaaattttcttatgcttacaataaataaatactttttaagccagcaacttcacttcacttactatgttttattacatattattcattctaagtgtagtcctagatatagtagagtactacgccaagacatcaggtcaaggacaagaagatgatcctaaaagcagaagagatgagaaacaaatagcataaaaggagctc

SEQ ID NO: 281139 - DNA, 1000 bp, Homo Sapiens
gatgataaagatttctatacagagaaagggagtaatcatcacttgttgaaaacattggttttattttttccaggtctgagcaaataaggtgtataaaaaatggtaggtatctgtttaaatatttaactgattttataatagcaaccttttgctcctaggttacatagtgttaaatattgtgttcatttgtattttccaatccaataagaactttttttttttacctctgcaggaatctgtcttggaggacatcagaaggtgaattttccaagttcttggacaacctagctgttgaaaagctttctgggtttggggggtatttcagatgtaccttaaagtgttagcagacacagattaagacactgggagccaatgaaacagcagttgagggtttgctgtgtatcacatttctgtattttatcacccccttcctgcaacattatttatctggaatctacctgcccttttgttttttagatacaagggcttggttttgttacccaggctggtttcaaggccatagctttaagagatcctctcaccacagatttccaaagtgctgggattgcaggtgtgattcatggcacccagactttgctgcctttcttacatgatccaggcccagaacccaaactcaggcactgtatagatgaccactttcgtaaactactgacctagcttgttgccaattgttgattgaacttcccataactccacttcgtgtctgttcctctgtatacagccaccttctgttcccgtcatgagcctttaggtctccatttgcatattgcaaatactatgttccatgtaggtagctcattcagggccttgctcttcacttcaaaaaaggttcccttgaggactggctgtcaatttgtgttgctgtgttggttgttgatgaaaataataaaatgattgattacatagtcctgtttactttttttgtgtgtatgtgtctcttagcatcagtgtgtaaatttccatgggaaactggctttcc

SEQ ID NO: 281140 - DNA, 1000 bp, Homo Sapiens
ttttgatattccctgccccagagctcatgaccagaacccagagctgatttaaaatattttgaaaaatggaggaggcagactgctcccagcagcctgtcaatggctgctcatctgtccatggagatggttacaggcaggtgtagtcaaaatgattgattccttgggtttgggggtgaataggctgggaaatttctgagccttttttttttgtcacagtgccctcaagttgaagtgatgagctggatttctttcttgttccatactgggcggcatgctcctcccatctccaccccttggtttgggggcttccagctcattggcaaaatctctctagttgccttcctttcaagctggagcctgacttttccccaatgtacattttttttttctccacaaagagttccttctctaatgtccccatctggtattaagtgcactttaaagaaaggggcagggtggattttcaagaggtgggaagctctaaggcttgaccgtgaggggtcttctcccagccattctcagcccatatgcagcaccctccatactgaagaggactgttgttttagtttcagacggtcctttccttccacatggtgctaaggtggttttctaggtaactgcagggatggaggtcactagccattccaaaccaggagagaaagtctggtgtcctgatatccagtcttttctaggaggaagaccaagattctccagcggcagggcagcctatcacccaacttctaagtcaggaaaggaagctgagtgggaatgccagctggtaagcgcaggctgcactggcccatgactccttcaaggaaaagaggccctgctcctttacctgctgagctccttttagcagttagggagaactgcagggggaaaaataccagtggagtgtggaataaatccaaagcagtgatttttaaatgtttttcaaaaacaaatcttacatagaaccccaatataaaaaataaagtaatgcagacctgggcagtttgca

SEQ ID NO: 281141 - DNA, 1000 bp, Homo Sapiens
cttaggcaacatcttagcgttaacatcaaaacagccctgatatccacacaaaggtgtgacaaaatgccacacatattgctttacaattaatacatatgtaaccattacaaacagaagtggctgccgggctcatgattctgacccttaacctctcctcccctcctcaaaaggtttcttctggtaacagatccagttgcctggccacagtatgacctagccaggctgaccacaggacctgactccttggcctgagtcacagacctggaaggctgtgctctaggactgcgctcagtcacactgcccccgacatggagaaggccacttgcagccaaaaacaatgtggccaagcagagacatacagatgagtggcagagcaccctgacagtgaccaagtccctgactcttccttggcttcagtgacccaacgaggaatcctattagtccccttttctgcttaagaaaatctgaattgggttcctgacacaaccagaatgcttggggaaccagggaagagggggcaataggtaaaaagcagcttctagtctgcgatgagcttcccctctgtgggtcataattatatattatgagacagactatactatttgaaaagatactttttaatgccccagatcctagaacattaatcagcacctagtaggtgtggaacaaacgtcttaccttaacagcgagtcaatgaaccagggaggggaggaagaagctttcccggagatgccggcccctcagtttccgggttcgcctggcgctcagccaggccagtcacagagagacgagcccggcgattcgccagcggaatgtccaggggcggggcagcgagcgaggcgaagcaatcctgaggcggtctagggggcggggcgttcagggggcgtggccgtgcaggggcgggctccgagcgtggggtgggcgcttgcgcactgccgctgcggctgttgctgcggagccaggaggggaagcgatggctgggcccgcgtggatctccaag

SEQ ID NO: 281142 - DNA, 1000 bp, Homo Sapiens
gacttctcaggttagccagcagctcactcatacttttttctctctctattccattggctgatctgctgacttggggctctgaatctggatactctccatcaccggttggctgctgtcaccatttccttcctcgttgatggcactactagtggtcaagcagaggatgcagatgtacaactcaccataccaccgggtgacagactgtgtacgggcagtgtggcaaaatgaaggggccggggccttttaccgcagctacaccacccagctgaccatgaacgttcctttccaagccattcacttcatgacctatgaattcctgcaggagcactttaacccccagagacggtacaacccaagctcccacgtcctctctggagcttgcgcaggagctgtagctgccgcagccacaaccccactggacgtttgcaaaacactgctcaacacccaggagtccttggctttgaactcacacattacaggacatatcacaggcatggctagtgccttcaggacggtatatcaagtaggtggggtgaccgcctatttccgaggggtgcaggccagagtaatttaccagatcccctccacagccatcgcatggtctgtgtatgagttcttcaaatacctaatcactaaaaggcaagaagagtggagggctggcaagtgaagtagcactgaacgaagccaggggttcagatgacactgctgcatcctggtcacattctctgtctcctggaatgctcccacctcaagtggagttagaaggaaggtagaggggctctcccccaggattttggtgttttgactaacaccagttcctgccaacctctgttgccaccacctttccttccaggccctaagcacgtgcagcaaagcacaccacagcacctttgataacctctctccatcctgggcctgatgacctgctctagactgttatagagggataagcagctcattcccctggttcctaataaaaagcctttaaattaaaaaaaaa

SEQ ID NO: 281143 - DNA, 1000 bp, Homo Sapiens
aacattttgtggaatagcagcaaatctacaagagaccctggttggtttttcgttttgttttctttgttttttcccccttctcctgaatcagcagggatggaaggagggtagggaagttatgaattactccttccagtagtagctctgaagtgtcacatttaatatcagttttttttaaacatgattctagttaaatgtagaagagagaagaaagaggaagtgttcacttttttaatacactgatttagaaatttgatgtcttatatcagtagttctgaggtattgatagcttgctttatttctgcctttacgttgacagtgttgaagcagggtgaataactagggcatatatttttttttttttttgtaagctgtttcatgatgttttctttggaatttccggataagttcaggaaaacattctgcatgttgtatctagtctgatgtacttatccatctcattacaaacaaaaacacacagaactgcatttgtagctctgtaatccttgaatacggaagtaaattttcttctttcctgactttgacattgtagctatactgtttccatttttgtttttacaaatcctttgggtctaattctgtgagcctacctatagcactggattaaaatgtctgcatcatttctttagttatccagttaactttaaaactgttgtaaaagtgtaaaccagcccatgacaggtttttgtacatgttaaagaacttcattgttcagttttcatgattattgtgtaaggaagactgatgtagatgttctgtgctgtcctggaccatgttaattacacttacgacgtattttagttccacatcacaatgatttgtccccagtgacccttttatcctttctaggcacatttcttgttgttgttgttgttgcagttcccctttgcattgtattgctttgacaactgtaatttgaatcagatctgaaagaggtccagaataaaatatattttgatattaaaaaaagaaaaaaaat

SEQ ID NO: 281144 - DNA, 1000 bp, Homo Sapiens
agaactaaggggaacaaatttaagtttgttgcaacttagccacacatgcttccctggtaccagctggaatcagcagctcacaggcatcttcaggacacttcagtgtatatgacacagtactttgttagcgtctgcgtgtgtatggaaagttgacaaaaaatggcatgaaaagatcatgattggattttcttttaaacctgcccttctgtaaaaaatagtttatatatttttaaattagtaggtatgtgtggcttccttttttcctaacattcccagcaaatttttgctgctaagactatcactgttaaagtgaaaattacagggaaaaatgtgatgaatataccgtaactcaaaatgtgatattttcttaaaatcactcttttatgctttaggaactgggttgggtctccactttggattattagtgttaaagggcctgagtatacgtggatttcattgtaaaatttaactccttgtcttttacttggggcacggggccctgggagggctttccctactttccccactatgttaacaggtaattctgatttatgcctttagtttgacttatttttaacaaaatattagaagttatgctttaaaatgtttaaatgtggactgaaattttcatcttttgtttgagaatctatgaagtgtatcatatacgtggcctaaagcaaggtgtgtattttgttattctgaaattgttttgcatctggacaaatactaaatatcccagtggccttttttttttttttttaaacctgtgtatccatctcatccttttgcgcattcctagtaagcaaaaaaatttgttatgccatcttcattattcgaattacagactgaaaaaatatggccagtttttaaagaagtttagattatgttttccatggaaggacaagtctgactgttcataggctgattttctttaagaggattattctgttttacaatttcaattctagatcacattttatatatgctgcatgccaaaaaa

SEQ ID NO: 281145 - DNA, 1000 bp, Homo Sapiens; identical to SEQ ID NO: 195501

SEQ ID NO: 281146 - DNA, 1000 bp, Homo Sapiens; identical to SEQ ID NO: 195512

SEQ ID NO: 281147 - DNA, 1000 bp, Homo Sapiens
ccaaatggaatatacagaaagctacaaatggaatgccttagctgcagtttgagggtgggatatccatgtttttcgtcagcctttaagtctttgctcaattcttttccctaactgcttttcaaactcatttgagttgaagggaaaagaggagaagggaatggagaaaacaactgaagggaaaagaggaggcaagaattttctctttctcaaaggaaatactaaaccttgcactctgcacattcaggaaaaatatgatttgatgatagcctcgcagtcagtttctccctattcaggaaatattctcagatggaaacaaaattaacttcttaccattaatcctagaagaatgttttcaaatgtttggtttgaggccatgttttaaacagagacctgttgaaaatcaatagtccccactcttcagtgtcccgtgctcaccatcatttccatgtttgtcttcctaggacctcaatacagtctccatcttcatatggtaacagctccccacctctgaacaaaatgaacagcatgaacaagctgccttctgtgagccagcttatcaaccctcagcagcgcaacgccctcactcctacaaccattcctgatggcatgggagccaacagtaagagcatctccttttagctgtggctgaaggatgaacaggctagcttaggacaagactctgtgatggggaaggcatgttcttaagctaaatgagagacacagtgggacagatcagatcaaagtggagtggcttgggtttctgactgaacctttcacttttgaggtttatcattcattgcaaaatatactactggtagagatagggacggatgtttctttagtgtagggataaggatttctgtgaaaagaacagtctacttgctgctatcctggatggagactcaccacctgcagcctttgaaatagtcaaaaggaaacaaatgcaacatgcataaagtagcatgttgcagtgaacttaaaatctagagaaataggccgg

SEQ ID NO: 281148 - DNA, 1000 bp, Homo Sapiens; identical to SEQ ID NO: 114729

SEQ ID NO: 281149 - DNA, 1000 bp, Homo Sapiens
cacatctggttctgttccagctctgcagagccaggctgaccggggggcatgttgttcatcgtgacctcttctggggaggaagaaactggcaagggctcctggcctctgccccagggatgcctgtgccagagccccctcgcctcgtggtctaatagtgcatcctccggcctgggctgcagggcaggggccggggcagggtgggccctcagcccgtgccatccagcccacctggggcacccccatggctgtcagcccctcccagggttggggtgtttgggctccatctctcccccggggctgaggtggagaccaggcagagcagtgggctccccccaagatgcctgtggacaggctctagggtctgcatggcgccgaggggctctggggaggcctctctgggggtactcagggccccctgcttcaccgtggccgcctccccccggcggggccgcgctcgatagggataaacaaagggcatcctgaggaaactcttatcagaacattacacctcccagagctgttttgttaggagcctgctataaatttttatcatttcaaaatatttttgtagcaccgcgtcgctccctgtgacgcatcgccctggggtggggccattctctgctgggtttatttctcacccatctcccttgggggtccctgggtgtggcagtgggagacatagctaggctgatgtgaggggtgggtggctgacctgtgctgaccttcctgttgttggcaggatggctgcaggccaggtttggggggcctcaaccctctcctggagcgcctgtgagatggtcagcgtggagcgcaagtgctggacaggtggcccgtgtgccccacagggatggctcaggggactgtccacctcacccctgcacctctcagcctctgccgccgggcacccccccccaggctcctggtgccagatgatgacgacctgggtggaaacctaccctgtgggcacccatgtccgagccccctggcatttctgcaatgc

SEQ ID NO: 281150 - DNA, 1000 bp, Homo Sapiens
  misc_feature (483)..(483): n is a, c, g, or t
tttctatcttccacttaataataaattgaggacttcatgtccctttgtctaaatattttccaagatcaagggctttgttttatataatcacagtgcaattatcaaactcaggaaatttagcattagtacagtactatgatctaatctgtaatccatgttcaaattttgtcaattgtcccaataatgccatttatatgtatttcttaaaaatccatgttcaggataattcaatgcatttgattgtaatgtctctttagtcttctttaatctgaaacagttctttaggctttttcttgaccttgacattttaaaaattaactttattgagttatactttttcatgcaataaaatgcactcactttaagtcatgaggaatatgggttttaacatatacacacacacacacacacacatatatatatatcttacccagtatgaaatcaagatatagaatattttcatcatctctaaaagttcctttntgcccttcgccacccactttgccccaggcaaccagggatgtgctttctatctgcaaattagtttaccctactctagaatttaatgcatcatgtactcttctgtatctggcttatttttacgcagcatgtttttgaattatatctatggttttgtgtatcagcatttcgttctttttcctactaggtagtattctattgtacagatataccacaatttatttcttcattcacctgtggacatttgatgtgtttccagtttttggctattgtgaataaaggtgccatgaacatttgtgtgcaagtatctgtgtggacaggttttaatttctttttagtaaatacctgggagtctgattgctgggccctctggtaagtgtatgtttacttttatttatttatttatttataaatggggtttctctatgttgcccaggctggtctcaaactcctggcctcaagcaatactctaaccttggcctcctcaaagtgttgtcattacaggcataagaaaccttac

SEQ ID NO: 281151 - DNA, 1000 bp, Homo Sapiens; identical to SEQ ID NO: 201663

SEQ ID NO: 281152 - DNA, 1000 bp, Homo Sapiens
atgatttcaggccgtcctcaaacaaagagttgacagaagtcgaaaaaggcttggtaaaggacaagataattgtggtgccactcaaggaaaacagtgccttagccaaagggagcccatcatcccagagcatccctgagaaaaactccaaatcactgtgcaggactggctcatgttcagaactagatgcctgccccagcaaaattagccagccagccaggggattctgccccagggaggtgacggtagaacacaccaccaacatccttgaagaccattctttcacagaatttatgggagtgtcagagggaaaagattttgatggtttgacagattcttctgctggagagctttccagtaggaggagtctaccaaataaaacaggcggcaagactgtctccgatgggctccaccaccccagccagctgcattccaagttagagaatgaccagggaggcacaacctcacggtgagagcagcaagcacccttcctcaggccacagcttggcgtctttgttcgcctggtcaccttgggcaagcaccagccccatctctaaaacatgctgccgcctggctggacctcagaccagaagctggagaatccacaccgtgcacttcctgggccacctcctttcccctccccagtgggagaagcggcactttgtcacttgggtgaatcaacagcctctgctttttccagaaagcaagagaactgaaaatcctggattaactaagtgacagtattttttttttgcacttactacacacctccactgtatagaaacctctacagattccaacagactttattcttgtacaattttaatcagttcttactgtagaatctggagtcaatgctctaatctgttttttataaataatatatattatgtatatgaaatgtgtatctatagtatgtctggagacagacaaggctgcacactaaaatgcagataaaggtgatttgtagaaaatcaaaaaaaaaaagaaaaaaaaaaaaaaa

SEQ ID NO: 281153 - DNA, 1000 bp, Homo Sapiens; identical to SEQ ID NO: 114730

SEQ ID NO: 281154 - DNA, 1000 bp, Homo Sapiens
ggagaaacagaatgtttgggcaggggctgctggtgctgcttgggttttgggttgagggtgctaggagaggatggtctccacccatctttctatttccagtacacgtcacattattttaccggtgagatgagaatgtcacaaacattaaaagccttatgtgctcatttctgcttatgtgctcatttctgcttatgtgctcatttctcccctgactctgtgacaaaatacagctctcctcagccaggcacggtggctcaagcctgtaatctcagcactttgggaggctgaggcgggcagatcacttgaggccagcagttcgagaccagcctgggcaacatggtgaaaccccgtctctactaaaaatacaaaaattagctgagcatggtggcgcgtgcctgtaataccagctactcgggaggctgaggcaggagaatcgcttgaacctaggaggcagaggtggtagtgagtggagatcgtgccactgcactccagcctggatgacagagcaagactctgtctcaaaataaaacaaaaaaacaaaatacagctctccagaaaaaaatgccttaaagacaaaacaaaacacccctgccctccaaatctcttgcctgagtcactacattccttcaaagataaatgacctactctttgccttctcctaaacatacgatcatgtctgacagggttaatgattatactctgcaatctataaccagatatacttatccctaaactttgatatgattttacacatactaaatcttcacctatgtataacctaaactaaaataccgtgttagaggagcctcacaagattactcctgggctacaggcctcagtctatagtcctcaataaggcttctaaataaaactaattttaattatttaaaagcttaatattttttctttagtcaacataccaatccttacattaattctacagagtaggtattatcttagtttcgcaggtgaggagactaaggttcaggaaaaaggattt

SEQ ID NO: 281155 - DNA, 1000 bp, Homo Sapiens
attgacattttatgtccatatgttttgccacttctatcaggtatcaagcttgattgattctattgtttgccgttgttatgttcatggagaggattaatgggcttaatgacaggtagtatttaatgtatgtacctcaccccaccgtacctagcactgtagttctctttttctttcttctccccagcaggattatatagttgaatttgagtacattaaatgtaattatgacatgattttcctgtagatataccttgctacacaggtgaggagctccagtagaatgttaaagcaaaatctgaaaaaaggtggcagctttacatctttctttccaaacttttttctttcctgtatgcactggctaagaatcccagtacaatttcaaatagaagtgataagggtaaatggattactcagggttctccagagaaacagagccaataggatacaatatgtatagctatatctatattatcacatataaataagcaaaaaatatagaagatttattataagaaattgacttaaatgattatggaggtgggcaactggagacccaagagagccagtggttgagttccagtctgaatctgaaagcctgagaaccaggaatgccagtgggtgtagttcctatctgaaggctggtaggcttgactcaaacccaggaagagccaatgtttcagttagagtcccaaggcagggaaaaaagccaatgtcccagttacaaggcagtcaagcaggaagaattctgtcttacttggggagggtcagtctttgttctcttcaggtattcagctagttggatgaggctagcctacatcagggagggcaatctgctttacccagtctactgatcacaatgttaatcacatccaaaatcacccagaataatgtttgaccaaatatctcattagtaacacccagaaaaatgtttgaccaaataccagggtaccctgtgacctaatcaagttgacacataaaattaaccattatagtagacctt

SEQ ID NO: 281156 - DNA, 1000 bp, Homo Sapiens
gcccaaaagaaccattgtgtttcaacaagttcacatttgatagtttgataccaagggatctttttctggcacaggttgtttggttactcactgtgtcttttgtttctttcagtgatgaagaactttctcaatatcttttacaactggtgcaagtgttaaaatatgagccttttcttgattgtgccctctctagattcctattagaaagagcacttggtaatcggaggatagggcagtttctattttggcatcttaggtaagtcttttatattttactttgagcccaccaggtgctttagtaactataaacaagcataatatatttaatagaaaaatagctgctttagtttttttctgaaccgtttataacatttatatggttttggtgccttctcctgtttcttgataccagcactcttgatttttatgatttgagatttgacaaagtaattcagttatccaagacccttatgtgtccctccatgcctgcttgatttcttcatttcttccttcctttcttttttttttttttgtgtgtgttttctacctgcttgatttttaactgaaattaataatgtattgctattttccagtaaagtgtacttattgtcttaatatatttgggctcaatgcagacctatttatttcatctagaaagttgtgggtggtactgtcattactagtgttattgagtgaaggtaaaggtatactataatgacagcaattttattcaatttctttattaagtaggtaatttccagaaatacacgaaccttacttcaccaagttcatataagagtaaaatcaggaatgagaactaaagttattcctttgttttctaaggaaattgtattaatagatttctcatttctgactctgtactcagacattttttttccctcccaatctggacttcatagtactgaaactaatgcttgtcagaaaaaaaaactaccttttttctttctttctctctttctccttccttccttttcttttc

SEQ ID NO: 281157 - DNA, 1000 bp, Homo Sapiens; identical to SEQ ID NO: 114731

SEQ ID NO: 281158 - DNA, 954 bp, Homo Sapiens
ctgcagaggaggacacagaacaggagattcctgtccttggagcagggtcagtgtgtctcaggggagaggcatgggggtgaggcttcctatgagattaggtggaacacgggttagtggggagggttagggttagggaagtttctatggagtctgggtgggtctgaggtgtttgagggaggaggcacagaagaggtgttttcgtgatgttggtctagattcagtgtgtctgagggggatggcagagggcagggccttcctgtggggtgggggtggggtctggcgtctcaagagtgtgggcatccagactaggggagggagtgtggcagggaatgttgctggggtgggggggtcttcttgacctcacttacatcccccctcccaccccagaatgtgccccccgatctggccatctgttgcttcgtcctggagcagtccctgtctgtgcgagccctgcaggagatgctggctaacacggtggaggctggcgtggaggtgaggaccccacctgggggtggcggggtggcagagatgggcgagaggacccaggggtcgtttagggcacggtggcaaggatgggtgagaggacccgggggtcgcttaccatctgctcttcttcctctctctgccctgccccccacaggccctcaatttggataagtgggtaggtccggccttggatgtcacctgtccttccacccctcctgaccccaggcaggcccgtctctcaggcccacgccctgcacacaggggctggagggtcctcccccaccccagttgtcaggggctgtggagccagaacaggccaggcaggaaggaaggaaggggatgggggcttctgagctgtccccgacgcctgctccttctcctctttccagtccttccccccaaccctgatcccagctcctctccgcatggacctctccacctccccatccaagcgtgagtcctctgtca

SEQ ID NO: 281159 - DNA, 650 bp, Homo Sapiens
tcctaatccctcagaccctttgggaggccacagtaggaggataccttgagcccgggagttcgaggctgaagtgagctgtgatagccccacagcaccctagcctgggcaacagagcaagacactgtctctaaaagaaaaaaaggaaaacaatctgctagaatctgcctgctcccagcaggtggagggcgcaggtggtagtaactgggaaaacttctggaacagggggccccttccacattgttctggtccaaggccccatgtgccgacctgccctgcatggtgctccaagccttgcattgtctccttcccagggtccctgcaggagctggtgtcccacatggtggtgcgctgggcccaagaggacttcgtgcagagccccgagctggtgcgggccatgttcagcctcctgcaccggcagtacgacgggctgggtgagctgctgcgtgccctgccgcgggcgtacaccatctcaccgtcctccgtggaagacaccatgagcctgctcgagtgcctcggccagatccgctcgctgctcatcgtgcagatgggcccccaggaggagaacctcatgatccagagcatcgggtgagacaccgcccttccccttactttgcatatcccttggtaatgaatacctcaggatacatacc

SEQ ID NO: 281160 - DNA, 1000 bp, Homo Sapiens
atggtgagtgcttcagttatagtatgtttgaattttaaaaaattcctgtttagaatgtatctatgctctcatgactatgcagtttctaacatacacatagaagctgagtctctgatccaatatgtttttatttgttccattaatttatcacatagattgggaaggcaagctaaaagccttaaaaatgccctttatattttgagtgatttcagcgttgaacacagtatactatctaaatttgctgctcactttcttaaactgttgcaattaaaggcatgtttatacatgactaatcgtgaaatgtttgtcactcttactgcacagacttatctgcaatcaaactggttagtttttttgttttgttttgttttattgtttttaatgaatctggtaccatctgtgctttcacaaaaaacttccaatgccatttttgagaactaacctaacagtcatgctaaccagaaaatccactggggaggaggttcctttgaaacaaaatgctgttcagttagtaaccaagttactttgattgcaaaagcagctgtgtttctgataagtactgaacaaatgtgtgtaattttctgtgccagacttatgactttgttttcaagcactgtaatgtgggatggatggttagaaacaataatatatagggtttctgttaaccctttcaggactcaactgtatctccttttgttaattttcccctgtgttgtgataaattgtttgccagcattcagtactgtgttggtgcagatgaggtttatatctcattttagcttatttcttgtacctttcagcatgcctacgcattcagtccttaaggggtttattttacaaactgtgcgcctgaagtttattagcaataagatagaaaatgagcaagtttataccataattttgagaaaaaaagaatctgctcagttccatatttcatccgtgaaaaacttgcaatacgagcagtttcaaggaataaataaaaaggaaatgaaaccattgt

SEQ ID NO: 281161 - DNA, 1000 bp, Homo Sapiens
cggtagcggaggcggcggtcaggcgccgcttctggggagtggcctttcttttcccctccctcccggttcggtggcggcggctcctccccctggggggggggggtggcgcggcggcggtggcatctgcggccatggcggcgactactgccaaccccggtgaggagacggaggactggggcgcctctaaaggggaggggccgaagggctgacaactaaggagacccagggctgaggggacgcagctggagctgaaggcgccggggcggggcgggggccgcgagagacggtgggggagcggtgacctggggaggggcccgatcccggggacttgggtagactcgagtatacccaagggagcgagggggcaggtgggagttgaggggggctccctgtcctgacctccgttggagcggcagccagtgcggggctggcccgccctcactcctcggtcggcgtctggtctgtgatgtggtcctcttttaaccctctgcccgctggagccgcttgatgccgaaaactgtaggcagagtgtctcggtttactttaagagtagtttggattcataaaccctggaccacactgctctttagttgaggcgttgcttccaaacatttaaaggtttagattttaatttaaaaaataaaaaatggacattctttgatatatacgacgtttctttaggctgttacctcccacccgcaacccccgtccccgtctccgtccccggactatactttgaaacttagatcttgtgttaagagggcctgtaggtctttgcctgctgagggcaggggtttgtgtaatggttatggttccggacaggtctttagttccacagccccaggtttaaatcttgttaggcctacgtcgaggcaatttccaaactctttcagaaaagtttgattccacaccatttctcaatttcaaaaaataatcaaatatcaaaaaggtttggtctgttttgtctaagagatggagtagggtgtagtgcagttctaga

SEQ ID NO: 281162 - DNA, 1000 bp, Homo Sapiens
tccctttttaggctgttatttaaatgcatatttcaatattaaaatagacatttttctttttttcttttaggttctgaacctctttctggccttattgttgagttcatttagctcagacaaccttgctgctactgatgatgacaatgaaatgaataatctgcagattgcagtaggaagaatgcaaaagggaattgattatgtgaaaaataagatgcgggagtgtttccaaaaagccttttttagaaagccaaaagttatagaaatccatgaaggcaataagatagacagctgcatgtccaataatactggaattgaaataagcaaagagcttaattatcttagagatgggaatggaaccaccagtggtgtaggtactggaagcagtgttgaaaaatacgtaatcgatgaaaatgattatatgtcattcataaacaaccccagcctcaccgtcacagtgccaattgctgttggagagtctgactttgaaaacttaaatactgaagagttcagcagtgagtcagaactagaagaaagcaaagaggtaagaatgcttttaaattttttgttccatttcctatgataaccatgtactacagttatttactattttcattgtgcttatatgcattatcaaaaagcaatattgaaagtcatatgtctatagtgatgttggaaaatcacaagatactctttattgggaaatggatttctaaaaattccaatttttcacaggaaattaaaccattctgagtctttagtatattcattttcttgatcatttgaaaatgtggttaaaaaatgtggccttttaggctgggcatggtggctcatgcctgtaatcccagcactttgggaggccaaggaggcagatcacttgagcccaggagttcgaggccagcctgggcaagatggcaaaatctcctctctacaaaaaaaaatacgaaaattcactgggcatggtggcacatgcctgtagtcccagctacaaaggaggctgagg

SEQ ID NO: 281163 - DNA, 1000 bp, Homo Sapiens
gctagtttgtgactttctgcctttttagttcatattgcatataaagtaaaaaccaagaactatttggtataaattactatcaagccacatgctgtgactttgaagtgtggttcttgttattttgtgggcaaaattatgttctattttatatcagtggacttgaactaagaatttactcctctgtaagccttaaaacctgtaagggtggactgaataattcactttagaaatcatgaattttgggttttgtattagccttaaatatagtcacatttggtttaagtaatacaaaacttgatgctaagcttagtgactctggtaaacattagaaacaattttttttttgagatggagtctcactctgtcgcccaggctggagtgcagtggcgcgatctcagctcactgcagcctccacctcccaggttcaagcgattctcttgcctcagcctcctgtgtggctgggattacaggcacccgccaccatggccagctaatttttgtaatttttaatagagatggggtttcgccatgttggccaggctggtctcgaactcctggcctcaggtgatccacatgtcttggcctcccaaagtgctgggattacaggcatgagccactgtgcctggccttgtccagtgttttttagtcattcaagaatccagcctcatttcatcccagctggaagaaaaagttcaacatagtgtttataatgtattatttttaaaattttcaattagtacatagattttcttaaatatacttcttagaaaagaaattgcatttaaatattatagatgtggtgtcagtctgctttgaccatccccagcccttttctcctcttgccttcctccgcttaccagagtggtgatacagaggtaatcactgtaactggtttacaattaatggatttataatcacataattgtatgtacctttggaaaataatgtcatgtaggttttttttttaatcctgtaatgttcattcactttttggagatct

SEQ ID NO: 281164 - DNA, 1000 bp, Homo Sapiens
aaagtccacaggcatgtaaaaggccctgcatgtgtgaaattacacattattaaagtcctgcatattaaacctttacaggatctgtagttttccattgtgaccaaacttatacagatcactgttgttcaatagattacatggccaattgtccttgggactgcagactatttataaatctacaagtaaatattttaaccaatctgtgtatgtaaattttctgtttaatgttgatttttgagtataaaaataaggagaggacatttaatggatggaatgaaagagataatatattaaaaggggaggggaagcttaggggaggatgggggtgagaacttccaacttttgttgtacgttgtttaaaattgtggattagggttatgaatgcttttgaggaaggtctcaaaagaagatcccccagcaaagtagggaagggtacttcccgataggagtcgaggtgcccaggccagctgctatactggcactgggaggagccccacgttctgccgtacctgcccccaggttggctgcatgtgccagggagtagtagaagtgccctgctcaacaggaaatgactctttccccgccacagtaaactgggccatctgctgcccttttggtttgctgcctcgattttgcaggttggagacattaaggcatgaagaaaccaagtgacacgcttcaattcagagcctaaagaagagtagtgacacatgtcggacagctgccgtgttcagcacagtccagagcgcgccatatatatgaacttgttgttctcacctcaaccctgagaggtggatttcagtgtgtctttggatggcaagcattaagagaagagtcctaacacacagcctcaggtgcttcctctctatggtgggtttcttctccaaaccaagactgcttccctggtgtgccataaaaccaccaggttggtcacagctcttttggggcatagtatgtaagggaaatttcacccatgtggtagccaagaagtgtcaaaaaa

SEQ ID NO: 281165 - DNA, 1000 bp, Homo Sapiens
agaaatggagctcaggagattgaaggacttggagaatagattgggagtcagttctgacacttcagtagagcagatgtcacacaaacaagatttatctgttcaaaactctcccattaattagcttcatattctcagttaagacatacataatttctctaggagtcttcattatgtcagttgtgaaggactccctgaatgatttgatggtctgttcccattctaaaattttatcttttgtgttttatctgtgaaattctgagtatcagattggattggtgtcatcactttgttgtgtcagaagtatattaaaatcagagctatctattgtagtacttttttccctcttgaattgtgctttttaatcaaccttcattaatgagtactcactaggtttactcttttagttgaaaattcattacttaaaaatatcactgtaacacacatgtaaactgaatcgcttttaaatcagcttctagggtttacatcagccagggttttaaaaaagatggagttaaatgtaacctaacaattgatttttaggatgagtcaaagtgattcagattaagatagtattgctttattttatttgttttcttcaattctctaatgacatataaattttatgtcttaggttcactaatgtatttaaatgaagccacactgctccataatatcaaagttcgatatagtaaagacagaatttatgtaagtattttacctgtagtgtaagtttttgtggagataattatttcatgtggtactctttgatttttgtcacgcttgaaattgtctaacagaaaatcatgcttgatctgagcctcttgaatagagtgtgaggttagtgaggacaaagattttttttctaatttacaactcgaactctaggagttaaaagcatgcctgggtacacagaaagcacttaatcagtattttgtggggatgaaaataatgaattcagagttgtcgtttaaatatcttttggactttaaaaaatgtccag

SEQ ID NO: 281166 - DNA, 1000 bp, Homo Sapiens
  misc_feature (138)..(138): n is a, c, g, or t
  misc_feature (887)..(887): n is a, c, g, or t
  misc_feature (898)..(898): n is a, c, g, or t
  misc_feature (923)..(923): n is a, c, g, or t
taaccaaaactttaaattcctgacatctgctctctaggtgttagtgttaatgggaatgccttaagatactcatgtgatgtttgggacactaatatttatagtcatagagttatggagctgtggttcttctaccttctncttggtcttgggaaagaggcaaaatggggatgtgtttgaagcattaatcataatagagaagaaagtagagactgaagagatctgtgcttaagcaattctttagtaaagaacttgtatgggggcagttatgctttccctttattttaagtaataaggggagtgatcaagtaaacaagtgaagaactcttggtgaaatagctttctgcccttgtcaggctgaagtggaggcacagctggcccgacagaaggaggaggaatcccaacagcaagcagttctggagcaggagcgcagggaccgggagctggccctgaggattgcccagagtgaagccgagctcatcagtgatgaggcccaggccgacctggcgctgcggaggtactggggcccctgggtggggtatagcgctctctcctttgctttctctacctctctgcctctcatttccatgcagaagggaataggagaaaataatattctgaaggccctgatatatttgagctaaaataattttaaaattatttgtatcgactttcatactcaagtgaatgagataattgatttttcatcatattattaaattgttgacaaataagactaaaatttcactaatgagtactctattaagaaaatatatcaacctttaccctgaaattgtttaagagtatagtayattargtagacacctaatttctaaatacctgtcatcaaacactggcattgaaataagtgactgtgttatataatgcantgtaatgtatntgtagttgatatttttctaatgcanaaaaatttaatgtattaaatctcctgtcagttgaaatgagaactctactctgcaatgcctcagaataaatgagtttc

SEQ ID NO: 281167 - DNA, 1000 bp, Homo Sapiens
ccaagcttcaagtaaccaagagtatatacggttatttcttggaagacaccaggtttaagtgacaaaggtgttgaggccatccaggtgaacactagcacactctagtacatgggaaagttgaggtctagggaggtggtgatttccttgggctcatggaagtctcctgccatcacccttagtcatctgctatatccataagtcttcatgaggtcattgtttaattcaggagatccaaaactatcctgtagttccaaactacaaatgtagttaacttgggggctattgaaggttaaatctaaactcaaaatgaaggagccatgcccagagaagagctgttcaggcccgctggcagggtttgtacgtgggtggccaggtctgaccccaggcagccaggatctgggtctggtttctccatccagcaagccctgcctctggctttgctcagccctgtgtttcctgccaagcggaaatccctggtcactgacttggggagaggtcagggagggaagattcttctcccctgatgtcacccagctgtttgtaacccaagcagcagcagaacaagcacacttgatgtcatggttgaagaattcagtcctgtcctggggcacaaaacagaggcaaagaagcatgaccgatgcaaagggttcctagactgcaaatgtcatttctctttctgacccccactggttgtagtaaggtctgcagatacagtatcacctagccgtcacgtggtccagccctcttggggggaaaggagaaggccacaacctattggcagagtaaaaagctcatattcttagccaggagaccctcaggtgataaatcccagtccgtctgctgaaaggctcatgcccctcaccctacccagccttagggactgaagcagcaagacaggatagatgttaaaggatctgggctcatgctccctcaggtgggcagctcccatccctgcttgcattcactgcccccatgcctttggacctgatggacaagcaca

SEQ ID NO: 281168 - DNA, 1000 bp, Homo Sapiens
tgtgcaaatggatgctgcaggaccgtaacagtagacattgatgaagatgttgctatgaggacagattcatcaaaaatgactgacgtggagtctggggtcgccaattttgcatcttcagcaagggcaggccgccggaatgccttaccagacatccagagttcagctgccacagacggaacctcagatttgcccctcaaactggaggctctctccgtgaaggaagatgcaaaagagaaagatgaaaaaacaacacaagaccaattggaaaagcctcaaaatgaagaaaaatgaaggctcataatctatcaagagtgctgaatttctgcatgttgaaagacttagtggttctgttttcttgagacatttaatctggtggtaactgtggtaacattgcagccctaagcagcatgtgtatattagataattgtgttgtgatgctactcactttgattgcaatgatgatgtccaaggtaagctattaaaaggcaggttacttccaaatcgcactgaaggaaaaggttaagaataatacatgatcacagaaatgcataccactgtctgtaaacccaacaaaattcactgttctcttttggatttatttagcctgatgtatttttaattcaatttttatggtgatgggcaaatcattcttggtaaatgtaaatcaaacatgattgatttaaaacttcatggaatttgtagaaaattatggacatttttggtgagaaagaacaatagtcaaaactcacatggatagagtgtgtttgttttttgccaaaaatgccccagaccttttcccaaacctcaaaaacgtcttggaaaaattgtaaaagtttgataacagaaacatctttaggatatttttgtctgacgtattttgcttctagtatgtgcctactgtgatttttttcatgtggaaaatgcaaaatttgtaacaaaatggttatatggaacatgcctattaaacgaattttactatcttccctaaaaaaaaaaaaaa

SEQ ID NO: 281169 - DNA, 1000 bp, Homo Sapiens; identical to SEQ ID NO: 114734

SEQ ID NO: 281170 - DNA, 1000 bp, Homo Sapiens
aaaaactttacctgtctgtactaatcacccttcaaatctccctgatcataacattcatggccacagaactaatcatattgattattagtggtgtagttgggtgtgttattattctgaattatgggggaggttatatgggtttaatagttttttaaatttatctaggagtatgatggttgtttttggatatactacagcaatggctattgaggagtatcctgagacacgggggtcaggaattgaagtcttggtgagtgtattagcgggattatcaatggaagtggggttggtcttatgagtgaaggagtatgatggggtggtggtagtggtcacattctttgctgaacaaacggtacctcaaataacttcatacaaatactactgggaaacttagcattttattaaaatgtttaaatttcctattttatcaaatctaacatattagtaataatatattccttttattcaactttaaagttctattcaacaatagcaatttataattttatattattaaatgttattcatacagtttaataattttataatttagcattaatgaaaccagcacagacaatataatgttcatgatattttatgtatatgtttaacatacacatacataattcaacattaatggcttccttaattaccattaatattataattttatattatcatttaagtttgcccttctattttaatattagatgtcttagcatccatcagttctatcaagctcttctcactggttcttctttgaattccagacatggccacaatcttctcttctaaaattctaaaatctgagggctctcgctggctgggtgctgctggaagaactgtaacttggttgttatctcaacggtattttattttaaatgtttcaattaaaagaagtttttaaaaatgtggaatcctgagaatattcactttttaaatacaatgggaatgtatttaatgtatcgctgaagtctgttctcctcgtttgatccagggt

SEQ ID NO: 281171 - DNA, 1000 bp, Homo Sapiens
atcccatggtaattaaccaaagaggcagaggctgagttacaaatgcttcaacaatggcatgcctcctggctacagccacaaaagtttttgcttctgtttcagtagatttactaacatgggggtgaaagtatgcttgtgtttttgcaggagacacaaaccatgtaggtgccctcaagatgtgtacaaccatggaacaggggactggaaggacccatggatcccaaccacggaccaggttcaccaagccatgctgagaaactactggagtgccagggttttacctatgcttaactgatcaatgctttttaactgaactcctctctaccgtgaatacaagagaccctaataggcaggcaagagtatcatcacccctattcagcaagaagaagttatagaagatggaccttcatcctcctgaaaccgctaacattaaaggttctcttgtaaaagggaaaggggagatatgtaggaaacgttcaaaccagagcaactccattttgaataaggtctaagaaaaatgaagctggatcaccaaccggcaattaagggctacacagcctgcaattgccttgctcaattaattttaaaaaaggccaccttatgctaataataatgacagctgtggtggtttttatgaaaaagagaaggggggcatgttgggagaaaagctgagtgttgggagagaagctgaggcagggcttgcatttctgctagacttgctggctccttgcttctagcactcccattatctcaagcagccatatgtttctcattcatttgtacactgtttcctttcaacccccacatcctcaccacctgtttatttgtttgagcagcaataaatagggtgggctcccagagctcagggccttcgcatcctccacacttgcaatggccccctcgtcccactttctctctccaactatctttttctcattcctttgactctgctggactttgtcacccccacgacctcatgttgggtctgatcacccctaca

SEQ ID NO: 281172 - DNA, 1000 bp, Homo Sapiens
cagattatttgagctgcataatctaaacatgtcaaacgttcagtgggactatttttatatatgtatatgtgggtgtaggtcataacatttcagtttataatataaattgttatttcagtttataagctatctctcagaggagactagctcttttgagaattcataatttaaagttttagactgaagtaaaatgcaacatagataatagtgtaaatcagatataattgagggctatatggcagtaaaactgctagtgccagttttcttgtttgcctgttatacatttttgatttttgtttttgtattctgaacattttgagagatcatatgtttgttcaattacatttagagttggtttgggaataaatatcttctaaaaagagatttatcttaaaaatggaagtcctaaaaattagtttatccagagtttataaagtcaaatattcagtaggcatagactggaatagataaattcatggaaatcatatcctttcagtacaccgtataacttcaatattacacaagtaacattgaggagaatgccatcagctttgttctcccttaaattctttggttttctttttacattttgggaacaactgcatttaaaatgttattagtcagtatatagtaaggattaggtgtttgctttctgaaggaatggtccagtgaggtgattgggagaggttattttctacctaacttgtatatgccctatacctcttgggcatactttgtctatagaaaaatattttgacctttaggtacattttgggccagtagtcaaataatcctagggccgatataaaaatcttagaataatttaaggtttgccttttatacctgttttgaaagcctttacatttttgtcaggtaatttttcccaagccgtggatataatctattcaaacatgtttatgctatccattctgtttttaaattgaaaaaaatgttaaaagtgtttatgaagaaaagtttaaataaaatatttttaatcttt

SEQ ID NO: 281173 - DNA, 1000 bp, Homo Sapiens
tactttggaagctataatgatcatgcagatatacactttgggctgggcaatatttaagaaatgataggaaaatagaaaaatcatgattattaattgtggaattcagcttgatttgtcctaaatgttggtgtctgttgctagagtattttaaatctgtacataaataagcatgataaaataatcaaggattttttcccaggatatggaagaactatgtatcacaaataatgtttttgatttggacttttggagttgatagttttgttttcctggaagatagacttttgaattatactttataaaaataatctatttatagaagatctgtcatttaatagacattttaagagatgttttaaacgctagtattttcttgaaaaatcttttttaaagctgaatcattcaaaagaaaacctggattaaacagttcgattttaaaaggaagggtattttttggaaatatcatcttaaagctgttttgtatcagtattttcaacattgttataatattatttgtaatactaagtgtaactcaggcctggagaaggtgtaagcccactatgctaatgtacatcagtaactgtaaaacaggggttctttgtaagttcctcttgtgtatatatagtaacttataacaatggcatgtgggcattctttcagtgaattgctttctttgtactaaaatctctagttttctaagacagttccatgtataaaaatgatttatgcctttctccaaggcggtacatatccaaagacatgacaccagggggaaaaagtgcttgtttttctgatggaagcagtggtcttttcttttctttcctctttcttttgtgcatgtgtatgtgtagctaagcctaaataaccctgtaaaatttctgctgcaaattgtctcttctgaatttagaatgtgttttaaaggaacacttaggaagagaaataccttgaagaaaagctgtttccacctgaaataaactgttcccatttttataattattgg

SEQ ID NO: 281174 - DNA, 1000 bp, Homo Sapiens
tcctaaaatatcagtaccagcatggaattatagcaccaccttgtggttaacatgccagtattttaccttttgttaaaacaagtgatttcccatcaaacaggataatattttttcccttttgaaaaattcaattttaaaaagaaacatttttgaagttttcttatggaagatagaaaaaaagttaagtctctttctaccctttctttttttctttatatagtgcagatatacacacagagaagggacttaaaacatttctaatctcctagtttatatacagtgtgcaaaatataagtaagtatatattgaaaatataaaatatttcatatatgttatcaggtggaaatttagaatccaaattttcttaaactttaataacttgtctaacaactctctaatagggactaaaaatcaactcaatatatcatacatttacacttacaaagagtctttagacaacataatttttggaaaaataaagcaaattcaactttattggagttattggacagatcagcaaattgttattttaaaaagttttcttgtttaggcaatttggtaagtggtttctagttataaactagccactgttgattaacttgagaaggtgaagcaggggagttctgaagagattacctagagctacttaaccctaagttaagtaaaattttcactttcattcttttcattctctcataaactggttgaaaaaacactgtactaccaacaaaggtgtcagttgcttgtgctgccctgtctatgttatgctctgaataggtctcggtaaagattatatggaaatactataaagaatacataaggtaaaatactagtcagaaagggttcagaagaagttagcatcaactgtatgaaaattctaggtaaagctaagtactattgagttggaaaaaagtaattctatcatgtttgcttgttttcctctactgtttttaatgtgatgttgtaatatattttaaaaataaaacttgaaaacgttggg

SEQ ID NO: 281175 - DNA, 528 bp, Homo Sapiens
agttttttaagcacaatagcaaaaccatcagctctgtattttctcctgttatttcattacagtagctgcttgtgggaactaggaaaaattcttccaacatattttaaggcctaaaatcttagttccccattctcctaccttatagattcacaggcctttctcgcctaggcatcatagataaacgtaattgtttggggagttgaatttaatgaacttatctaactttgtaacccatcttggctttagtaactttatcaaggtggtggctttagtgaatataatggtaaactttagaggacgctaaagcctccttttatagcgctcctcaacggtagggagagctgaagggaaaacattctgactgtgtggcagggtgattttcttccttatgaccacttacagtggatatttattgtcaacacacggtccacagctcatcatgatggacttggagctgccgccgccgggactcccgtcccagcaggacatggatttgattgacatactttggaggcaagatattgatct

SEQ ID NO: 281176 - DNA, 925 bp, Homo Sapiens
gattctttaatatttaggattgactgttctttccagttaagcactgaaggattatgtcttgtagcttccccaagagaaggggagggaaaaaaaagcactatgttaaggataatacagaactcttttgaactattttggtagtaccttttaccatactgtttgctttttgatttgggtaaatatcttaagagcaaagaaaacaatacaccaaatgaaaatgctttgaaagtaaatgaaaacagcgcttttgaaaggctggtatagtatgaccctggagtcagcctttgtgttacagcgaaaatgttggtgctataaattctgattgtttacagatgttgattctgcttatgctccaaagtgtgcatgatgtattttacgtagtactctgaggaagtctctttataaaacctactaccacttagtataaatttgtttgaatttatatcatttgttactgtaaattcagcttattccaattaggttggcacagatttaaacttgatacacattccacaaaaaccaattcagtgtataagtattgaagtataagcagtcattgcagcttgatgccagatcatgtatgtaataacaagtggaagttaatagggccctctaatactgtatgggtactcctaagaattatttcattttggatataaagaagttatgaggcctcctgtcacattcacagctggttctccaaaataatttggttgtttcaaaaacaaatggtaatcatttggttggattcttcagtatcatgactagatcatgtggttttaccatagttgccaagtggtgggaggtagcatacctgaaaatgtacgtgtgtgtttgttgtattttttcacattttgtgaacaaagcacatttattaaaaattttaaattttctagccaaaaaaaaaaaaaaaaaaaaaaaaaaa

SEQ ID NO: 281177 - DNA, 769 bp, Homo Sapiens
taattatatttacgttagaggagcgttcctagggcaatgaagtcagaccgtgaggactggtggaacgctaggaagtgagaatgccggtatgagtaacgattcgtagtgagaatctacgacgcctattggggaaggtttcctgggcaaggttcgtccacccagggttagtcaggacctaagacgaggctgaaaagcgtagccgatggacaacaggttaatattcctgtactttctataatagtgatggagtgacggaggaggataatcttaccacttactggattgtggggtaagcgttaactggtgactgtaggcaaatccgcagtctataaccgggaggcgtgatgcatagggtcaaaccgaattagataattccacacttccaagaaaagcttctaaacttaatattatggaaacctgtaccgagaacggacacacgtccccgagatgagtattctaaggcgagcgagaaaactagtgttaaggaactctgcaaaatgaccccgtaagttcgcaagaaggggcgcctaaggtaacacttaggacacagtaaattatgaggggcaactgtttatcaaaaacacagctctctgcttaaccgcaaggtgatgtatagggggtgaagcctgcccatgccccaaggttaagtggtgccttagcatttgcaaacgttgaaatgaaaccccggtgaacggcggccgtaacaatacggtcctaaggagcgaaattccttggcggttaatctatcaaccccgttgtgacctattcc

SEQ ID NO: 281178 - DNA, 1000 bp, Homo Sapiens
tatgctgccctctacaggctgctcggcctccctgcagctcagcgcagcccagggctccaagtgaggcccagaagcccatgggcagggctggggggacgaagggggaacccggagcacctccacttctagggaagatggacagcgtgggggcacacctgggcctcccggaagctgtggacgaaagggagagcgggtcctccagggcaaggggaacgggaaataggtctcctaggtgcctgaagcgctgagcaacctgggtaccctggtggggatgcagggaaggccggggcagagaaagcgaaggtcgacccagggctgtaggaagccataggagagtgaccacgggattccctgagaaacagggccggccccccaacttcagggacccaccgcccattccccgagagctgtcggaaccagatgcaacccggcagcccagagaactctcctgggaggctgtgggtgagccaggccaacattggtgtccctgtccccagagggaggagcaggcaggagagagaggggaaggaggtatgaatcccagtccccaggaacctagctctttaaactctggggagtcggattcaggaaacacccccaggaggccaagcctgaaaacagaggggagggaggaaggaaggagtcccagcaggagcacagccctggtttcctgtcactcagagctgattcacaggaggaggggaggttggggggcgggagacaaaaaccacacctctttttatataaggtttcatatttaatttggtcatggattcataaatacataagtattttgtacacaatgtgcttccttgtttgtattataacacatttcaaatagggacctttgacagggcagaagcatgaaaggacaccaaccacgagtgacacactatactatggctgtcctgtgtcacatgctatttggcctggggatatagcaaagcctaatgtaactaaacaacaaaacccccaattatttcatgtcgtcaggaagctt

SEQ ID NO: 281179 - DNA, 1000 bp, Homo Sapiens
atgcatgcactagcaaagcgatggggaggccatgggtaagtgtatgccaccaaaatgatgtggggaggctgctgtgtggggaagctgtgggtgagctggtgcatgtcagtgggggctagtctgctggagctctcccatggtcagtgtactctgctgttgaaggagctatgatgagggcccctgggaagcaccctggttgtgtatctgaggttgcactgccaatgaatgtggccaggatggagctcctgaataggtcattcaacaggggttgctcagattgagctgtcctcatcccacagggaacagttcctgctctgtcccagtccaaccatcaccctaatgctaaagtctcctagaggagtgtagcaagcattgggggatgggtgtccttggccaagctccactgtagccctttatgtactaagccctttgtgctccacacaggctgaagtctttctcctgctacctctctaagcagctcactgccagctccggtgtccatgaggttcgtggagtctactgctgctcagattctgaagatacgtggtgagagaagtctactctttgcctgatcaactcaccccatcctcaggagttgctagggcccaggagtgagtcctgatgttcagccaccctgtgtagggttcccagatttcccctttagctcagcattttgcagcctccctccatttactctcaatttcttcccttcaaagatctgcttagagtgtgccagacttctcaatgccctggtctctctgtgagagatgttcctcctggctgtgtctagtaagccatatggaattctatatagcaaatatttattatgcttttattatgtatcaggtactgttccaggagctaaagatacagcaatgactatagtgaagtgctggactttatggagctgacattcaaatggataagacagataataaaaacaagtattaggttggtgcaaaagtaattgcagtttttgccattgaaagtaatggcaatg

SEQ ID NO: 281180 - DNA, 1000 bp, Homo Sapiens
atactactgatttgtgtatattgatttataacctgagaccttactgaatgcatttattaaatctaggagtcttttggtagagacttaagagttttctagtcataggatcatatcattagcaaacagagagtttaacttcctcatttacaatgtgagtgtcctttatttctttctcttgcctgattgcactggctaggacttccagtgctgggttgaatagaagtgatgaaagtgggcatccttgtgttgttccagttcttagggggaatactttcaacttttccccattcagtgtgatgttggctgtgggtttgtcatacatagcttttattattaatattttagatatgtttctttcatgcctagtttgttgaaaattttatcataaaatgatgctgcactttatcaaatgctttttctgcttctattgagatgattatatggtttttatttttaattccttttatgtgatgagtcacatttactcacttctgtatgttgagccatccctgcatccctaggaggaaatcaacttgatcacagtaaattatcttttagatgtgctcattgatttgattggctagggttttgttaaggatttttggatctatattaatcagggatatctgtctgtagggttgttgttattgttgttatgtactttcctggtttcggtatcagagtaataatggcttcatagaatgagttacagaagatttcctctttctctatattttttaataatttcactagaagtggtaccaattattctttgaatgtatggtagaatttggctgtgaattcatctggtccgggacatttgtttgttggcaatttttttgttactgattcaatctcacttcctgtttttgatctgttcaggatttatttttcttcctgattcaatctaagaggtttgtatgtttctagaaattcatccagttcctctagatcttctaatttgttggcatagtggtgttcatagtagtctcaaatgatc

SEQ ID NO: 281181 - DNA, 1000 bp, Homo Sapiens
gggaggccaaggcgggcagatcacttgaggtcgggagtttgagaccagcctggccaacatggttaaaccccatctctattaaaattacaaaaattagccgggagtggtggtatgtgcctgtagtcccagctactggggtggctgaggcaggagaattgcttaaacccgggagatggaggttgcagtgagccaagatcatgccattgtactctagcctaggcgacagagcaagactccattaaaaaaaaaaaaaaaaaagaatgcgtgaaagattgtaactcctacaacgtctagcaagtaacttgaatgagtcctgaaagtagataatgtgttagcctttctctaagttcatttaggcttctctaacaaaataccttagactgagtaatttataaacaacaggaattgattgcttagagttctggagtctaagaagtccaagatcaaggtgcaagcagattcagtgtcttttgagggtcttgttcttcatagatggcaccttctgctgtgtcctcacatggtagacatggtagaaggggtaaaaacacacacacacatacccctccctcggacttcttttattcagggcattaatcccactcatgaggacagagctctcatgacataatcacctcccaaaggctgatccttttaatatccccttggggattagatttcaacatatgagttagaggggataaaacattcagatcatagcagccttgagcccatgtctggctatcagtagcagatccaagagagagcagaaggaaattttagatgtgccagaagaagcagaattaggatgtgatagggagggggcagttctgttgggtccagagctgccaccagaagtgggaagggttgggagtagggtaccttgggtagcctgagagctgtactcccctattgggaggtaagttgagtgctacctgacttgaaagtcctggaggacctctggttggttcaggagatgaagcctaggtgctctgagaagctt

SEQ ID NO: 281182 - DNA, 523 bp, Homo Sapiens
  misc_feature (309)..(309): n is a, c, g, or t
cctgttcaccctccgccaggctggaggtgggaggggccaacattggccttagggataggcatttacagccttttgactcagtttcccggtagtgtccgctggtggggatgggtggtctgaggtggtatttggtggagaaggcgcttacctgccctgggctgagcttcctgtaccccgcagatcatcacttctacgatgagtccaagcctttcacctgcctggacggttcggccaccatcccatttgatcaggtcaacgatgactattgcgactgcaaagatggctctgacgagccaggtgagcctttcnttgtcatccatcagatgtttattgaacactgctcagtgccaggccctgtctgtgtgaccaaggatactacctctgctggctcccctttggaagtgggcagaaacaagctcagaagtcagtggtcagtgttaatggccccgggcagctggaggagcccagagtcgtcctcctcccaagcctcggggtcagagaaggctcctccaaggaggtgagg

SEQ ID NO: 281183 - DNA, 1000 bp, Homo Sapiens
agaggtgaaagcataacatgggtacagaggggacaacaatgaatcagaacagatgctgagccataggtctaaataggatcctggaggctgcctgctgtgctgggaggtataggggtcctgggggcaggccagggcagttgacaggtacttggagggctcagggcagtggcttctttccagtatggaaggatttcaacattttaatagttggttaggctaaactggtgcatactggcattggccttggtggggagcacagacacaggataggactccatttctttcttccattccttcatgtctaggataacttgctttcttctttcctttactcctggctcaagccctgaatttcttcttttcctgcaggggttgagagctttctgccttagcctaccatgtgaaactctaccctgaagaaagggatggataggaagtagacctctttttcttaccagtctcctcccctactctgccccctaagctggctgtacctgttcctcccccataaaatgatcctgccaatctaatgtgagtgtgaagtttgcacactagtttatgctacctagtctccactttctcaatgcttaggagacagatcactcctggaggctggggatggtaggattgctggggatttttttttttttaaagagggtctcactctgttgcccaggctagagtgcaatggtgcaatcacagctcactgcagcctcaacctcctgggttcaagcaatcctcctacctcagcctcctgggtagctagcaccatggcatcgccaccatgccctattttttttttttaaagacagggtcttgctatattgcccaggctggtcttgaactgggctcaagtgatcctcacgccttgcctcccaaagtgctgggattataggcatgagccactgtgcttggccaggatttttttttttttttttttgagatggagtttctctcttgttgtccaggctggagtgcaatggtgtgatccggggaattc

SEQ ID NO: 281184 - DNA, 1000 bp, Homo Sapiens
ggtcgcctgtccttaaacttgcctgtcacttctccttaactctaggttctcctttttgcttctaacctttgactcttatttttttccacagccgtcatggaaatgatgagtcagaagattcagcagctcacagccctgggggcagctcaggctactgctaaggcctgagagtttttgcagaaatggggcagagggacaccctttgggcgtggcttcctggtgatgggaagggtcttgtgttttaatgccaataaatgtgccagctgggcagaatgttggtcttttcttggattaagcaagggactggtgatgagatgggggtgtggtcgagagtgtgggccccgtctcagagcctgatgcgcaggggtgatgcgatgcgcctcttggaggctccatcgcagggccctttgaccagctggaagaaatcctaggctgggagtgtgctgctgctcactctgcagagctggttgccaagggaacggttggcaagcggaagtggggctgcgctggcgcttcctacttccgggtcggcgctcctgcctccctgcagggagctgcttatgggacaccgcttcctgcgcggcctcttaacgctgctgctgccgccgccacccctgtatacccggcaccgcatgctcggtccagagtccgtcccgcccccaaaacgatcccgcagcaaactcatggcaccgccccgaatcgggacgcacaatggcaccttccactgcgacgaggcactggcatgcgcactgcttcgcctcctgccggagtaccgggtacggtccgcgaaaagtgaccctgggactgcgtgcatgcatgcctccggggtggatggcattccgccaacagggtcactccgatagcgcccggcagcccaagcacccttcctacccttcctgcctccctgaagtccagcattaatcccctacccggcgacacccggcagccccttcacccctgtgtacctcgcaggatgcagagattgtgcggacccggatcc

SEQ ID NO: 281185 - DNA, 1000 bp, Homo Sapiens
tactgcaaatgtcatcagaactttttggtttgcagatgacaaaaattcaactcagactagtttagttaaatgagggtggtgaatattgttcatattgtggcacaagcaaaagggtgtctgagccctcaaagtgaggggaaaccagggcctgagccaagctagaattccctctctctgactctcaaatcttttagtcattatagatcccccagactttacatgacacagctttatcaccagagagggactgacacccatgtttctctggccccaagggcaaaattcccagggaagtgctctgataggccaagtttgtatcaggtgcccatccctggaaggtgctgttatccatggggaagggatatataagatggaagcttccagtccaatctcatggagaagcagaaatacatatttccaagaagttggatgggtgggtactattctgattacacaaaacaaatgccacacatcacccttaccatgtgcctgatccagcctctcccctgattacaccagcctcgtcttcattaagccctcttccatcatgtccccaaacctgcaagggctccccactgcctactgcatcgagtcaaaactcaaatgcttggcttyttcatacgtccaccatggggtcctaccaatagattccccattgcctcctccttcccaaaggactccacccatcctatcagcctgtctcttccatatgacctcatgcatctccacctgctcccaggccagtaagggaaatagaaaaaccctgcccccaaataagaagggatggattccaaccccaactccagtagcttgggacaaatcaagcttcagtttcctggtctgtagaagagggataaggtacctttcacatagagatcatcctttccagcatgaggaactagccaccaactcttgcaggtctcaacccttttgtctgcctcttagacttctgctttccacacctggcactgctgtgctgtgcccaagttgtggtgctgac

SEQ ID NO: 281186 - DNA, 1000 bp, Homo Sapiens
tatttaatgttttacgatctagcctttccagtataggcacttcctgaaaaacctttgtcctcatttggggcattttgttgttgggtttcgccatgttggccaggctggtctcgaactcctgacctcaggtgatccacctgcctcagcctcccaaagtgctgggattacgggcatgagccaccacacccggccaggaaaaggtattttatatttatcattgctgtgctgtttattcatttgtataaattcaagttcccatctggtattgttttccttcagcatgaataacttctttgaacatttcttgtggttcatgtctgctggcaacaaattctctcagctatttatctggaaaagtctttatttcaccttcatatttcacctgtattttctttgtgtacagaattctaggttgacatttgttcctgagtgttttaaagatgtcatttcatattcttctggtttgcataatttctgatgagaagtctgcagtttattttctttctatttctctctctttttgctcctctgcaaagccaattcctcttgctatttttaatattttctcattatcattgtttcataggaatttgattatgattttccttggtatgatttccttaatatttattctatttgggaccattgagcttctcatagctgcatatctgtatgtttataattttcatccagtttaaaaaaaaagttttgagaaagagtctcactctgtcacccagtctaaagtacagtgacacgatcttggctcactgcaacctccgcctccctggttcaagtgattcttgtgcctcagtctcctgagtagctggaattacaagtgcatgccatcatgccctggtactttttgtttttacagtagagagggcgttttggccactactttcgtcctcaagtgtagccagctacctccggtttcccaggcgatatcctttggagagtttgggtgtgcagtgtctctagtctcatttgcttcatcgagatc

SEQ ID NO: 281187 - DNA, 1000 bp, Homo Sapiens
tgagccggacagcctggctgtcattgctttcttcctccccatttggacccttctctgcccttacatttttgtttctccatctaccaccatccaccagtctatttattaacttagcaagaggacaagtaaagggccctcttggcttgattttgcttctttctttctgtggaggatatactaagtgcgactttgccctatcctatttggaaatccctaacagaattgagttttctattaaggatccaaaaagaaaaacaaaatgctaatgaagccatcagtcaagggtcacatgccaataaacaataaattttccagaagaaatgaaatccaactagacaaataaagtagagcttatgaaatggttcagtaaagatgagtttgttgttttttgttttgttttgttttgtttttttaaagacggagtctcgctcttgtcacccaggctggagtgcagtggtatgatcttggctcactgtaacctccgcctcccgggttcaagccattctcctgcctcagtctcctgagtagctgggattgcgggtgcgtgccaccatgcctggctaatttttgtgtttttagtagagacagggtttcaccatgttggtcgggctggtctcaggctcctgacctcttgatccgcctgccttggcctcccaaagtgatgggattacagatgtgagccaccgtgcctagccaaggatgagatttttaaagtatgtttcagttctgtgtcatggttggaagacagagtaggaaggatatggaaaaggtcatggggaagcagaggtgattcatggctctgtgaatttgaggtgaatggttccttattgtctaggccacttgtgaagaatatgagtcagttattgccagccttggaatttacttctctagcttacaatggaccttttgaactggaaaacaccttgtctgcattcactttaaaatgtcaaaactaatttttataataaatgtttattttcacattgaaaaaaaaaaaaaa

SEQ ID NO: 281188 - DNA, 1000 bp, Homo Sapiens
taggagaaatacctaatataaatgacaagttaatgggtgcagcaaaccaacgtggcatatgtatacctatgtaacaaacctgcatgttgtgcacatgtaccctaaaattttaagtataataataataataataaagtcttggtccttgctgtggatattagcctgttttcatctctcaagagttctgaggcccttcctattttggggattcctccatcacatgagtcttggtggaaggcagggtcctatctcctacttgaaaatatatggggctggatgttccattttttcatagaacagatttccagaacagagaagtgacaaagccctctgggtaaggaagatggggtagagaattgaagaggatggtggcgggatctcagagaaggctgtgtgtcttgcccctccctctcatccagtggagttggctgtaaaagggaatgatgtcagaacatactgagaagtctgagttcaaggctagaggggatgtgtgcagtattctcctctggagccctgggagaaggctgcctcccatagcatcctcatggagccaaaagtgcttacaaacactatctcagtgatatttctttcttttttttttttttttttgagatagattctcactccttcccccagggtggagtgctgcggtataatctcagctcactgcaacctccacctcccgagttcaagcaattctcctgcctcagcctcctgagtagctgggattacaggcgtttgccaccacgcccagctaatttttgtgtttttagtagagacggggtttcaccatgttggtcaggctggtctcaaactcttgacctcgtgatctgcctgccttggcctcccaaagtgctgggattacaggcatgagccactgcgcctggccaacatttcattttcaaatgttaaattaacatatatgttctctactgaccatgagaattcttaagataactgtgtggcaggtttaatgtaatggacaaagagtgccagcctg

SEQ ID NO: 281189 - DNA, 1000 bp, Homo Sapiens
gcctactacctggccaagaccatggcagacgtgccctttcagatcatgttcccagtggcctactgcagcatcgtgtactggatgacgtcgcagccgtccgacgccgtggcctttgtgctgtttgccgcgctgggcaccatgacctccctggtggcacagtccctgggcctgctgatcggagccgcctccacgtccctgcaggtggccactttcgtgggcccagtgacagccatcccggtgctcctgttctcggggttcttcgtcagcttcgacaccatccccacgtacctacagtggatgtcctacatctcctatgtcaggtatgggttcgaaggggtcatcctctccatctatggcttagaccgggaagatctgcactgtgacatcgacgagacgtgccacttccagaagtcggaggccatcctgcgggagctggacgtggaaaatgccaagctgtacctggacttcatcgtactcgggattttcttcatctccctccgcctcattgcctattttgtcctcaggtacaaaatccgggcagagaggtaaaacacctgaatgccaggaaacaggaagattagacactgtggccgagggcacgtctagaatcgaggaggcaagcctgtgcccgaccgacgacacagagactcttctgatccaacccctagaaccgcgttgggtttgtgggtgtctcgtgctcagccactctgcccagctgggttggatcttctctccattcccctttctagctttaactaggaagatgtaggcagattggtggtttttttttttttttaacatacagaattttaaataccacaactggggcagaatttaaagctgcaacacagctggtgatgagaggcttcctcagtccagtcgctccttagcaccaggcaccgtgggtcctggatggggaactgcaagcagcctctcagctgatggctgcgcagtcagatgtctggtggcagagagtccgagcatggagcgattccatttt

SEQ ID NO: 281190 - DNA, 1000 bp, Homo Sapiens
tacataagtatctccgtagtgttaatcagttttgtcaaaatgcttttactggctagctgcagtagacggtagctgtatcttcatatcttaaaggtaaaatattattaactgagtgtataatgagttttgacttcacagtccttaaaaataagatgaagtgagctcaataaccttatcagaaatagtgatttatagtgagcctacagactggagatgtatgattttcattgtcgttttattgattttagctttgaaaaagaaaaagaagatgccaaagcttcgctttgccagtagaatccggaaaattcggaagaagcaattttaaacattcttaatatgtcatcttgtttgtctttatggcttatttgcctttatggttgtatctgaagaataatatgacagcatgaggaaacaaatcattggtgatttattcaccagtttttattaatacaagtcactttttcaaaaatttggatttttttatatataactagctgctattcaaatgtgagtctaccatttttaatttatggttcaactgtttgtgagactgaattcttgcaatgcataagatataaaagcaaatatgactcactcatttcttggggtcgtattcctgatttcagaagaggatcataactgaaacaacataagacaatataatcatgtgcttttaacatatttgagaataaaaaggactagcaaataaaactcattttgcatttaaaagttggattatattttagtcccaagaagacaaagtcgcagattaacaacactttaaaaatattactcccattttattgtgttagattgcagtacaatgaatgaataaggggatttatttaaaagatcttaactttcttgactgatttaaaaagctaatcaatttattaaagccagaaatgttctcctctgggaaagcaatttctatctatttatctaccaatccccactcacatgtatatgtttgtgtttacatagagatagatggttttaa

SEQ ID NO: 281191 - DNA, 1000 bp, Homo Sapiens
ttactcttttatacatgtgataatttcataaagtgagggatcccaaaaaaagagtttcatccaacattcttgttctgcaggttgcttttataaagaaggtgaactattttcatgtaatgttaagagttaaacttatctttcccaaatataactttattattagcttgggaaaaatgaaattgtattcccatttttaaaataaatacaaatgtttatttcagaagggcagttttgattatatgtgaatacacaaattttactggatttatcttaataaaaagactctgacgatgattgtgttttgttatatcttcaaaaatatagctagtgaaatattgtgcttaatttttttctattgtgttattcatgaaaatatttaatattcactgacataaaattaatataaagtaaaattcaccattttaattataataaaaataaagtatataattcaatggttgtcagtatattcacaatgttgtgtccactgtttaattccagagaatttttatcacccaaataagaaacaaagcaccaattagcagtctcttcccattttcgcccaacttatcccccacctccatcccttggcaaccactaatctgccttctatctctatggatttgcctattctgaacatttattataaatggaatcacataatatgtgtgtggcctttggtatctggcttctttaacttagcaaaacgttttcaggtcaatctccattgtaatttgtatcattacagcaggtctcaattttgttcaatgctgtttggttataattttgatgagaaaatagattcccagctggggccactgtttgtggagtttgcaagttctcaccatgtcttcatgagttttctccaggtagttcagtttcctcgtacatcccaaagaagtgcattttaggttaactggcatgcctaaatgatcccagtatgagtgtgtgtgtgtgtgtgtgtgtgtgtgtgtgtgtccctgtgatggactggagtcct

SEQ ID NO: 281192 - DNA, 1000 bp, Homo Sapiens; identical to SEQ ID NO: 114737

SEQ ID NO: 281193 - DNA, 1000 bp, Homo Sapiens
tcacacgtaaatcaaaagaaatgtcctctttgaagttgtaagactccaccaatgacagacacccttttcggtggactctgagtggtgtgtagtggttttatagccatggaaactaggagtatctcactttccactgagaacccctgcccccaatccctctaagttggggtgtggcagttgggcagggtcaagtgacccagccctggctgtaggacagccatatacagtgaagagttctagaaccagctaaaaatggaagtttgggtgtttaccaacaaggtacctctttatggatgcagccccagtaagctggctttaactctcagctccttccctgtctcctcctaatccaagcccttttataaaataaagccccttctgtcccactgctcacatacttatgtgctgctagtctctactcgaagttcgtgcaggactaatgcttttaaaatgaggtctaaaaaataattactagtcgagactattattctttaaacagaactgcctttttctactctttatgtaaactctttctattgtgttggtctaacaaggcactattttaaaattttttaatttttcccatagcacttaaaagagattttgtaaagaccttgctgtaaagattttgtaataaaatggtctaagggctctttttccaacattaccatttttaaaaaatgttttaaaagctagaagacaacttatgtatattctgtatatgtatagcagcacatttcatttatggaaatatgttctcagaatatttatttactaatatatttatcttaagccatgtcttatgttgagagtgtgacattgttggaataatcattgaaaatgactaacacaagaccctgtaaatacatgataattgcacacagattttacatatttgcagaccaaaaatgatttaaaacaagttgtagtcttctatggttttgtaacaaattgtacacatgactgtaaaaaaaaaatacaattttatcaagtatgtgtt

SEQ ID NO: 281194 - DNA, 1000 bp, Homo Sapiens
  misc_feature (279)..(279): n is a, c, g, or t
cttattacctcctatttattgttttgacttagtatctcctttcttcacaagatagcctcactgaccataaaatcatggttagattaatggaccacttgttttatacttcatatctcttataaagaataatagtgagtttgaataaactgtccttaggtatttttaaaaacgttcatgtctagtatttagggatggtttttacttcaattttctctctcgttttggtaattcacttgtagatcagacttataaccatgtttattctatacttagcttagnattctttctttatagcttaattctaatgcatgtgtttttgacatgagcatttcattggggaatttttctaagtctttttaacgattgctaatgttgttaatgaataatgtcttctctcttagatcattgtatggttaattttatcaaggaaaatttacttggatccattaaggagttcaggaatagatttataaatccaattcaaaatggtcagtgtgcagattctaccatggtagatgtcagagtgatgaaaaaacgtgctcacattctctatgagatgttagctggatgtgttcaggtacacatatgttccatagtaataaaatattcttacttttttatataacaatcccgacatattttctgagcttaaagtttaataattttgtgttttctttcccgctctttcagtagatagttttacagttatatctccttgcgttgtcttaaaaaatttctgctgcattcaacttttaaaaaagaagttccgctgagtttaaaacatagttgattcatttgccaggtgtaaagcctcatatcttattatgttaatgtttagatttttcatccttaagatagggagttccttaagaggaacatagctactatgatgaagttcctatgctcaccctaattctgtagtacagtattataaatctcacttttttgaaatggttataggagaggccagtatgaattaagagaggagccacttttaaag

SEQ ID NO: 281195 - DNA, 1000 bp, Homo Sapiens
ctgcagacggcttcctgcatgtttcccacaagcgctcagatggctgaattggcaagtctgtggtgctgctctttggggccacctcgttctttgcctttccctccccttagcgatgtgtcccatccgttgcctacagtcaagtcagtccacatgtttaggctaaggtgggcatgaccgagtggccttcccccgggaagaccagtgtcgtaactggaattaagttgtggaacataagagtcaaggctcgtgtctgctgtgaactggagttgagggaatgtttggggatcccacctggtatcagtaagggaaccatggcgacggccagccttgcccatgtgaggcatttgctttgtcaggccttctcagtagtggagaagggaggaaggagaatgcagctctttcagtgctgtctagcagtgcccaagagccgtgattgggcacctcacttaacgtctaacttcagattcactcttgggcattcctgtcttcctctccaatcttgaatggatgttggcttcgataatgtcatcctgaagtttctttgtccacacagccctggctggttgttaataagctgttaatgcagccttgcactcaggaagccctgatgtttaaaggaactgtgtctttgttcttcctctcttccctctttctcttagtcccactttatctcttctttctcttcctctccctcctccttttcccctctccctcctactctccccctttctctcctccttctctaagaaacccagtcttaattccacacaatgcatgcacatgcagtagcttctctgcttgagtgagctggtgtgattaggttttctaaacatgcacattggccttgctacttgtccttttattcccttcccacagaccataaaccaagaattatttttatttgtattattttgatttttttaaagtaaaatattaacttttcctctttgaaataaattcccatttggaacatcaaaaaaaaaaaaaaaaaaaaaaaaaa

SEQ ID NO: 281196 - DNA, 1000 bp, Homo Sapiens; identical to SEQ ID NO: 201596

SEQ ID NO: 281197 - DNA, 1000 bp, Homo Sapiens
tattcgcctacacaattctccgatccgtccctaacaaactaggaggcgtccttgccctattactatccatcctcatcctagcaataatccccatcctccacatatccaaacaacaaagcataatatttcgcccactaagccaatcactttattgactcctagccgcagacctcctcattctaacctgaatcggaggacaaccagtaagctacccttttaccatcattggacaagtagcatccgtactatacttcacaacaatcctaatcctaataccaactatctccctaattgaaaacaaaatactcaaatgggcctgtccttgtagtataaactaatacaccagtcttgtaaaccggagatgaaaaccttcttccaaggacaaatcagagaaaaagtctttaactccaccattagcacccaaagctaagattctaatttaaactattctctgttctttcatggggaagcagatttgggtaccacccaagtattgactcacccatcaacaaccgctatgtatttcgtacattactgccagccaccatgaatattgtacggtaccataaatacttgaccacctgtagtacataaaaacccaatccacatcaaaaccccctccccatgcttacaagcaagtacagcaatcaaccttcaactatcacacatcaactgcaactccaaagccacccctcacccactaggataccaacaaacctacccacccttaacagtacatagtacataaagccatttatcgtacatagcacattacagtcaaatcccttctcgtccccatggatgacccccctcagataggggtcccttgaccaccatcctccgtgaaatcaatatcccgcacaagagtgctactctcctcgctccgggcccataacacttgggggtagctaaagtgaactgtatccgacatctggttcctacttcagggtcataaagcctaaatagcccacacgttccccttaaataagacatcacgatg

SEQ ID NO: 281198 - DNA, 1000 bp, Homo Sapiens
tattcgcctacacaattctccgatccgtccctaacaaactaggaggcgtccttgccctattactatccatcctcatcctagcaataatccccatcctccatatatccaaacaacaaagcataatatttcgcccactaagccaatcactttattgactcctagccgcagacctcctcattctaacctgaatcggaggacaaccagtaagctacccttttaccatcattggacaagtagcatccgtactatacttcacaacaatcctaatcctaataccaactatctccctaattgaaaacaaaatactcaaatgggcctgtccttgtagtataaactaatacaccagtcttgtaaaccggagatgaaaacctttttccaaggacaaatcagagaaaaagtctttaactccaccattagcacccaaagctaagattctaatttaaactattctctgttctttcatggggaagcagatttgggtaccacccaagtattgactcacccatcaacaaccgctatgtatttcgtacattactgccagccaccatgaatattgtacagtaccataaatacttgaccacctgtagtacataaaaacccaatccacatcaaaaccctccccccatgcttacaagcaagtacagcaatcaaccttcaactatcacacatcaactgcaactccaaagccacccctcacccactagaatatcaacaaacctacccgtccttaacagtacatagcacataaagccatttaccgtacatagcacattacagtcaaatcccttcttgtccccatggatgacccccctcagataggggtcccttgaccaccatcctccgtgaaatcaatatcccgcacaagagtgctactctcctcgctccgggcccataacacttgggggtagctaaagtgaactgtatccgacatctggttcctacttcagggccataaagcctaaatagcccacacgttccccttaaataagacatcacgatg

SEQ ID NO: 281199 - DNA, 1000 bp, Homo Sapiens; identical to SEQ ID NO: 201601

SEQ ID NO: 281200 - DNA, 281 bp, Homo Sapiens
tctcaagaaaagcttaccggttttctttaatttgtttagaaagcacaaacacaactgcttctgtattcaggaggttgtgagtgggctgcggcagcccgttggtgccctgcatagtggggatggctcgcaacgtctcttcattctggaaaaagaaggttatgtgaagatacttacccctgaaggagaaattttcaaggagccttatttggacattcacaaacttgttcaaagtggaataaaggttggctttttaaattttatttatttttgtgctggctacg

SEQ ID NO: 281201 - DNA, 1000 bp, Homo Sapiens
tgtgttctgcttttaaactacacctgtagtacagttaatatgttttttattggtattgatttctttaattcattaattttctctatttgggacccaagtcataagaaccaattagaggacataataaaaacacttaatgcttgtagtctgtagagatcttcaccatttcacagcacacacattattttcataataaattgccactggtgggacatgggactgacttatttgaatagagtttgaaataccacctttgtatgatgcaaacaatatttgattattttatctaagaaatctatgcatgtgtatcaagttaaaatagtgggtttaaatacaatttacaaagcattagaatgttacctaatctcttctgggttaaatgtgataggaatgtattggaatgtgaagaaattatagaaaattaaaagactcagcctctttaggaagtttgctaaaatggagaggttatgtttaatttatttatatcttcgttaatccaagcatctaatgaacaaaaaactgctacagtgacgtcataattctataagggcaatagttgccaaatttcctctggtattattagcattctgcctttgcatagattagccttcaaatttattatttttagtattatttgatacgattgaagtggctaagattgattgagcttttcttgatcacattttctgcttcttagctaaagtaattttatttaaattgacatggcttgagttgtcatcattttctgctcttctagaatgatgtgtagagaaaacttgaagatactatcccttctttggcattcttctcttaatgctatgctattatttatcataatatgcatatatttagttgtatctggtatcattctaacactcataactaccattttagttaagtccaactttatatttgttacaatgcagtgttttgggaaaggtctattagtaattatttaagtattacatatttttatggaagtctttagaaggtgaagatc

SEQ ID NO: 281202 - DNA, 1000 bp, Homo Sapiens
attggcctggagtgccagagcgtcacctccaggggggacctggctacttgcccccgaggtgagtgcaggagactgttgtccaggcgcccatttctgttccaagtcccctgggaatgccccctccccgccacgttccccgtgtccagcctctactcccctaggatcttggtcctgactcccagccttctccgcccaccatctggacactggtgtccaccctcactccctgcctccagtgcccattcagtggttggagcctccagccgtccccgtccccacccccgcccccccaacccccctccgcgctccccacccccctcccgctcccaccctcagcctcccagctcagagtccacgctcctgtgttccgggctgcaggcttcgccgtcaccggctgcacttgtggctccgcctgtggctcgtgggatgtgcgcgccgagaccacatgtcactgccagtgcgcgggcatggactggaccggagcgcgctgctgtcgtgtgcagccctgaggtcgcgcgcagcgcgtgcacagcgcgggcggaggcggctccaggtccggaggggttgcgggggagctggaaataaacctggagatgatgatgatgatgatgatgatgatgatggagcggatctgagccctgcgtggtttctttagtaggcccggagggactgatctagcgtctccaagagagtggggcgcgtagctgctggagggggcggggacaccgcgactttctactgccccatcgcccttcctcctatggggtctccaactgcttcctccgaaaatagggcctgaacttcctctagtgacgtccccacccaaggctcatggctgccttcaagaggtgacgtctcatctttgaggctaccttgacgctcaccctggggtctccgacctccccaggaagtggctgggtccttttcccccagtcctcataatgaggcttcatcgaggacctgggtcagtctgggcagtggacgggaccctccagggccc

SEQ ID NO: 281203 - DNA, 1000 bp, Homo Sapiens
cacaatagtgagatatttattattactttctttttagaaatgagggaactgagacttagaaaggttaagagtaatttatctagggctgtacagcaagtacactctgcactgccctttttgtttgtttgcttcctgaaggaatgggttgggcataccatctgtaatgatttccaggatgccttcgtagtggactcctgtgttgttccggaagggtaggtattgtttacctgctggcttggttgcactggtgaagttacatcaattctgtcagtagctgatacaaacttcagaatacccttcacctcagccacagctgcccagtcccacagcttctttcctcccaaccccagcacccctgcacccttagctccaaaattcctaaaaggttcactgtttgttcttctaatttctccccatgatgttgtgtttgaaattggtttgctctagtggttttccctgtagccttgcgtattcctgagctgcaacatcagattctggtttttctccgcagtgactttccatttcctgtgaaagcactgtacggactggaagaatacgacactcaggatgggattgccataaacctcctgccgctgctgttttctcaggactttgcaaaagatgggggtccggtgacctcacaggaatcaggccaaaagtcagtatagtttttcttttctaaacctgttagtgttttgaatgttcatggggaattccacagctcttggtggggaagttgagtcaaaaaagtttctctcgagacaaatggtatttggagaggttagggagaatggggcagattccttgttttttcttggatccttggcttgagatttatattgccttgtgtgagccaacagatattctgagattactttctggccaacgtggcgaaacactgtctctactaaaaatacaaaaattagccgggcagtgtggcatgcacctataatcccagctactcaggaggctgaggcaggataattgcttgaacctggga

SEQ ID NO: 281204 - DNA, 1000 bp, Homo Sapiens
atacaccagcacagcacttctttttttgagacggagtctccctctgtcgcccaggctagcatgcagtggtgcagtctcagctcactgcagtctgtctcccgagttcaagcaattctcctgcctcagccttccaagtagctaggattacaggtgcctgcaaccatgcccggctagtttttgtatatttagtagagacagggtttcaccatgttggccgggctggtctcgaactcctaacctcagatgatctacccacctcagccttccaaagtgttgggattactttggcgtgagccaccgtgcactgccataccaccacttgtaataaatatttcattctatatcgaatgccctctttgttcctatgtcatatacatgcagtagagctggaggaccatagcttatttaaaattatgcaaattgggccgggcgcaatggctcacgcctgtaatcctagcactttgggaggctgaggcaggcagatcacctgaggccaggagtttgagaccagccttgccaatgtggagaaaccccgtctctaccaaaatacaaaaattagccgggcgtggtggcacatgcctgtaatcccagctacttgggaggctgaggcaggggaatcgcttgaacccgggaggcagaggttgcagtgagctgagatcatgccactgcattccagcctggtgacagagcaagactcctttaaaaaaaaaaaaaagttttaacagtgataatagtacagttgtgtatcctctaggagctgtattccagaggtcacccagagcagtaacctaaaatgcttatttatttattctttgccccttaggatggtgaagaagacgaagtaagtgctggagaaaaggagcaagatagtgatgagagttatgatgactctgattagaccccagataaattgttgcctgcttctgtgtctctgccagcctgtgatcattttgtgttagagtttgaaatccgctgtttgcctttcttactggtaggatcc

SEQ ID NO: 281205 - DNA, 887 bp, Homo Sapiens
  misc_feature (74)..(74): n is a, c, g, or t
  misc_feature (110)..(110): n is a, c, g, or t
  misc_feature (161)..(161): n is a, c, g, or t
  misc_feature (164)..(164): n is a, c, g, or t
  misc_feature (166)..(168): n is a, c, g, or t
gccctttgggaggctgaggcgagaggattgcttgagcccaggagtttgagaccagcctggacaacatagcaagnccctgtttcagttaaaaaaaaaagataaaaaaagancctgcaacatacccacttataaattattccagaattcaaatatatctcccnccngnnnagtgaaatactttgagaaggacataatttagaagcaaaatagattcattttttaagccgaagtaagaaaacaatttaaaaataatgtaatgtccatttcaggatccattccagatgaaaggctctatcgaatgtttgtcaataaaaaagtaacaatgttgagaccaaaggaagatgagaactcttggtttaacttatttgtgattcatcagaacaggtaaaacttttctctgaaaaagtttgagccaagtgctgaggcttcccaaatctgtttctgagcttacctattttagtgaaatgcccttaatctttcaaggttgtcaatgcaagatcagacaaaacatagatttgctttgtgtgatttcattttgaaattgtttttagtatatattaatacctacaagaatatttgtaacataaggataaggcatacacatgaatactcctcaattcaacaaaaaggtagaatctttttgttggattatccattcctttatcccattccttttccctgatcccacctgcttccccctatcccaaagggaagcattattaattttgaattaattatttcattgcttttctttgctgtttaatcacatgtatactcatattatgctatatttacagccaacttatgttcagcattacattactgagatccattttgatgctgggatgtgtaatttatttttactgaggtggaaggagaggactggg

SEQ ID NO: 281206 - DNA, 1000 bp, Homo Sapiens
agcctcctttatgtttttatagtatgattagttcatgtcaatgcctaaattaatgatttttaggatggtacgttatctcattgtgtgtactttctccttcttctccctcttaggctatgaccagggccagagcactcagatctcagtcagaggagtctgcttctgcctttagtgctgatgaccttatgagtatagatttagcagaacagatggctaatgactctgatgatagcatctcagcagcaaccaacaaaggaagaggccgaggaagaggtcgaagaggtggaagagggcagaattcagcatcgagaggagggtctcaaagaggaagaggtgagcactgagttcagtcctgtgcacattcacacttggcagttgagtggaaaatacagaattagatctgttcagagttgaattataagttttatttctaaaacacggttctttaaaaatctatttttataatatataaagacagtctttaaggcagttctgacatgtgccttttacttaaataaattttgaatggccacatgcacttagggttttaattgttcttagcacataccttataaaagcttcactgtgtttgtcacgtagtaccttttggatacatttaatgtcatatgtattttcacatgtgcaaagtaataggcaaatatgagttgttaaagaaaatagctaaaagcctttggcaacaggaggaaaactccagatcatacaattattatttttgttactgtcataagatacaaatacacatatgcttatcaagtagtctttataaagtcagtttaagaaagaaaactgccccccaatttgattcctaaaactagtcattaacatagtcaacattgtatttactgtgagactattgtcattgaatagttcacgccaatagaaattggtcactcagtgactttctcacacattatgtcagttcatctctaaagattttttaaaattgtttttattaaatatgcatccataggaattttaa

SEQ ID NO: 281207 - DNA, 1000 bp, Homo Sapiens
ccccaggggtggccacagcatggggaaatcatatttcaggattatcacatgaaatacagagacaacacacccaccgtgcttcacggcatcaacctgaccatccgcggccacgaagtggtgggcatcgtgggaaggacgggctctgggaagtcctccttgggcatggctctcttccgcctggtggagcccatggcaggccggattctcattgacggcgtggacatttgcagcatcggcctggaggacttgcggtccaagctctcagtgatccctcaagatccagtgctgctctcaggaaccatcagattcaacctagatccctttgaccgtcacaccgaccagcagatctgggatgccttggagaggacattcctgaccaaggccatctcaaagttccccaaaaagctgcatacagatgtggtggaaaacggtggaaacttctctgtgggggagaggcagctgctctgcattgccagggctgtgcttcgcaactccaagatcatccttatcgatgaagccacagcctccattgacatggagacagacaccctgatccagcgcacaatccgtgaagccttccagggctgcaccgtgctcgtcattgcccaccgtgtcaccactgtgctgaactgtgaccgcatcctggttatgggcaatgggaaggtggtagaatttgatcggccggaggtactgcggaagaagcctgggtcattgttcgcagccctcatggccacagccacttcttcactgagataaggagatgtggagacttcatggaggctggcagctgagctcagaggttcacacagctgcagcttcgaggcccacagtctgcgaccttcttgtttggagatgagaacttctcctggaagcaggggtaaatgtagggggggtggggattgctggatggaaaccctggaataggctacttgatggctctcaagaccttagaaccccagaaccatctaagacatgggattcagtgatcatgtggttctcc

SEQ ID NO: 281208 - DNA, 1000 bp, Homo Sapiens
tttatattgtagagcagaactaatctgggatgcccctctaatattttctccttatctgtccctgacaggaaactgtgtttgcaatgctggtagagatcacagagcgagccatggcacattgtggctcccaggaggccctcattgtgggaggagtggggtgtatgtattattgaaaagtgttcctctttcctattcttaacactatgcgtcttcctcctggtactctaaatcattaagcgtttggagtaggcttcccaatccttgcccctaatcccctatgtcattgttctaagtgagtgcacatgacgtgttctgctggaccatgaagagatggctaaaactaagctaatcctgttccctgcctctttgtaggtaatgtgaggctacaggagatgatggcaacaatgtgccaggaacgtggagcccggctttttgctacagatgagaggtaaagacactttccctttggtttcttttttacttctcctgttatagtgattttccacccttagatcccaattttcatctctcttgcatcccagattctgtattgacaatggagcgatgatagcccaggctggctgggagatgtttcgggctggacacaggaccccactcagtgattctggggttacacagaggtgagtgattcacctcttggtgagggtagattattgggacatagacaaaaacagcagggaagagtccaggaacatgagggcagagaagaatgaaggatgttaagggctcgctctccaccatgtttcttctgtttttccacaggtatcggacagatgaagtagaggtgacctggagggactaataagatcaacagaatcagagtagatagttccttaatcggaacccaaaggaccccgtgcctcaatctctatcctgatgtcatgggagtcctagcaaagctatagactccaagcaaggcttggggtcctttatggaaccccaggatgactcagcaataaaatatttttggttttttggt

SEQ ID NO: 281209 - DNA, 1000 bp, Homo Sapiens
gaaaagtcttctagagataggtcagcaccatttatgcatattaccatgcaccctctaatgtctgcaggtgccctggggcagccaacctgttacaattgcaattatgttaacaattgttaaagggccgggtgaggtggctcatgcctgtaatcccagcactttggaatgccggggtgggaggatcatttgagcccaggagttcaagaccagcctgagcaacagagtgaaacctcttttcaaataattaataataataataataataataattgttttttgtttgtttttgagacggtgtctagctctgttgcccaggttggagtgcaggagcgcgatctggctcaccgcaacctccacctcccgaattcaagcgattctcctgcctcagccttccaagtagctgggattacaggcacccgccaccgcgcccagctaatttttgtatttttagtagagacagggtttcgctgtgttagccgggctggtctcgaactcctgacgtcatgatccgcccgcctcagcctcccaaagtgttgggattgcaggcgtgagccactgcacccggtctaataataactgttaaagcaataatgaccactcgccacagagcacgctccttcctgggggtcctctgggcctgagctgggggctgcgccgtactccaaggctgactgtggggtcttacacatcataatgcacataggcagcttgagtaggaaaggcccttatgctgcctgaggggaagctcacccccaccccccaaggagccgccctgggtatgagacatccctggaacggcctaggggtccctggtggctgctggcagtcacagcaagtggccaatcaggtcccattgaggcccaggggctcactcatttattcaactaacatggcgtctcgatgggacctgaggccagcagggcaggtgcgtccccttccccctggtgggctcatagctgcgggtaggggcccggggctcattgagaaggtgcgattccag

SEQ ID NO: 281210 - DNA, 1000 bp, Homo Sapiens
cctccaggaatctcctctggcttaaaggagccctgaataaataaaatctatccagctgccaaagcaccccatgatgttaccatatttatcagcacctgaagttctaaatctccactctggtcaagccatctcttgtctttctccgttagaaaaagatgggcagtggtttctgttttattttccaaggtacttgccactgtttaatacggtagcttagcagttaggaatggccttttctcattaagctcagctcccaatgtttcaaaccaatctctttctttctttctttctttctctctttctttctctttctttctttcttcctttcttcctttctttctttctttctttctttctttctttctttctgtctctctctctctctccttccttccttccctctctccctctctccctccctccctctttctttctttccttctttctttctttttttttctttctttcctttctttgttttctttctttctttctttcttttctttctttctctttctctctctctctctctctctctctctctcacacacacacacacacacacacacgagtattgcctggaaaggctggaatgctgtctttctcaaatgttcttattcattcatgatacttttattgaatgcctactaacatcaggcaatgagctggtgagcaagacttggctcccatctaaggggaggcagtaataccatgtagtaataatatgatggctgacatttatcaggtccttactacatgccaggcaatgagccaggccttttatttccattgtgtctgtgaattcttccacaacctatgaggttaagagtactattattgcatactccattttacagataggaaaaatgagaccagggaattaacttgtccagggacaggcaactagccatgaacgaggccaaggtttgagccaagtggtctaactccagaacctgtgctccagctcagaaagtgtgggaaatgcaggacacattttgcc

SEQ ID NO: 281211 - DNA, 1000 bp, Homo Sapiens
attccagggatatatatgtgaacgggttgccagtttagcttggcctgtgggtggcagccgcctgagtgagcacttcgtggctgcagctctaaagggtttggatctgaaactaatgaatgaaaatatgacctcagaagatttaaagagagcaaatacccagcaacagaacctgggtcccagagactgttgggagcatgaaatcccaggctggccgaaggaggaagtgggagagcaatggcagctgacatcacatggtgccagaccttctcagtgctttctgtgttcactcattattccgtccctctctctcagaggcaggtatggctgcttccccattttatagatgaggaagctaaggcaaggagaggttgtgtaacttgctcacagacacaaagctagccagtggcaaagctggaggtcaggtctaggtggtcaggctccagagttctgcggatttcacagcacggcagtggcagtcggaagaaccatttgtcaggtgattgtgggcaaatgacgtcagcccttcaaacctctgttttgcatctgcaagctgcttgctgctgcaacaaattaccagaaacttagtgacttaaaacacaaattaggtcgggtgcggtggctcacatctgtaatcccagcactttgggaggctgaggtgagtggatcacttgaggtcaggagttcgagaccagcctggccaacatgatgaaaccctgtctctaccaaaaatataaaaaattagccaggcatttggccgggtgtggtggatcacgcctgtaatcccagaactttgggaggacaaggtgggcggaacacaaggtcaggagttcaagaccagcctgaccaatatggtgaaagcctgtctctactaagaatacaaaattagcaggacgtggtggcacgcgcctgtagtcccagttactgggaggcggaggttgcagtgagccaagatcacgccactgcactccagcctgggtgacagagtgagactccgtctcac

SEQ ID NO: 281212 - DNA, 1000 bp, Homo Sapiens
aaagcagtcactagggataggcaaaggaagtgatgatgtcttcattttatagatgagaaaatttcaaaccagggaagtaaactgtactgccaaaggccacagagtctgaggatggtcaaactgagattcaagctgaaattgactcttattccatgtatagtgctttggtcatcttgtttggaatgtctttccaagtttaaataatgggattataattaaatttaattaacatgaaaatgttgtagtgcttttgggtataaaaatcaattatcactgggctagagaagtgctgaagtgcctgttcacagagatttctggttagtagaatgtaggtagtatagttttttttttttaattgtggttgttcactcacaattcatactttttacaagtgatcagaattgtcccgacagttaaaataagtgtgagcgggccgggcacggtggctcacgcctgtaatctcagcactttgctaggccgagatgagcagataacttgaggtcaggagttcaggaccagcctggacaacagggtgaaacctcgtctctactaaaaatacaagaacttagccgtgcgtggtggtgcatgcctgtaatcccagctactcgggaggctgaggcgggagaatcactggaaccccagaggtggaggctgcagtgagccgagatcgtgccactgcactccagcctgggagacagacgagactctatctctaaataaataaataagtatgagctatacacttatatatgccttgggaaatatatttgcacagtaaatgatttttaaaggcatgtgtgtatgtatgtgtgtatatatactatgtgtgtgtgtgtatatatgtgtgtgtgtgtgtatgtatatatatctgtctccttaaatcactcagagcttttccagataatgtcttaagatgtcctttaagggtgatatttggcttttaagacctctgtatctttgaatgtcaagttcatatatgtatttcgtaagaaattgataa

SEQ ID NO: 281213 - DNA, 1000 bp, Homo Sapiens
acactgacgtcaactggcaggacagggaggggaacgcagccctaaatacagctgcacaggcaggagctgcctctggccccatgggcaccgttgccttggacactggctctcagccttgtgcttcctggtcagcatcacgtgggctggttcatttgagctttaacacagatctggtggaaacacaggctgccaggccctgcccctggagtctttctttgaataggcctggggtggggcccaagaatgagcagaagaacaggtttcctggtgaggctgatgccgctggcccagggttctcacgttgaggaccgagagctttgaggttttcatacctgatgatgtccaggaacccttctcagtaggcactgaagaccatcagcagaatcacagaccccaggagagatgtcgtcagacagacacagaggcatcaccgaattaaagtgaaaatgaagaaaggagctgagcatctgtttcatgactttcgtggctgttttactaaagaggctatcctggcccagtcagggcacgctatcatcaccaactacttgttgaactacgttcagggtcttgaccttgaaggagggacgcgttcgggttgaaagccgccatgcagggtcgaacggatcgcatcggagccctgagctagcaggggcgggtgtccacgcgagggcccccgccgtgggatgtcgccagaggagtggccacttatacgtccgcctcatgcagaggctcctggagcgcccctgccgggagctgttggggaaaaagtaccagcttgagctgccgccgctccccgagaggccgcaaaagcccgagggctccaagaactgcctgcagaggctcagggactgcgagctgtccgcgctgacgccgcgctccatgcggggcccagaggaccggggcgccctggaccacatggtcaggatgaccacgagcctctaacagccccgccggggccctcgcgtgccagactatgtgccccgagagcaccttgtgctgg

SEQ ID NO: 281214 - DNA, 1000 bp, Homo Sapiens
ctgcactgcagcctgaggaagaaagcaaagagcccatctccaaaagagagggagagagatgtggtctcactctgttgtccaggctggtctcaagcaattctcctgcctcagtcttccaaagtgggattacaggcgtgagccactatgcccagccaactagctccctttctcctgcagaaataagaaaaagtctctctctcatagggccatcagtaaataaagccaaaagttgtgccactgaagagcgatacaaaggaacagagcgcgaacggcttctaaatttctagccctctcgcagggcatcctgactgaactgtgtctaagggtcggtcggtttaccactggacgggtgctgcatcggcaaggccaagttgaacaccggatggtgccaaccatcggttgtttggcagcagctttgaacgtagcgcctgtgaactcaggaatgcacagttgacttgggaagcagtattactagatctggaggcaaccacaggacactaaacttctcccagcctcttcaggaaagaaacctcattctttggcaagcaggaggtgacactagatggctgtgaatgtgatccgctcactgacactctgtaaaggccaatcaatgcactgtctgtcctctcctttttaggagtaagccatcccacaagttctataccatatttttagtgacagttgaggttgtagatacactttataacattttatagtttaaagagctttattaatgcaataaattaactttgtacacatttttatataaaaaaacagcaagtgatttcagaatgttgtaggcctcattagagcttggtctccaaaaatctgtttgaaaaaagcaacatgttcttcacagtgttcccctagaaaggaagagatttaattgccagttagatgtggcatgaaatgagggacaaagaaagcatctcgtaggtgtgtctactgggttttaacttatttttctttaataaaatacattgttttcctaaaaaaaaaa

SEQ ID NO: 281215 - DNA, 1000 bp, Homo Sapiens
gatgggcctggctgggagtggaagaagggaagccttttgcaaatagtagagtatcagttgcaggtgccaatgactaactttttgaattctatgttggcattaacaataaagcattttgcaaacactggttataactgtctttatggaggcagctctgggaatggtgacattgatagcttaccatgctccaggccgggtgcctggcccttcacctggatggtcgcatttgcccctcataagactcccatgaagaaaggcaccactgttatcccatctgttattcacagatgggaaaggcaaggcttgaagtggttaggtggcttacccagtcacatatcttctaagtggtgcagccagaatttggcggggggagtgcgaccaagaaccctacactcagtcctgtgctctgtgctgtggaggagagatgaccaggagcagaaacttcattcagggacatctcaggcaccagctcccccatgagccagctaagttccctccctcccttcaccaagcaccatgtgtttcctcatgtgccgaatgaagaggattagatactcaagaatggaatgagtgggtgagtgagtccttcgctgcacccaagtctgattttctgtgcgcctgctcaccccaccctgcatgttctaagcatgcttccataaggctgtgccccaccctctgattctagagtctggactgtatcagaggtgagtgcctactagaggtaacaaggtcaggaccccaaaccttgtccatcccccaaagtactgagcccccaccatgcaccagcccatgccagatgctttgcacttgtgatatcacccatcccttgacaacccagcaagttctattattgttcccattttacaggcaataacataagtgctttcccagggtcccacgctggtgacagtgagggcccagggtctgagagcccagatcgcacatgtgcgggctggtggcaggggagatggcagcaagccagactcagacatttctctgc

SEQ ID NO: 281216 - DNA, 1000 bp, Homo Sapiens; identical to SEQ ID NO: 114741

SEQ ID NO: 281217 - DNA, 1000 bp, Homo Sapiens; identical to SEQ ID NO: 201679

SEQ ID NO: 281218 - DNA, 1000 bp, Homo Sapiens
ctagatgatgcaaatctacgcaagaatgaactggagacagagaataggctggtgaatcaaagacttctggaagtacagtcacaagttgaagaattacaaaaatctttacaggatcaaggctcaaaagcagaagattcagtccttctaaaaaagaagcttgaagaacatctagagaagctgcatgaggccaataatgaactacagaagaagagagccattattgaagatctcgagccaagatttaacaacagctccttaaaaattgaagaattacaagaagctttacgaaagaaagaggaagaaatgaagcaaatggaagaacgatacaaaaaatacttagagaaagccaaaagtgtcatccgtactttagatcctaaacagaatcaaggagcagcaccagaaatacaagctcttaaaaatcagctccaggaacgagaccgactgttccactcattagagaaagaatatgagaaaacaaagagtcagagagagatggaagagaaatatattgttagtgcctggtacaatatgggaatgaccctgcataaaaaggcagctgaagatagactggcaagcacaggctcagggcagtcatttctggcgaggcagaggcaagcgaccagcagcagaagatcatacccaggccacgtgcagccggccacagcaaggtagagaagttgtgccgctcaatcacagacacctgcacccacaacatacttctgttacacacaagaacatttcaggaaactcagccagcttattttttgtttctcttctatgtcaatacttagtgtttctcattttgaggactttttctctctcctgtatctttgttttagtttctttggtttttattttgtagtcctttcagttatttttaatgtgccaaaaatttgtacatgttcaattaaaaatgttgtataatagtgtaatacttttctttgtatgaaaatgtcctcttcttcaaaggtataggctttgtaatgaattagattttctg

SEQ ID NO: 281219 - DNA, 1000 bp, Homo Sapiens
tgcaccaatttctgtcaatagatttctccagaggacattgtgttcatgacaatctatcaccacaaggcaaaatcagacagaatttggggagagcatgaaatttgttaccttctgcttgtgaggaaaaacgtcactctgaacccggatcccagtgaaacgaaaagcatcctctacctgtcccaggaggagctgtgggagctgctggagagggaggcgaggggtgaagtcaaagtcaccccctggctaagaaccattgccgagaggtttctgtaccggtggtggcctcacctggatgacgtgaccccgtttgtggagcttcacaaaatacacagagtgtgagaggcagggaggtcgagtcagccatgtgtaatgccctcagtgcaggcagacgcaccattgaggcaatgatacaccctctccaaaaaacagggcaaaaggggcacttgattgcccatcatgtataaatcactatttcaaccttttcatcaactttgtcatatcttcattttcccttttccttatttccatatttctcatctgcctggttgcagggaggaaatttaacatttcctttgtcccaatttccattttataagcacttgtttgattaacagcagctgatcctgaaagtcttggggagatcttgagagtcctgaagcaggcggactagcctggctggaccatgaggctgtctccccacagctttatccaagcctccaaggtcaggatgggatctctgtatcatgtttttctttttaaatcacttatttcagagtgcaacacaaggctgcatttttaaaaaaaagacacattcaatcttgcatcctaatacaagcagtacggaagatgcgtatggtctcagccaagtgactcgacgtttatccacttctgttcatttgatcgtttcagtaatatgcttacaaataaagacatacttgctttaaaacatactgttgttgtttaacacaaagtaaactatatgttaagttttggtgtttaa

SEQ ID NO: 281220 - DNA, 1000 bp, Homo Sapiens
gtaagccttaggtttgggagtctggtgggaacaatgccaccaccactgacagtagcgacacccttcatggattgcagctgggagaagtgaagtgactcacccaaggtcacacagtgtggcagggccgagcaccccccgcccctgccccatcccagggcccaggtcgggtggcgcagcgcggggcaagagaagacccgggcgtgtccaagcctcgagcaggcggcaggtgtggtgggcggggctaggggcggggctccgtggaccagggtccagccccaagcggggcgcgatcctgcccggtcgcgccgacccccggggtcctcatattgtctgtggcttaagaggggagtcgtcacaggcgtcaagtcttctttctaaagccggggacctggggaggaggtgggagtttacgggaggaagggccacggagatgggtcgcttctcctggagctagagctgcgggctggggtctccagggttcggcccggggagccgaccctggtcgccgtcggggctctgctcggccctcctgaaacctccgcctcctccagcagggggcgggccggggccgcgtctcggggggaaggcgatcaggtcgccccctcctccgattcccccgccttccaggacagcctccagcccagaggggcggtccgggggcggggtcgcaccgccccctctcgctcccaatcccggggcggccgggcgggggtgggcagggggcgtgaggccgcccctgcgtcccgggggccccccgaaaacgcgctccgggtgcccggtccctccgctgcgccctgccgccgtcctcccgggggtctcgggcggccgcggccgtgtccttcgcgtcccggcggcgcggcgggaggggccggcgtgacgcagcggttgctacgggccgcccttataaataaccgggctcaggagaaactttagcgagtcagagccgcgcacgggactgagaaggggacccacccgagggtccagccaccagccccctcac

SEQ ID NO: 281221 - DNA, 1000 bp, Homo Sapiens
tgatggccaggctggtctagaatccctgacctcaggtgatctgcccgcctcggcctcccaaaatgctgggattaccggcgtgagcacagcgtctggccctatatgcttttttcaattcaatggctacttgcctaattttgaatggccaaaataaccttccagttattttcccttaatggaatcaacctagaatagttgcctggggagagggagctggggggcagtgattggaaagagacatgagggaactttttggagggataaaattgttctatattttgatttaggtgttagttacaggatattttcatttgtaaaatttatgaactgtagaccttagatctgtgcattttaccatatataaattatatctcaatttaagcatagaaaaagtaaaccaatgattgtgatatacttggctaatgtccatatgctacagtgtgttgaaaagaaaaataataccctattgagaaggtagacatgtactgcaagcataagctatgaaaacagagaaaagccgcagacattgttaacggactgagctgggatgtttccagttgtggggattctgagcctcttttgtaatgtgcttaatcacttctaattgtacagtcagctaattacagtaattagtcttgccttagttcaacagagttgaactaagtcattctcttagcgggactgggttgaattttcctgcatctagcgacttcctcagattgtggcctgcaatggtgcattcccggggctcaagaagtgatctgtttgtgctgggttttcaccactgggtgtttgaggggtgagggatgtgactaatcatggagccagtgagtcacgcgtgtcaggcctctgagcacagcaagagctctttgggctctgcactggcaccactctcggcgtactgacccagccttgcttaggtccaagtcaatcacattgtttttttttttttttgagacagagtctcactctgtcacccaggctggagtgcagtggcatg

SEQ ID NO: 281222 - DNA, 1000 bp, Homo Sapiens; identical to SEQ ID NO: 201670

SEQ ID NO: 281223 - DNA, 1000 bp, Homo Sapiens; identical to SEQ ID NO: 201671

SEQ ID NO: 281224 - DNA, 1000 bp, Homo Sapiens; identical to SEQ ID NO: 201603
  misc_feature (914)..(914): n is a, c, g, or t
  misc_feature (977)..(977): n is a, c, g, or t
  misc_feature (989)..(989): n is a, c, g, or t

SEQ ID NO: 281225 - DNA, 1000 bp, Homo Sapiens
ccttgaccagatcagctggtgtggaagtggctcctgtcatactgtggagggcgtttcatttctcccattgcagattcctctgtgatgacctgtcatctccctgtctctcgcctctctctctccacacagatgcagaatgtcatgtatgacttaatcacagaactcaatgaccggagcgaagacctggagaagcagattggcagcctggagtcgaagctggagcatctcaccgccagcttcaactccctgccgctgctcatcgccgacaccctgcgccagcagcagcagcagctcctgtctgccatcatcgaggcccggggtgtcagcgtggcagtgggcaccacccacaccccaatctccgatagccccattggggtcagctccacctccttcccgaccccgtacacaagttcaagcagttgctaaataaatctccccactccagaagcattacccataggtcttaagatgcaaatcaactctctcctggtcgctttgccatcaagaaacattcagaccagggaacggaaagaagagagaccgagctaattaactaactcatgttcattcagcgtgcttggtccgacatgccttgaaaccagaaatctaatctctgtttaggtgcctctacttgggagcgggaagaggagatgacaggaagcgacgcctctggcagggcccttgctgcagagttggtggagaacagaaatccacgctcaatctcaggtcttcacgcggggggtgggggtcagatgcactgaagtagccaacagcgaagccagtccagaagaggggtccgctgggagggagggttgtgtcaggcttgggggatgggctcttcgccatgggggtctttgaacacacctctctcctttccttttgtctacggaagcctctgggtgacaaaagtaaaagagagctgcccacaacttgccaaaacagatatactcgaatcagactgaaaaaaaaaaaaaaagacacagacaaataaaaagccaga

SEQ ID NO: 281226 - DNA, 1000 bp, Homo Sapiens
tttaaagttaagccaattaaaatcacataagattaaaaattccttcctcagttgcactaaccacgtttctagaggcgtcactgtatgtagttcatggctactgtactgacagcgagagcatgtccatctgttggacagcactattctagagaactaaactggcttaacgagtcacagcctcagctgtgctgggacgacccttgtctccctgggtaggaggggggggaatgggggagggctgatgaggccccagctggggcctgttgtctgggaccctccctctcctgagaggggaggcctggtggcttagcctgggcaggtcgtgtctcctcctgaccccagtggctgcggtgaggggaaccaccctcccttgctgcaccagtggccattagctcccgtcaccactgcaacccagggtcccagctggctgggtcctcttctgcccccagtgcccttccccttgggctgtgttggagtgagcacctcctctgtaggcacctctcacactgttgtctgttactgattttttttgataaaaagataataaaacctggtactttctaaactgcttgcctctgtcattttcgttcataacaagtcatcctttttgggctctgtatccccttgatctcagtggagcatgaagaaactccccggaccaaatcccctacgggtgccagacatgccgggggtgggcagagggtgggggcagagaggtaagaaggcaggaaggggcctagagaagagggaagacttcagaacatgcaccctgatggcctatgcagcatatcacccctacttcaaggttttgtttaggtggcactgtgtttaaatagcaaacacaaaaatctttgcgtcagttgccatccatagaaatcaggaggtttcacataaaaatccagatttctcacttttcttgggaaaaagaaataaaaaaaattggcaactgtcagcctgcatggcaacaagagagctgctgagtggcaggcacccatctaga

SEQ ID NO: 281227 - DNA, 1000 bp, Homo Sapiens; identical to SEQ ID NO: 114742

SEQ ID NO: 281228 - DNA, 664 bp, Homo Sapiens
tctgggctacaagtgatcctcttctgtcagcctcctgagtagctgggaccacaggtgcacgccaacatgccgggatcatttttttttttttttttttttacaataggccttcagctggattcatttattttgaaatggtggacaaccgcagctgcagacctcaatctatggtacatatcaagcaatgcaactttttcttgtcatgtcatgacttttgtctgcttcttgggagcacttccaccatcattagtagcacttgatatgggtcccatgatattattcaaattatttactgtattgtgctaaacatgatggaaaatatggaactgctagagaacactttttactgtgatacacaattgactggagagatgaactgctcatttgaagatgattagcgtcacgtggcattttaagtgaatactcccaacccttgagctcatcacaatggcaacagaaggtggctacaaaattatcagtcgtacagtatgtactacagttaattttatacagttatgatttcatactgcatctttatctgtttacatttctctggactgtgaatggcgtcacgtagtctgtgtgcaaattgttttgataaattataattaaaaaaaacttgtgtatattttatggtaataaatgataaaatgcaaaaaaaaaa

SEQ ID NO: 281229 - DNA, 1000 bp, Homo Sapiens
  misc_feature (709)..(709): n is a, c, g, or t
  misc_feature (733)..(733): n is a, c, g, or t
  misc_feature (806)..(806): n is a, c, g, or t
  misc_feature (819)..(819): n is a, c, g, or t
  misc_feature (874)..(874): n is a, c, g, or t
  misc_feature (899)..(899): n is a, c, g, or t
  misc_feature (916)..(916): n is a, c, g, or t
  misc_feature (919)..(919): n is a, c, g, or t
  misc_feature (944)..(944): n is a, c, g, or t
  misc_feature (985)..(985): n is a, c, g, or t
  misc_feature (995)..(996): n is a, c, g, or t
aggcctgactacaaaaagatcggctcaaaggcccctcagagtgttggcagcatttgtttccttgtggttgtaagattgaggtccctcttgcctcactatctgtcagctgggagtgacctcacctcctccaggctgctatcaggttatgccacaggccccttccgtttctgtaataaagaactgccctcatattgaatccatatcacacctcagatttatctgatttcccttctgctttcaactagacaaactctctgcttatagaaaggctcatgtgattaaattgtgctctattttaaggtcaagtgtgctatgtaacatgaccaaataatgagagtaaaatctattatagtgacatgccctggaattatgtagaagcgaaactattgctggaggggtaatctttggggccaacttagactattgattattccatgttcaaggagagctggcatataattggagagctaagaaccgtcaatatctcaacatctaaaaaaataaaaattgtaattgtatttaaaatgttaggaaacatagttagaaatttagggttttaagcagatataaagatcttttaatcatgctaccacctaattacaatattagataaagaagaacaattaagcctagtctatatgttagagaaatatagtaattttttctggaatgatttattatgtgcagactttgggttattggaatagancattgaccatatatgttttaaagnacttaaaaaatattttataaataaaagttatttttattacagaaacagaaaataggttggatattggaatcangaaaaatactgtnttaagcataaaggcattatgttttaaaggaaataatatttcccttaaccaattangggaagaaaaccccagggccaaccncttgattgtaaaaaaangantttaccaggacattgaagctgcatngccccttgggtttatgggactaagaaatttttatgcccttnttaaaaacannaaaa

SEQ ID NO: 281230 - DNA, 1000 bp, Homo Sapiens
cactcccgccgagccctgtcccccgagatgcacgctgtcacctctgagtggatctcactgactgtgggggtcccaggcaggcgttctctggccctgaccccacccttgcctcctctgccagaggcttctatctataacactgaccacctcgccttgtcaccaagggccagtccctccctgtctctcagcctcccccatttgagttggtcagatcgtcccaccccacgatcagtagcttctccactggccctaccttccccacacaaaacctactccctagcacctacttcccaggcctcccttcacatgaatggagacggtggtgtccacacgccatcttcaggcatccaccaagatagcttcttgcagctgccgctggggagctctgatagtgtcatctcccagcttagtgatgcctttagcagccagagcaagaggcagccatggcgcgaagagagtggacaatatgagaggaaagcagagaggggggcaggcgaaagaggccctggtggacccaagatctctaagaagagctgcttgaagccttcagacggtgtcaggtgcctgagtactgaacagagactctcagatctcaacacccctgaggagagccggcccggcaagcccctgggtagcgcttttccaggaagtgaggctgagcagacagagcggcatagaggtggcgagcaggcggggaggaaagctgctcggagaggtgggagccagcaacctcaagcccagcagcgaagagtcacccccgacaggagtcaaacctcacaagatttatttagctatcaagcattatatagctatataccacagaatgatgatgagttggaactccgcgatggagatatcgttgatgtcatggaaaaatgtgacgatggatggtttgttggtacttcaagaaggacaaagcagtttggtacttttccaggcaactatgtaaaacctttgtatctataagaagactgaaaaccatggagattatttttattgg

SEQ ID NO: 281231 - DNA, 1000 bp, Homo Sapiens; identical to SEQ ID NO: 114743

SEQ ID NO: 281232 - DNA, 1000 bp, Homo Sapiens
ttttgggcggtccagaaaccataagttatcaggaaggtgcttataaatgggcagagtacatcacttgcccaagattctaacaacctagcctgccccccacacactgtggggcaccgtttgctacttgccaagtaactgccttttttggcaaagaccacccaggacatggctcagagtccatcctaaggctggccaacctctgtaaatctcgtgtcccctgattcagagcgagtgcatttaattcaggaagatcacttacgactgagtttttcatcatggctttgtctgtgaaaccctcagaaaccagagagtgaggctggtgcaccgggagcggctgttgtgccagcagcttggtcctcttcggcatcttgtctgggcatttgtttaagctcagggtctctttttctgccaccatcttcctagaaaatgtcttgttctcataaaaagtgtagtaaaagaatcagtgggctttacggatgtgagcaggaggtctggaaaaaaatatcaaaaggcgcgataatggtagaaattcaacccctcgtagtgcccaggttgatccagatgtttggcagctcctaggtgaagggagctggaccctaggggcggggcgggaagagggcaggaccttggctagagctgcaacaagcttccaaaggtaagcctcccggttgctaagcgactggtcaacacggcgggcgcatagccccgccccccggtgacgtaagattgctgggcctgaagccggaaagggcggcggtggggggctgggggcaggaggcgtgaggagaaactacgcgttagaactacgactcccagcaggccctgggccgcgccctccgcgcgtgcgcattcctagggccgggcgcgggggcggggaggcctggaggatttaacccaggagagccgctggtgggaggcgcggctggcgccgctgcgcgcatgggcctgttcctggcccgcagccgccacctacccagtgaccatgataggtacgtgggta

SEQ ID NO: 281233 - DNA, 1000 bp, Homo Sapiens; identical to SEQ ID NO: 114744

SEQ ID NO: 281234 - DNA, 1000 bp, Homo Sapiens
ggatcacttgaggtaaggagttcaagaccagcctggccaacatgataaaaacccatctctactaagaaaacataaaagttaactgggcatggtgatgcgtgcctgcagtctcagctacttgggaggctgaatcaggagaatctcttgaacccgggaggcagtgctttcagtgagccgagatcgtgccactgcactccagcctgggcgacagagcgaggctccaaagtacagatgtcattaacttcagtttgtgttatttccctttcacgagaagggctcaaaaaatatttgggaaaactacttgtctcaacaccctaaaatgcttttttttgtagcagaagcaggaaaggtttgaccaaacatacctgacattaggaagaaatgcaacaggcactcatgcttcctggtgtccacgatgcatgtgccaggagccgagcagagggcctggtgttgagcatttctgatcttcccaagcagctttccccaccatggattacacaaaacattggttctacaggatgctaacaggtattccttgcaaaaaggaattttgttgtttagaaaaactgagttaatgaaagtggaacccattcttttgttatttgagaattcccaagatgaggatatgatattgagcatttgccaaactcacttgataataaaaaccttttccatctcataggattgatgttccaaagaccaaactttgagaatcactgctgacaacaagcttacaatataatatttctctttgtatctcacaaataggaaagctgaggtcaggtaaattgaccaagatagcaaaacctagtgattcaaggactcagggtcagaacccagagccacctgacctcaaacccatgttctgttccactctctccccgaaaggggctcagactgtagggtgcccctgacccaagtgagtgcctgaagccagagggcgaatatgaaatcaatatcagagcttgaatagagaatcccaaactgactgtgttgatcc

SEQ ID NO: 281235 - DNA, 1000 bp, Homo Sapiens
acgttccatggctgagtcacattctgttgtatgggtggatcacattctgttcacccatttatcaaccgaaggacacttgagtcgtttctactttttgctgtgcccctgtgtgcatgtctttgtgtgtggacgtatgtttccgtttctcctgtgcacacacccacaactagaattgccgagtcatatgatgattctatggtttaacattttgagtaaccgctagactgttttccaaagtaactataccaccagcaatacacgaggcttccaatttctccgcctcttgactgacagtgggtatcatctgatagcctctggggtttttgtttgtttgtttgtttttgagacagagtctcgctctgttgcccaggctggagtgcaatggcatgatcttggctcactgcaacctccgcctcctgggtgcaagcagttcttctgcctcagcttcctgtgtagctgggattataggcacatgccaccacacccggctaattttgtatctttagtagaaatgcgggtttcgccatgttggtcaggctgaactcctgacctcggtgatccacgcaccttggcctcccaaagtgctgggattacaggcatgagccaccatgccaggcctccttatggttttgatttgcatttcctcaatgacttataaggtcaaacagcttttcatgtgctctccctatatcttctttggtgatttgtctatgccctttaaagaatttgactagtggccaaatgcagtggctcgtgcctgtaattccagcattttgggaggctgaagtgggcaggtcacttgggcccaggagtttaagacctgggcaacttagtgagatcctggctctacagaaaattttaaaaatgtagctgggcgtggtagtgagtgcctgtagtcaggcaggctgaaatgagaggataacttgagctcaggagttacaggctgtagtaagctatgatcacgccactgcactccagcctgggcgacaaagtgagatcc

SEQ ID NO: 281236 - DNA, 1000 bp, Homo Sapiens; identical to SEQ ID NO: 203896

SEQ ID NO: 281237 - DNA, 1000 bp, Homo Sapiens; identical to SEQ ID NO: 114745

SEQ ID NO: 281238 - DNA, 1000 bp, Homo Sapiens; identical to SEQ ID NO: 114746

SEQ ID NO: 281239 - DNA, 1000 bp, Homo Sapiens
tgcctctgtgaggagcactggcctgtgggcacttgtcagtgagcacagatctgggctgggagtccttgttctgtaggcctcttcccctgagtgtgctgaaaacatattgacgtggaactcacttcttcctgggttcaagtgattctcctgccccagcctcccaagtagctgggattacaggcgcctgtcaccacacccagctaatttttttatttttggtagagacggggtttcaccatgttggccaggctgttctcaaactcctgacctcacgtgatccacctgcctcagcctcccagagtgctgggattacaggtgtgagccaccgcgcccagccttttttttttttttttaaagcaaatctgagtcgtatcattccagccataaatataatcacaatactgtgatcatgtccgacaaaacggacagactcctgagtgttctccaggctgcaagcccttgtgcagtttaccttttgtctcacaagtgactgcattggcatcggagcagcgccccaagtctctctggtttagaacagctcccccttgcatcccctcccctccaagttcctcccatccatctattgaaggaccttggtcgttgacttgtggaactgcctgcatgcgggatctggctggttgtgccctgctggtgttcttttatacccattttttctttaaactggtaggatcaggggctgggtgagcgtcaggtttgctttttcctttggcgagaacgctcatagctggtgctgtgttctccaggctcctgaaggcgtgtggcagccggctgaccgagaagctcctggaaggtgctccgaccgaggataccttggtccagatggagaagctcgctggtgaggcaggggtgctgttgccggggccttggcccggatggccgtggggcggtaccagctgtctgctctcctggcaggaatcgctgagggagggaaacgcggctctgaatcagcccagaacgagccttcgggaagctcaccctc

SEQ ID NO: 281240 - DNA, 1000 bp, Homo Sapiens
tttatttatttttgagatgtagtctttgttgcccaggctagagtgcagtggcatgatctcggctcactgcaacctccgtctcccaggttcaagagattctcctgcctcaatcttctgactacaggcgcatgccaccatgcccggctaattttttgtatttttagtagagacgaggtttcactgtgttagccaggatggtctcaatctcctgaccttgtcatccgcccacgttggcttcccaaagtgctgggattacaggtgtcagccaccgcgccccacctatttatttttatttttttgagacaagactctcactctgtcacccaggcaatggcgtgatcttggctcactgcaacctccgcctcctgggttcaagtgattctcctgcctcagcctcctgagtagctgggactacaggcgtgcgccactacgcctggctaatttgtgtatttttcgtagagatggagttttatcacgttggtcaggctggtcttgaactcctctcaagtgatccgcctgcctcggcctcccaaagtgctgggattacaggcgtgagccaccatgcctggccgcagcattatattgaatcaaagctcatcgaaacctgttagttctatcaagttgataaactaacactttttttagcctttccctcagaattgcttggtaaacacgagcatgttctattgcaaaaccaccatgtggaacttctggttcctttccaaactgcagacgtcagctcatctccctcagaaatgagaactgaccctcctccccacctgcagggagcccaactccgcctcctctcagccaaacttctcatggatatagcttatctcccacaactaaactaagttccttgaaggtaaggactgagtgctactttttaaaaaatctcctgcggtacccaacactgctatacatgaagaatattttccggccgggcacggtggctcacgcctgcaatcccagcactttgggaggccgaggtgggcagatc

SEQ ID NO: 281241 - DNA, 1000 bp, Homo Sapiens
acttgtgaattttaatttcatttccaggctaacctactttttatttaatgcaaattacagtaccagttaactatttccaaaccaagtcacatagaacaaaatgtatttacaagggaatggggaaagggaaaaaaaacattgagcatacttttcacaaaaaagtttatatttaaaatgaaaaaaaaaaatcagtcacagaggcattcaagtagtaataatgttatacagattttgcttttcctttatatcaagacagatttgcacaagtgtttgcaatagtttgtatacaacccacagtcctttatatatatatatatatatatataataaattttgttttttaggtttgtttttaagatggaagtggtcacgctaattggtatgtgtacaggcccaagtgatccatcggcaacacatttataaatgcaaattttacaggcaagcagattttcatacaactatctgtatctgcctgtagacagatatagttaaggaacaaaaaacttaccgattaaacaccaggaagtctacgttgtgcagctaaccccttatgtgctggctgtcattttgcttttattgcagaggtgcaaaacggagcaacaaacttgaataagacgggtttttttttattttttttttttttttggtgggaagttactttcaaagcctctcaaaggtagatctcagtctgggactctactgtgcttctagttgtctcttttattttcagtggctcaggtttctaccagaaaagacagattttattgtaaagcatacctacttttccacacaggggagaaaagtgtttggctctgtgattaggtgatccctaacctgaacagtaggattcagataccatttcagttgaaaagaaagaaacccccccaatttcctggggatcgggcatgggccaaacttcctttggaagatttcccagtttaatccttttaaaagggaaaggggaaacttggttgaattgccgttgtcttcatataaagaa

SEQ ID NO: 281242 - DNA, 1000 bp, Homo Sapiens
agaccagcctggccaacatggtgaaaccccaccactactaaaaatacaaaaattagccgggcgtggtggcgggcacctgtagtcacagctactcggcaggctgaggcaggagaatggcttgaacccaggaggcagaggttggttacagtaagccgagatcgcgccactgcactccagcctggacgacgagcgagactccgtctcaaaaaataaaataaaaataaacctttttcctgagtaacttcagccagtcactaccacaagttgagattcccaagtctgcacctccagccagaccttgctcccgagctgcatatctgggcacccaaccgtccgttaaagccatccatctacatatcccaaaaggtgtcccgaattaaacaggtctaaaaccaaactgacttccgccaatccccgtttcagctcctccttctgtgtgcgtgtggtggggcgacgcaggtccactcactcgagatgctgtcacaactgcggtctctttccaggaaccccagcattcacacttgctgccaccgctctttagaaagccctctttgccaccatccttccagtttgtcaaactcctactcacactttaacagaaaatcttctttccctgacccccgtcccatacaaagagagccgctctctcttttccctgacaacactactacagcctcttccaccacagacgtcttcctctgccctgtttacttgactcgtgggaccgtccacacccggctcctccacttccacgaggagacggagtgtcaacacccgagagagggaacctgagaggagcttgaagcagaggatgggcccagaagtcgccggcgtccgcaccgaggtcgtacctcgatatactcttcctcgtccaggacccgctgcttgctcgtcgcagccccagcctctcccgcctcgcgcttcctcgggggcctggacgcggcgggaagcaacaaggacgacgctgatgcgcccggcgtctccatcgctatcccaggaa

SEQ ID NO: 281243 - DNA, 1000 bp, Homo Sapiens
gaaaaaaaaaattatgtatgtatacacacacacacacacacacacacacatacatacttgccggcactggtaggtctcagtgacaattatcaggaggaagggagggtagaatgctcgcaatggtgttcctggctcccaccccccatctcactctgtctttccttccagacactcacccacggcactgcagtttgcactcgcacttacgagaaagaggcatgacctgactgcactgttgctgactactactctgccaatcggctacccctcgactcagcaccacattgcctcatttcttcctctgcattttgtacaaatccacgaattcttctggggtcaggtgccactgaccgggatccagttccagttcccatggtgtatgtggttttttttttttttttttaactgcactcatagggtgctctgaggtcaataaagcagagccaaggccacccagttgccttttggcctttggtaacataactctgggagtcttggtttatcctgtgtgtcagagagtgggcagaaataacggcctgaaggttactgaggaagaagcactggatgggagactgaaatggacagtctcggagcctgttaatcagctgatcaccttacacatttaataataaaagagctgtacctacacgttgcctttacactgccccccctccatggtcaaatgacctagttcagtcagtgatggggcttccccaggtttggctattgaactgtcacttcaggcccatcctacactgaaagctcttgggtctggctgttctctgtgaaatgctgtagtctctccctttccagaattcaggttcagggcacagaacccaggcttgtaccatggtggtgggagaaaatgaccactggccaagaggactgctgacctgtgcaccaggctagtacttatgactacaaattcttactgcttctctaatcaactctgagggaagagggcatctgatcattacaaaagggagggcttataagtgat

SEQ ID NO: 281244 - DNA, 1000 bp, Homo Sapiens
ccccagctggtaaatagcagaggcagacctagaggccagatgctgtgcctactgggccactgcaatctgtactccaggatcctgcctcctggtgactctgcgaccttggcatctaggctccaaggctttacactacaacttatgctgcccctaacagccacctaactcatgtccttgcaggacaccccaccccactactgttgctgcacaaccctggcaatgccagtcgtcatcttgtccaagttagactttagcttttctcatgacccccaactataaggacattcaatacagcatatagtaaaaggcaactaattccaactagtgggtatgtataggggggaagtcagcctaaatgagtgaaatctaaattatgaaattttggaaagacactccattttattatacatgactggaactagattaatgaagggcaacctagtagagacacttttcaggccttactttcatgcatggttgagtgatctgtggaagcctaggtagagtgcgaatcttctgcctgtgggcttcagcatcacacagacctggattggaacccttgtctcttctactcattagctatttttgatcttaagcaagttcctttttttttttttttttggagacagggtcttactctgtcacccaggctgctgcagtgcagtggcatgatcttggctcactgcaacctctgcctcccagtttcaagcgattcttgtgcctcaacctcctgagtagctgggattacaggcacgtgccacatcgcctggctaatttttgtatttttcgtagagacagggttttgccatgttggccaggctggtctcaaactcctgacctcaagtgagccacccacctcggcctgccaaagtgctgggattacaggcgtgagccactgcacccagtgagttccttaacttctctgagcttcaatttctttcttttttttttttttgagacacagttcactctttttgcccaggctggagtgcaatgccac

SEQ ID NO: 281245 - DNA, 1000 bp, Homo Sapiens
tttttgtattttttagtagagacggaggacagggttaacttttacaggttgtgatagacgtgtatttgtagaccagtgagccttcgcttttctgcattatctgtccccattgccaccccactgtgatcttggaaggctcctaataaagatttaattttccatgagctcagtggaatagcagcaccgagcctgataggaaaaagtcgaagttaaacatagatagtttgaaactagatcgttctgtaagccttaagagcaaaacagccgacctctggtctagtcctcccagtcccagagtactggtccccagactaaccaccttcaacattttaagctgttcttctaatacctgtttccgtatgttttttatttttttgagacagagtcttgctctgtcgctcaggctggggtgcagtggcatgatcttggctcactgcaacctccgcctcccggtttcaagagattctcctgcctcagcctcctgagtagctggaattacaggcgcacgccacgacacctggctaatttttctatttttagtagagacggcgtttcaccatgttgggcaggctggtcttgaactcctgacctcaggtgatcctctcggctcagcctccctaagtgctgggattacaggcacgagccactgcgcctggcccgtatttttaaataatagtcattttctgctatttcttgcattttcagttatggagagtatgtgttgacttccttctgtggcagatgaggatttaggtctcacagaagccactcccccgggggcttatcatttgtgttgagaacattcaatatcctcctagcaatttgaaactatatattattaactatagttatcctgaagtggtatagagcactagaacttattcctcctatctagctataattttgtttaacaaatctctcccatccttgtcttcctcctaatctttcccatcctctagaatcctgttatactttttatttctgaaatcaacttttttta

SEQ ID NO: 281246 - DNA, 1000 bp, Homo Sapiens
gacacacagaccaacagccagtccctccttgttccccaactcaccggccacagtcaggcaccagggcctggcttgggggtgatggactctcacgtcttggatgcatgggttgagtcaccaggaatgatctcattcacgacttattcttctctggctcaggcaactttctgggggctggtgacacctcgatcttggtcctgccatacctagaggtcgggacagacgacgctacctgcccagacaccaccaagttctctgcctgcaaaacctgggaccaggactcctgtccgcattcccaaatttggctctgagtcgaggcaacctgcacacaagaccccaccaaggaatgtgcaaggactgagatctgcagacttgtgggtaactgatcacagacctcagcatgggggtgaccagggtgactcttcaatccctatccccatgggctgggtacaggatatcctcctaccccatgactgtcttagggagacttggggtaccttatggatttgatgaatgtgggggaactcagaggaactggggccaccaaggttggaaaagggtttggttcttgactttgtattccttccaatacagcaataaactttgtctccctttttattcattcattcattcattcattcattcattcatcatttgtggaaggctcacttggatttttgtagagttgtgtctgcagaggcaagactttgtggtaggatgggtgagaatcttgggtgccccctgccttaccttctctatgccaccaccatctcccagaaacctgacccttcttccacctcttctccagctcatattgaattttctagcccctttaatccttctgctcatggcatgccctagcacattttgagaggacacgtagcaggcctcctttcctttagtagattcaggagaggcatgcctcgtatagacctgaaatgaagcttttaatttcgtgaaccccagtttctacaactataaaagggacattaaaattagg

SEQ ID NO: 281247 - DNA, 1000 bp, Homo Sapiens
gtttaaaactagtatttcatgaggccaacaaatatattaaaaagtgctcaacataactaatttttagagagatgcaaatcaaaaccacaatgagataccatgtcacaccagtcagaatggctattattaaaaaatcaaaaaacaacaggggctggcaaggctgtggagaaaagggaacacatacacacagtttgtgggaatgtgaattagttcagccactgtggaaagcactttggagatttctcaaacaatttaaaacagtagtaccatttgacccagcaatcctattactcggtatatactcaaaggaaaataaatatttggtagaaaataaatctttctaccaaaaatatacatggactcatatgttccatcactgcagcactattcacaatagcacagacatagagtcaacctagatacccaccaatggtggactggataaagaaaatgtggtacatatacactatggaatactatgcagccacaaaaaagaacaagatcatgtcctttgcagcaacacgaatgcagctggatgtcatccaaagcaaattaacacagagacagaaaaccaaatatggcatgttctcacatgtaggtgggatctaaacattgtgtacatatggaaatagagatgagaacgatagacactgggcactggggactatagagaggggagggtgagaggggggtgagaactgaaagcctatcaggtactgtgctcatctgaacaacaaacctcaacaacacgcaatttatccatgtaattaacctgcacatgtacccccgaaacctaaaataaaagttcaaaaaaaacctgtggtatttaaataggtattgtgtctaaaaatgcatgctatctaaaaatgtagttttattgcactgtataagaatacgagaggtttaaaatagacactctaaaagttataagccctaatttacatatattctctagcctttctccaccttctatctaccaaaaaagcaaaaccgtaggatc

SEQ ID NO: 281248 - DNA, 1000 bp, Homo Sapiens
ttcctttctctctgtccagtggcagagaagcccatacttttgaacgcagcttgttggctactgtaaaagccctgctctgagcaaggaccaatgagcacgcggagtccaaactcttggaaacagtttgtggccaggagtacttgacattgagacagcctccgagttgtaaacaagggcgagcctgggcgggaccccagcccacgcgactcggagccccgtcccaagaggctaatcttaagcccacgttgccccagatacctgtttctgcttcctcttccctgttcttcccaccctttttccgtcacagccgcgggcaccggtgccagggcactccgtggtcaccgtgccaggccattctgtgatgaccgcggctggaggggcggagcccatagttctttctctgatctgattggcgcgacctggagttcaggacgcgtttccaagttccagtgactcctcctgtttgggactcggggggagagtgcggggagacaaataaaacctcgggcggcggcggctggtgggaagacttgaacttgaatctcgaaccactgcatctccgactctgcccagactcttcactccgcggcaccctcaaaccccagcccaggccggggcgcacaagccagccagcgcacctgcagtcctcgcccggacgcgccgcgccccctcggaaccaggctctgctccgagcagccttcgcccctcaagccagccacagtccccgccaggccgggtgggcgtcaagatgaaggcggcccgcttcgtgctgcgcagcgctggctcgctcaacggcgccggcctggtgccccgagaggtggagcatttctcgcgctacagcccgtccccgctgtccatgaagcagctactggactttggtgagaggggacacagggcccaagctgggtcctagggttggggaactgccttaactttcagccttggtagagggagggctaggctcaagctaaaacaactggggttcactttgctgctgagc

SEQ ID NO: 281249 - DNA, 1000 bp, Homo Sapiens
tgggaacctgtgggatgcatctggattagaaacttccacaggagctaatatgtcttatagcaactccatggacatagcttctagaatttctgtaagagacatgccaattacaagagtcactatactcagggaggcccaaagttatagtatccattagcatagtcaatatttatagttcatttataattcttttggtaatcaggaaacatttttaccataaacaatattgttgggtaacataattgacctattaataagttttcaataaaacagaattgagaaaattaaccaaaggttaattctcatgtacaaaggtaaagtgttttgttaaccttttacccaaaagtgatgatatgaatgtagatttttttgggtgtttgaccaaggaagccaaaccattctttcagattatgttagatttgtagctttgtggagtgttgccagagatgttactttctgtgtgtgagtttgatgagctaacctggagtttgtttgttggactggccaaaacaaatctgagccaactatggtccataccagctgacactgaagaagttcctctcaatgaagtaaatggaattgaagggtttccagagagattaccagtgataatacaggcatgggaagtgatataaaattctcaagaatgaaactgataggccaccaccaatattctacctgaattctatttctcatttcacttgggggaaactaggtcaaactaacatgtgtactaatatatgtctaacttaggcatacgctctagagcagtgattctcaatctttttgagatagtaaatttatttgagaaaaggatgaaaactgcagacttcttcctcagataaatgaacataaagmcctacatgtggacttttgcttatcatgtattgtattggaaattaattttctttgatacttagactgtgtaaacaattttcacaaggaagggatttcaatttaaaaatcaatttccagttctggggaaaaaaaaaaaaaaaaa

SEQ ID NO: 281250 - DNA, 1000 bp, Homo Sapiens
aggttctgctctcagatttggagagtagtttacatttgactctgacagtagtgttaaaagggttttttccccctaaagtgttttgaggaatcatatactttggattattaattctctttatttgacattaaaataacaaatttttcttaggaatttggatatctttaagttaataaaaggtattaacatgcagtttctaggataaggatacccagaaactacttttaaacatactacacattcaattctgttttctagtagccagagaagtccatcacctggtcccaatcatacttctaatagtagtaatgcatcaaatgcaacagttgtaccacagaattcttctgcccgatccacgtgttcattaacgcctgcactagcagcacacttcagtgaaaatctcataaaacacgttcaaggatggcctgcagatcatgcagagaagcaggcatcaagattacgcgaagaagcgcataacatgggaactattcacatgtccgaaatttgtactgaattaaaaaatttaagatctttagtccgagtatgtgaaattcaagcaactttgcgagagcaaaggatactatttttgagacaacaaattaaggaacttgaaaagctaaaaaatcagaattccttcatggtgtgaagatgtgaataattgcacatggttttgagaacaggaactgtaaatctgttgcccaatcttaacatttttgagctgcatttaagtagactttggaccgttaagctgggcaaaggaaatgacaaggggacggggtctgtgagagtcaattcaggggaaagatacaagattgatttgtaaaacccttgaaatgtagatttcttgtagatgtatccttcacgttgtaaatatgttttgtagagtgaagccatgggaagccatgtgtaacagagcttagacatccaaaactaatcaatgctgaggtggctaaatacctagccttttacatgtaaacctgtctgcaaaattagctttttt

SEQ ID NO: 281251 - DNA, 1000 bp, Homo Sapiens
gctgcggctgagtgcgctgtgcttagtgctggacacccgtgtccccggccctttcctggaggcccctctaccacctgctctgcccacaggcacaagtggcagctataactctgctttcatgaaactgcggtccactctctggtctctctgtgggctctacccctcactgaccacaagctctacctacccctgtgcctgtgctcccatacagccctggggagaaggggatgacgtcttcccagcactgagctgccccagaaaccccggctccccactgctgctcatagcccataccctggaggttgacaagccagaaatggccttggctaaaggagcctctctctcaccaggctggccgggagcccacccccaatttgtttggtgttttgtgtccatactcttgcagttctgtccttggacttgatgccgctgaactctgcggtgggaccggtcccgtcagagcctggtgtactggggggagggagggaggagggagcctgtgctgacggagcacctcgccgggtgtgcccctcctgggctgtgtgaccccagcctccccacccacctcctgctttgtgtactcctcccctccccctcagcacaatcggagttcatataagaagtgcgggagcttctctggtcagggttctctgaacacttatggagagagtgcttcctgggaagtgtggcgtttgaaggggctggagggcaggtctttaagatggcgagactgcccttctcagctgataaacacaagaacggcgatcctgtcttcagtaaggctccacgagaagagaggaagtatatctacacctcaaccctcctagtcaccacctgaaataaatgttagggacactactccaacatgtttgttctgttcttttgttcctacaaagccacaggaagaacccaagagctcatagaatgcgttgggaacccaaggttctctgccctcctttgattcaatcatcctagacaataaaggcagttgatagctctg

SEQ ID NO: 281252 - DNA, 1000 bp, Homo Sapiens
ctctggatattctcttatgagattattatgcatgtttctgtcacatgggcattatttacacacttgataaatgaaaggtatttctctgtccgttcaaggaaataaaatgtaagttcttgttttattaaatgaatgaagccttttggttaaaaaaaaagtaatgtaatatgtttctgttcaaacttgagctaatgacatttaaggaattaaagacattgatctagttcttagtatgaaaagtgtacatgtagatatagttatataattgtgtatatacatatctacacacatggttggttttatattgctttttcatcaatatttttgactgaaacctttacaataaattttattttaattatgtaaccactaatattttgagagaaggaagcaaatgttatatgtccttctgttaaaagaaaaaaaattcagtcctccgccaaccgcttcccacacactcatactctgcacatcttggctacattaaaatggactgacagaattatttaaaaggcactatgaaggtagaacactaccttaatattttatcctagtcagaagcctgatttaacactgaactttgaagggaagcttagctgtagctcatggctttcaaagattagaagaaacatttactggttctatggaaaatagtcttcttgctaggtagattggaaacaaagaaattgcattggtggtgttaaaatctaacatttataacaaatcctgttttattctagatgaaatacttagacaattcttccagtggaaaccagtgaacttttttaacagctttgggaattcttttgtatgataatttttaaaatgaaatgtgtactcttcaaactaattaaagcttgaagttttccaggagtcgcattttaaaagtgtttgtacacattttaacacttggatattttctattttggttttgtatatttttatgtatacacaatgtacagacttttttcttgtaaataaaacatgttttcatttgtct

SEQ ID NO: 281253 - DNA, 1000 bp, Homo Sapiens; identical to SEQ ID NO: 201578
  misc_feature (8)..(8): n is a, c, g, or t
  misc_feature (12)..(12): n is a, c, g, or t
  misc_feature (56)..(56): n is a, c, g, or t
  misc_feature (153)..(153): n is a, c, g, or t
  misc_feature (155)..(155): n is a, c, g, or t
  misc_feature (184)..(184): n is a, c, g, or t
  misc_feature (192)..(192): n is a, c, g, or t
  misc_feature (239)..(239): n is a, c, g, or t
  misc_feature (260)..(260): n is a, c, g, or t
  misc_feature (285)..(286): n is a, c, g, or t
  misc_feature (326)..(326): n is a, c, g, or t
  misc_feature (364)..(364): n is a, c, g, or t
  misc_feature (412)..(412): n is a, c, g, or t
  misc_feature (415)..(415): n is a, c, g, or t
  misc_feature (444)..(444): n is a, c, g, or t
  misc_feature (457)..(457): n is a, c, g, or t
  misc_feature (462)..(462): n is a, c, g, or t
  misc_feature (505)..(505): n is a, c, g, or t
  misc_feature (514)..(515): n is a, c, g, or t
  misc_feature (528)..(535): n is a, c, g, or t
  misc_feature (537)..(537): n is a, c, g, or t
  misc_feature (540)..(547): n is a, c, g, or t
  misc_feature (550)..(550): n is a, c, g, or t
  misc_feature (552)..(553): n is a, c, g, or t
  misc_feature (556)..(557): n is a, c, g, or t
  misc_feature (562)..(565): n is a, c, g, or t
  misc_feature (575)..(575): n is a, c, g, or t
  misc_feature (577)..(578): n is a, c, g, or t
  misc_feature (624)..(625): n is a, c, g, or t
  misc_feature (638)..(638): n is a, c, g, or t
  misc_feature (704)..(704): n is a, c, g, or t
  misc_feature (708)..(709): n is a, c, g, or t
  misc_feature (719)..(720): n is a, c, g, or t
  misc_feature (723)..(724): n is a, c, g, or t
  misc_feature (775)..(780): n is a, c, g, or t
  misc_feature (785)..(786): n is a, c, g, or t
  misc_feature (865)..(865): n is a, c, g, or t
  misc_feature (899)..(899): n is a, c, g, or t
  misc_feature (911)..(911): n is a, c, g, or t

SEQ ID NO: 281254 - DNA, 1000 bp, Homo Sapiens; identical to SEQ ID NO: 114747

SEQ ID NO: 281255 - DNA, 1000 bp, Homo Sapiens
tcataccagcttcgaggatttcttcccctccttccccctacgtaggccttactcatcctctggggccccctcgttcccaccgcccccatgaatccttccccgaaaatcccggcgcagagatcccctagcctgcacttctcctgcaggcatgggtttggttttcctctgtttccacatgttccataacgttttccacctggtccccaataggactgcaaagtcttgagtgcaggagtctcatcccctcactctgcgtggtcccatagacctgtgctctatacagatgagacgaggcctgcttgtatattcccattaggatgaacctggagtcttttcctcttggctccttcaaaacctttttcgttctcaatttgctataacctttgaaacctcgccgtgtggcatattatagagaagagagaaaaactcaaaggtgtgctctttttttaaaaaaaatcccaaataccagaaggaaaatccacacgttgatttcggggttcatcatcaacacgcacttggtgagcactttctctgggactttgggaaaaacctgttctggaagggcccttagctgtaggagccaggtacaggggactgaaataagtacccagcctgctccccgacagctgcggagaggagagagcagcaggagaggcgcatggagagaaaacggccaggggaaagtttccagaaaccccaccccaggggacactggggtttccggaaagcaaggagtgacccccgcattccacctacttcccccctactaaaggcttccgcaactccagggagtcctccccttttgaagctgagcctcggcatcctcgcctacctccctccaccctgcagcagagagggctgcccccagctgaggatggggcacagcagccagaggcttccccggtcttcatgtcggaaatcctgtcttttccagcacatgcacacgccacatacacccccgccacacacacacacacacacacacacacacacacacata

SEQ ID NO: 281256 - DNA, 1000 bp, Homo Sapiens
acagcatctttaaaactgtgtagctacctcacaaccagtcctgtctgtttatagtgctggtagtatcaccttttgccagaaggcctggctggctgtgacttaccatagcagtgacaatggcagtcttggctttaaagtgaggggtgaccctttagtgagcttagcacagcgggattaaacagtcctttaaccagcacagccagttaaaagatgcagcctcactgcttcaacgcagattttaatgtttacttaaatataaacctggcactttacaaacaaataaacattgttttgtactcacggcggcgataatagcttgatttatttggtttctacaccaaatacattctcctgaccactaatgggagccaattcacaattcactaagtgactaaagtaagttaaacttgtgtagactaagcatgtaatttttaagttttattttaatgaattaaaatatttgttaaccaactttaaagtcagtcctgtgtatacctagatattagtcagttggtgccagatagaagacaggttgtgtttttatcctgtggcttgtgtagtgtcctgggattctctgccccctctgagtagagtgttgtgggataaaggaatctctcagggcaaggagcttcttaagttaaatcactagaaatttaggggtgatctgggccttcatatgtgtgagaagccgtttcattttatttctcactgtattttcctcaacgtctggttgatgagaaaaaattcttgaagagttttcatatgtgggagctaaggtagtattgtaaaatttcaagtcatccttaaacaaaatgatccacctaagatcttgcccctgttaagtggtgaaatcaactagaggtggttcctacaagttgttcattctagttttgtttggtgtaagtaggttgtgtgagttaattcatttatatttactatgtctgttaaatcagaaattttttattatctatgttcttctagattttacctgtagttcatt

SEQ ID NO: 281257 - DNA, 1000 bp, Homo Sapiens
agcgcttgaacccgggaggtggagattgcagtgagcagacatcacatcattgcactccagcctccagcctgggtgacagagcgagacgccgtctcaaaaaaaaaaaaaaaaagaaaagaaaaagaaaaagaaaaagaaaaagactcctgagcctcctagtggttcacgcctgcaattccaactactcaggaggctgggacaggagggtggcttgagcccgggagttcaaagccagcctgggaaaaatagagagagagagagacttgaaatatggtaaatttcctcagtacctgaaaatattaaaaaaaacaaaaagctagaaggaaagagaaggtaactgaaacagaagggaaaggggacagatctcaccaagctgaggtcttgggagaggagatactggctgagccctattacttaatttaaaataccttaggggaggccacccaagtggatgcggggctcctgtgaatcctttgcttgactccagcgggttacctttgcctctgatacataaagggtggggatgggagcgctctcctctctccttcccctgccttgctgtgggaacttctgggaaaggaggtgcagggctccaggaagccagtgcccagggagtgctatgctgagtccaggagcctggccacggcaggggtggacagatggtggcagaggaaccacggtgtcccttcctccagatttagctaaaggaaacgtggagcatcccattggccatcctccccactctccaattcggctccagaggcccctccagactataggcagctgcccctttaagcgtcgctactcctcccccaagagcggtggcaccgagggagttggggtggggggaggctgagcgctctggctgggacagctagagaagatggcccaggctggggaagtcgctctcatgccttgctgtcccctcccctgagccaggtgatttgggagaccccctccttccttctttccctaccgccccacgcgcgacccggggatg

SEQ ID NO: 281258 - DNA, 1000 bp, Homo Sapiens; identical to SEQ ID NO: 207160

SEQ ID NO: 281259 - DNA, 1000 bp, Homo Sapiens
gaaacagagcgatgagcttgccctggtcaggcagcagttgagtgaaatgaagagccacgtagaggatggtgacatagctggggccccagcttcctccccagaggcgcccccagccgagcaggaccccgttcagctgaagacgcagctggagtggacagaagccatcctggaggatgagcagacacagcggcagaagctcacggccgagtttgaggaggctcagacctcggcatgtcggttacaagaagaattggagaagctccgcacagccggccccctagagtcttcagaaacagaggaggcctcacagctgaaggagagactagaaaaagagaagaagttaacaagtgacctggggcgcgccgccacgagactgcaggagcttctgaagacgacccaggagcagctggcaagggagaaggacacggtgaagaagctgcaggaacagctggaaaaggcagaggacggcagcagctcaaaggagggcacctctgtctgagtttcctctttggaaaaagaagttactgttcaacttaccaaaatgccttacacattccttacaaataaaccaaccaacctacacagcgttatccaggcccaacttccggtactccgagagaagccatgagagacaagtctcttagagccacagaagtagaccttccagagccccagtttgtaaatgaacctgtgtcacatttgataaacactatcctgggcgcagccccgggccaccgccgagtgacgccaaagccctggttgactctgacagccccgtgggtgtgtgggaggccgggcgctctggggtctgtctgtcagtgcaatcgtttagtgttttttcagtggggcggggcgggaagcgggtgggaccgggcagccagttctcaaaggctgtggggccgactggaggccacagcccctcacccctagacgttgccaaccagaactgacgtgtgacctcctgggtgttgatgccattaaaaccaacgttggtgcccgg

SEQ ID NO: 281260 - DNA, 1000 bp, Homo Sapiens
ctctatgggtaggtattattttcatttacattttacaaacaggaaatctaaggcttggggagataaactaatgtgttcagtgtgatatcactagtaattggcagaaccagggtttgaatttaggttctctaattctggaactatatataaatgtatataacatatatattatatattatgtaataataatgttatatattatatataatactgtataatatattacattactgtaacatattataaaatatataatatataatataatatatacttccagaattttatatatattatatattttataatttcaacttttattttagatatagggggttcatgtacaggtttgttacatgtgtatattgcatggtgctgtggtttggtgtatggatctcatcacccaagtagcgagcatagtacccagtagttagtttttcaacccacacccctctccctcccacccctctgtagtagtccccagtatctatcgttcctgtctttatgtccatgtactcaatgtttagctcccacggtatttggtttgaagtttgaagttgggtaatgtgatgcctccagctttgtggaacaatattgttaaccattgcatacactacctcttaggtatggccatgttgcatgccttacaaaatctgttattcagagaggtggaatgattgtacaaggcaacaatgacagtggtggttctcgccctccattccaagccagaattgctgttgtgttagtgatataaatgcttgatattgatatcaaaggagaagtaactcaggaaatgaagactggttatggactcatggcctggctttcctggtggttctctaaactttgaagatttttgtatgccaatgtttacatttgaagatgttggccatttaatagataatacatgaggctattcatagagttattttggtagagtgtttagagcatagtctttgggattctcattgatttattcaacaagtatttattagaattc

SEQ ID NO: 281261 - DNA, 1000 bp, Homo Sapiens
agaaatatccccatatgagctggtatccttaattatagtgaaggtgcgggagaacaaggaaggtgatgaataggtatagaatataatccctttaagttttccctgaatgtgtttataatgagtaaacatatacactaagtatgcacacaccacacacacacacacacatatatatctacctacatatgcgtgcacacacacacacacacacacacacacacacatacacataagatacacaaaatgaactcgatcatatgttttggaaatacggactaaattaactattctattttcgtatattgtgaatgcactctgatgtatcaaactcttgcaaaatgtaaattggtcttcaattctctttggtagcttgttactaaaaaaagagagaaaatccttttaaaacttttcagggaaaccatgatttccttggcctcaaggatttgtgatgaaacagcagaaaaaattttgaagccacacaaactctgggttcttttctcaacacccgccatgtatcaattctgtaaccttaggcaaattatttaaactttctaagccttgattttctcatctactaaaaacagcaataatctaagatcaagataaaacaaaactcacccagaacaaagtatagtctccatgaataaagaacatgtctgttttgtttccccagcacctagaacaatatgcgatgtatacaatggcagatactaaatattatttatccagcagaaaacaataaagttgcaggaccaaccctgtcaactaagctaatgctacataaaaattacatgcaggattagctaaagaacataaattctacacatatactaattcttagggtctctgggttttcttaatgttatttccttcagaaaatgggcataaattcctatctaatgacatctcacatcctcatcaagaagcaagtcatgaaatttaagccttacaaggtatattctttttggggttttacaactattaatgaaaaaaaaaaaaa

SEQ ID NO: 281262 - DNA, 1000 bp, Homo Sapiens
gtttggtggtttcacacaaaagtaaacatactcttaccataagatccagcaattgcactccttggaatgtactcaaaagagctgaaaacttatgtctacacaaaaacctgtgcacagatgtttatagcaactttattcagaattgcaaaaacttgaaagcagccaagatgacctccagttagtgaatggataaactggtacatccaggcaagggaatattatgaaatgagctatcaaaccatgaaaaagacatgaagggaaactgaaatgcttattactaactgaaagaagccaatattaaaaggctacttgttgtatgattccagctgtatgccattctggaaaaggtaaactatagaggcagtaaaaagatcagtggttgccagggattagggggaaggaggcatgaataggtggagcgcaagattgttaggccagtgaaactattctatatgatactacattggctgatgcatgccattatacatttgtcagaactcacagagtgtacaataccaagagtgaaccctaatgtaaatgatagactttaggtgataatgatgtatcaatataggttcattaattgtaacaagcaccactctggtagggagagctgacagtaggggaggctgtgcgtgtgtggggtcaggggagtatgttggaagtctctgtaccttcttcccaattattctgtgaatctaaattgctgtaaaaataattctattaacctccctgttaactgataatttcagttttctgaattttatgtacatttcatgtcatcaatgtacatgacaaatgaattatttctttataaaacacaattttacattctaaaaatattgagttctgaaaatattgaaaataggatacatttggggattttgctaaacattctagtttgggtttcactaaggctacagaagtccactaagagaaccttatgaatataagttaggaaagagcaagtattttctcctggatttatttttttaatttg

SEQ ID NO: 281263 - DNA, 1000 bp, Homo Sapiens
ccctgtccctcagtctctgtgtatctgggtggaggggactaatgtagaaggacaggtgatagcctacaaggtggcatgggggtagagcatggggtgaaacagcaggggggtcaggggaacagaggaggtaggagacccaggaaactgcccaaagggctggggagagggtcgcagctctgccaaaggctgccctgatgctgcggccacagggctggcctggacctagctctgctctttggaagggcagtgctttagccaggtggagaccaccagcagccccctcccgtgtttcagttcctggagctgtctagtgggaggcctccagggggaaggccagtcctggtgagttccatatcacttgacagcagcagcctgggctgcacttccaggtgagggatgggtagagcagggcaccccaggggcatcagggccagcgctctcaccatctgcctccaaccccagccctgtgggatctggggctggccctgcacagctccttccctggctaggcttccccatctgtggggaggtggccgctggcggggggtcccggctgaggagctggtggggcaggtctcactggaatagaggtgaggcggaacttcaggatgcacctgacccagagggcaagggaggggacaaaggccagtctactgaggcaaagagagggctctgaagagcttgaacagaaattgacatcagggcaatgttttagaaagaccactctgaccagcaggacacaagatcaacctacactcagtggtctcacatacaccagccatcactgaatagaaaatgtaatagaaaaaaagatctacgacataggccatctgacaaaaagacacaaaaccacaaggtgaaagacctttatggacatgacagagaggacctgagttaagagggaaaatacatcttcatagctaggttcacattcagttatgttagtcccaaacctacaaattcaacatgatccctattaaaatcctaccaatatagttca

SEQ ID NO: 281264 - DNA, 1000 bp, Homo Sapiens
gcactcgatgtaggacacttcacattccacagactgaatcatgtccactggtctggcctcagtctatctccaggacagttcctgagtccctgctgtgcaaaggcctgacttactttcatagtcttggcctcatcattgcaggacatttctggtacctgcatgctctctagagagaacattacaccccggagcaggggagaacaggtggatgcagataaagttatacctgacccatttcagcctctttgcactgtgtccactatttggcagtttaaaaacacccagaggcccatgaaactttgtgagctatgaaatctggatttgaacttgaacctggtcagactctacattccatgcaagtcactgagggatgaaaatctcaaaagcaaagacctggacaggagaagggtcttggaatccagaagtaaattttacttccaacagagccgtgggcctggggtggggactcagttggttaactgctttccttccaagaagaggaccagcatatgagttccagaagctacattaaaaagtgagcatgtgtgggatggagagatggttcagtggttaagagcactgactgctcttccgaaggtcctgagttcaattcccagcaaccacatggtggctcacaaccatccataatgagatccaatgccctcttctggtgtgtctgaagacagcaacagtgtactcatatacattaaataaataaataaataaataaataatttttaaaaaaaagtgagcatgtgctacttgcaatccaaaccctgtggccacagaggcaggtggatccctggggacatttgataagttccaggccaatgagagaccatgtgtcaaaaaataagagtggatgattcctaagggaaggtacctgatgttgtcctctgattttcacaccaacgagcacatgcacatttaaacctactgagggattgttcttgggtaaaggtggggcccaggcgtatttgtccttcactacatgtcttag

SEQ ID NO: 281265 - DNA, 1000 bp, Homo Sapiens
gacttcctcactagccttactgtgaaacgtgcagaatggaaatgttttgcttagagttctgagagtagtcgttttcaaagttagaaaatgcaaagtatcttcacacttcctttggttttttwatatgtctgaatatgttgattatcttgaagtcacttgttgaaatagttttcacttaaaattacttttcattcaacagaaatttcggagtttcgctctgttcaggtctgtgtgattttgggggaatcatagccccatttctgctctttcggctagcagccgtgtggctagaactacctctgatcatctttggtaagaactcatttgctattcttaagagccttcatctacattctttgtactaaaagagacctataataattgttaggttcaataatgataatgatagtcatttatcttattataataactatttcattgataattatgatattaatttcatcttattataataactatttcagttttgagagccaattcagttataatgaatggttttaatttactttatattaaagggtgctgataaataatgttcaattagcattctttgggttctgagttaaatgctatgaaactcttatggtattggagaacataaccaataattttcaggggactaaattaaatattcaatatgtttaaaaatgagggccaggtgcagtggctcacacctgtaagaccaaaatgggaggactgcttgggcctaggagttcaagaccagcttgggcaacatagcaagactgccttgacaaaaatttaaaaattagctaggcgtggtgatccatgggtgcctgtagtccaagctactcaggatgctgaggcaggaggatcaaggctgcagtgagctatggtcacgccattgcactccagcctgggcaacagggtaagaacctatctctaaaataaataaataataaaaaataacaaaaataagcctaatgtctaattgtatttctggtgttctctctctatggat

SEQ ID NO: 281266 - DNA, 1000 bp, Homo Sapiens
gagcttctgggtgatgccaggcccaagtctttgtggcacccagctccatgctttgaatactatgtggctgaatgaatttttaaaatctcaaagcagttaaacagcaggaaagcccattaacttcgtactgaaaaagcaacatactgtgatgatacgggatgacatcatttcaggttgggcatacaaaaaagtaaggaagctaaactaagactatactcaccaggccatttagaagttttaaataatgcctccactattttttttcttagacatagcttttaatggggaaatggaattttgttattaatacccattatattcctgtaagtaaatgactatttttcccttaactcagtgattagacaggaaggaagacattagtgattagacaggagggaagatattagtgattagacagcagggaagatattagtggtaaagagtgaatgatagtagtgaatataaatggggctgaggaaactttaagcataaaagattcctgagatgactttacaagtctgtacgaatctgccttgactgtatatttcatactgcccaacaaaacaataaaaaacaattttaaatgcatatttttaaatgtacacagttttctatttcatcagacttaagtaaaaagcttccacatgaagaccctttataatatgtgtgtggttatgcaaagagcaaaactcaggtaaacactaaagtgagaatgaaaaacaaacctaaagtaagtttcaagaagatagaaacttaaatggaaggagctgacttctgaaaactaagtcatcaattacaacacagttttacctaaggaaaaaatacagcaatattcgttaaaagcacacagtttttatggtatatacaaggagcaaaacagaactttttggtggagtataactcatatgttcacaagcaaaaccttcaattgtaaaatagcacacaccacccagtgaacagacatagaaaaagtgttaaagtcaacatgaccattactcaa

SEQ ID NO: 281267 - DNA, 1000 bp, Homo Sapiens; identical to SEQ ID NO: 201595

SEQ ID NO: 281268 - DNA, 1000 bp, Homo Sapiens; identical to SEQ ID NO: 114748

SEQ ID NO: 281269 - DNA, 1000 bp, Homo Sapiens; identical to SEQ ID NO: 201432

SEQ ID NO: 281270 - DNA, 1000 bp, Homo Sapiens
cgccaagtgcgtcagccgctaccactgagcgcccgggtgcagaggcggtgcagggcggggatgccggggtccccgctcacctccatgcctggcctggcaggcggcatgagactgcctcgccccgcccagtcccactcccacggtgacgcccgccaggcagtcctgtgggggaggcccgggctgtgccaggcgatgcaccgcgtcagcccctggggacctcaggcacaatgggcacctactcccttcccctagagcaaaggctgagctcacggctggcagctgcccagctcacacccctccccacccactggggccctgctctgcagcgtctgtgccccaggggtcatgtcgtgcgcctgcacctgagtctgccgtgtttgctggtgcctgcgtgtgcacaggtgcctctcgggcctcctggtctgtgtgcccgggagcacggacacagatccaccatgtgtgcctctgcggggacatcaggcagacgagtacccaatgcgggggccaggaatggtgacggctgcggccattccgtgggtgccgcagctcagaggtgggcaggcaagagcacccaagtatgcactgtcgggctccaccaggcaggccagggcaggagaagacacaggagggacttcccagcccacctgccaggcttctcccctcactgggacagggtgctgggtgacccaggctgagccctggcctggcccacctaccccagctctcatcttgggagagactcagcccctgcttggcaggacctgcagctcaggttcagctgtggaaccaccaccccctgcaccacagctatgctatgggtgcccaacaagccagctccatggccaagctgagacttgacccccgatctgggtcttctggaggctgacggcaggggaactggtaggtgactgctccccaggcctgcacaagcccacaggaacccaggtgcccctttgagagctctaggctgacaacgaggcacgggcaccatgagggacgg

SEQ ID NO: 281271 - DNA, 1000 bp, Homo Sapiens; identical to SEQ ID NO: 114749

SEQ ID NO: 281272 - DNA, 1000 bp, Homo Sapiens; identical to SEQ ID NO: 201433

SEQ ID NO: 281273 - DNA, 1000 bp, Homo Sapiens
agtgatcctcccacctcagcctctcaagtagctgggactacagacatgcactaccatgcccagctaatttttaagtaatttgtgtagacacaaggttttactatgttgcccaggctggtcttgaacccctggctcaggtaatcctcctgccttggcctcccaaagtgctgggattacagccgtgggccaccactgccttttaaacaacattttcaaacaaaataaatgcaaactgctccagaaaagagtactggtacagaaaaaaaaccagtactgaatttccaataaagcataaaatcaaagactgtcttttacctctgactcacaggtggtagaagacagaagtcttcctctattagagagtcaagaatgcacagccgcagcagctgtgagaagttgagcttgatcacttacgtgaacttaatctctctctttcattcttcctttcagatctggaaaagatatacacatcgtcccttttcaggcgggttagggtgataaataaagtgacggtctggttactgctcacttttttacacctcagtcaatttggggaagttaactggcagagaagaacatacttgtagccgggtttgccaccatttaaaattatacaggctcatgcctgtaatcctagcaatttgggaggccgaggtgggcagattgcctgagcttaggagttcgagaccagcctgggcaaaatggcgaacgccacccgcctctactaaaaatacaaaaggttatccaggtgtggtggcaggcacctgtaattccagctactccggagcctaagacaggagaatcacttgaacctgggaggcagaggttgcggtaagctgagatcgcgccactgtactccagcctggcaacagaataggactccgcctcaaaaaaaaaaaaaaaaaaaagaaacccgaacaacaaacaaacactccagatcaaaacctgggcaatttaaaatagcaaaagaaacctttaaattaaaaaatatatattgttt

SEQ ID NO: 281274 - DNA, 1000 bp, Homo Sapiens; identical to SEQ ID NO: 114750

SEQ ID NO: 281275 - DNA, 1000 bp, Homo Sapiens; identical to SEQ ID NO: 201434

SEQ ID NO: 281276 - DNA, 1000 bp, Homo Sapiens
  misc_feature (276)..(296): n is a, c, g, or t
agagttctacctctggccaaggctggaaatttgatgcctgctagtattgttgggaatgggagactgaaataaatgagttagttggggcattaaacaggaataaatagctgtggttgtgattcattactacaattagtggactagtggcagagaattaagaagaagatgatgtgagagataaattatatgatttggtaaggcaagggaatcagtaaatcttggttctgaacaagttcattttctggaaagatagccctgtactgggaccagaattcnnnnnnnnnnnnnnnnnnnnnaagaccaagattttcaacaaatatttttcaatgcagttctcagctgctccataactaatagtgacttattcaacacagatattttcagatggttcacacccatgtttcttacccagggacagttcaccacccctcccttccctcccatcactcttgaggaacatgtggcaatgttagaataatttttggttgtcacaacaggggtttcttctgatatttaatgagcagaagccagggacactgctagagaacccacaatgttcagaatagactccatcaccaaccaagatttatctcgtccaaaatgtcaatagtgctgaggctggaagcattggttcacactgtgctctttctgaaaaatgtagactcgctttttttttttttttttttgagatggggtcttgctctgtcgcccagactggagtgcagtggctccatctcagctcactacaacctctgcctcccaggttcaagcgattctcctgtctcagcctccccagtagctgggattacaggtgcaccctgccatgcccggctaattttttgtattttagtagagatggggtttcaccatgttgcccaggctggtcttcgaactcctgagctcaggcaatccacccgctttggtctcccaaggtgctaggattacacgcatgagccaccgcgcccgcctagatcactcttttatacactagctgccaatt

SEQ ID NO: 281277 - DNA, 1000 bp, Homo Sapiens
ccccagcccaagagctgacccctgcccttcccacaccctccgtgcctcgcgaagccctgcccttctcccatgatgccctttgcacctcctccgccactgcctgctgtgcctccacctgagcccaggccaccatcatctcctgaccctcccagcagcctcctgtcttgcctttgctgaaaccaggccttacacagcggccggattccacagtgccctgtgcccttgtctctctcttcttagaacccttcagcgattccctttttcatcaggggatggcctgccatgtccttccccctggccccaccacagctctggccttctttctccccactgctttgaactctgagctccaggtctaccgaacttctttggattcaattgaatcatgttctttttttttttttcctttgagatggagtccttccctgtcgtccaggctggagtgcagtggcgcaatctcagctcactgcaacctctgtctcccagattcaagcgattctcctgcctcagcctcccgagtagctgggattacaggtgcacaccaccacacccggctaatttttgtatttttagtagagacaaggttttgccatgttggccaggctggtctcgaactcctgacctcaggtgatctgcctgcgtcggcctcccaaagctctgggattacaggcatgagccaccgtgcccagcctgaatcatgttcttttgtcttgaaggatttgctcaagcagctcattctgcctagaacactccgtggctgcttcccctgcactcccatcctcaggtctcaacttatacacatcttctggggaaggtccctccatgccttgaatggggagagtggggggtcctgagagctctgtggggctctgcacatccctgtcatggtactcagccttccttgttgcgatgataatacttttatgtgatctgtcttccccgccagttggtgagttccatgaggagactgcaacttctccaccctgtgcccctccagatc

SEQ ID NO: 281278 - DNA, 1000 bp, Homo Sapiens
gcagctgttgagtgttatgtgcctaacactggctgggcacattgccaggtggtttatgcatattgtctgtagctctcaccacaacactgcaaggtggatgtttcctcagtttacatttgaggaaaatgaggctcgaagagcccaaataacttgttttagaccagtggactgaactctgtaaaacagaatacctggaaaaaatatagaaagacaaagtagaagacaaactatcatatagaaagaagtagaataaagttaaacccctaaacttatgcaattaccacggccaaacactgttggcaagcagcaaggtgtaacaaatagaatatagattccggagttggacaaacttgtatttgaatcccagattcaccatttcctcattgtaaaattctgggtaagtcatttaacttttttagcttcaatgttctcatccataacgtgataagtactttaagggtaagtattaaataaaatgagatgacttgcataattattgatactcagtaaatgctgtttccctttcttaatctgtcagtcaaggcaacagaagagacaaagaattacgcaattattattatgtctaaatattgttttaatggttctcaaagtgttgcccctgggccagcagcgtcacctgggaacttgttaggcatgcaaatgaccaggttccacctcacaccgactgtatcagagaccctggggctggaacccagcagtctttttccaggagccccccaggtgatggtgtgtgcaccaaagcttgagaaccgtggctgtggttcattatcctcctggtctctgcaacactgcagtggagggaactgagaagccgagtaggttggcaagatcacaaggttattcactggagacatcattcaaatgcggatctcaggcaagtagtgctcttcttactcggaaaaagaaaaccaatagaggcaggtgccagtggctcatgcctgtaatcccagcactttgggaggctggggcaggtggatcc

SEQ ID NO: 281279 - DNA, 1000 bp, Homo Sapiens
agaggaggggaaaaggaatgctaaacaggtatagagtttctatttgggatgatgaaatagtggtgatggttacataatactatgaaagtgcttactgccatggaattgaacacttaaaaatgtttaaaatcgccgggcgtggtggcttacgcctgtaatcccaccactttgggaggccaaggcgggcggatcacgaggtcaggagatcgagaccatcctggctaacacggtgaaaccccgtctctactaaaaatacaaaaaattagccgggcgtggtggcgggagcctgtagtcccagctactcgggaggctgaggcaggagaatggtgtaagtaaacccgggaggcggagcttgcagtgagcgtacatcgcgccactgcactccagcctgggcgacagagcaagactccgtctcaaaaaaataaaataaaataaataaagaaataaaataaaataaaatcgctgggcgcagtggctcacgcctgtaatcctagcactttgggaggccgaggaaggtggatcacctcaggtcaggagttcaagacaagcctggccaacatggtgaaactccattctctaataaaaatataaaaaaattagccgggcatggtggtggtgggtgcctgtaatcccagctattcagggggctgaggtaggagaattgcttgaacctgggaggcggaggttgcagtgagccgagatcatgccattgcactctagtgtgggcaacaagagtgaaactccatctcaaaaaaaaaaaaaaaaaagtttaaaatggtaagttcttgttatgtatgtcttaccacaatttaaataatattaaaaactggattttcaatgaataaaatctttcaattatgaaattgctgggattataggcgttatccctataaaacagaagttgtctttaaaagatcactaagagaaaaaaattagaaaggctgggtgcagtggctcatgcctgtaatcccaaactttggggggccaaggtgggtggatc

SEQ ID NO: 281280 - DNA, 1000 bp, Homo Sapiens; identical to SEQ ID NO: 114751

SEQ ID NO: 281281 - DNA, 1000 bp, Homo Sapiens
tattccatgaagaaaaccactatgaagataatcccattcaacagactcacaattggagaaggacagcaacaccacctggggggagccaaacaggtcagaccagagcaccctgcggaaacagaatatgactcactttaccctgaggatgatttgtagaaaattaactgctaatttctattgacccacaaagtttcagaaattctctgaaagtttcttccttttttctcttactatatttattgatttcaagtcttctattaaggacatttagccttcaatggaaattaaaactcatttaggactgtatttccaaattactgatatcagagttatttaaaaattgtttatttgaggagataacatttcaactttgttcctaaatatataataataaaatgattgactttatttgcatttttatgaccacttgtcatttattttgtcttcgtaaattattttcattatatcaaatattttagtatgtacttaataaaataggagaacattttagagtttcaaattcccaggtattttccttgtttattacccctaaatcattcctatttaattcttctttttaaatggagaaaattatgtctttttaatatggtttttgttttgttatatattcacaggctggagacgtttaaaagaccgtttcaaaagagatttacttttttaaaggactttatctgaacagagagatataatatttttcctattggacaatggacttgcaaagcttcacttcattttaagagcaaaagaccccatgttgaaaactccataacagttttatgctgatgataatttatctacatgcatttcaataaaccttttgtttcctaagactagatacatggtacctttattgaccattaaaaaccaccactttttgccaatttaccaattacaattgggcaaccatcagtagtaattgagtcctcattttatgctaaatgttatgcctaactctttgggagttacaaaggaaatagca

SEQ ID NO: 281282 - DNA, 1000 bp, Homo Sapiens
gttaaaataaaggggaaaatgcatttttatacaaacagaatttcaagtatacattaatagacttttcagattactaaccaagttgctaagatttcattcacattgttcttaaagctgttcaacgagaaagcttttgctaaactgctttaaatatgtttatataaacccatattttcactctttctttgaactccctcccccaacccgagtctctgcccaccctcctgccctccccccttccccgacacgacaggggtcctggggctctaggagacatgcaaccccaccaagaactattggcttgtcatcaggggaaggacagaatcttacaggaggagagactgagaacacctgtcaaatgaagggagaacaaatctgatacttagaaatgacacaaatcaggatcgtgtcttagagtctttgtgttttcacttgatttttaatttaaaaaatctcagcctcccacaaaacaccaccaaagtttctgacaaattggtagctgtgaaaataatcttaggtagtttttccccagtgaaacttccaaaatcaggacaggtatttagaaccctttttcaatttggcggttctttttccctttggcatggagtgggggccacttaaaagtggatgttattacttgtgtgtttacattaagaaatttggttcatttcacagggtctggtaagagctctccctccttaactctcctcctgaagtaatctggtttcagggccaggaacagccactctccttaggaattaaagtgcattttttttcggtaaagggaaagagggggaggtggaggtttacacttaagtgataatgattaaagtagggttgggtgagagaaaatcctactcctatatataggtatttataattaaggtcataataaaaactgatattcttaggaaataagatgcacaaagccagtctagcaccctcagtggtgcaagagcactattctggttcactgactttcccgaggcatctttactat

SEQ ID NO: 281283 - DNA, 1000 bp, Homo Sapiens
attttctgtatatttcaacttaagacatttttagcatctgtatagttgtattcaatttgagaccttttctatgggaagctcagtaatttttattaaaagattgccattgctattcatgtaaaacatggaaaaaaaattgtgtagtgaagccaacagtggacttaggatgggattgaatgttcagtatagtgatctcacttaggagaatttgcaggagaaagtgatagtttattgttttttcctcgcccatattcagttttgttctacttcctccccttccttccagatgataacatcacatctctacagtaagtgcctctgccagcccaacccaggagcgcaagttgtctttgccatctggtctatagtacagtgcgcggcgttaggccacaactcaaaagcattatcttttttagggttagtagaaattgttttatgttgatgggaggtttgtttgattgtcaaaatgtacagccacagccttttaatttgggagcccctgttgtcattcaaatgtgtacctctacagttgtaaaaagtattagattctactatctgtgggttgtgcttgccagacaggtcttaaattgtatattttttggaaaagtttatatactctcttaggaatcattgtgaaaagatcaagaaatcaggatggccatttatttaatatccattcatttcatgttagtgggactattaacttgtcaccaagcaggactctatttcaaacaaaatttaaaactgtttgtggcctatatgtgtttaatcctggttaaagataaagcttcataatgctgtttttattcaacacattaaccagctgtaaaacacagacctttatcaagagtaggcaaagattttcaggattcatatacagatagactataaagtcatgtaatttgaaaagcagtgtttcattatgaaagagctctcaagttgcttgtaaagctaatctaattaaaaagatgtataaatgttgttgaaacaaaaaaaaaaa

SEQ ID NO: 281284 - DNA, 1000 bp, Homo Sapiens; identical to SEQ ID NO: 206204

SEQ ID NO: 281285 - DNA, 521 bp, Homo Sapiens; identical to SEQ ID NO: 206206

SEQ ID NO: 281286 - DNA, 1000 bp, Homo Sapiens
ttcagtgctgcttttcccaagttgattttaatcgtagttaagcagtagctatgctgatgtttttagaaatattagaagaatactcgttctcaatttttcttccccaacacaactgaggaacgtgaaatacttaacagcaccgtacggaatggtcacaccgtggaagggtaccattcaagaagttacttctccccctgctgggtgtccctgtctgcgacttcttcacccaacttgaatgattgccttaaagttatagttacagtgtgaaaagtctgtactttccaaggttacagtttcttttggttgatttgataccactggtttgtgattttacattgaactttataagcaaaagttgaatcccgaggaaccatgagtgtacatccagcattttatcactaaacggtagtatgaattgtaaacccaaaggggagggcatttctaggctcctgattttgtcagtcctttatatatttgcttgtttatctactcattctttttttgaaacaaatgagatataattcacataccattcaatgtacccattggaagtgtacaatttactctttttagtatattcactttatgcaattattatcataatcaattttagaacattttcctcaccccaaaagaaactccatacccattagcagtcacctgccatttcccctcagcccctggcaagcactaatctactttctgtctctatgtatttgcgtattctagacatttcgtgtgaatggaatcatataatatgtggtcctccctgacggttctttcttttagcataatatattcaaggttcatccagattctagcacatataagtacttcattcctttttatggccaaataatattccataatattaaatatgtgtcacgttctgtttatccattcatcagtgaatggatatggatttttttctactttttggccattgtaattaatgctgctgtgaacactcatgtacaagttatggtgagaacatatgttt

SEQ ID NO: 281287 - DNA, 1000 bp, Homo Sapiens
ttactataaatttcatccaactacttgtgatctctctcacctacatcaattatgtatgttaatttcagcaattaaaagaattgattttaatgactttgaattcttaatttctttgtcttaaaagttgctagttatgattttacagatgcaattttaaatcaacttttagccaggtgcggcggctcacacctgtaatcccaactattttggatgccaaggtgagaggattgcttgaggccaggagttaaagatcagcctgggcaacacagaccctgtctctacaaaaaaagaaaaaaattagccagacatagtgttgcttgcctgtagtcccagctactctagaggctgaggcaggaggattgcatgagcctaggagttcgaaactgcagtgagctatgattgcaccactgcactactccagcctgggtgacagagtgagacactgtctccaaaaatagtaataataagtagtcaacttttactgctaatttggtgaacatgagagaggatatgaaaataaatattacctcagctatcctaggatgttaaaatcatctccaattttaaaattctctccaatctacatacagtagtagttagtcagataaaggatatccaaaaaagagatagctagaaaatgggagaagcagagttctgcaacccctttcagtttgtaaattgttcacatgtatgaaaataactggtatttatcaatccactcagatttctgcactaacttttatcttatatatcatatgtatctcttttctttttctaaatgggaacatatatttgttattaggtggcagagatatagccttaagatatatttgtaaaatgcacactgaatagacatccaacctaaaaaaaatcactatttaaaaagcccatataatatatacatatttgttagcatgctaattgttcatgttttgtgtttattaaatagaagtgatatatatgacattttgaagtaaagcacatctgaaaaattctactc

SEQ ID NO: 281288 - DNA, 1000 bp, Homo Sapiens; identical to SEQ ID NO: 203365

SEQ ID NO: 281289 - DNA, 1000 bp, Homo Sapiens
agggcagccaaatgattgacagccctctaaaattttaataatagacagtcaataaaaatgttctgacctccgtaatgaaagccaggattgcaggcctatctttgatgcagtttgcagccccttgataacgacagacaattaacagggtgcctttttacygtagtgccccagttgacagaatcatgcatcagaagcttttatgtgaaagtggaatctttgttctggagaaaatcaaagtgtgactgtatttgaaagccagctcgttgaaggattccttcttctaatgagctgcgccagtagtaactgaggtgtggtgattagcgaaaggtcactcctgccgtgccaccttccgtgccgatttccctacctaacacggggccagggaaggcagcgagcgcaataaatcagaacacaggtgcccattaacctgccgtgaggaacggtcagagagccttttccttgtttcattccaaaaaggtggggggagagagcaaggagaacaggtttttggcatattagaaccaagcacggtttgtgttaatcaaggacaccctgaatcagtgcaatgaaacctacatgtgcagaatgaagcgttttttckttgtcatcatgaaaactcctttttttctacctttctgtttctttttttaaatatgtatccttggggtttgtttattttttttttcttgtttcacttcaaatgaatctggaaaaactttccagggggcttctccctgggtgtggtgtgtgatcggcagccccgccgttgtggcccgaggctcctggaagctcatcagctgatggtcttccttggcctgtagtaaaaatactgctgaattcctcgttgggctttaaatccattggcactgccacctggttccgttgtaacatagcttttggattattagaaataggaataacttgatagttaaatcattcagcagcatctttacgaatatggtttgggaagcttcttcaccacggggtgaagacctccacg

SEQ ID NO: 281290 - DNA, 1000 bp, Homo Sapiens
cacaatttccacaaaaatatctcccaaatggataaaagatttgaaggtgaaaaatgaaaccttaaaagaattataagaaaaaaggaagaggcattttatttttattttttattatcttcaagtgcagaaaggcatttctaaggattatttaaaaaacccaaaagttattaatacatttgactacataagaatatttaaagtctccatatagaacaaaaaacaagttacaaaaccaacctgagaaaaatttttgcaactcataacaaaaagataatttttgtagtatatgaagagcatctacaaataaataagtaaatgatgaataatccaatagaaaacaattagcaaaacatatgaacaatttactagacaaaatataaatagcaatgtaaatacatgaaaaactgctcaccttatccatgataagaaaaacgtaaattcaaactgcagctctatattatttttcacctaacagatgggcaaagatctgtaatgtttgataaaacactcttaacaaggatgtggggaaatagccattctcttacatttctaatgaaattgtaaattgccacaaccactaaggagaacaatctggtaacatctatcagcagttaaaatatctacacactttaacacaattggatttttaaggaatcgatcctgcagccaccacaaattaaatgccatatgttcagagatattcaccacaatatcatccctttgacaggggcaaaaagtgtacttttggactgtttgagaaggccctatttatcacacacacagtaaatcgattaaagagcacaaggcacctttgtcacacaagatctggcacttagcacaacatggcacaaattgtaatcccaaacatctattcataggccaaacaccattcaggtcccaaggaaaaacttctccacattctttgcactatgtcttcaaaatgaaaggcaactgtgtccaaatactatggaaatttgtgggttttgccactgcagggaag

SEQ ID NO: 281291 - DNA, 1000 bp, Homo Sapiens
ttgccgagttttgtacatcaggctccctattagctcttcttcctgtctttcttcctccatcaccattgtcacttccttatttcaggcaagcatcacatcccaggaattgcctaatagcctcttaactcgccacactggctctgatctcacccaaggtgctgcttggctctaatgtggcagggaatggagctaacactgatagttggtggagggctagcagacaaaagcatgccatcttttaggtcctttaaagatatttcttgatattctttatacaggcattactttaacactattccatcacagtcttaacaactgttatgtttatgtatttcctttaaaaagattaaaaataatgtgctcaagagaaacaactggtctcctctcacccccttgacacccttcactatacttttggtctcatcaccttctaattcattccacatttttacgttagcccaaagtgctcttttggtactttttttaccttcatgtctatcttctcctacagaaacctcctaaacctgtaagatccttaaagtcagggaatgtgttgtctttgtagtcccacttctgtgacttactgccaccaagtagatattcaatgaatgttcactgaattaattaacgagtacaaatttgatcatgctgaagccctacatcaaaatcactgtgtggttctccatagcatccaaaatatagttcatattccttagtgtggccttcaggagttgacccctccttgctttcctttccatcgtctctcactgttcttccaattgcatctgcctgggcataccaccctctattttctttctttctttctttctttctttctttctttctttctttctttctttctttctttctttctttttttctttctctttctttctttcttctttctttcttctttttctttctttctttctttcttctctttctttcttttctttctttctctctctctcttctctctctctcctctctctctctcttt

SEQ ID NO: 281292 - DNA, 1000 bp, Homo Sapiens
ggtgggcggggcccgggtgggcgacagaggcagcggggaggcggtgggcgaggggctgtggggctctgcgggcggggccagccccaggatctcctgcacgttgtggggcagctcctggaggcacgggatgagagaagcgaaaagcggaaggtgaaggtgagaagggggcgggggtcggtcggggttcgggcggggcgctgcggggcggacggggactcacggggcaggcggttagctggcggtgcagggcctcggcgcgggtcagcacgtcctccacgctcagcttcatagtcagctcgttgatgtgctgcgggagggggtgggtcaggcgccagtcggcactcaaccacctccgcccgagcgcccactctgtgcttcgtgctgggaaacaatgaagacacaccgggctggccctctgggggctcagaagtgcgctgggcgagacatgcttctcaggcctccgggagcattctgagcacgtactcggggagggaaggtccccacccacctgcccggaggaccttgctgggagcaggcatggcatggggcagaagggaaacctacgcggccccacccccactgcgctcccaactaaccaggctttcaataatcccacactaaacacctgctccccggaggtactgcggccctgggcagcgcccagctcaggggggacagggcgggggcggggccggagcctcaccttgaggatctcattggagccgaagccggacagcatgagggtgtccctctccatgtccaggatggcgcaggccaccagcaggtgcagattggggccagggagccctgtccacagcacctgagggtgcgggacagagggagggagggaggtcatagcccagcctgggcctgaggtcccaccagggtctgtccctctccgcccaacctcccagggcaggtgagcccaccccttcaggcctctcgcccaaactggctggcccacctcccacagccgaaggacatccgggaaggggaattc

SEQ ID NO: 281293 - DNA, 1000 bp, Homo Sapiens
  misc_feature (148)..(148): n is a, c, g, or t
  misc_feature (221)..(221): n is a, c, g, or t
  misc_feature (417)..(417): n is a, c, g, or t
  misc_feature (767)..(767): n is a, c, g, or t
  misc_feature (915)..(915): n is a, c, g, or t
  misc_feature (927)..(927): n is a, c, g, or t
  misc_feature (951)..(951): n is a, c, g, or t
  misc_feature (961)..(961): n is a, c, g, or t
atggagccagtgtctgcttcacatgttaagtccttctttccatatgttagacattttctttgaagcaattttagagtgtagctgtttttctcaggttaaaaattcttagctaggattggtgagttggggaaaagtgacttataagatncgaattgaattaagaaaaagaaaattctgtgttggaggtggtaatgtggktggtgatctycattaacactganctagggctttkgkgtttgktttattgtagaatctataccccattcacagaagataccgagactgtgggccagagagccctgcactcaattctgaatgctgccatcatgatcagtgtcattgttgtcatgactatcctcctggtggttctgtataaatacaggtgctataaggtgagcatgagacacagatctttgntttccaccctgttcttcttatggttgggtattcttgtcacagtaacttaactgatctaggaaagaaaaaatgttttgtcttctagagataagttaatttttagttttcttcctcctcactgtggaacattcaaaaaatacaaaaaggaagccaggtgcatgtgtaatgccaggctcagaggctgaggcaggaggatcgcttgggcccaggagttcacaagcagcttgggcaacgtagcaagaccctgcctctattaaagaaaacaaaaaacaaatattggaagtattttatatgcatggaatctatatgtcatgaaaaaattagtgtaaaatatatatattatgattagntatcaagatttagtgataatttatgttattttgggatttcaatgcctttttaggccattgtctcaamaaataaaagcagaaaacaaaaaaagttgtaactgaaaaataaacatttccatataatagcacaatctaagtgggtttttgnttgtttgtttgnttgttgaagcagggccttgccctnycacccaggntggagtgaagtgcagtggcacgattttggctcactgcag

SEQ ID NO: 281294 - DNA, 1000 bp, Homo Sapiens; identical to SEQ ID NO: 114752

SEQ ID NO: 281295 - DNA, 1000 bp, Homo Sapiens
aagtatgactgtaactcacatataggtattgggaagtcgaattttgcctcttgctcttctagcctctctgacctccctacagcacctctgtctctcactgctaggggccctgccatgggaggcctgggccctggtgctcctcccggagggagaaccagggaaggagttagctcctcagaggccaggaggccaaggctcaggggtaaggaaggcatattgtcctcacccacatgtaggtctgcctctttggaaactctgaggtatccctgcgggatcacctgcgagctggggcctctgagcaggagctgctgagaatcattggggctgctgtgggcaggaagaagcggcagcatgcaggtaagtgcagggtggggagggctggcctggatggtgagtgggccttgtccctgggagggaggtgtggagttgtggggtgagatgaccaaggaacacctagggggaagctggcgagagtcagcatcatccccactaccactcactgctgttggccctctggactcagggtacagtgatgcttctccttccatggggaaaagtcatagcagaggctgcacaggagaggggaccccagattctcttgggctgttttactaggtggggagaagggggtgtcattgcttctttctcatcccacacgtggccttctgtttagggagggcagggtcctgatgtccacagactgttctttgggctcagccttgagcgacctcgcagtgcacatgtgggggccttttgtcatacagctgagtgcatgtgctcggggctgtcaagcgcgtttgtttcagtgaactctcctctccccgccctgtccctctcccgctcccctgctttcctctccctctccccttcccctgctttcctctccctctccccctccccttcactcctttccctctcaatatttcccacatcaaaaacctgcccattatcctcatcatcaggagacccatcattatctaactactcacgatagccatca

SEQ ID NO: 281296 - DNA, 1000 bp, Homo Sapiens
ggctacctggaaaagataagttgtctaaagtgctttaaaaaaccctattaagatgagaacttcaacagctttatgaaaattttgaagagaaaggtgttataagcttctgcagttcccattcaactccttccctattcaaaagtttcaatgctcttccacctcccatcctcaataacatttccatcctcagctacagctgtgtaatctcaaagagtagtcagaagaggagattttaaaaaacaacgtaagagtcaagccagtgcttctgggaggccaaggcaaggaggatcacttgaggtcaagagtttgagaccagcctggacaacacagcgagaccccatcctttaaaataaaaaaaaccctttaacaattagctaagcatggtgggacttgcctatggtcccagctacttgtacttgcaaggctaaggtaggaggatagcttgagcccaggagtttcaggttacaaagaactatgatctggccattgcacctcagcctgggcaacagagcaagaccctgcctcttaaaaactgcttagtccctattctttcccctcatttaccaggtgtgaaatttcaacaaacatgtttcagtgaaatgatgaaaaggacacaacagcaaagtatgttagaaaaaaaatgctttggaatcagataaaaagtcctgagtttaaatttagctctgccttttacaagcctctgaagatttattctgatcattaaacgaacatacatgagtaaacctttaattagtatacactcaaggtacgtatattgttttcgtttctccttctaaagcatggaagagtttctttttaaaaaacaagctgacaaactatgaaaattaaaagagtacaacagcatgcagaagtagtacagaggagttcctagaagttatattctttctccagagagcaatattattcccaaaagggactctactcacttcacagcttggaaggtaatacctaccttctgacagaacagaaactggtgtct

SEQ ID NO: 281297 - DNA, 913 bp, Homo Sapiens
gccagaaatcttcccagtagagatcaccatccgcccccgacccccaagctgaatacttaaggggtgggtccttcccatcaagctgatttctcaacgagagggacaatcccagcttccccaacattgcagagcccaaacatgtggaagagttggaagctccgcacagatgtcagagtaagggagggggcaggcggttctccttgtgcctcttcccagcccggtagcaggggcccatgcttcctccctggtctgtcctcgcaggaggtgtccaggcggaggcagttcctgcgggagcatgcggcccccttctccgccttcctcacagacagcttcggccggcagcacagctacctgcggatctccctcacagagaagtgcaacctcagatgtgagtcaccttcctgggccctctctgggctggtgtccatctgctgaagcagcccttgaaatttccctgtgcctggaaatcctcctgtgtcctccagttctgctttctaacttcttcacctgctaccccttgcttaccaggccaggtgggcttcaggggcaagataggggtcaaggctgagttgtatgattatagaagctgtgtcctacttggaattagatttgaaaacataaatgcagttggatttagaattaagattggatcctggacctctcattcttcaggggtccttcctcctgtttccctgtagttcccgaagtccaggacatggccaggggtggggtggtggacattataaacatttgaagtagacagccatgcccatgccagcactgctgactctggaggtgccccagtcccgtgacaaatcagctggggctaggctaataacaaagaggcctcatttcataatcctcccaaagagtgctctggatctgtagccactgctggagggacttccaaagg

SEQ ID NO: 281298 - DNA, 1000 bp, Homo Sapiens
tggtttcactgccatcagccatgctgatatattagaaatggcatccctatctacttactttaatgcttaaaattatacataaaatgctttatttagaaaacctacatgatacagtggtgtcagccttgccatgtatcagtttcacttgaaatttgagaccaattaaatttcaactgtttagggtggagaaagaggtactggaaaacatgcagatgaggatatcttttatgtgcaacagtatcctttgcatgggaggagagttactcttgaaaggcaggcagcttaagtggacaatgttttgtatatagttgagaattttacgacacttttaaaaattgtgtaattgttaaatgtccagttttgctctgttttgcctgaagttttagtatttgttttctaggtggacctctgaaaaccaaaccagtacctggggaggttagatgtgtgtttcaggcttggagtgtatgagtggttttgcttgtattttcctccagagattttgaactttaataattgcgtgtgtgttttttttttttttaagtggctttgtttttttttctcaagtaaaattgtgaacatatttcctttataggggcagggcatgagttagggagactgaagagtattgtagactgtacatgtgccttcttaatgtgtttctcgacacattttttttcagtaacttgaaaattcaaaagggacatttggttaggttactgtacatcaatctatgcataaatggcagcttgttttcttgagccacggtctaaattttgtttttatagaaattttttatactgattggttcatagatggtcagttttgtacacagactgaacaatacagcactttgccaaaaatgagtgtagcattgtttaaacattgtgtgttaacacctgttctttgtaattgggttgtggtgcattttgcactacctggagttacagttttcaatctgtcagtaaataaagtgtcctttaacttcaaaaaaaaaaaaaaa

SEQ ID NO: 281299 - DNA, 1000 bp, Homo Sapiens
tcccaaagtgctgggattacaggcgtgagccaccacgcctggcctgaactggcttctaattggttggttaagtaagaagagattgaatgaaagacagactttcaattctaattcagatattcttttctacacagaaacattgtcaattgttgctgtggaactagaactgaaggatttcatgaatgttctcccagaagatggtactgcaacatttttcttgccatatcttctctattgcagtcgaaagaaaccattgacttaaaggtatcatttgaaaaataccataatggcatttgagactgaatttctaaaaattgaatgccaaagtacaagtagaggagttttttattttatatatacacacacacacacacacacacacacacacacacacatatatgatacaaatgctttcaggctgcttaccttaccgtgtagtggtaactattcacttcttaatttatgacctcaatcaatttaattgtctagaatgtaaaaagtctttaagacataagaattcctcaaagaagccatacattttttaaggtggggattgacttttattccaaggaacaacatcagttcactgttgttggagacatgacaatcattttcatcccaagaacactttaaggaaacattttacaagtatgcttgaaagaatgtcactaactggtccagaattttatcttcttgatttttccagatttctctatgtttttgagaaagatgttaatgttttgccatggtaaaagatttcaaacctcattttttttgttccttttcttgttacttttaagaaaactcatgctctgtttctctgaatcaaatgaagtagaagtttacaaagctaactttcttcttgtctagctattaacatgatttgtcaaatgcatgtttttttcagccaaagccttgtttccatttttgttgatgtgtactcttgctcttttagctagagtgtatgtgaaaataaagaaatacatcattgtattcacaa

SEQ ID NO: 281300 - DNA, 22 bp, Homo Sapiens
taagggcatgactgagagactg

SEQ ID NO: 281301 - DNA, 21 bp, Homo Sapiens
cctggacttttaggatgtgac

SEQ ID NO: 281302 - DNA, 21 bp, Homo Sapiens
agtcaaatgtcggtcctcatg

SEQ ID NO: 281303 - DNA, 20 bp, Homo Sapiens
aagtttgtccaacggtcacc

SEQ ID NO: 281304 - DNA, 21 bp, Homo Sapiens
tgacctgcgtataaaacctgg

SEQ ID NO: 281305 - DNA, 23 bp, Homo Sapiens
agcctgcagtgatactagacagg

SEQ ID NO: 281306 - DNA, 22 bp, Homo Sapiens
tagccatctctgtagctgacac

SEQ ID NO: 281307 - DNA, 22 bp, Homo Sapiens
cctctaccacacatttagcctt

SEQ ID NO: 281308 - DNA, 22 bp, Homo Sapiens
gagttgccatactttgctgtag

SEQ ID NO: 281309 - DNA, 1000 bp, Homo Sapiens
ggcttccctcttcgctcggctctcattctctctcccgctaccctgtgaagaggagccttccaccacgactgcaagtttcctgaggctgccccagccgtgctgaactgtgagtcaagttaaacctcttttctttataaattacccagtcttgggtatttcttcatagcagtgtgagagcagatgaatacactggccctgcctgggtttcagaaccagccttgaacctttcacagtggccagaggatggggaggcagaggcccaggttgcacacttcttgcctgagtgttggggactatctgacccaaaacaggtgcacagagggcaggagaggatgttcccaaaggaaaattagagtttagaatcaaaagaaggggaaggtgcgtgtttgggaggtaaatagcaaatactcttcataggttcactagagtcttgctactccaagtacgatccctgggccagcagaatgggcacagctggagctgattggataggtcccatgagcctcaggccccacccaggctcaatgagtcagagtctgcgtcttaagaagaccccctggtgatctgtgcacattcaagcatgctgccgttttccaaagcacttgcaacactcaggatgcttgcaccggtcatgttgccaccatccaacctgcagaccccattcttgagattgactgggagttcctatcatgtcctccatagcaaggggatctagaccagaatcaagccttggatctagttctcaagtctcttttgtctctttcagtttaggaacagtttgtcaactttccttcacttttgtgaccttgatacttgagtttgaaggctgtctctcaatttgtgttctgcccagtgcatcctatcagaaggcatgtgatttcaacttctcccataccaacaacgttcactttgatcacttgattaaaggggtgtctgctaggcttctccacagccaagttactattttccctccctttataattaatctcgtgccgaattc

SEQ ID NO: 281310 - DNA, 1000 bp, Homo Sapiens
agtccatggtgacagtggtgggaacagttacgaggcagttagattttggaagtcatgttggcccacttggctacagagcagtcttaggaacagcaccataaaaataaagacttattcctgacacacatgcatctagagtaaactggggcgtatctgacagcgttagtacagtgatggccaaatgcaaactgcattccagaaccagcgaagggtgacagactgggctgaggcagagctaggactaaccatctcgagtgatgccatctcggggccaacaaaagttttggacacggctggatcatctgaccaaactgctcaaatctttacacaattattgtcctggtattaaactttcacctgccacttccaacaaacaggagacagaataaggagatgaccaggaagatggctggattaagaattctagacttggccgggtgcggtggctcacacctgtaatcctagcatcttgggaggctgaggcaggaggatcgcttgagcccagagtttgagaccagcctaggcaacataaggagaccccatctctacaaaatatcaaaaaattacccaggtatggtggcacacacgtgtgattccagctactcgggaggctgagatgggaggatcacttgaacccaggaggttggggctacaatgagctatgatcgcaccacttcattccagcctggatgacagaagactcactccatagttcatggccccgtgatccagagtccctgctggcgccttcgagtggggcaggctgagaactcaagctgtaactaatgtctcctccgaagaaaactaaaccgagggctgagctgatgtgaagttttccgtggctgcattcatacaaatggtgaaaatgtagcatacctcccctcaaaagcctgaaagtaaagacatgcccccaatttaatgtgatgaattagagaaataggtttcagacacttcatggtttaaagtctcacaaaataaagctttcgaaggaaaaaaaaaa

SEQ ID NO: 281311 - DNA, 1000 bp, Homo Sapiens; identical to SEQ ID NO: 207053

SEQ ID NO: 281312 - DNA, 1000 bp, Homo Sapiens
actagaggtgggccaatggatgaatggatggatgagtgggacagtagtccagggaggatgtccctgtctgtccagtttgcatcggctcctgtgcagtcacatagctccctgctagctgagttgaaattaaaacccattcagtctggcttctatatggctcatggggcctgtggactggtctctccttttccctccagaccccatccccattaagtccatgagcaaatcatgtaggtgacatcctcacaatgatcctgaggtgactctactcaccatctgccttctcccacctagtttgagcacccttcattacttacctggaccagccagctggcccccctctcctccctgctggtgtggtgtggcctgttaacacctgagccgcagctgaacccacttctggctaggaccctctgctggctccctggctgctctgagtgacagctagagccttgcaacagcctcagccattgaacctgggacttctgtccctgagctctctgctgcttgcctctgctcacaccaggacagatgcaggcttcccctctgggcctcaggcatgccggtcatgctcctgcctcagggcctttgcatgagccattcccactgcctggaatgctctctgccaagatatctgcttgggtgacccaccacctcctgcaaacattgctcgaaccttgcctcgtcaatgaggactacaaccccggccacgcatctagaaggcatccagcacagagtatgtgctcaatacacagacaaagcaggacaatacatgagacaactgtccctctcccaggcccctgggaaatgctgggatggggaagatattcagatgtcaagaggaatagggcccagtgtcttgattctcattccagtgctcttcctgttcacaggagtggcagggctgcacatttggagcaaaactgagatgagtttcaagggccgctgagcatcttacccacccacagcctttcccagtgttctgggagataaacagctg

SEQ ID NO: 281313 - DNA, 1000 bp, Homo Sapiens
gaatcttaaggcctaggatcccagcagttttggggtctaaagacttttcaggctcccgaaactccctctatttttaataattttaaatgtttccccaatacttagctaagcaaagaaggaaaaagtgtacttttattacacagtcagttctggataattctaggggaaattcttccattttagaaatctctgctttcttcttttctcccagattcttctcattaattccctcagtaaatatttgtctgtggcagggtgcagtgctcgtgcctgtaatcccagcacttttggaggctgaggtggacgaatcacctgaggtcaggagtttgaaaccagcctggccatcatggtgaaacctcgtctctactaacagcacaaaaattagctgggcatggtggtgcgtgcctgtaatcccagctacttgggaggctgaggcaggagaattgcttgaaccaggaggcggaggttgcagtgagccaagatcacgccactgcatgccagcctgggtgacagagcaagactctgtctcgggaaaaaaaaaaaaaaaaaactatatatacatacatacatatatatatatatatatataaaatgtacatatatatttatctggcacctactagatgccccaggtaccatggtaggcacaggtgtacagtgatgaagagcattttcctataaaatattacccaggctgactccaagttttaatacctcaggtaggaaaaggaggagagtgttagtaaaatgtttgccgttgaatttcaccagcgtaaaaacaacattctgggaaataattatctgcacttcagttctttggggtggtaccggagggaatctttacaaaggtggtattaatggagaagaggaagggaaggatccttagtgatgggttgtttttccaagcacctcgatctagtggatttcctttttttttttttgagatggagtttcgtttttgtcgcccaggctggagtgcaatggcgcgatcctcgagctc

SEQ ID NO: 281314 - DNA, 1000 bp, Homo Sapiens
ttcatgggacccatggaagccagcacagtccttgtcttctctaagtccccaagtgctcctccccatcctgcccttcacccctcttgccccactgtctagaacaggtgtttgcaaactacagccccatgggccaaatcaaacccatggcctgcttttgttttaattgaggtgaaactcacataacataaaattaacgattgtaatcactgcctgtttttgaaacgaaagctttattggaacacagcacacccactcacgcattgtcggtggctgcttttacactgcagcagcagagttctacagctgttgtgacaggcaccatagggcccacaaagcctaaactatttactatctggccctttacagaaaatgtttcctgagccctgctttagatgattttgatctattctctttagacaggacctgggccctggggaacattttctcagacatctctacctctattaagaaatgcctgccctagtcaggcgtggtggctcacacctgtaatcacagcactttgggaggccgaagcaggcggatcacttgaggccaggagttcgagaccagcctggccaacatgtcaaaaccccatctctattaaaaatccaaaaattagccagacttggtggtgcgttggtaatcccagctacttgggtggctgaggcacgagaattgctggagcccagaaggcggaggttgcagtgagccagatcacactgctgcactccagcctgggcaacagagtgaggccccgtctccaaaaaaaaaaaaaaaaaaaaaggccttgcctgtcctttttaaaggcaaacttttccccttttgtggggaccccaggctcttgggccttacggaccatttcctaagggattcctgtttccccttcttttttcgggtttttacccacacaggggccagacctggaaaaacccctgggacctgatttgccaggggcacccccttttttttttttttcctggggggggccgggggcatatgg

SEQ ID NO: 281315 - DNA, 1000 bp, Homo Sapiens; identical to SEQ ID NO: 114754

SEQ ID NO: 281316 - DNA, 1000 bp, Homo Sapiens
ttatttctaataggtactaccttagccacaacacaaaatccaaacgttaaaagacattatgcaatataaacaattttcctcccacccctgtttccaacatctaactccttttctcagaggtaaccaagcagatctttcttgaatccttccagagctattttacgcataccaagcattaatataatctttcaaaataaaaatggtactatgcaaaattacactgtcttgctctttgatttttttcacttaatgtatcttggcagctattccacattagtacatgtagaattgctttattcaatttttttttctttaggtgcacttaatttaatatcaagaccacaatacaaaaggcccaaatacaatgaaaaaacacatttgtccattaacaccaatgataatgctctttcagcacatgcctgccgaatggaatgcggatttaataaagctcactcctgaaaaaaataacccagtgagtctcaccacagccaacatccttaagcaatctggttgtgaaatgaatgtttataatgcttcaaacagcttaaacctgaagtttgataccacaccttcatgtttgcacagttctcaataagattatctacaatatttacaaccattcaaaggtaaaccattgattaaaaccacattcatttaagactcaataattcccataaatatgtacaattattatgtatcaataaaaaagaatcaagtaatatagagcctcaaactaaatggttaaatatatgaacgacttatactgacaactaatatttgattttctgtgactatttaaggttggttcttagcaaataatccctttaaaggcaaaattcacctcatttgagttttgacccagcagttcaacaacaatgatgaagttcacagtcttactggcaaaaccaatatgttgaaaagtcctcatttaacatctggataagttcttggaaactctgattttaagcaaagggatgcataaggaaaccatttttaccat

SEQ ID NO: 281317 - DNA, 1000 bp, Homo Sapiens
atcctctctgcccctttcctgaaacaagtcctgtatgattggaagggggcgggggagggggagcgtggcagggatgaggcgaggctggaggccaggtttctgggtctgctgatcctcccccacgggactgcctcacctccctcccttctcatcctctctctcctctcgccctccctcccgtgtcccccacccgcaggtgcgggccagtgctattgcccaggacgcggaccagaactacgactacgccagcaacagcgtgatcctgcacctggacgccggcgacgaggtcttcatcaagctggatggaggcaaagcacacggcggcaacagcaacaaatacagcacgttctctggcttcatcatctactccgactgagctccccacgtctccctccacccacgtccctcacccgccggggtcccctccgggcggggcagacgatgactcgcccctcgcccacccgctcgctgcccggccctccccggctatgacgcccccggcccgtgctcaacaccgcctgggccacagctaggccctcccaccggctcgctgcagagccgggcccagcgcgccctgtccccgtgccagggaaccggggttgaccgcccccgcccagcccgcgctatatatttgtacaataggactgtttactgcccacctccgcctgccagcccaccccagcctggggagaggtcgcggcggcgggtttgcttcctgcgctctgagatgagctgccctcggctccctccggggtggcgcgcccgggggaggggggagttgggggctggatagcttcccagcaccctcagagcccccgcccggctgtgccccgtctgaccaaagttataataaaaacattttcaccccgcaggggtttcagtctgtgccctggggagggctgcgggaggcgacggtggaccgtgccctcctccagattaggaaggggtctggtggaagtttctaggggaaaccaggtgccagagccagagctactccaag

SEQ ID NO: 281318 - DNA, 1000 bp, Homo Sapiens
  misc_feature (50)..(50): n is a, c, g, or t
ggcctctctgatgtaaagaaagatgagtagactggtttatcccttctatnagttagtacatgagagtaccctggtcctttaagagccagagttctttggggtttttgtttgttttcccccattaaaaagcactagcatttattaggggaaaatgaggttctcctcaactcatgttttccctctctgtattgtggaaaatctgaacctcactctgaaagtgaatacatccatttgaaagggatggcaggttaccaagagtgtcatttaatgaaacccctctttttcttgaccaaaagagaccttgttttctttgagaagcaggagttcactttaatttttatgaacatctcacaccacttccacctaaccctacctactgtaatatgggctggcctgtcaagtcttgggcaagaatagtgataagatgctatcaggtcagaacccatattgttagagtagctgaaagattcaggagttcttattttgaactcttgcatgtagaatcattacaagatgtctcttaaatgcagttagagtgagaggaaagctggagctgtgggtggggaacatgtcagaggtggggctcagcaggaagtgggaccagtgcctgctggatgtggtagataagtaccggttttggattagggattgttttctcacttaccttctttaaaaaaagaatgtggccattagcctttggttctggcatggcattaggaatggcttattccagcagtcagcatgatttccaggttccatgtcttctacatggaaaacatgtcaaaggacaggagcagtgaccacctgacaacatcgcagtgggagaaaagagaaatcatgtttattcctcaggaatgctgaagtaccctggagtaagctgtcattcttattataacaatgttattagtaatgctttaaactccagcacacttgttcatgtattttgcacaccaagtctgttctctttgtcttgtcatttttcctctctggaaattgtcaa

SEQ ID NO: 281319 - DNA, 1000 bp, Homo Sapiens
tgtctttatatgaaactgtaaaagacaaccaggtcgtttcttaattgctgaaatttattaaaatgaacacactagaaaatcacattcccaatccagaggaatccaatggcgtcgtcagcctatttgcaatggaaatgattgtaaacctatagggagacataggaggggctgcacacaaactactttcgttcgtcctgatttactggcttcttttccccctagagatacagtctcactctgtcactctatcgcccaggctgagtgcagtgggttgatcatggctcactgcagccccaaacccctgggctcaagcaattctcccacctcagcctcccaactagctgggattacaggcatgcaccaccacgcctggataatttttaaattttttgtagagatgaggtctcgttatgttgcctgggctggtcttgaactcccggactttcaagcaagtctactgcccctgcctcccaaaacaaacattgggattataattataagccaccacacccaaccctaatttacaggcactgtatgtgataatatgtgattttgtcagatgttttccagttggaagagattatggaaaattaaaatgtgtctgccatttgatagtaggacaaatactgaaatattaagccacagctgagttctggccttagtccttttggggctgctctgacaaactgccgtagactgggtagttggtacgcaatagatacggattgctccacagttctgggggctggggagatcaaggccctggcagatgaggcatctggtgagggcccactttctggttcatagacagcaccttcttgctgtgtcttcacttggtggaagggtgaggggtctctctcaggcctcttttaaaagggcactaatcccactcacaggggtggggcccccaagacctaatcacctcccaaaggtaccttggtagttagttaggatttcaacagatgaatttggggaggacatgaagattcagaccacagca

SEQ ID NO: 281320 - DNA, 1000 bp, Homo Sapiens
cagaaagggaagcgggttaaagaatgaaagtgaggtcaagtttttcagtttaatttacagctaacgtctcctatcctagcaaggagggcccccagccccagccctccctctttccccgacctcacccggcccccaggactgactgcaccatagcctcgcctgccttggaatcccttcatccctctctctttcatctgttcttgaaaatctatcaccaagatggtgaggaccacctccttcgaggacatggtgcccggccccattgcccaaagcctgggaaaccatcgttgccacgtgcagcttccacctacggccagagcgatcctgatgcgggtgatgatgtggtcttgggtactgagagccacttttcttcaaagagccgaagtgggaaattaatatgcccagggctcgatgagaacacaaaggggttgtgtcacataagccccaggaaaatgcttccatttctctagagagcttaaggctttccttttagtcacaatatcttagggcgttatcctgtcttctggggggtctgaaccaatcctcccctcataggagcctaaaggtccccagttattccgtaattcccaatagtgggaatcacccagcggcagcatcctgagaccatctgtgccaatcaacagtgtctagcgtgcaacagaggtttaaacactcgcacccgcagtagccaagatgtgcaaacaactgtccacagacagagggatggaggaaccaaatgtggtgtctacataaaacagaaacgtattcagtcctaagaaggaatgaagttcagacacatgcctcagcatggatagccttggaaacatcatgctgagtgaaagaagccacacaccaaaggccacatggtgtgccattgcacggatatgaactttctcgaagagaaaaattcctagagacagaaagtacaagggaggctactgggggctgggcaggggacagtggggagctggtgtttaatggggacagagtgtttgggatc

SEQ ID NO: 281321 - DNA, 1000 bp, Homo Sapiens
ttatcctgccctctagccccaggctgaattacttaggcactgttcccctggattcctactttttagagccaggtgcatctctttttgtggtacagataatagtatataatcacctttgattttcttgtctgcattaccatctagactgtactgtccaatatggaaaccacgaggtacatgtgactatttatatttaaattaattaaaattaaattccattaaacattctgttcttaagttgcaatagcaacattttaagtagtctttagccacaggtggctagggctactgtactgcacagtacagatatagaacatttccatcattgcagaaaggtttactgtacaggactctgatagcctctgattcccttaaaggactgatttttgccctttttatttctatattccgtacacctagcacataataggagctcaataagtatttacgggatgaatgagtacaggaagttcaaatgctgagctaagagaaataatttataacctatattattttgaagccgtaaatttaagtttttctcatttatttggttgctctggtgaacattttattgtactttgaaatgatgaattaaaaccaaaattttgagttgtgtacaagattggcaaatatgtgtgcattcaagtggtctgaactccaaagacattgctttccctaaagattaatggtattacttctgggtatattgccatccagctgtgagatttgtccgtagaaatttgttaataaagaacatgtctcttctaaaatcttcaaaatgccagactacttgcattccttatgaagcctcaggttaccaaatgtagcaaatatgctactccatgctgtactttggcttcaggagcatgcttttggaaccaagatattctcaatcaaattgacttgaaccagaaggagaggtattaactcacataaagaaacatccatagatggagcatgttcagggtggttgattccacgacataatgatgtcaacaaa

SEQ ID NO: 281322 - DNA, 1000 bp, Homo Sapiens
tctacatggtataaagagatgctctgaggacaataggagagtcacttgtgtactattagaattcttgaagggtctacagtttttgaaataatttgcaacaagagtacaggatcaaggtgttttcatgcatctccttagctacattccaaaacaaaattcattttcaatttggcagagtggatttgggaggactgtgtttttgaggggagtctcagagtcgtgaccagggcagtggtcaataacatatgcttgtagatgcaaagacacaactgaatcatgaaagtggcaagagtgtcatttcttcaacttcggcttttctagtttgtagtaagttaaaaaaaatactggagtacaaaattcacttgtaagttatttggcatatctgtatcttttggttgcattggtaatttaaaaataagcaatatgctatttttagtatcttaacttccctacacataaactattacaattaaatcctgtttagttttttttttcctaagcaactctactaaaatgactgtttagttttttcaccatctctactttacaatttacttcctgtattttatatttggttgttctttcagaacatgtcatgggcagtttcaacagatagcacatgacacatattctttccagatttctacgattaatcctgaatttattccatttccatatgcagaaagtctgaaatattttccattgacatttcatagggatagagctgtagagttctatctcaatttgcaatggattactaggaaaggaggtcccttattatatggaccatcataaaaaccaagacaagaaactaataacctatattctctaaaaaccatgtgcatcacaagatcattaggtataagcatttctaaggcatgagagaattagcacttcacagccacaagcacgagatgccacattctataatcatctttatttctctcaactgagatggaaacctgcatctcacttaaggattttagagcaaaaaggatcc

SEQ ID NO: 281323 - DNA, 1000 bp, Homo Sapiens
atacagatttctaggtccccaacccaaacacactgaacctgaatttctaggaatgggcccaggaaactgtggttgtaaaaagttccttgggatattaaacaaaaattagtcagctttggggtttgctaggagaaatagtcaagattttaggactgattgtcagattctaagactaaggttttttgttgttgttgttgttgttttgttgttttgtttttgttttgttttgttttgcttgagacagggttttgctcttgtcgcccaggctagagtgcagtggcgagatcttggctcgcgacaacctctgcctcccaagttcaagcaattctcctgcctcagcctcccgagtagctgggactataggcacgcaccactacacctgtctaattttttgtattttttagtagagacggggtttcaccatgttttggacaggctagtcttgaactcctgacctcaggtgatccgcccgcctcagcctcccaaagtgctgggattacaggcgtgagccacagcacccgacccagattctaagaataagattcttaagcaaagagtcttaaagccagagtcaatctcaagggaaggttgatgtgtgtttctgagcaaacaggaaattaccatgaagtagaaagacggagaaaatgcattggcccaccaaggttcactctccttgctttttttatttaaaaaaaaaaaaaaatctcctctgcctttctccaatctggctgcagtcctatttgaacatttgagcagttaaataaggctttaaacacttccctctaatcaatcagcaaattatttccttctcctcaagatgtcactttcaattttaaaaaagacatatgccgtttttctcttgacattttaagtttttcaaatttcagaaaatgttcaataatagcaaaataaacaaccatatacctaaattcaccaattgctcatattttgccacatttgctttgttctctctctctctatttgagtgtaagatgaagct

SEQ ID NO: 281324 - DNA, 1000 bp, Homo Sapiens
tagttttcttacaaattaatgtattttgcaatatttccagaaaatcactgtgggagaataatgtaatatactttaggatatatttcctgaccttttcttaaatggcttcatgtgctattcccccaaattctgctttctctattttcttttttatttaacctataattatactttctagtatattctgagtctatcttctaagccaccttacatttttcctggaacaagggagggaataaatagttgcctccactaaatcaggaaaaaataaaaatatcccaggggagctgtgattatgccaagagctctaaacagaagtttgagaaggtaaaaattaagttgtagtatctgagttgtttttattttcttcctttggggtttatgaaggtattcataagaactttaatttcaggggaaaaaatgcctgatttgctatttttgacatttcctcgtctcttaagaagtcagttaaatatgttttcatagtttatattcctgtttcatagattactgtgaaacatgtatttaaacctatgaattataaaatagtatttagattctagcgtgagttaaatagattagtcatatatcttttagatttgtggatttgacatgtaaattatgtgttgtgtataagtaagttagttactaaacatatggcatggttattgataaacttgttgctatttttttccaaatgctatcagtgtttgtggacttttaaaaattagtttgaattttggaatgttctgtgataaaatataatttcaactattttgtacatttaaatatgccatgttgtatatgtctgtatttaaaaatgttgtaaatatctgcattttaagaattatgaaagattttcctcaaaaatgacagaactctccatacttaattgtgacacattataagatatctgattttaagcttttggattttgttctaaaaattaagtttaaacatgctgaaaattccataaaaataaaattttgaaaataaagtg

SEQ ID NO: 281325 - DNA, 1000 bp, Homo Sapiens; identical to SEQ ID NO: 195025

SEQ ID NO: 281326 - DNA, 1000 bp, Homo Sapiens
ccagcccctctctaccatattgggaccctcaagaggtttgtgctagcccgatgcctccaccgggcacttagaaggcaagaggacaggatctctcaagacacagcacaattcagtctcttaagattaacttcacaatgatggaaattatttcatcaggtggaaagtctgggtctaatagcagactgcacatgagcagagtgacatggtggtggcacttatggtggtggcttgagagccttggggaaattagggccctaacagctagaatcaaagatgataccgcagggccctgtagcaagaaatgggaagcagggggaggggcaggggctcagaacaatattctagaccaactttgactacttcctgtcttagtaatagaccaatacatggctctatttagcaaagtttttatactgaaacttgattattgctgccctttataatttcctcttcaatgatatttcagcagtttccctcttggtcctagttttgtgcacatttttttgaatgtggttcagattaattatatttctctcactttcttagctggtcctattttttcacattctggcatgtggctatcaagttagattgctgtaggcatcatattgtcatggtaactactgaacctaatgatgcagatggatggcacatcagtataataaatgatggaaaacggttcctaaaaattcatccctttcataagaggggaagaatgagtgcctgatattgttaatacctccctttctacctcaggcctttgcaaattgatgttcagagggtcactggagtgagagggaggaggggggcgtcttggaaatttccatttctcttttcaaacccaaaataggaatgactcttgctgtttgtcagatttgctgaaaattgctcctcacaaagaacatttttttttgtacatgtaattgtaaatacaggtttagtacgttaatattctatagttctgatgttgataataattaaacccagataattttatagc

SEQ ID NO: 281327 - DNA, 452 bp, Homo Sapiens
aagtatggttcttaaaccccagtttaatgtggtaattcaatgcagttaaaaacttttttttattgaagggaggtttttgaatgtttctgttccttaggtgaacggctgtttcctcttattcaagccatgcaccctactcttgctggtaaaatcactggcatgttgttggagattgataattcagaacttcttcatatgctcgagtctccagagtcactccgttctaaggtgatttaaatttatttaccaagttgcctcttacacagttattacgtggctttttatggggacttaattgtacagaacacttacatcgtgttatatatagccatgtacagttgtaaagtctgcataataacctgtggcgctatttatcccatttatagataggtaaactgaaacaggctgaataattgccaattgactcacacagctcttaagaggcagagcgg

SEQ ID NO: 281328 - DNA, 1000 bp, Homo Sapiens
taagggacggttgggggctgggagccctgggcgtgtagtgtaactggaatcttttgcctctcccagccacctcctcccagccccccaggagagctgggcacatgtcccaagcctgtcagtggccctccctggtgcactgtccccgaaacccctgcttgggaagggaagctgtcgggtgggctaggactgacccttgtggtgtttttttgggtggtggctggaaacagcccctctcccacgtggcagaggctcagcctggctcccttccctggagcggcagggcgtgacggccacagggtctgcccgctgcacgttctgccaaggtggtggtggcgggcgggtaggggtgtgggggccgtcttcctcctgtctctttcctttcaccctagcctgactggaagcagaaaatgaccaaatcagtattttttttaatgaaatattattgctggaggcgtcccaggcaagcctggctgtagtagcgagtgatctggcggggggcgtctcagcaccctccccagggggtgcatctcagccccctctttccgtccttcccgtccagccccagccctgggcctgggctgccgacacctgggccagagcccctgctgtgattggtgctccctgggcctcccgggtggatgaagccaggcgtcgccccctccgggagccctggggtgagccgccggggcccccctgctgccagcctcccccgtccccaacatgcatctcactctgggtgtcttggtcttttattttttgtaagtgtcatttgtataactctaaacgcccatgatagtagcttcaaactggaaatagcgaaataaaataactcagtctgcagccccaggccggcctgtgtgtgtcttggggctgaggtgggtgggggggctgaggtgggtgggagggctggcgggacaggtaggcgccctggctccccagctcagtgctgggagtgtgcagtgggagggaggccgtggctccagtgggtgctccggagctc

SEQ ID NO: 281329 - DNA, 1000 bp, Homo Sapiens
ctccgcctcccgggttcaagtgattctcatgcctcagcctcctgagtagctgggattacaggctcctgccaccacgcccggctaatttttgttttgttttgtttggagacagagtctcgctattgtcaccagggctggaatgatttcagctcactgcaaccttcgccacctgggttccagcaattctcctgcctcagcctcccgagtagctgagattataggcacctaccaccacgcccggctaatttttgtatttttagtagagacggggtttcaccatgttggccaggctggtctcgaactcctgaccttaggtgatccactcgccttcatctcccaaagtgctgggattacaggcgtgagccaccgtgcctggccacgcccaactaatttttgtatttttagtagagacagggtttcaccatgttggccaggctgctcttgaactcctgacctcaggtaatcgacctgcctcggcctcccaaagtgctgggattacaggtgtgagccaccacgcccggtacatattttttaaattgaattctactatttatgtgatccttttggagtcagacagatgtggttgcatcctaactccatgtctctgagcattagatttctcatttgccaataataatacctcccttagaagtttgttgtgaggattaaataatgtaaataaagaactagcataacactcagcatctagtaagtgctcaacaaatagcagctgctgttacttactgttatcaaatttctgtccacatccactctccatatgcacttgaaggtggcaaagatccacaaccatggtgcctgcctttatcctcagggtccgttcctttggttggcagacccctatcctgggttctgagggaccaacagagaaaggaaaattccatccctcacctctggaagttcccaatcacaggaaggaaacatagtaagcacgtggctacaaatacaattgacaagaacatgaaggtgcaggataacaaga

SEQ ID NO: 281330 - DNA, 1000 bp, Homo Sapiens
tgcgcaacagagaaaactctgcctgaaaaaaaaaaaaaaaaaaaaaatgatctcttcatatcacgtaaccaaaaaatccatacctgaccttgagttttcccaggacgggattctgtgacataaacccttccatgcttctaccttaaaatgtctactcctgtgtttatttatggtttagtgttgagagcatgggctcgggagtcagattgcctgggtccaaatcctagcgttactttttaacgctgtaacctctctgagcctcattttctcctctcaaaatgagagtgggatggtcctacccttacaatgtgctgagaggattaagtaagatcacacaggtgagctgtttagcataggacttggaacatatgttagctagtatgataataaaggggcatgtatatccattcaggcaggacagtttgaccaggagtatgtgaggaaccagtgctcagggcagtcatggaggaaggggagatgccaggagtgagtgaggggcacatacctgggcattatcctgtgtgggggaaagggaaagggggactggatacccacagggaagggagctgagttggaggcaaccctcagacagatgggaatggagaactcacctgctggggtgagggaagcagcctggcctaaaagaggagagcttcccctgcttgccatcaggtatggcacggggagtatgactggccaatctgtggtcacaggtgagacaactccccaggacattgccactcatactccagaaaaagtatgtggccctccctggccagggctcgggtcttgccaagcaccccgtttgaccagctcagcccaaaggccaagtgaccatatctcctttgatgttcttttgaagcttcgcctcttggtgtcggatattccttagataccaattagagctccttctgaaacaggcctaccttctgttggctgaaccaaagcaaatgtggatttgttctcactttggcctggtaacttacggagcccaaggatc

SEQ ID NO: 281331 - DNA, 1000 bp, Homo Sapiens
aattttgaccttacagagtttctccctacccctatctaccattgccacttgtggattgtcattttgccatgactttcttttaaaaaatatcaataagctctatacttcagtaatgtaagtttgaatttcatcctggctgcataagtcactttccattttgacaaagtctagaaatatttttctccatctccttgaatatgggtaatggatacctattgtggggcccactctcaatctcatggttttattttaatttagttctcaatagatatgcctcagctgcttaaaaaccattgaaaatggcccatggccttgtccatctaacagagtccagtaaaatcctgacaatggaatggggagagagaaagtgagaaccaccaaactcagcacaaaacgactgagtttaaacctctgtgctaagagatgatcagagtctatcatggcttctagtagcatgagaccatgtctcacgaatgaccctaggctcccatgacaatgcctacctaagaaagctcaaggctgccaggggaacttactttagtctagccaatacttgatgatggcagtttcaggatctttctttcttatagcacttactaagaagggaatccttcctccatccctttgatatatgtgtgtatctcctagggacttcaatgtatctttgcccaggatctgaaaggcaatacttttgaggtgtagttctcaggaaggactgagcctctgtcttccagtctctgtgggaggttagaatcctaacttctaatattgccagctggcagacacagctgtcctgatgaggcagacatttaaaatgaccaatcttttgtaatgtttcacttgtgccctgccccctgccctctcccctgcctctctctcccattagaatgccatcacctctgcacaaatgcgaacagaaccagccccttcctctacggtcagtagttactgaataaaattggttttcatcgatttgactaatgtctgatatatctttgac

SEQ ID NO: 281332 - DNA, 1000 bp, Homo Sapiens
gccctccaccccattcattgtctctatcaaaatgtacccatcttcctggccaggcacagtggctcatgcccataatcccagttctttgggaggctgaggcaggaggatcacttgaggccaggagtttgagaccagcctgggcaacatagtgagtccccacctctacaagaaatacaaaataaaaaattagctgggtgtagtgacatgcacctgtaatcctagctacttgggaggctgaagcaggaagatcacttgaacccaggagctggaggctgcagtgagctatgattgcaccactgcacactagcctgagtgacaaagtgagaccctgcctccagaaaaagaaaaaccttacccatcctttgtcccattcatcaactctgacctatgtttgcttccagcctccttgaagctgcccttgaagacttcccgactctacaataacttggagacagagagactggccaggcctccccggtggccagagccagccagcatggccaccctcaagaggcgagatgagcccacagaggcatatcctgcggggatgctgggctcccagtgtggttggcctgaacaaaataaagtgttgactcctgggcatctgtgccttctctatggccttgctacctgggattccagagagttgatggggtgcagataggggtaggactgttagaatagaaccaacccaaactgtgtgtagtttggggtgtatacttctatttctcttcctacatgtctacatgccatgaccttcctcctcctcttcacttggccagtttcagctcacttcctccaggaagtctttcctgatatatcaaactgaaacaaatgctcctcctccatgctcccttaatccccatgcttgtcgattatattcctttgccaattcatttctctatcctgtgtatgtataagtgtgtacaagcattcaagaaactgatgaatgatgaatgaatgaatgagccaaagaacaaataaatgagcccacacaccc

SEQ ID NO: 281333 - DNA, 1000 bp, Homo Sapiens
gaccaagaaaaaagaatgaattcattcattcatccatattctgggagcaaaggaaattggagttaacaaaaccaacccagaaactgccttcctggtcctctatcaagtgcagcagaaggtcatggaacaaatgacttcaagagtgttacttgttactgaagggtcagtaagagataatgacctttaggatctatttttgcacatcaagggtgggcaaaagcaacccgcaaatggagtcttaaaaggtgcctaggtgtctgctggcctacaagggtgggaaggtattccaggctgtgggcctggcttgagcagtggcctggaggtgagattcagcctggcatgcaccctcgagaccctcttggccacttcctgttccccattgtgagttccagtgccatgagcagccctggccccgggctgcatccctctctctccctacccctgcctttcctctatctggtctccctgcagcctggagagtgtgtttccactcatagccgagggccagcgcagtgccacgtcacaggccatgcaccagctcttcgggctgtttgtcacactgatgtttgcctctgtgggcgggggccttggaggtgagtaaccttggattttctagaggaaggggcatgggatcctataagcctgacatgaattcattcactcatagatatttatggagcatctactttgtgccataaagtagggattgggttgtgggttaaggggtaaccaacctcctgcaggcacagaggtgcatgcaggtgcttgctcctttctggtgccgagggcagctggggagtccgcgaggggtgagcgaggccctctcttatgggtctatgcttgcctgtgctgctccctctgcccactagagggaagcccaaccttaggctgaggcctagaaggggatggcttgcgccatgtggggcagggacaaggaggggaggagatggcctgccacttcagaccccagtgcaaaaacctttcacagaggcacactgtc

SEQ ID NO: 281334 - DNA, 1000 bp, Homo Sapiens
gttggcatggcacatccatgcatccatgcggctgtcccctaacgacacaagccccagggactcgtgtgcctaccacactggtgggacctgaagggccacagccaacacctgtgtgctgggccgtgccagcaccacctgccaggagagcacatgggtgtgcccagaagccacctgcccccacaggtctgagggaaggtggggccctgcctggagacccctccccaacctccctctgcagcacagtgctaggctcggaggttcctgacattcctttagcccaggtgtggccaagtctccagctttattattattattattatttgagacagagtcttgctctcttgcccaggctggagtgcaaaggcgcaatcttggctcactgcaaccgcttcccaggttcaagccattctcctgcctctgcctcccgagtagctgagacgacaggtgtgcaccaccatgcccagctaattttatatttttagtagagacaggatttcaccatgttggccaggctggtcttaaactcctgacctccagtgatccgcccgccttggcctctcaaagtgctgggatgacaggggtgagacactgcacctggccttccagctttactatgctgaaaacaactttcttcctcccctccagtgcaacccaggctgagcggggatggagactccacaggccaataaggagagccccgagacagcatcttgcatcccgctgctaacaggaggggcttcctgcaacaggaccaggcatctgtggtggatgagcactgggactttattacacggcacggcactcgtgacaacggaaggggtgggcagaaatgcaggccggaacattccacagtccagggacggttggtcattcagaaagtatgtatttccagaacactcagtagtaaggccgtctgggattgttctgtggaaggcaaaacagataacaggaggaggggattagcactaaagacagcagttcctcctgtctggaaccttcc

SEQ ID NO: 281335 - DNA, 1000 bp, Homo Sapiens
gttaggtatgtagtccctgagaccagccttccttggatgaactccaaagtgatggctgaggattagggagtgtggggtgggggctggaaagtcggtcccctattgttgctacctaggccatgacatccccatactcccatcgcctgctcaccgtttgacatccccccccaccaccgccttggtgctgaactcttactttaatttctgtctttcttcgtttgttgggtttcaggagggggtgcaggaaagacggtgtgcgtggggagggggtgtagggtggggatggaggggagcgtcctaagggtcgatgtagtgtcatgcctctttcatcaccaccaccgaagatgaaacaataatcatctaaataccgcgtgttctcacacataagtgggaactacataatgagaatgcatgcgaagaactagggggacgagagacgcaggagcctacctgagggaggacgtgtggaaggacagacagcttcaggacaaagcaaaacgagcagaacacaaaaactgtaggggactgcgctgagaatccgggtgaggaaatcatcggcacactgaaccccctactcagaagtttacctatgaaacaatcttgcacatgtatgcttcaaaaacaaataacagttagggaagaaagagagagagagagaaagagagagagacaagtaaaataaagcaccacctccttgacctgactcagggcgtttggggtcttctggggaaatgttctgaaacaatggagtattttggtctgttctttcttgtgtctttttttttttttttaagacggactctcgctcagccacccaggctggaatgcagtggtgcactgggttcactgcagcaaatatctcccgggttgaagcgattctccagtctcatcctcctgagtggccggattacagtctcaccgccataatagccctgctaatttttgaaccaattagtagaagaaggggtattgccatgcttgcgacgctggacttgaaggc

SEQ ID NO: 281336 - DNA, 1000 bp, Homo Sapiens
tcaataaatagcaaatttttatttaacataagacaagtgtgtaatattttctagaaatagccttttattctcaaaatatacattaattcaaatatatttaatgccttcctgggattacacccctaccacaggcgatccagacattaataatcaagaatcaaatgacaggtttataggttaatattctgaatcttaaaatgccaccgtcctaactggaatgctcacccaagtgattctggactgtgtaagtagcaggggcaagactaaaagttgcaataagccttggatatgggtacagtcactagaaggaactgcttttgagttccagctttgccagttactcatcagatattcaaacttggtctcagtataatcgtttgtaaaacttaggtaactgtacacagctgttccttaagattatgtatagaaaactactctgtaaccaataaaatgctaagtagaaaagcaaaaaaaaaaaaaaaaagttgcaataagcaaatcagctccttgccagtaggcggcagatggccatgctgtacccactgctctagcccattccttttttccctccccatcttcctaggaacccatcttccatggaacctaaaggaatataccagatatagtgctgaacttaacaattcaggaagttaattgtcttcaggcagttagtcaggggacataataacttggggcagtttttctgtatctatggaaagagacttttgaaaagttagttggctccgtaataattactagtccttttaagaaaagaaataagaaaaactcttgggcaggagtaatttgaagtgtgaagttccacaaaaatcaacatgttcaaaatttgactttttttttttttttgcaccggaagtgaaacttgaaaagacagccactcagaagggtgggttcacatttcagttctgtggacttaagccaagtaagttaagctgagtttctgaccttcatctattaaaaggagggtaaggagaataagctt

SEQ ID NO: 281337 - DNA, 1000 bp, Homo Sapiens
ctactcagatgaggagatttggaaggccttggagctggctcacctcaagtcttttgtggccagcctgcaacttgggttatcccacgaagttacagaggctggtggcaacctgagcataggccagaggcagctgctgtgcctgggcagggctctgcttcggaaatccaagatcctggtcctggatgaggccactgctgcggtggatctagagacagacaacctcattcagacgaccatccaaaacgagttcgcccactgcacagtgatcaccatcgcccacaggctgcataccatcatggacagtgacaaggtaatggtcctagacaacgggaagattatagagtacggcagccctgaagaactgctacaaatccctggacccttttactttatggctaaggaagctggcattgagaatgtgaacagcacaaaattctagcagaaggccccatgggttagaaaaggactataagaataatttcttatttaattttattttttataaaatacagaatacatacaaaagtgtgtataaaatgtacgttttaaaaaaggataagtgaacacccatgaacctactacccaggttaagaaaataaatgtcaccaggtacttgagaaacccctcgattgtctacctcgatcgtacttccttgctacccacccctcccagggacaaccactgtcctgaatttcacgataattattcctttgcctttcatttctgttttatcacctttgtatgtatctttaaacaacatatacccttttttacttatgtaaatggactgactcatactgcatacatcttctatgacttgattcttttgttcaatattatatctgagattcatccatggtgatgcaaataggtgcattattttttttcactgctctgtagtctggcattgtatgaatacagcacaatgtatcagttttaatattggggatcattagcattattctcaggtttttaaaaattataagcagtactactatgg

SEQ ID NO: 281338 - DNA, 1000 bp, Homo Sapiens
ataacagggaggggggatgcttctcggagggacctgggttttaaaaaataaaggggggtaggagaaaaagggagagagaagaaaaagggggaaaagaaacagctcaaatgaacagagagatcacggtttgcatggctgcccttcaataggctaaactgacaagatcagttttaaagggccacttaaatcagtttcaaagactggagaaaaatgagtcgccctctttggggggaatctgaggctggatcgtggacgccatactcggactggccaggttgtccacccccaacccccaacccctatataattataagccaaactattatttacagaggaggaggggagagagtgctggtagttttggtttcttctgtttactgacttgggccagacagacccaatgcacttttgcttgggcctctcaatgacccaggctaaggactcgggcagtgaaagcctgtagcacactgagctatgttttattttaaagcaaacacttcctcaggaccatctcttgctctttcttcccccaacccgcctcccccccttaagttttcagtacatagacatttgctccaactccggttggggcagtttgacagagctctgtgcacacacctcatgtgacccaattcaaacctcttaatctgatgactgaattcttcttcttcttcttcttcttctttttcttcttcttcttcttctgtttttaaactttcttccagatgcctgtggtctctctgatgtagcccatgtggaaagcttgcaggaaaagtctcagtgtgctttggaagaatacgttaggagccagtaccccaaccagccgacgagattcggaaagcttttgcttcgcctcccttccctccgcaccgtctcctcctcagtcatagagcaattgtttttcgtccgtttggtaggtaaaacccccatcgaaaccctcatccgggatatgttactgtccggcagcagttttaactggccgtatatggcaattcaataa

SEQ ID NO: 281339 - DNA, 460 bp, Homo Sapiens
gagaagtccagtgtggttattttacacatgccaaatctctgtagaaaccatcgtcttcaggcaaaaaagagagagaggagattttagaatctgaatttatcttgtagttaagtgagttgatggggccacatcaaatggaattttttctggtacccactttgtgaccatttttaatatttcaatttctttgagagaaatctatccagtgtttagcatggtgcttggcacacagctttcaataagtattggctatttctattattacagtgattttcagcttgggtctagataaaagtttggtagaaatcttcatgggctagcatgtgaaaatgcatctgaccctacggaggcatagttgatctggtggactaatttctagcttgtctgtttcactaactgttcacattttccaatatggatgtttttctctaattttgatgccctgtttatccctttgtag

SEQ ID NO: 281340 - DNA, 437 bp, Homo Sapiens
agtttatgggatgtaatttgctacaaaatattaggaaggaaatatcttcagaagatagcattttccaatgacagtaaccaatctttcctgagagctaagcacttgcacacactaatttatttctagccacttatccatgaagcacatttttagagatgatgaaattgaaaggcagagaggttagtgtacttgttcatggttgtagaattggaagaactcaagtctaagtctgtcttgtcccactttcaaatgctatcatcttaaacgggctcttccttatcgtttttgatatatgtattttagtcaaaaactagttaatttgtggttgacttatgttctttattattaacttaacacacttccatttctgccagtatgactattagaagcaaaattttttaacataattgagccttaaaatgtgtcttttcttttag

SEQ ID NO: 281341 - DNA, 1000 bp, Homo Sapiens; identical to SEQ ID NO: 114755
  misc_feature (449)..(449): n is a, c, g, or t
  misc_feature (451)..(451): n is a, c, g, or t
  misc_feature (460)..(460): n is a, c, g, or t
  misc_feature (462)..(462): n is a, c, g, or t
  misc_feature (478)..(478): n is a, c, g, or t
  misc_feature (493)..(493): n is a, c, g, or t

SEQ ID NO: 281342 - DNA, 1000 bp, Homo Sapiens
atttaatcctaaaaacactcctgggaaatgggtattattcccattttacagatgagaaaattgtcctttgtagaatacccatcatgtgatagcttcttgcatattatgctattcatttctcacaaccttacaaggtaaatggataatgttcctggatgagagattaaacgtactcgaagatcttatggttgtgtggctcagagactctaagcatggctttccaaatctcattctcttgtagagattttccattgtattgcattttgaccatgttcctgtttacaaaacctaagattatattctgaagtatctgtgacttgagtgatagctcaggaataatctgagggcattctattaggaaggaggactagcaaagcctatagttagcctatcctaggcatgaactattctcattttagataggatgacttgataaataggatgaagtgagcaacctgtttgtcttcggttattgctatctacaagacattctgctagtcactgtggaaaagtttccttctcttgggttttttcctcttccccttcctcttaacagtgttggttatctttattatgtttctgtgtatttgtaacagctgtttcacccttgtattgcataatggggatttttcttggaataaaaagtgaggcatgtaaattcattgagaactaaccgtagtttgtaaagaagtaaaaggcctttgtatctagttttttgcagatcacatttctttgaatgctggaaagtgaaataaactggtctaggagccaaaaataaatcttgggtttttttaagattttgctcttagatttgtaaccacctgggtacaactttttcctaatttgtgtaagaggttttagagatgcactctgtccctcttgctttacaaattgcctacaagaatgcaaccaaaatactagaaactgaaacttacacaaaacctttcaggttttttcctgtgttgtagttctagggaagaggatagtttattagtattta

SEQ ID NO: 281343 - DNA, 1000 bp, Homo Sapiens
agaaggaggaagaggaggaggagggccgggcgcagtggctcacgcctgtaatcccagcattttgggaggccgaggcgggcggatcacgaggtcaagagaccgagaccatcctggctaacatggtgaaaccccgtctctactaaaaatacaaaaaattagccgggcatggtggcgggcgtctgtagtcccagctactcgggaggctgaggcaggagaatggcgggaacccgggaggcggagcttgtagtgagccaagatagcgccactgcactccagcctggaccacagagcgagactccgtctcaagaagaagaagaaggagaagaaggagaaggagaagggaaaaaagaatcctcatcattaatgcaagtggaaggaaactcttcaccaaagaattgatcacatcatgaaaggtgaaatcattacggaattgcttaaatatataatttgaatctggatttaaaaataataaatgtaagttttttctttaaaaaaaaaaaaaagtccattggttaaattcagcttgaatcctttgccactacatcaagagctaacaggtcaacaactgatctccacaacctcccacctcatttcctttctcagtccaggtagcaggaaaatggaaaaaaaaaaatgattttttttttccaaacactttgtcagtttccccagcggtcacctttgaaaagggaaaaatgtctgaaaatagacaaagctgaatataaacatcatttaattccccccacacagacagcctccgctcctgtgagggcgtggggaaaacggagtgggagaagggggctagcgaggaggaagaggcgggaggtgcggcaggggcacaggtgacgctcctcccgcctgcctagcagagctccaggcgcacatccgcagtcagccacctcgcgcgcgcctccaggagcaaggatggagaggctggtgagcggggccggggcttgggaaggagggcgcagggcaggcgatgttgagccggtggccctgg

SEQ ID NO: 281344 - DNA, 1000 bp, Homo Sapiens
tcaagcagaaaattctgttcataaaacagagattcaagacccatatagttggggtggtaaatcaaaaataactcaatcaaaagcttggtgtgaaaagacactgaaaatgaagtcccttgatagaaaggagcatgtaaacatctataaatggactgttcaggaaaaacctgaagcagtattaacatcgtatccaagaattcctaatgccagaatgccaagggaagatgagtacttaaacagaatcactttcccttcctggcaaagtagcactttaactcatttcaatacagagactggggaaaaatcaaaattagaagaccagtattgtcagacattgaaaggaaataataacaataataaaaagcatttagtaacatttgcacaatacaaaaaagaaatacaaactctttatataaaaccagatgaaatttgcagtgaaaaatgtgccaagttccctgaaatacagtcattccaatataaggttgtagaagatgagaaaaacttgaaaccacacctcttcccagaattatttaagatagaagatctaaaacccaaggtccgaaaagaaagagaccgtgtcgcccaaccaaaaaagtcatttaacaagatagtcaggatactaccaaccacactgcccaccacaagaattcacctaaagaagtctgttccaaggacactgcttcactggactgcaagaagaactatacatgattgttcagataaatttgaggatttacatgacatgacctcatttacacaccttaaaaaagtaaaatcaagatcaaggcttttaggaaaaagctcagatgatatccataaccatgccagacactctgcaagaccatatactgctccggaggttaacaagcaacgagaaagctacagtggaaagtttacaagtcgtcgaatggtttcatcaggcttagttcatataaatgataaaacatcagattatgaaatgcataaaatgcggccaaaaaaaattaaaagaggatattga

SEQ ID NO: 281345 - DNA, 1000 bp, Homo Sapiens; identical to SEQ ID NO: 195022

SEQ ID NO: 281346 - DNA, 1000 bp, Homo Sapiens
gtgccactgcactccagactgggtgacacagcgagacttcatctcaaaaaaaaaaagaaaagaaaagcaattgtacttcactatgccatatgtatgtattcactgaccaaaaattcactgaccaaccaaccaaactccacacttcatctgatcccccatagacttggggatggacagctgttctttggccatatggtataagaggatcattcttgtcactacttaagttagcctcatcattttgtgctgctccaacaccagcagggtatctcccaataaagtgttcctaagcagcctgtatactgagtgcaagcaggctatcaattttaataatagtccataccatgtatgtgtttctgtcagcagaatgtacatgttgtacaaaacctccaggttccttaagctttttgctgtccatgaatcctctgtggcaactgtaatcacagagccagaagccagagggccagggatatgagaggctgacaaacatcaggggacatctggggaggagatccctgtcatgtctcttgtgccatggagctattatggctggtcttccatttgctttttctttaagtgaaaaccatttttctactttgcttttctctccatacttaaatggtcagtagctactgagtggtgctttatctgaataggcctggatcgaagtaaaatagaaatgggactggctttccacaggaagtaaactgcttcagagcccacagtcccctgctcagtgtccggaaagaagtcagtcatccctgttggcagtaaatcttcccacaggccgtccattagagatttaactagatatgttcaatagaaagagtctgaggcaagtggaaatgaggaacggaaacttaggttgggagaatattttttttttattcattctgtttgcttaattcagagtacagtttgtgctatttcatatctgtactccaggcagaaatataacttgaaaatactgtgtctaaagaaatttcagtgttctatcatt

SEQ ID NO: 281347 - DNA, 1000 bp, Homo Sapiens
ttggtgaaacaaagcctcttcctccagcggacttggactcttaagtcaggggtgtcgtgtgtccacgctgtactttgtatacgcctctccctggccaggatctcaccctggcagggcaagggcaaaagcgggccctaactgtaaggtgggtgggctgggataaggaggcctggaagaggccagataaagccagccccaaggtctggaagcctcccaagcatagccccctcccctcccacccacctgcctgtctgcgtgcttacctttaacctccacccagttgttacttaactcgcggtaaggttctgaccagtcccatgctccactccagaaacccgccagggaggctaagtccctgggctgaccctaggatgagggcaggaacctatcaggtaaaacctttctccctgcacactcgaaaggccagaacttctgcccccagtcctgtcaggggaggggaggccttggcgtctcccaaatcacgttttctgggtcaacaagcctcacagctctagttaaatcctgggcagagctggcttggcagagatgcccacacctgtgcgtcacttcgtgccctacccagaaggggaacaggaaaccaagggatgaaaggtgctgggtccctggctgcctccttgcccatggctgagaagttctggtgggaaggaaccatggagggcccatctggatatccttcctcagctaaaactgcctccttccaggtaggagaacccggtgaccaggcaggtggcctttcctgtctaagcctcagtttcttgggggcgatgctgccagcccctcacagggctcagcgcagcacccagcatgcttggagggtgagaacaaattgaaaaaatcccacatttttttcctctgaaaattttggtaagacggccaggtgcggtggctcatgcctgtaatcccagctcttggggatgccaaggctggtggattatgaggtcaggagttcgagaccagcctggctaagatgacgaagccc

SEQ ID NO: 281348 - DNA, 1000 bp, Homo Sapiens
gtaccggctgaccctgcgcaccagcaaggagcccgtctcccgtcacctgtgtgagctgctggcacagcagttctgagccctggactctgccccgggggatgtggccggcactgggcagccccttggactgaggcagttttggtggatgggggacctccactggtgacagagaagacaccagggtttgggggatgcctgggactttcctccggccttttgtatttttatttttgttcatctgctgctgtttacattctggggggttagggggagtccccctccctccctttcccccccaagcacagaggggagaggggccagggaagtggatgtctcctcccctcccaccccaccctgttgtagcccctcctaccccctccccatccaggggctgtgtattattgtgagcgaataaacagagagacgctaacagccccatgtctgtgtccatcacccactgctaggtagtcaaagaagtggggtgagggcatgcagagtgtgggtggccaggcttcgcagcccatgggtgggactctggggagacagcagcagcagcagccgccgaagccccagctgcaaggccaccagacgcactcctgtgcctggttcctcagtccccaacaccaggtagcaagctctgggcagctgggcctggtagacctcatcttctgtcttctctggtggccctggctctggagaaagaacagggggcactgacatgacaagtagcatgctaacctttgcaagccacaccacatcctgatcccaagttctgaacgcgtggggtctctgaacacaggttttgggagcctcctgccaggggagggcctcggggctctagctggctgtcagcaacttgaagaccacaatgatgtcactcagctcaccctcttcctctttctcagccttggcccccattttcctggagaaactgtgcagctgcaggtgatcctcttagcaatacacatggcgaacacggcagcaacacaggagctcctgt

SEQ ID NO: 281349 - DNA, 1000 bp, Homo Sapiens
gcatttgtgggaaacttaaccacctacaaggagataagaaagcaggtgcaacactcaagtctattgaataatgtagttttgtgatgcattttatagaatgtgtcacactgtggcctgatcagcaggagccaatatcccttactttaaccctttctgggatgcaatactaggaagtaaagtgaagaatttatctctttagttagtgattatatttcacccatctctcaggaatcatctcctttgcagaatgatgcaggttcaggtcccctttcagagatataataagcccaacaagttgaagaagctggcggatctagtgaccagatatatagaaggactgcagccactgattctctcttgtccttcacatcacccatgttgagacctcagcttggcactcaggtgctgaagggtaatatggactcagccttgcaaatagccagtgctagttctgacccaaccacagaggatgctgacatcatttgtattatgttccaaggctactacagagaaggctgcctgctatgtatttgcaaggctgatttatggtcagaatttccctctgatatgtctagggtgtgatttaggtcagtagactgtgattcttagcaaaaaatgaacagtgataagtatactgggggcaaaatcagaatggaatgctctggtctatataaccacatttctaagcctttgagactgttcctgagccttcagcactaacctatgagggtgagctggtcccctctatatatacatcatacttaactttactaagtaatctcacagcatttgccaagtctcccaatatccaattttaaaatgaaatgcattttgctagacagttaaactggcttaacttagtatattattattaattacaatgtaatagaagcttaaaataaagttaaactgattatatttgcatctgtgcagaagtgaatgcttttaattttcaatataacacactactaatcacaacttcttgagaaaccatccttcc

SEQ ID NO: 281350 - DNA, 1000 bp, Homo Sapiens
aatgctcgtctgtgtgttttagtttcatcacctgttatctgtgtttgctgaggagagtggaacagaaggggtggagttttgtataaataaagtttctttgtctctttattttttatgtattaaccaaacatacctccagacactgctgtgagtgctgtgtctctgttaactcctggaattcacccatccagaggaaccaggatgcaagaggttaagaaacttgccatctgggtttgggttccccatacaaggattcaaatagttgatttaggaagtaatcccgggaaaccctgctaaggtagtggggaactgaggcagggaaggacacaaaccaagaaagtgttacctgaaaggggtccagatgcagaccccaaaagagggttcttgaatctcatgcaagaaagaattcagagcgagtccatagagtcagtgaaagcaagttaatgaggaaagtaaaggaataaaagaatggctactccgtagacagagcagccctgagggttgctggctgcctatttttatggttattgattaattatattccaaacaaggggtggattattatgcctcccttttagaccatatagggtaacttcctgatgttgccatggcatttgtaaactgtcatggcgctgttgggagtgtagcagtgaggacaaccagaggtcactcttgttgccatcttggttttggtgggttagagccatcttctttactgcaacctgttttatcagcaaggtctttatgacttgtatcggtgacgacctcctgtctcattctatgactaagaatgccctaacctcccaggaatgcagcccagtaagtctcagcctcattttacccagcccctcttcaaagctccagtttaaataaacctctgacaaaagggtgagttattcaacagattaccagcatgagcaactgatgcttacctgccggggatctctggaagaccatgcatggcacatgcccagttatgcctgcaaaggagagggagctg

SEQ ID NO: 281351 - DNA, 1000 bp, Homo Sapiens; identical to SEQ ID NO: 114756

SEQ ID NO: 281352 - DNA, 1000 bp, Homo Sapiens
ccgcatggaggagaagcgcaaaagccgcgacgaggagctgggccagcaggcggggactaacggcggcccggaccagggcagcgtcaagaagagcagcggcagcaaaggcactaagaagttccggctggaggggaccctgctgaggacctacatctgccacatcatcttcaagaccctctttgaagtgggcttcatcgtgggccactacttcctgtacgggttccggatcctgcctctgtaccgctgcagccggtggccctgccccaatgtggtggactgcttcgtgtcccggcccacggagaaaaccatcttcatcctgttcatgttgtctgtggcctctgtgtccctattcctcaacgtgatggagttgagccacctgggcctgaaggggatccggtctgccttgaagaggcctgtagagcagcccctgggggagattcctgagaaatccctccactccattgctgtctcctccatccagaaagccaagggctatcagcttctagaagaagagaaaatcgtttcccactatttccccttgaccgaggttgggatggtggagaccagcccactgcctgccaagcctttcaatcagttcgaggagaagatcagcacaggacccctgggggacttgtcccggggctaccaagagacactgccttcctacgctcaggtgggggcacaagaagtggagggcgaggggccgcctgcagaggagggagccgaacccgaggtgggagagaagaaggaggaagcagagaggctgaccacggaggagcaggagaaggtggccgtgccagagggggagaaagtagagacccccggagtggataaggagggtgaaaaagaagagccgcagtcggagaaggtgtcaaagcaagggctgccagctgagaagacaccttcactctgtccagagctgacaacagatgatgccagacccctgagcaggctaagcaaagccagcagccgagccaggtcagacgatctaaccgtatga

SEQ ID NO: 281353 - DNA, 1000 bp, Homo Sapiens
tactattagcaatagcgggtttacactgtctccgctattacctccagcccatagaggacaaccacctcagagctactcaacaataccaaattcagggccctgatttggaaagtgtaagaccctctcaccaggccattctttatcactttagtaagcagagtgtcctaaggggatatagagaatattatagaatatagtcagctattggcttatctaggctaacatcgtctatcaatatagtatgcttacttctctgtgctttcttctactgtctgccaagggaggtctgacatttctgccccagcattggctattgctcttcccacatttctaagaactgtctcccatgtcagcactatttctcagggttcttaccatggtattaaattgcaatatcacgagacagtgtatccacatcattaaaattttccaactttgtattctgttttttcgatacagtatcttcaggaccgtggcccttacattctttctcaaatcccgcctctacccgatgtttatgtcttatacgtgctttggtgtatgatatctttttaaaaaatcaagagtaatgttagttattggtgtggtgtccataagtgaggcttaagttgtcttccaaattagaggcttacgtatcatcttcaacactagagaactaccaactattaatggggggaatgggccacttctctaggccaagtgactttaatatggacctgagattttaaatttctttttttttccttttaaatttttgaggacagggtcttactctgttgcccagactacagggcagtggcacaatcatagctcactgtagccttgaactcctgggctcaagcgatactctcacccacatagctgggactacacgtgcattgccaccgtttcctggataattcttttttgtagaagaacagggtcttcacaattgttgccccagcttgtcttaaaaactccctggtcttcaaggcaatcctcctgttctcaggcctcccca

SEQ ID NO: 281354 - DNA, 1000 bp, Homo Sapiens
caaatatgtggtaatgaagagaatgtatgatgaaagctcaaatctagaaaaagcaaactcttactagaattatcattagtattaattttattctactgaagaatgtttacttactggatctcccttggggccttgaggtccttgaccattaggagggcgagtaggctaataaatggaaaagaaacaagttaaacaagacacagaatttgcatattatttagtaacccagattctaaccaatccttatctttaaattgaaacggtcactttttactcgtaatacaaacatggctatttgatgaacatgactttcactcccttttaggctcctatgatataggagctattcatgtgtctaaatatgaatattgaagatgtacagtttatctttaaactcacagcagttggaggctgtgggcaaactgcacaacattctccaaatggaatttctgggttggggcagtctaattcttgatcgtcacatattatgtcatcgcagagaacggatcctgagtcacagacacatatttggcatggttctggcttccagacatctctatccgcataggactgaccaagatgggaacatcctccttcaacagctgaaaaacaagttagatgacgtgaagtttccttaggttttgctgaaaggtgatttttgttactctgttaggactattaacaatagccaaagttgaaaaggtttgaaacaaataatttcttcctttcaatacaaaatatacttgcccaatgtaatttgctaagtagcaagaaattaattaaaatatcatatctgctgtaacataaaattggacacatactcaatttcttaagacagcagatattttaatttcatttataggtaagaattacatcaatgtttatccacacaagcatttaaacaattatttattaaaggacattgaaaataactctccaccaattgctatctttgccttaacaacaactgggagcattaactaaagagatgatttgtcac

SEQ ID NO: 281355 - DNA, 1000 bp, Homo Sapiens
tatggaatctggaagtgaactttctaaaacagttgccacattcatcctccagaagatcttgttagatgacactggtttggcttatatatgtcagacgtatgagcgtttctcccatgttgccatgatcttgggtaagatggtcctgcagctatccaaagagccttctgcccgtctgctgaagcatgtagtgagatgttaccttcgactttcagataaccccagggcacgtgaagcactcagacagtgcctccctgaccagctgaaagacacaaccttcgcccaggtgctaaaagatgacaccaccacgaaacgctggcttgcacaactggtgaagaacctgcaagagggccaggtcaccgatccccggggtatccccctgccccctcagtgatccttccctgttccctcccactactcccccaagttggggaaaggagggggaacctacgagaaaaacagctcaggttttatcaccgactgggaatagacaacctcaatgctgaaccgcactggagaaaaggggcaaggtacccctgctgaggtgtatgggctgccatctcaggctgtcttgaggacctgggctccctctgctactcccaggaaatgggctcctgacacagcagtctgccaccacagccccaggagggtgtcaacaccagcaaatgctgtatttgcagcatgtccaagatgacccttctcccctacctctacctagccactggcagggaggggagacagtggtgatagcagcagcactctaggcatggtgaacgcctgggaccaagccatgtggcgttttttattttgcctttctggaagactcaagatatgtctcttcattctctctcagtatttgtttactttggtttttttgtttttaatctcagagagaggtgtgtttagtgggcacaagctgtaatattcagcaaaactttgtcgactggcactgtttacaagtttgttagctgcataagctcaataaaaagttggtttgggcatt

SEQ ID NO: 281356 - DNA, 1000 bp, Homo Sapiens
gagtggtgaggaggagttaaaggttggaactaggggtggagcttctcaggttcacccaccaggaggctgcaggttgtgttgggcctcacagagaggcaaggggcaggttaaagcatttcccatgccccctgagtgtgggagcagccagcctgagcagccctccgtgcctctcagcatctctttggttgaactcagtgatttacactgcaaggtcaggccgtagattatacgcgtgtatgtgcatcttagaataaatgtgtttgtattcataggcacatggctatgtgagtgtgtcagcgtttcttatttatataaaaagtctcttaggtcgggcacggtggctcacacctgtaatcccagcattttgggaggccaaggggggcggatcatgaggtcaacagatcgagaccatcctggccaacatggtgaaacctcgtctctattaaaaatacaaaaattagcctggtgtggtggcaggcgcctataatcccagctactcgggaggctgaggcaggagaatcccttgaacccaggaagcagaggttgcagtgagccgagatcacaccactgcactccagcctggcgacagagtgagactctgtctcaaaaaaaagtcttctattttacataaaaaggaaaagccctcatgttggtctctgtttctagaacagtccaggagagtggatcctggccttgattcatatgtttgaaactggctggctagtcagaggggattatttggggtaaatatactgctgagataatagacaccacccttctctctgatccttcgaattggattctggccagctcctagtgcttaggaaacagggagacatggcttgcattatttgccccgttggaggccccatgctctcccttttcttttaaatcctttacctctaagtatacggaaatcacttttcacatctgaagagcccaactgcaggttggcaaatcctggggggtgcccggagcatctctttcaatgggccagggc

SEQ ID NO: 281357 - DNA, 1000 bp, Homo Sapiens
attgcactttgagcccgtggggtgaggagttggcaatttggagagacaggatttgggggttctgccataataggaggggaaaatcaccccccagccacctcggggaactccagaccaagggtgagggcgcctttccctcaggactgggtgtgaccagaggaaaaggaagtgcccaacatctcccagcctccccaggtgcccccctcaccttgatgggtgcgttcccgcagaccaaagagagtgtgactcccttgccagctccagagtgggggggctgtcccagggggcaagaaggggtgtcagggcccagtgacaaaatcattggggtttgtagtcccaacttgctgctgtcaccaccaaactcaatcatttttttcccttgtaaatgcccctcccccagctgctgccttcatattgaaggtttttgagttttgtttttggtcttaatttttctccccgttccctttttgtttcttcgttttgtttttctaccgtccttgtcataactttgtgttggagggaacctgtttcactatggcctcctttgcccaagttgaaacaggggcccatcatcatgtctgtttccagaacagtgccttggtcatcccacatccccggaccccgcctgggacccccaagctgtgtcctatgaaggggtgtggggtgaggtagtgaaaagggcggtagttggtggtggaacccagaaacggacgccggtgcttggaggggttcttaaattatatttaaaaaagtaactttttgtataaataaaagaaaatgggacgtgtcccagctccaggggtgatgggggtgatggactagatttctaaggagagtggggctgggtagggagggctttgtggctgaccgagaggtgtcagaggtctggaggctgcagggctgtaggggctggaacttggttatcagccccagggtatgtttgaggtggtggggtgggggccgagcgagatgaatcattcgcagctgcttctaacgtctc

SEQ ID NO: 281358 - DNA, 1000 bp, Homo Sapiens
ctagagtggaaagttcaatgtgggcagtgattgtgttctattaagtcgccaagtctccagtacctaacaccagggcatggcttccaggtggcactcaacaaatgtaggttgaatgatgacccggtttgagagtacccaggttaagaagtttgggttttattttacaggtaattggaaccactggaaagttttgatcagggaaatatgattggagctctctttttgcaacagacattttccaccagtgcgtagggtagattcattggcttacttaaagcaggaaagctagttagagtgtccttgctgtgatcctaatgggaggcagtgaagcccagactggatcagtgagatcaaaataatactcaggcacaaagtggctagctaagatggggagctgacttggaagtagtggttagagttcatttttaagcaagcaatgccaggacattcaagaaaacttgtcctgatctgcagttggacatctaaaacaagaggcaggccagggctgggaataatagatgtgagcatcatacatcgtctccattatgtagaattttatgagctggggataaagataaatttatacggaaggtaatttaattaaggcacccactagaaagccatggacagaatttcaaggcgatgcctgccagcagggcctgtaggaaaacttaccacagaacacaggagtattgcgaatgggtttataagacaactaagttggagttgagaagacccatctgatgaaggggtcactcagcaagagggggaaggccacaggcatcctccttaggcaggggcaagatctagattgaaaatcctttttattttccagatgtaacatttgccactgtttcttctgacatgggctttctcctttagcagtttggtgtagtgaaagtcctcaggcctggcttctttctacacctggcccttcacaaatcacgtcacttcacttggccttattttcctcatccacaaaatgcagttctcaccacat

SEQ ID NO: 281359 - DNA, 1000 bp, Homo Sapiens
tgccactgcactccagcctgggcgacagagcgagactctatctcaaaaaaaaaaaaaaaaaaaaaaaaaaaagaaaattagccaggcgtggtggcacatgcctgtaatcccagctactcgggtggctgaggtaggagaattgcttgaactcacgaatcagaggttgcagtgagccgagactgtgacactgcactccagcctgggcgacagagtgagactctgtctcaaaaaaaaaaaaatgcttagctctctgggcagccagcccattctcacctttacctaatataaatctgtaccagggtgagaatccaggaagcagagggtccgaaaatgtgcttctttcttctaaaaaggaagacacatattccccagatcaaattaaaaaaataaatccaggagaaaatacttgctctttcctaacttatattcataaggttctcttagtggacttctgtagccttagtgaaacccaaactagaatgtttagcaaaatccccaaatgtatcctattttcaatattttcagaactcaatatttttagaatgtaaaattgtgttttataaagaaataattcatttgtcatgtacattgatgacatgaaatgtacataaaattcagaaaactgaaattatcagttaacagggaggttaatagaattatttttacagcaatttagattcacagaataattgggaagaaggtacagagacttccaacatactcccctgaccccacacacgcacagcctcccctactgtcagctctccctaccagagtggtgcttgttacaattaatgaacctatattgatacatcattatcacctaaagtctatcatttacattagggttcactcttggtattgtacactctgtgagttctgacaaatgtataatggcatgcatcagccaatgtagtatcatatagaatagtttcactggcctaacaatcttgcgctccacctattcatgcctccttccccctaatccctggcaaccact

SEQ ID NO: 281360 - DNA, 1000 bp, Homo Sapiens; identical to SEQ ID NO: 206208

SEQ ID NO: 281361 - DNA, 1000 bp, Homo Sapiens; identical to SEQ ID NO: 205513

SEQ ID NO: 281362 - DNA, 1000 bp, Homo Sapiens
tgattctgaatttcacattaaattatttgagtttatacagacctaaattttaaaatctgtacatatattattttgatgtattaagatgaatattgctgatttaaattttatttatgcacatacttaaaggacagaaatgtctgggaaagtaattgttaaataatgatatgtaactttttaactttttaaataaataacaagatttttaatgtgtgtctccctcagggttgtttaaagttttttttctccctcaagtataaatagtggtaactatatgttttgtatcttctagcaccaactgctgtaaagcaatgctgcaaataatgcttgaatacaagtggctaagccaacaacagaataaatacttttatagtagttttataatcctgaaattcgaaagctttcccaattgcacttgcatctaaacaaaactgttgcagtttttactctatttattttgttccccatgtttatgaaagtcctgcacagtttcaaaggcatggtaaataatatatcaatgtttatgtagtctgttacagaaacagctatagataacattatccagtgaagagcaaaattcaagctttagaaaatattcatgcatgcaattttgacatatctaaaaataggtttttgtatatttatggtgggaggtggttgggaacttttaacaaaatggggtgttaatttttgtacagtctgtgggcatttacacatttttaatgtattaaaatttggtaattatgtgtacattaaattaataaaagttacttctagttatgatttgtgaattccctaagaccttggatttttttaagtaactttatatcagaaatgatactgcatctttatatttttaaaattgtattgctgctcaagaatggtaccctcttgtcaaaaaggcatacattcataattgtacattcagcattgtaaataatcttatgaaaccttttttgattgaagctattcaaaataaaaattttaatgaatgaaataa

SEQ ID NO: 281363 - DNA, 1000 bp, Homo Sapiens
gctggtcttgaactccaaggctcaagtgatcctcctgcctcgacctcccaaagtgctaggcttacagtcatgagccaccatgcccagctgacaccaggcttttcagaaaagaatagctttattgcaagtcaaccagtaaggagacagaagtctagctcaaatctgtccccctgtgctggctttaaggcggtaattttattaggaaaggtttagggggtggattctgatattaggtgattggcggaagcaaaggggaggcctggaaagtgctcaggcatgcgcagttccctcttcatgttatctcatggggggcatgtgcaaattccgggggtggttagtatgtaacatgcactggaaattcgggctgtgacatcagcaagcttgttctgtgcaaactgcagttggccatattggtcccaatctatttcagccagcgtgttaatcccaccagcagatgaatttcagcatttctgcaagtcgtttctttttttatctgccatcctgcaaactggaaaatttctgctagtcactggtttctttaactctttggggcacggtttcactggtaggaggcctcagtttatcccatgggcctctccatagggctacttcagagtccccacagcagcctccagaatgaatatcccaagaaagaaaagaaaagtgccactaggggccgggtgtggtggctcacgcctgtaatcccagcactttggaagtctgaggcaggaggatcccttgagcccagaagttcaagccagcctgggcaatgtagggagacgccatctctactaaaaaaaaaaaaaaaaaagaagaagaatttaggccgggcgtggtggctcacgcctgtaatcccagcactttgggaggctgaggcaggcggatcacgaggtcaggagtttgagaccagcctggccaagatggtgaaaccctgtctctactaaaaatacaaaaattagccaggcacggtggcgggcgcctgtaatcccagctactcagg

SEQ ID NO: 281364 - DNA, 1000 bp, Homo Sapiens
ccagtctgtgtcttttaattggggcatttagcccatttacatttaaggttaatattgttatgtgtgaatttgatcctgttattatgatgctagctggttatttttaccattagttgttgcagtttcttcaaaatgtcgatggtttttacaatttgatatgtttttgcagtggctggtaccagtttttcctttccatatttagtgcttccttcaggagctcttgtaaggcaggcgtggtgctgacaaaatctctcagcatttgcttgtctgtagaggattttatttctccttcgcttatgaagctgagtttgactggatatgaaattctgagttgaaaatacttttctttaagaatggtgaatattggcctccactctcttctggcttgtaggatttctgcagagagaaggagaagtctgatgggcttccctttgtgggtaacccaacctttctctctggctgcccttaacattttttccttcatttcaaccttggtgaatctgacaattatgtgtcttggggttgctcttctcgaggtgtgtctttgtggtgttctctgtacttcctgaatttgaatgttggtctgtctcgttaggttggggaagttctccttgataatatcctgaagtgtgttttccagcttggttccattctccccatcactttcaggtacaccaatcaagtgtaagtttggtcttttcagatagtcttatatttctggaaggttttatttgttcctttttattcttatttctctaatcttgtcttcatgctttattttattaagttgatctttagtctctgatatcctttcttctgcttgattgattggctgttgatacttgtgcatgattcacaaagttctcatgctgcgtttttcagctccatcaagtcatttatgttcttctccaaactggttattctagttagcaattcctctaaccattttttaaggttcttagcttccttgctttgggttagaacaggctcctttagctca

SEQ ID NO: 281365 - DNA, 1000 bp, Homo Sapiens
cttcctttatttcctcctctcctcccacctagctcaatcctactcattcttcagcagttagatacaagactgctttctcagtaaattcttctcggacctctcaggctgggttgcttccctttttttcttctttgggacacagaacacaactgttactataccacttctgtgtaaatttcattgtggtccagattagaagatctgcatcatctggaaccaaatttgacttgtttccaacagtaacccagtaggcattcaataaatgtttgttgactgaatagaccttcatggcctagtaggtgaatccatgaatgaacaaagggcaggcctttaacactcagttatgaatggagatgaaggcaaatgccatctggagacaggcaaaccttgagccaaaacccagacggggaaggaatgagaagagaaacagagacatgggtgttaggtactttctgagactgattttttaactctcaagaggcttttgtgcttatcctggaggggaccagatatgaactaccttttgtaaaaaataggtggattagaggaacgagagagaatctgcaaaaattctctcaccagccatatctctaattaaagtttctagggaatgttctttttctgctacatctcacaacaccaaagagaccaaaactgggatgtggccagatccctgagaattctcactttcttatcagcacagtccaaccctacctagtcccttttggccaaatgcttagatacataatgacactagactccctgttgggggcatgtaaagcttcccaaagaaatgattctagatgcctagattttttttttattaaatcagaaatgggttaatgaatggtagggcatatagagagagaatgtgtagagagttgatccctgccttgttgtcgagaccacacactagttcattgatttctgctccatttccttagtcctgacaggaatttaaatgtttcaagttcttttaagcctgaaaatgtttgaaaag

SEQ ID NO: 281366 - DNA, 1000 bp, Homo Sapiens
ttaactgtgagtttctatagaactttactttttccactagtgcacagagagagaaaggttatcttaatagtcggtttcatggagatgaaggatgggagattaagaggggggaaatgatttttactggcagctatattccctctctgttctatttgctttaacaaagggataaaacctggcaaagtgtacattattggaggactcaaatctgtatgtgacatgtcccaactactgtccgctaactagttatccaaattgtaaagctacagaagcccagttgaggggtaagtgtgcctggctcacacagcctgcaccctgtcacctcggcaatgagccagtgtggggcactggggacttctaacccttggattgctctttttgacctgtgcataccttctaattgtaaaatatatttcagaccgtgagtaccttgagatctgagcaactgtgttaatgaagtaatagcaatggtccacagtgaaagatgtgttggggtttgcaaaacaagcattccgtcacctctttaataatgtcacagactttttaaaagagaggctatcaagttgtaatataatctgtcatgttttatttaggaaggaaggtaaatttgtgcttgcacggggatcattttgtattatttttgctaatacccagttgaagctaaaaagcaactatttgaatcctgtgaattaatttataagaatgttaaacagctttggaaatacatgcatcttatgaatcatagccttatttagcaagatcaatgttaaagtgttgttatatggcagtatttaacacattcacagtgtttgtttgatttcaactgtgaattgtcttacagttttttcaaacctagttgtttctatggacacctgctctgaattgtacattgacttcattactaaagaacaaaaatgttcatttttgtcccagtaaattgagactgcttgtacactttcagaaaaatatgtgaatttataaagattttgtagatacttgt

SEQ ID NO: 281367 - DNA, 1000 bp, Homo Sapiens; identical to SEQ ID NO: 196664

SEQ ID NO: 281368 - DNA, 1000 bp, Homo Sapiens
agcatgtggataaggtcagtgctcacactgcctagtccacagggagaggatgctgcatgaatatatacttgcctctgagtggaggagaaatcgtggcatgaaagagagagtaccagtgatgacttcttatccctggagctgggctttcactgctacccatatcccagccctgcgagtctgttctagccagcacagacaccgcagatccggaactgaatgttcctaaatggcgcagccaatccaggcttttcagaaactgggcaaaaacattaaaatggggacgatcgggtcttccgcagtggtccaacacaggatttcttttaaatgtttcaaaaacatgtccttaaaatttcagcctgcttcttagcgagtgggccagttttgcttaaaactggtgggggggcgggggggaagtttttaaaaattgccaaaaagttagatgcaaatgtattactgtataaagcaaagctgtatatactaaacattttttagcagagtaatatttatttgcatagtctatttattgtattcgtattacactgttattaaatactgggatgaaatcagtgacctgaagcaagaaatcttgccttttaatgtatcattaattagggctgctgtgatattgtcagcttgcattaacaattagaagatagagaacccgccatcagggtgtctacctaacttctcagggactacacttggtagttttccaccatttaaagaactggtaaatatgaaacatttgttgagttaccagaattgccattaacagtgttttctttcccatattccatgctttctgcctctgtgtatatatataatatatatgtatatgactgtgctgtgtatttatcgaagctagtaagcaataatttatatgtaaaaatggccaagcaatataaggttaaaacttatataagtaacccttaccttatcttgtattttcaatttttttttaaaactgcttttccaaatatgagactatgttaaagacact

SEQ ID NO: 281369 - DNA, 403 bp, Homo Sapiens
  misc_feature (281)..(282): n is a, c, g, or t
attatatagctgttctggatgttttcccctcagacgcataacctggggaaaatacatgaattgtggccaaacctgcattgcacccgactatattctctgtgaagcatccctccaaaatcaaattgtatggaagattaaggaaacagtgaaggtttgtattaaaaacatctgattccactgattttaataagataaggagtcaaattaactattcgcaggcagcatccccatttgtttctcccttcaggaaaatttcaaaatcatatgtgactcagtgaaannattgactaatatgaaaatgctatgtgtaccatagaatatatgctgggagcaaggttgcattggtgttaaatctacttaaactgtctagttgatttgttgatgattagttgtggcatatact

SEQ ID NO: 281370 - DNA, 1000 bp, Homo Sapiens
  misc_feature (365)..(366): n is a, c, g, or t
ccaacactttgggaggtcgaggcgggtggatcacctgaggtcaggagttcgagaccagcctgaccaatatcgtgaaaccccgtcttactaaaaatacaaaaattagccgggcatggtagcctgcgcctgtagtcccagctactcgggaggctgagacaggagaatcgcttgaacccggaaggcggaggtttcagtgagccaagattgcgccaccgcactccagcctgggtaacagcgcaaggctccgtctcaaaaaagaaaaagaaagtgtcctgataatgtctgcggggaggatggattgtaaggatacaagattagaagcgggcagcagtcttgaatggtgccttaggaactgtagtaggggnntagtaataggacagtttggggatatatttggaggtggctgaactgccagaaaaagaggtcatttccagacttttggggtgcaggagcccctgtggactttccaaggatctcaccgtgccagcctcccctagcagagccccctgtctcccgcctaggagctgaaaatcctggtggactacgacgagaaaggctacctcctgcagatcttcaccaaaccggtgcaggaccggcccacgctcttcctggaagtcatccagcgccacaaccaccaggtactgcttgtccccggcaggcccgaggggacaggcagctagcacactcggttttctgggtccttggctcatctcctctctttcccgccacagggttttggagccggcaacttcaactcactgttcaaggctttcgaggaggagcagaacctgcggggtaacctcaccaacatggagaccaatggggtggtgcccggcatgtaagccccgcccaccccacggaggccacagccacacagccacgccccctgattctggaactcgcccaacttccctactggctgctccccttgggtcccgcccaccagcggactcggcccccaaggctccgcccacactgaccacgcccctcggcggggccg

SEQ ID NO: 281371 - DNA, 1000 bp, Homo Sapiens; identical to SEQ ID NO: 207088

SEQ ID NO: 281372 - DNA, 1000 bp, Homo Sapiens; identical to SEQ ID NO: 206987

SEQ ID NO: 281373 - DNA, 1000 bp, Homo Sapiens
tggtactgtgcttctccaacttcaggatgtgtaggaatcacctgagcagtcttgttgagaggcggacactgactcgggaggtctggggtagggcctgaacgtttgcctttgcggttctaacaagctctcaggtgatggcgatgctactgttccctggccccgaggtagaggaagatttaagtaaaagcttcctggaggaggcgcaagtgaaccgcagagctttcccggacgcccgagaaagggagaaaccccgaagaattcctcctctctcggggctgggtctccgcatccacgccgggtttggtttcccaggctatcccacgtgttcgggcgtccgtgtcaatcaggttttcccggctgggtccgggtttaaaggctgtcgctcgcagggcgctcccatggtgccgcgcggcgggcgggtttggattttaaatccccgcggccaatcagtggcgcgcaggcttttgtaacgttcccagcgccgcgtttgaattcggggaggagcggagcggtgcggaggctctgctcggatcgaggtctgcagcgcagcttcgggagcatgagtgctgcagtgactgcagggaagctggcacgggcaccggccgaccctgggaaagccggggtccccggagttgcagctcccggagctccggcggcggctccaccggcgaaagagatcccggaggtcctagtggacccacgcagccggcggcgctatgtgcggggccgctttttgggcaagggcggctttgccaagtgcttcgagatctcggacgtcgacaccaaggaggtgttcgcgggcaagattgtgcctaagtctctgctgctcaagccgcaccagagggagaagatgtccatggaaatatccattcaccgcagcctcgcccaccagcacgtcgtaggattccacggctttttcgaggacaacgacttcgtgttcgtggtgttggagctctgccgccggagggtgagtgtcgctgctggggaactggaactgcct

SEQ ID NO: 281374 - DNA, 1000 bp, Homo Sapiens
agaatttgggttgactcctgagcatatttaaaacaaagaagctagaaatttagcagtcagattaggtaggtggttttatttcaaagggaaactttaatccaaagaaagattaattactctaacaaacaagagaagcttcatgtttgatgatacagatttaagaatacctgagacttaagagtgttggaagtcatttgatagaaagatgagatcggagacaatgttgtgttatagggcacacattgaaggtatatgccaaatctctcaccagataagtccttttctccctgtgccgttttcttgctcaaagggaacagtgaattagccagctagaatcttcctggtccctttttgaggcagtagcaggtaaggaaagggctgattttcatcaaaaccaagacctttctgcagggatgatagtggaataataatgtgggattagcccgctagcattaggagcagttgggaagttacctggtagatcaagcattacacacaaaaaatcaagttgatcagagtatgggttctccatatagcaatacttcagtgagattaagtataaacagtttttggcaaaaaacaacacagtctactctttctgcttacaaagacaaagccttacaaactcactatgaaggtaaagggaggacagcttgcttctttgcccagacatttacaaagttgtttttaaaacacactcataagtaagtttggcaagttgtttaaaaaatgtctctttgttttgtacagttctgttagatgttgttatattttaaaagtttaatttaaaaaatttaatttgtccttcctaagaaggataaatatataaaaaagccactggaatgaaaacttcctatatgctatgctgttgtcttattattatatagaaaaataactttagaaaaatattgaagacattgtattaccacttgtgattcaaacaattttgtggttaaaactggattttaaatttaaaaatcaataaaaatttcaaatgttt

SEQ ID NO: 281375 - DNA, 1000 bp, Homo Sapiens
atcagcagtttacaaatggataactcgttttaagaagggacgagacgatgttgaagatgaagcccgcagcggcagaccatccacatcaatttgtgaggaaaaaattaatcttgttcgtgccctaattgaagaggaccgacgattaacagcagaaacaatagccaacaccacggacatctcaattggttcagcttacacaattctgactgaaaaattaaagttgagcaaactttccactcgatgggtgccaaaaccgttgcgcccagatcagctgcagacaagagcagagctttcaatggaaattttaaacaagtgggatcaagatcctgaagcatttcttcgaagaattgtaacaggagatgaaacgtggctttaccagtacgatcctgaagacaaagcacaatcaaagcaatggctaccaagaggtggaagtggtccagtcaaagcaaaagcggactggtcaagagcaaaggtcatggcaacagttttttgggatgctcaaggcattttgcttgttgactttctggagggccaaagaacgataacatctgcttattatgagagtgttttgagaaagttagccaaagctttagcagaaaaacgcccgggaaagcttcaccagagagtccttctccaccacgacaatgctcctgctcattcctctcatcaaacaagggcaattttgcgagagtttcgatgggaaatcattaggcatccaccttacagtcctgatttggctccttctgacttctttttgtttcctaatcttaaaaaatctttaaagggcacccatttttcttcagttaataatgtaaaaaagactgcattgacatggttaaattcccaggaccctcagttctttagggatggactaaatggctggtatcatcgcttacaaaagtgtcttgaacttgatggagcttatgttgagaaataaagtttatatttttaatttttatcttttaattccattttccacgaactttttgaagtcccctcg

SEQ ID NO: 281376 - DNA, 1000 bp, Homo Sapiens
catagcgagacttcatctctacaaaaaaaaaaaaaatggaaaaaatagtctggcatggtagcacacacctgtagtcctaccttgagagactgaggtgggcggatcacttgaacccaaaagtttgagaccagcctgggcaacatggtgaaaacccgtctctacaaacagtacaaaaattagccaggcatggtggtgcacacttgcagtaccagctactcaagaggctggggtgggagaatcacctgagtctaggaggtggaggctgcagtgagctgtgatcacaccactgcactccagcctgggtgacagagccagactctatgtcaaaaaaaaaaaaagataaaataaaattcaaatagcgatacaagaaaatacacaagggtgatgacgtggagaacaactcacagggagggtgtttcctcagaccaagtggtgaggggaggcctccctgaggaggagccaccgagggccaagccataggaagaaggacctagtcatgcagacttgggtggagaatattctaggccagtggccttcaatctcggacacacattggcatcatccgagagcctcagaaactactgctgcttgccattcctcaacctttgagtctgccttattggctgtagggggacaatctgggcattgggattgtcacaggaattttcctaagctctcctggtgactctgagaatgctgacccctgagaaccccgggtctagtggaagtgactcacagcatgatctgatcagctttgggtgggagcatactagtcatcaaataacagagactgatgtccaggtctttgaaaacccccagggcaccagaaaatcctgactccagaggtcggcagaggggcccggggattctgttttcataacacgtgctctcaggtgactgtatccactgctaggcccaacagatatcctctgctaggacaaatgagaaacccacaactcagatgaccagtatgaccactatgctcccacccgaagctgac

SEQ ID NO: 281377 - DNA, 1000 bp, Homo Sapiens
ttcatgatcataccaactcccactgctttctgaagatgctacagggaaatctaaaggagacattatttgcctggcctgacaaaaaatccaatgagatggtcaagaagtctgaaagagtcttgagggaaaaccagtgtgcctacatcaatggtaacatcttattctttttctaagggcaagtgggaagaaccatgacctttggtctgaaatattggttacttacactttttatgcagtagaacctggatcatgagtcatgattcaaaatacttgggaaatgacttaaacatagcaggtctggttttttaagcctttgtatcttggttggaatcacttattgaaaacatatgcatgtagttcagtatccactgaaaagtcatttacttgccaagacttaagacagttaaaataaaatatgaatttacttcagtggagtctttcaacaaaagagatcaagttggaaacattagccttgtgttagaaaatagaacagaatgttctgtaactaattaagaatgctagctagtctctgtttttctaaaatacatatagcatacctaaaaagtatcctcgagggaaattttacaaagcacgttattggccagtgatttatacatatcttaccaagaattccttatcttttctaaatgggatatgggatagccaaatacttttcaagagagcagtgattaatttccatattcctaaaaggaacagtaacttccaaaaagctcattaaaatgtatatgagacagatagatagttttttattcccttttacgtaggaggttgccaacacataggaagattaaacaatttgtccaaggttactcagcttttaagtggcaaccagaatttgaacctaagcaatttgattgaaaaacctatgttcttcatcagcatgtaccccacctatataaagtattatagagctttgggggatttttttttggcaaagcaagtttttttctccataaatcttactggcctcgatatttgg

SEQ ID NO: 281378 - DNA, 1000 bp, Homo Sapiens
ctgtaaatatttaaagaaaaaaaagtagttttgtatcaacctaaatgagtcaaagttcaaaaatattcatttcaatcttttcataattgttgacctaagaatataatacatttgctagtgacatgtacatactgtatatagccggattaacggttataaagttttgtaccatttattttatgacattttacaatgtaagttttgaaactaactgttggtaggagaaagtttcttatggaacgaataccctgctcaacatttaatcaatctttgtgcctcaacatactgttgatgtctaagtatgcctcagtgggttgagaaaatccccattgaagatgtcctgtccacctaaaagagaatgatgctgtgcatatcacttgatatgtgcaccaatacctactgaatcagaaatgtaaggcattggtgatgtttgcatttaccctcctgtaagcaacactttaacgtcttacattttctctgatgatgtcacacaaaattatcatgacaaatattaccagagcaaagtgtaacggccaacactttgttcgctcattttacgctgtctctgacataaggagtgcctgaatagcttggaaaagtaacatctcctgccatcccttcatttaaccaaagctatcaagtattcctatgccagagcagtgccaactcttggaggtcccagagtgcagccaatgcctttgtgtggtagttctaaattttaattgcacctgaaaaacctgggcacctaagcaatgagccacagcaaaaagtaaagaacaacaacaaaataaagctgttgttaaattttaaacaatattactaattgcccaaaatgtcaatttgatgtagttcttttcatgcaagtataaattcaattgttagttataattgttggacctccttgagatagtaacaacaaaataaagcaagctatctgcacctcaaaatgtgtggctggttgttttctgtgaaattctggggtggggaagtatgcatcttc

SEQ ID NO: 281379 - DNA, 1000 bp, Homo Sapiens
agctccgcctcgcgggttcacaccattctcctgcctcagcctcctgagtagctgggactacaggcacccaccactactcctggctaattttgtttttgtatttttagtagagacggggtttcaccatgttagccaggatggtcttgatctcctgacctcgtgatccggccgcctcggcctcccaaagtgctgggattacaggcgtgagccaccacgcccggctgctgataccagtttttaaaatactgacatccactttattcatatccataagagctcagcttttaatgcaacatgcaagagtctcaagacagctctctgaagctgtcctgcatttttttctgtggttagaaaaaatatgtaatgtgttcctgggaaaagacatactatatcctaaaaggacaagtcttgatggccatagaagtgattacaataatatgctaaagtgaccactaacctttattgaagttgacaccttgggtttttttaatagcttttattatgctcttagtctaaatttccctgctaagttacaatcctgatcactagggccaacaaagtatgaatggcacagggtgttacttctggtttaaaagtgcacctatccattcttcattcactggaaggagagggcttgtcgccacgactggaatgtacttcttagggattaggtcagcagggacatcttgaatgaataagaacatctggcaccctttgtgcacaccaagaatggtatttctggggtgagtgggctgccctgggcaagaggaagcttttgtccagctgatttgagcagatcctgaccactgtttatttgcacattcctaactgcaaatgaagtgccaactatggctgcctaccacaagacaagttctttgaagttgctgggtacatttctttggtgtcttcctatttactaaacaagactagcagacctaattgtgcctattctcaacagtgaatccaagccaagttttgcacttgtctgtggaatgttgct

SEQ ID NO: 281380 - DNA, 1000 bp, Homo Sapiens
cctacttaaattatctatatgtgttccaatgtttaaaatacctttcttgatggcatggagtgatcctatatctggagtcttctgagatgaagtgatgggaggcaggaagtgtagtcacaaagactacaggcagccagccctggagtttccaactacaaagatcaggtcgggggatggggaggagcatgattatttaagccaccccagatatgggctttgcaaaagcacggggttcctcttatttctatcaccactattggggcaacgtcttgtctaaatccaaacaactctgtagaccaaatttctttcgtttttatagcagggtttctcaccctcagcactatttacatttttgaccagataattctctgttgcaccataggatatttggtagcacccttgctctatacccactagatgccaatagcactgcccccttccagttatgacaatcacagatgtctccagacattgcaaattatcccctaaggggcaaaaacaccccgggttgagaaccactgttctatagatatattagagacatatctaaatttaccttattctgtcttagacccagctggaaaggatgctggtttttaagcagtggcaaagctaccagttggttcactcactttcctctaaaaaagttcagctgcatttgcttctcaaagtgtgggccccaagagaattgttcctttcttaactgattattggacattttgtagatagagccaaaatatggtagttatgtttaaagttctttaatctacttagtccacctggagagaatttggatgatgtagagtgtggcacggggacttctgcagataatgatcagggttaacatatactgggctgaaaactcaatggtgcaatagagcagctcaaaaaccagatacagtaataagtgacatttattgagggttttttatgagccagacactgttttaatgactttatatgtattatctcattaaatactaaaactatataaaataga

SEQ ID NO: 281381 - DNA, 1000 bp, Homo Sapiens
gctgggcctcggaccccactccggccctccagagccccacagccccatctgcgggggcagtgctcacccacaccataagctactgccatcctggcccagggcatctgggaggaaccgagggggctgctcccacctggctctgtggcgagccatttgtcccaagtgccaaagaagcagaccattggggctcccagccaggcccttgtcggccccaccagtgcctctccctgctgctcctaggacccgtctccagctgctgagatcctggactgagggggcctggatgccccctgtggatgctgctgcccctgcacagcaggctgccagtgcctgggtggatgggccaccgccttgcccagcctggatgccatccaagttgtatatttttttaatctctcgactgaatggactttgcacactttggcccagggtggccacacctctatcccggctttggtgcggggtacacaagaggggatgagttgtgtgaataccccaagactcccatgagggagatgccatgagccgcccaaggccttcccctggcactggcaaacagggcctctgcggagcacactggctcacccagtcctgcccgccaccgttatcggtgtcattcacctttcgtgttttttttaatttatcctctgttgattttttcttttgctttatgggtttggcttgtttttcttgcatggtttggagctgatcgcttctcccccaccccctagggtaccagcaggcagagccttgccctctgctcaggctggggtccagtgggaggggcccaaaatctctgctcagagaagtgcagggggagccttccagctcactctccctgaggactggcgtgacaggggctatgggtgttgtttttaaaaaaagaaaatatatttttttgaaaaaacgactgcccatcccgggtcctttccctgatgggttggggcagttacctggttgctgttttaattaaaaactttagagcacaatggatctcgag

SEQ ID NO: 281382 - DNA, 1000 bp, Homo Sapiens
tgccaaaccctcctttagagaattatctttagatgagtaacacaatgcagcctgttttaggaaagtcagccttaaaagtggtttggttcagtttaacgagtaatatctgctggatgttagatactgcggaggtgctgatcagataaaaatgaattgagaaatggggtctgccctagaggaacttcagttgaataaaggagacaagtaaaaattgtaatacagcatgcctcaaaagaggtaagggccaggctgggcacagtggctcatgcctgtaatcccagcactttgggaggccgaggcgggtggatcacgaggtcaggagatcaagaccatcctggctaacacgatgaaaccccatctctactaaaaataccaaaaaaaaaaaaaaaaaaaaattaggcttcgtggcgggtgcctgtagtcccagctactctgggaggctgaggcgggggaatggcgtgaacccaggaggtggagcttatagtgagccgagattgtgccactgcactccagcctgggtgacagagcgagactccgtctcaacaacaacaacaacaacaataacaaaaagagataagggcctgaaaaagaaacaattagctcggagcattcaaggaagatttctggaaaaggtgatgtctaagtgaaatcctcaaggaaagaaagagctggccaggaagagaagcaggtacagggaagacaacatgcaaaggacagagcagtaaaacacatcagaattatctagtgttcgtggatagaaaaataatgaggattggtgaggccagaggctggctggggcgtcttccggtgccttttacatgttttttgcagcactagagagccattgaagagttttaaatagggaaggtgcatgaccagatctatttagacagatcattctgactgcaatgtttaagagtttaagatatgtttgaagagccaagatctgttaggaggatactgcaacaaataaagagggcgtgaactagagcaaccatgg

SEQ ID NO: 281383 - DNA, 1000 bp, Homo Sapiens
ttaataacatcagagaatgaaaagattacattgattaaacaagaacaggatagtataaaaagaccttcacagaataacaataacaaaaactcttagaaattaaaaaaaagatagtagaaataaaaactgaatagagagtaaagaaatagttcagaaagggagagcatgtagagattgaagtaagaacaaagataagaaaatgagaggatccacgccgggcgcagtggctcacgcctgtaatcccagcactttgggatttaatataaatatattaaatattttaaataatataattttaaataatataaatatattaaatatattaaatatttaaatatattaaatatttaaatctttttgtcttgctgagttgtatgagatatatatatatttttatatttatatgtatttatatctatatttatatataatatatattatatatttatataatatatatttatgtattattatatatttatatataaatatatattatatatttttatataaatatataatatatatttatatgtataatatatatttatatataaatatataatatacatacgtatattatatatttatatataaatatatattatacatataaatatatattatatatttatatataaatatataatatatatttttatataaatatataatacataaatatatattatataaatatataatatatattatatataaatatagatataaatacatataaatataaaaatatatatatatctcatacaactcagcaagacaaaaagatttattaaattcattcagtcaacaaatatttattgaatacctactaagttctagtcatcatgctaggcactgactgttcaagaataaacatagacaagacttctgccctttcagaaaccagccaagattcttcaacccaaggcagctgtgaagtataacacatctctggctcaattttctccatatggtttggggttccatgaatgagtct

SEQ ID NO: 281384 - DNA, 781 bp, Homo Sapiens
agcctcccaagtagctgagactacaagcgtgtgccaccacatccggctaatttttgtatagtagagatgaggtttcaccatgttggccaggctggtctcgaaatcctggcctcaagtgatctatctgcctcagcctcccaaagtctgggattataggtgtgagccaccacgaacggcctcaattcacaaacatttatttggaacattcactataggccagtgtagtgccaggagatgtaaggatgagtgagaaacagttccagaccccaaggagaacagcccctgggtcaggaaggctgacagcttctttcttttcccctctcagagccacccagagttccctcactgaagatctgagcatgacccgggacgaggcactgccggactctcattctgcacaggacttctatgagaattatgagcccaaagagatcctgggcaggtaaagcccaagctttccccacgaagtgctgtcctaggctccagcagaccctgtgggctacagccagctctgctccaccccgagtactaacgccactttcatccccaaagtgctgttcacttggagaaaccctttgtttggggtcctgccctcctgaagccaggacagataagagaaacctctcccagcaaaaagttcccaggggcaggcgcaatggctcacacctgtaatcccagcactttgggaggctgaggtgggaggattgcttgaggccaagagttcaagatcagcctgggcaacatagcaagaccccgtatctttttttttttttttaaaaaa

SEQ ID NO: 281385 - DNA, 1000 bp, Homo Sapiens
cccatgagtcctgtgacctcagcccacgcggggacctacaggtgctacggctcactcaactccgacccctacctgctgtctcaccccagtgagcccctggagctcgtggtctcaggaccctccatgggttccagccccccacccaccggtcccatctccacacctgcaggccctgaggaccagcccctcacccccactgggtcggatccccaaagtggtctgggaaggcacctgggggttgtgatcggcatcttggtggccgtcgtcctactgctcctcctcctcctcctcctcttcctcatcctccgacatcgacgtcagggcaaacactggacatcgacccagagaaaggctgatttccaacatcctgcaggggctgtggggccagagcccacagacagaggcctgcagtggaggtccagcccagctgccgacgcccaggaagaaaacctctatgctgccgtgaaggacacacagcctgaagatggggtggagatggacactcgggctgctgcatctgaagccccccaggatgtgacctacgcccagctgcacagcttgaccctcagacggaaggcaactgagcctcctccatcccaggaaagggaacctccagctgagcccagcatctacgccaccctggccatccactagcccggagggtacgcagactccacactcagtagaaggagactcaggactgctgaaggcacgggagctgcccccagtggacaccaatgaaccccagtcagcctggacccctaacaaagaccatgaggagatgctgggaactttgggactcacttgattctgcagtcgaaataactaatatccctacattttttaattaaagcaacagacttctcaataatcaatgagttaaccgagaaaactaaaatcagaagtaagaatgtgctttaaactgaatcacaatataaatattacacatcacacaatgaaattgaaaaagtacaaaccacaaatgaaaaaagtagaaacg

SEQ ID NO: 281386 - DNA, 1000 bp, Homo Sapiens
ccaagtagttgggattgcaggcaagtgccaccacacccggctaatttttttttttttttagtagagacggggtttcaccatgttggcccggctggttataaactcctgaccccaagtgatctgcccgccttggcctcccaaaatgtgactttcattttcttgatagtatcctttgcacagaagtttttgattttgatgaagtccaactcttcttttttttttgagacggagtctcactctgtatcccaggctagagtgcagtggtgtgatcttggctcactgcaagctccacctcccgggttcaagtgattctcctgcctcagcctcccggatagctgggactacaggcacccgccaccacacccagctaattttttcttttttggtatttttagtagagacggggtttcaccgtgttagccaggatggtctcgatctcttgacctcgtgatctgcccgcctcagcctcccaaagtgctgggattacaggtgtgagccaccacgtctgggttttttttttttaaaggttgctttgttttagagcagttttatgcccacagcaaaattaagaggaaggcaaaagagtgtcacacgtaccctctgcctccacacatgcatggcctccttcattrtcaacatcccctatcagagtggtgcatatgttacaattaagtaatctacattgatgtattatcacccaaaataaatagtgtacattaggattcactcttggtgttggcttttcatagcttttagacaaattcacaatgatacataaccactaatacactatcatacagaggtttttttttactgccttaaatcccctgtgctcttcctgttgatctctccctctccctaatcctggcaaccactactccttttacatttatagtcataattgctaaaagtttagaaacaaccaagatgttcttcagtaggtaaatggatgaagaaactgtggtgccttgagacaatggaatgttattaccactaaaaa

SEQ ID NO: 281387 - DNA, 1000 bp, Homo Sapiens
  misc_feature (372)..(372): n is a, c, g, or t
ttaggaggattttgtcaaatccctgtctcctcttctatggggtttacactcttttgcattcgattatggtgctaaatagttgagtatacaaaattttgctaagattccctgtttttacactatagaaattttgacatactgatgcacatagttatcttatctttgaacttgaatttcacgcatgctgttttttatttgttgtagtcagaagccatgcatgtgaagtcgatccatatggaatgccagggggctgttcacacatctgtctactcagcagcagttacaaaactcggacttgtcgctgcaggactggcttcaacttgggaagtgatggcaggtcatacaaaagtatgttgttaaaataaaccattngccagcagctacccctttagaataggattttaagtattaattagcagcatcaacatcagtcataacatgagacttcaacaggtgaagtttgcctgcaaatatatactgtccatttttctcaaaataagtatttttcttttgtgataatatgaatgagaaactaaccaggctctggagtcactaaatttattgattttagggaaacatatgttgaggaagatttttagaaagatgcttcccttaattccctaaagaatgtatttgagctaataagttggaatgattagttgatcagatttcctcttatttgaaccaatatgctactcctcataataggcatgttgcttgtttcgacagaaatccatgtatagtcaggcttcattttatccagcatcactggggagtgaattcactccatgatttaatttgtcatgattcaatttttcagatagctgaagctatacctaattagagatcaaacatttaatgattttatcaaaaagttttaacgattttatcaaaaagttttctaatctcttagatatatctttgttttattttaaaaataggcctgaataatttattttaatttaaatatggtaaaaaggattttaaaaatgactttcat

SEQ ID NO: 281388 - DNA, 415 bp, Homo Sapiens
  misc_feature (77)..(77): n is a, c, g, or t
taagtcaaaaagggcccttggctgaatgacctcttctttgccaccaccataaccattttaatccagagcttttatanggcacagcactttgttttatagatccataatccagtcattatgaatgaaatattatctgtgattttcattttgtacaaatatttctatatgatctctggttgtgtgtttctacttttatttataagaaaacagaagctgtcgaagaggcttcaagccatgctataatcgccgctgcattcctcatggcaagttatgtgatggagaaaatgactgcggagacaactctgatgaattagattgtaaagtaaatacttgttccatcaatctgagaatattggtgtgctaagtgtttcctgaacttttccaacattcgtttctgagagctctgtggcatata

SEQ ID NO: 281389 - DNA, 1000 bp, Homo Sapiens
tatatgagtttgtgttctaaaataaacatatgtttaaagttataagaatatttcaaatcatactagatgtgtaataaaacaccataagaaattttgcatcaaaggatgtttcttaaaagctgcaattcagaaaaatggcaagattaatgtgggaacagttgagcaaaaaagtaatatattgtttgttgttttgctcccagagaatctgtaaacaaaatcagtattgattttctttcctagatatttgtattggattgactgctgcgagtatcctcatattggccgtgttggaatggatggaaccaatcagagtgttgtcatagaaaccaagatttctagacctatggcactaacaatagattatgttaatcgtagactctactgggccgatgaaaatcacattgaatttagcaacatggatggatctcatagacacaaaggttggtccagtaacataaatattctagtattttaccaggtcataaaatatttatttaaaaatatatatttattttatatgctttctctcataaaacatatttaatttaaggttacattattatacttctttataaaaatattggtaaattagaattagatgtattcaaaaattatatgttatgcacaagatattttacactatcaatgttttctttaatctatttttctaaatagattttctagtaaatgggcagtagttttataaattaatatccacatgcatcccaactgaattgaaatagaaggttatttgcttgtaaatatgaggctattactgcaaactgctaggatttcaattttcttaaaaaactgagtaaaagtatagttttataagttatcggttaagctatgtacatgactaaagttattgttacctaatcacagcagcacaataattaacatacaaaatagtacagacaaggatataacagagaagatgtcacgtatagttaaacatgacacggatatagcagaagccacaaatgactcaaattacatt

SEQ ID NO: 281390 - DNA, 1000 bp, Homo Sapiens; identical to SEQ ID NO: 114757

SEQ ID NO: 281391 - DNA, 1000 bp, Homo Sapiens
aatgcatggggactaatgcccggaaaattcttatggtccaaacatctgtatgcccttgggaggaagggaggagtgggtttcattagtgcctttgtttgggagactcttaaaagttgtaggatcctcaacccagatctttctggctttagaaacccacaacaaatgcaccaccccgcccctacccggctgagactgcctgtggatttctagctcgcctgggatatttgtactcctccccgggaggagagcgttgaaaatactggaaggccgttccctaaagctccctttctcctagactggaggcagccggtactgaaagtctggaaggaaccgggcagcatcgtgcctactgctagaagcaaaggtaccagccacgcgcgatcctcggggtctccgcaaggatcagagctcggtaaaggggccggaagctttcggctcttttaaagaaacagccacactttcccagcagccgaaagatactgtattctgattttagcttccattagggttccttgaacacctgtcatcggaaagcacccaccaccctagaccacgcccacccacgaagagacccctccctcagccttgaagccccgcccaatcacccatctcggaggctgcgcgcgcagcgcggaagtgcgttcagcagttggggttgagcgcgcggcaggtgcaggcgctgcggaagaagcgacactggcaggaggcgcacgggtcgcagcaggcgggtgcaggcggcttgcagctgtctcgggtggccacgcagggcgtgggtggcgggggccgtgccaccttcttcgtcgaggcctttttctgtaggaaagacgtcgagggctgctgagcgggccacgctggtcccgcgcgtcctcttctgctgtggaggtctgccaccaggacctctgccgcggtgcccacctctactcataacgcacaggccatcctagtgggttcctggccgccaccccaccctgcacgccgccttcatctacaagctcaccta

SEQ ID NO: 281392 - DNA, 1000 bp, Homo Sapiens
tgctgcatagcagcaaaatagagaattcttttagacgtaacgttgagcaaatcaagctaggctcactacagcacataccgtgtgatcccatttacaaaaaattcaaaaacaggcaaaactaatctatggtgataatcagatgggaggcattatctaagagggtgctggaaatgtcctttattgtgatctgaacatagtattcatatacgagtcattgaaatatacatttcaaatgctggctgtttattatcatttcactgggataaatgcccaaggagttagttttcaaagagatgctatttagaatttatggaaatttagaacttactgtattttcccagattttctataatgagcaagcattgcagtttgagggtttgaaagattggtagagacaaaaactgcataagctgcatgattatttctcacacttcagatgcttaccacctttatgatttgccatatcatgtattttaaaaaatacatttttttctttttttagatggagtctcattctgtcacccaggctgcagtgcagtgggtgtgatctcagctcactgcaacctcctgggttcaagtgactctccggcctctgcctcccgagtagctgagattacaggcacccatcacaatacctggcaaatttttgtatttaaaaatacagccaggctcggtggctcacgcctgtaatcccagcactttgggaggccaaggctggcggatcacctgaggtcaggagttcgagaccagcctgaccaacatggtgaaaccccgtctctacttaaaatacagaattagctgggcgtggtggctcatgtctgtaatcccagcactttgggaggccaaggtgggtagattgcctgaggtcagttcgagaccagcctgaccaatatggtgaaacctcatctctactaaaaatacaaaaattagctgggcatggtggtatgctcctgtagtcccagctactcaggaggctgaggtgggagaattgtttgaattc

SEQ ID NO: 281393 - DNA, 1000 bp, Homo Sapiens
aaataaataaataaataaataaataaataaaaataaaatgtccttggctggtgcagacatgaagttgatttgtaagagggtcccccactcgacagtgcctgtttgtgctgtcaggctgttcctctgttcctggacttcctgtatgtgctctaaagtctgaatgggttatgttggctttttgttattttgctattaacacatactaaaagtgccctcattatggaatcttttgccgtgaaggaggggtcgtcagactcaggaaagctggcccttctggtcgggcctcaccagtcagggcaggtccttttgcattcggtcctgggaatgcagaatctatagccgccttcgggagttcattccacatgctgacacttggatgatcagtattcctacctcatgtctaactgcagtctttcctgctttagatgaagcccattttctccacctggaaccctgagacgtcttttttcttttcttttcttttttctttttttttgagacagaatcttgctctttcgcctgggctggatgggcagtggtacgatcttggctcactgcaacctcctcccctgggttcaagtgattctcctgcctcagcctcctgagtagctgggattacaggcacctgccaccatgcctggctaatttttgtatttttagtagagacagggtttcaccctgttggccaggctggtcttgaactcctgaccttaggtgatccacctgccttggcctcccaaagtgctgggattacaggcgtgagccaccgtgcccagccctgggatattttaacctcctctctctcaagcctcttgtaatgctgagaagaaaaagtccccaatgtcctgtgattctgggattccaagggctgtacttgcagcagtcatcatttcaccctggagtgggtaagaccttgttatgccccagcccctccctgcccagcagaaggcaggtatcccttttccacccacctgaaggatggggctctcactgaacaggg

SEQ ID NO: 281394 - DNA, 1000 bp, Homo Sapiens
gaggattgcttgagcctgggaaatcaaggctgcggtgagctgtgatcatgctactgcactccagcctgggcaacagagtgagaccatgtctcaataaatatataaataaataaataaaaataaaataaaattctgcctttattaattctctcgtgttctgaaacagattttacaaatttccacccatgaattcttaacatcagtgattttttttgaatcattaatgcttttttaaatttttctttgagacagagtttccctctgtcacccaggctcgagtgcaaagtggcgcaatctctgctcactgcagcctctgcctccctggttcaagtgattctcgtgcttcagcctccacagtggttgggactacaggtgcgggccaccatgcctgactaatttttgtatttttttaatagcagagatggggttttgctgtgttggccaggctggtttcaaactcctgacctcaagtgatccacctgccttggcctccaaagtgctgggattacaggtgtgagccactgcgcccggccctaattagggtttttataaagccaaaagatcttggcaacacccctaggtaccctttagaagcctccaattggctacagcctgtgaaggattggcctgtgaccaatcggaggctgaagtggaggcttagctcatggtcaagcagaggctgaagtgggaacttcttgtctttttatcacaggcatgaggatgtggcctgcatgctgcctgatcttgcctagaaccggctgcacctgctgttctcttgtttatgcaaactggctgcacctgctattcctttgcctatgcccctacccctggctatcctaattccctgttctcctgcctcactattactgtattctctacttctaaataaaaataaaacaaaatacaaaccgttttcatgtattatagtcatgatttgttatttcaagctgtgtttaaaatgtaaagcccattacagtaggatagatgagaagaaagaagg

SEQ ID NO: 281395 - DNA, 1000 bp, Homo Sapiens
gttggaggatggcttgagcccacgagatggaagttgcagtgaactgaaattgtgccactgcacttttcagcctgggtgccacagcgagaccctagttaagagaaaaaaaaagtaaaaacaaattgtgggtcaaagtaaatgtatacagttttattacaatgtaacaaaagttgaaaatcgggcccggaatttatccaatttcagatatatcttagaaaaagcacaggaaacagaccttaaaattgtaacctaccaactaacttacatgcttataaaagtaaaggagaataactggccgggcacggtggctcatgcctataaaattccagcactttgggaggccaaggcaggaggatcacttgagcctatgagttcaagaccagcctaggcaatgtagtgacacctcatttctatttattttaaaaaaaagagagagtaactacagaagaactttaaaaaataaaaaataagcttaccttggattcttggcttagagtagaggttttttttaagttatggaggaaacatttttgtaaaagtttaatgacccactttagatgctccaagaacaagcatcccttccatgtatgtcttgagaaagaaatcacagaagcatttctcaccaatactctttggcttaaaatgttcagcagaattgggcagtgggggtgacttttcttatattaataatatttacatccaatacactgaatcttcctttagaggtaagactttaatatctatactgtaaatatttggtttatttggcactactgtaagttttgtttttcacaaagctcttattatgaagcaaaataaaaattctagtttcttgtatgattttttgtactcattcattcctgttaagctgccaaaaattaaagtgcaatattgtatatttttaagaacaaatttaaaatagaattttgatgtttctcagatcacaagaaatacaaatctatatagtataataaaatcagcaaaagatcaaaaaaaaaaa

SEQ ID NO: 281396 - DNA, 1000 bp, Homo Sapiens
ctttatagtcttattataactttcatagtctgggttacttgacatgtaacaggtatttaatacatacttatttccttgatttatttggtgtcacagtttttcctgtgttgtagatttatacccattatcttttggcaaaaatcagaagccctcactaagtgatagcagatcttttcttaagcagatttttttcttaaggatttgatagctttgggatgaggcaccaggaaataatgggttgttggtttatccattagcaatcactggtaaatttatctcttcagattactatttgcaaaaatgatgaatgtgtgctagaagataattctcagcggaccaaatggaaagtgatcagccccacagggaacgaggcaatggtgccgtcagtctgcttcctcatccccccacccaataaggatgccattgagatggccagcaggtaacttggctcagctgccactggtacacccacctctgctgttggcctcggtgaaccagtggagggatgagtgtgcatttgtgatgtttttgaacacagtggtaaagttcctcctgggagaggcttctcattggagatatcaagtctcctactaccagccacatagtagatcttcaataaatacttctgttcagctggagtatcttcagtgatatttcttttttaaagaactcctggttataaatagtttactctcagaagattgatttttttaccagcctggtcaacatggtaaaacctcatctatactaaaaatacaaaaattagctggatgtggtggtgcacgcctgtagtcccagctacttgggaggcttaggcatgagaattgcttgaccaaggaggcggagtttgcagtcagctgagattgcgccactgcactctagctgcctgggcaacagagcgagactctgtctcaaaaaaaaaaaagattgggctgggcacagtggctcatgtctgtaatcccaacactttgggaggccgagggaggcggatcacttgagg

SEQ ID NO: 281397 - DNA, 1000 bp, Homo Sapiens
gtggagggagcacactgcactgagtgagaaaacctgaatccaagtcctggctgtactgcttaccagctgggtgaccttggacaccattcacattttttttttaagcaatgaggcatctcttctgtaaatccagaacagtaacatctaccttgcctacttcatgaattagtgattgtgagaaccaagtaaactaatgaatgtacataaaaacattttctaagccctaaagtgtgtgtagacatggggtgagagagaaatgtgttcacagctgattcccagagggtttctagtcttgcttttataggtaactccactttattccctcaggtattagaaagggagttaaaggatctgaccaccttggtcagtcaggagctggagtgtgtgaatcagattatcatcagccagcctcaagaagttcctgctcaactgttgaaggctctagagaaagatgccaagaatcttcagaagtctctcagctctgtgagtgacacttggaattccaggctactccacttccagaatgctgtggaaatagaaaaggtagcattttgcttttattcataaaggctcacaaagtctgggtggctgggagattttcataatgtgattttccatttatttcttagactaaagtgttaaatcagcacacacagctagaaggccgacttcaagatctgagagcctgggttggcaataaaaatcttattctgaacagcaagggatctaacagtgaaatagatgttgacagcctgaacctctgtctccaacagtatgaggtaaactcaagcacattttctttgtcctttgagttgtatcaattttatttccctgctaggcaaaccaatatccatatttatcttttttttttttttttgagacggagtcttgctctgtcacccaagctggagtgcagtggcacaatcccagctcactgcaacctccgcctccttgggttcaagcgattctcctgcctcagcctcctgagtagctgggacta

SEQ ID NO: 281398 - DNA, 1000 bp, Homo Sapiens
aaaagcaggatgttgttctgatcaagaatttgttggtgagcgtgcagtctcgatgggagaaggttgtccagcgatctattgaaagagggcgatcactagatgatgccaggaagcgggcaaaacaagtaagttggggaagaaagatactaattcactgaagagtcttgggctgcatgtattgagtctctgggatgattctcaaacgtgctgtatagtgtgtatattcattcctgttaacttatttcttatgtaattttagttccatgaagcttggaaaaaactgattgactggctagaagatgcagagagtcacctggactcagaactagagatatccaatgacccagacaaaattaaacttcagctttctaagcataaggtaaagcagttaattgctcttaggtcccaagccatagtattcgctaaagcttgtatcttgccaaaaataaaaatcagagctagtaaaaagaaaaccaattggttaatgtttaaaagtcaaaatgatgaagccagggttccattttatatctagatggtctaatcatgatatttgctcatttaaataacagtttaaggaaagtagttatgggagtaactagttaaaactgtaggctttcacaaattgtcaggcacttctatatatgatataaacaaaaaattataaatttcttaaggataagctatggttaattttagttcaaaaaaagtggtgatattcatactttatttggtttctagcctgaaaactcaaattcttttgttccaaatcaagatgtcgtctgacttttaacacttttttcttttctttctggaaacataggagtttcagaagactcttggtggcaagcagcctgtgtatgataccacaattagaactggcagagcactgaaagaaaagactttgcttcccgaagatactcagaaacttgacaatttcctaggagaagtcagagacaaatgggatactgtttgtggcaagtctgtggagcggtgagcatga

SEQ ID NO: 281399 - DNA, 1000 bp, Homo Sapiens; identical to SEQ ID NO: 201500

SEQ ID NO: 281400 - DNA, 1000 bp, Homo Sapiens; identical to SEQ ID NO: 201617

SEQ ID NO: 281401 - DNA, 1000 bp, Homo Sapiens
aatttaccatgcaagattttagactgattaggaaattcactaggaagagtagcaggtataatgtttgtatcatattaattttattattgtcttttatttttattaaaaattttatttcagtagtctttttttattaaagtatatactggtttttggttacatggttgaattgtctaatggtgaagtctgagattttagtgtacccatcacctgagtagtgtacattgtacccaacttgtagctttttatcccttaccctaccttccaccctccccattttgagtctccatagtccattatatcactctgtatgcctttgcatacccatagcttaactcccacttataagtgaaaacacggtatttggttttccattcctgagttacttcacttagaataatagcctccagctccatccaagttgctgcaaaagacattatttcatttttttatggctgaatagtattccctggtgaatatataccatattttctttatccactcattggttgatgggcacttaggttggttccatatctttgaaattgtgaattgtgctgtaataaatataggcatgcaggtgtccttttgatgtaaggacttcttttcctttgggtagatagtagtgggattgctggatcaaatggtagatccacttttagttctttagagaatctccatactgtatttcatagaggttgtactaatttacattcacaccagcagcagtgtataagcgtttcttctcaccacacccatgtcaacatctattgtttttcgtcttttatttctatcaagtattttacatatgatacttggtttagttcgaaattggcctcatccaaaccaaagattatggtgcacttgaaaaatacaaactgaatgttgtctatactcatgagagtttcctgccatggcctaagtgaaatcttgataacactgaacaaaggcttcacttgtcctcatcttttaattctgtattctgataggagacaagatc

SEQ ID NO: 281402 - DNA, 1000 bp, Homo Sapiens
gttgtagaggatgaataggagtgaaccaccgacgtggagagggaaaagcattccaggccaagggaatgacacgagcgaagacacagcaagaaactgcacggctcgcgaggtcaagggaggtccagtttgagaggagatgaggctgggggatggtcaagtctcacaccaacccccattttcatgggtgagaaaattgaggcccagagaggttaagtaaaaagccaaggtcacacagctaaataatgacagtgctgggacttaaatacagcctagcttcagagtctgagtgttaatcatggctcttccagtgtccctgtgcccaccacagccacacggctgggcattattaccagagccccagcctagaatctggagacaccggcctatctgcccaccaacagcacaggcaccggctgcattctgggatacggggttcgggaatgtagaatcatcactaccaggcacccttatagagccagctctgtgctgagctctgggaggcacagaaaggaatggagcctggcccttgccgctggggagtttacaggacctggggcagagagagaccagtaactgccgttcatcaacatggtgatgatgacggtgggtagcatttactatgtgccaggtatgtgttgtttcatacaatcctcataagggcactctgagaaggtattattctccctaattcgtaaataggggcaactgaaaccccgagagttagatgactagccagaagccacacagcttggcaggtagcacaacttttccacctcactgcaaagccccagtgtgaaaacaccacgccgcacagcgagggctcatgataagcatgtttaacccacatgaacttaagtgtgtgctcagcagcaaacagaaagacaaggggcaacccagcccaatatttcccttggttgaacaaacacccaggaggagacagacaggagctgtggagcctccgttccctcagatcctggaagccgttcatcctgtgggtacc

SEQ ID NO: 281403 - DNA, 1000 bp, Homo Sapiens; identical to SEQ ID NO: 207064

SEQ ID NO: 281404 - DNA, 1000 bp, Homo Sapiens; identical to SEQ ID NO: 207065

SEQ ID NO: 281405 - DNA, 1000 bp, Homo Sapiens
atcagtcaaacagaattgtcacattgaagattatcttgggtttctagaattcattctaggttttaaagatgcagacagattctgagggtcacaaacgtcagtttgccaagtatgtttaggctgtaaagttatccatgaaaagaccgtgtggtttgcatgagattgattgtgatcggatgtaactacattgctttttacagctcagtagaaaccactttcaattgcaaattgtagcagaagcaggcgtctacttaattttgatcttaaagaatttcaaagagaataaatgcacactaaatagtggtggattttggtagtatacgccaacatcactttttatttaacacatgcagaaatgtgtactggtagagaaaattggtagagtgaattaaagtacagacagatccacattgactttaaatgaatacatgcacggtcagaaaacggtaaccctgggcaggaatctttaagttttcagggctcattagacagtgagcaggtgaggctcaaggctgagtttgcaactgtgctgtgaaaactcaaaaatgaaagtttttttcatttctgagcctgttgaaaagtgggtaagaagggaaagggcagtctcataataaaataatatgtaaaggctaaccaaataacccactttagtctttacttactggcaggcagcaacatgtcctatttacagagggaggctttacctaagtggttatatgtaaatgaaccaccttttcaatgaaacaggatgcacctgtctagaggtgtctgttactagagcaatggatgtttgattggactgacaaattttatttcctttttggaaaaaagaatgtaggtggtatcaaatcaccctttctcctggtaacaataggaattacttcttgaacttgagaaaccagtagttgcttgacttatgttttttgcatttagcatagtcttctaaagtagtaggagcatacgtttttgtctttaattccctgcagaccccttccccaat

SEQ ID NO: 281406 - DNA, 1000 bp, Homo Sapiens
tgtgagcctggagctctgaggccaggatgagcagtctgctacttactgtgcgtggccattgctctcaagacattgccatcatcagtcttggccaaagaaggtcaggtctcctctagtacactggcgatttgagaatgtgcaagtcatctgcatttctttgacaggagtagtgaatttgggagtataaatctgaatccttaagcctttcaaccattctcactaaatgtctttacttcagggatgatcacgtttgatcgtaatgccaagatcttgcagatgtataaagggcatggtaatccaagtcttgagttgaagtaagtggtcaggaaaatcttgacccttggggaaggagctaccagagctgggtggcctatgtgtgtgtgacagggaggaggtgtgcagaatttgggggaaagatcctttgtagttctccatgtggaataataacttccatttattgagtgcttatggtaggcgcttttcacatgtattgtatcatttaaccctctaggcagtcctgtgaactgggttttattatcctcatcttactgatgaagagtcaaacttaaagaggaaaaggaacttgaccagagtcacagaggtggtaggtgggagacaggtccatccaatatacaccttgccttccaatagaagccaaagccctattgcctaatctcttcactttaagaacatgaagaatagtgttgagttcccctttgagatctgactgtggttaaagcttcacaaatttcagaaaaacagaataactcactaaaataaaaatttaaagctaccccacagaaaacatctaccacaacccaaaacttcagggtttatatatccagattttagtgaactatatgactctccctagtcccttgctctgtctcctggtaaatactgtccctttcagagccctggcacatacatagtgtaataagatcagaccccatccccctaccattccaatgcaatctaattgcaaagtgaaaatccaggg

SEQ ID NO: 281407 - DNA, 1000 bp, Homo Sapiens
gaatcagctttgtaggaatgttcccacagctggggctctttagaattctcacagattaaaatcaaccacatatgacttcacaatgaaaagtttccagttacacagagtaaacaagccatcagtggaaacaacaaacagtagaattagacttcccaagaacttgaatttaagaattatcagtcagaatataaatgaaatgtcctaaaatgtttctagaaataaaagatggatttgaaaacatgagcaaaatgctattaaaaatgtctaggcagaatttgaaaaggaaacaaaatgaaatttttgaaataattatattcaaaactgacaactcaaaaaggaaaaaaaaggttttaacatctgatatggtttgactctgtgtccctgcccaaatctcatctcgaattgtaattccccacctgtcaggggagggacctggtaggaggtaattggatcatgggggcagattttccccatgctgttctgtgatagtgagatctcatgagatctgatgtttaaaagtgcggcacttccttcaacacgctccttctcctgccgccatgtaagacgtgacttgcttctctttcgccttctgccatgattgtaagtttcctcaggcctccccagccacttggaactgtgagtcaattaaacctcttttctttataaattaccctctctcaggtcgttctttatagcagtgtgaaaacagactaatacaacatccaaatatttttctgaaaatcactgattagagtttgagtttgttatactgttaaattatatacaaagtttaaaaatcataaggatataccatgatgaatttccataaattaatgtactatgtaaccagtattcagatcaaggaacagaacattaccagcatctcataaaccccctttctgttcccttcatgtaatcttttactccaaggtcaactagtattactccaaggtcaaccagtatccaaaaataggggtgtgactattatgcaagtatcctg

SEQ ID NO: 281408 - DNA, 1000 bp, Homo Sapiens; identical to SEQ ID NO: 114759

SEQ ID NO: 281409 - DNA, 1000 bp, Homo Sapiens; identical to SEQ ID NO: 195208

SEQ ID NO: 281410 - DNA, 1000 bp, Homo Sapiens
cgtgattcactgacacgggacggtgggcaaacagcaaagccaggcaggggctgctgtgcagctggcactttcggggcctcccttgaggttgtgtcactgaccctgaatttcaactttgcccaagaccttctagacattgggccttgatttatccatactgacacagaaaggtttgggctaagttgtttcaaaggaatttctgactccttcgatctgtgagatttggtgtctgaattaatgaatgatttcagctaaagtgacacttattttggaaaactaaaggcgaccaatgaacaacctgcagttccatgaatggctgcattatcttggggtctgggcactgtgaaggtcactgccagggtccgtgtcctcaaggagcttcaagccgtgtactagaaaggagagagccctggaggcagacgtggagtgacgatgctcttccctgttctgagttgtgggtgcacctgagcagggggagaggcgcttgtcaggaagatggacagaggggagccagccccatcagccaaagccttgaggaggagcaaggcctatgtgacagggagggagaggatgtgcagggccagggccgtccagggggagtgagcgcttcctgggaggtgtccacgtgagccttgctcgaggcctgggatcagccttacaacgtgtctctgcttctctcccctccaggccgtgcataaggctgtgctgaccatcgacgagaaagggactgaagctgctggggccatgtttttagaggccatacccatgtctatcccccccgaggtcaagttcaacaaaccctttgtcttcttaatgattgaacaaaataccaagtctcccctcttcatgggaaaagtggtgaatcccacccaaaaataactgcctctcgctcctcaacccctcccctccatccctggccccctccctggatgacattaaagaagggttgagctggtccctgcctgcatgtgatctgtaaatccctgggatgttttctctg

SEQ ID NO: 281411 - DNA, 1000 bp, Homo Sapiens
tcccatgatgaaatatcactaataaatcctgtatatttagatattatgctagccatgtaatcagatttatttaattgggtggggcaggtgtgtatttactttagaaaaaatgaaaaagacaagatttatgagaaatatttgaaggcagtacactctggccaactgttaccagttggtatttctacaagttcagaatattttaaacctgatttactagacctgggaattttcaacatggtctaattatttactcaaagacatagatgtgaaatttaggcaaccttctaaatcttttcaccatggatgaaactataacttaaagataatacttagaagggttaattggaaatcagagtttgaaataaaacttggaccactttgtatacactcttctcacttgacattttagctatataatatgtactttgagtataacatcaagctttaacaaatatttaaagacaaaaaaatcacgtcagtaaaatactaaaaggctcatttttatatttgttttagatgttttaaatagttgcaatggattaaaaatgatgatttaaaatgttgcttgtaatacagttttgcctgctaaattctccacattttgtaacctgttttatttctttgggtgtaaagcgtttttgcttagtattgtgatattgtatatgttttgtcccagttgtatagtaatgtttcagtccatcatccagctttggctgctgaaatcatacagctgtgaagacttgcctttgtttctgttagactgcttttcagttctgtattgagtatcttaagtactgtagaaaagatgtcacttcttcctttaaggctgttttgtaatatatataaggactggaattgtgtttttaaagaaaagcattcaagtatgacaatatactatctgtgttttcaccattcaaagtgctgtttagtagttgaaacttaaactatttaatgtcatttaataaagtgaccaaaatgtgttgtgctctttattgtattt

SEQ ID NO: 281412 - DNA, 1000 bp, Homo Sapiens
tatcccagtttatcccttattcttcctcaattctcaagatttgtttttaagttaacataacttaggttaacacactctttgtaaaatacactgttcaatctacagactcagtggttagcttcctgttaactaatttctgttgacaggtacttggatattttatttagaaagtggttgccaataaattagttataagtcgccagtttcactgccttgtgaacacataattattgtggtctcagtattccctatggtggcttctcctgctcctggtattgccctgaaatgggccaaaagccgtggctccccaatgctcaggttatagaacattgtccaggtaccacctaggagagcccagcctcactgaaagtattcaaatttaggaatgggtttgagaagtaggtagctggtatgtgcttagcacaagaatctctcttccttgggttagtctgtttcaaaactgaaaacactgtcattccttaagaaaataggaaaaagtattccaaacctctgtcactagaaaatttgccatattaccaaatctcaaaaacctctcaggaaatgagaaagtcccagtttctggtaaactatttgggcccttttctcaagttctccttccagtgctatttccttgaggtgaggcaaagttactcaagatcatcgctgccactcaaggccttgatagggcaagtgaaaggcatggaccattattatattgatcacagcataagctgtgaaaacccacatcttctccaaacatctgcttggagcattatcatcgcatagtttgctctggtgttcagggaaatcgctgtttcataggaaatcacatggcagtgggatgggagtgtttcctgacctgccgatggtactggcacctgagcaagcattcctagtcctttttggtctgggcctcttgttctatcacaaccacaagctgtttaaaataaaaacgtcaagtcacaggcaggtcattttatcctgcgtgaatcaattgaag

SEQ ID NO: 281413 - DNA, 1000 bp, Homo Sapiens
caaaattcaaaattgaaaccaaggtttcagtgttgcccattgtcctgttctgacttatatgatgcggtacacagagccatccaagtaagtgatggctcagcagtggaatactctgggaattaggctgaaccacatgaaagagtgctttatagggcaaaaacagttgaatatcagtgatttcacatggttcaacctaatagttcaactcatcctttccattggagaatatgatggatctaccttctgtgaactttatagtgaagaatctgctattacatttccaatttgtcaacatgctgagctttaataggacttatcttcttatgacaacatttattggtgtgtccccttgcctagcccaacagaagaattcagcagccgtaagtctaggacaggcttaaattgttttcactggtgtaaattgcagaaagatgatctaagtaatttggcatttattttaataggtttgaaaaacacatgccattttacaaataagacttatatttgtccttttgtttttcagcctaccatgagaataagagaaagaaaatgaagatcaaaagcttattcatctgtttttctttttcgttggtgtaaagccaacaccctgtctaaaaaacataaatttctttaatcattttgcctcttttctctgtgcttcaattaataaaaaatggaaagaatctaatagagtggtacagcactgttatttttcaaagatgtgttgctatcctgaaaattctgtaggttctgtggaagttccagtgttctctcttattccacttcggtagaggatttctagtttcttgtgggctaattaaataaatcattaatactcttctaagttatggattataaacattcaaaataatattttgacattatgataattctgaataaaagaacaaaaaccatggtataggtaaggaatataaaacatggcttttaccttagaaaaaacaattctaaaattcatatggaatcaaaaaagagcctgcag

SEQ ID NO: 281414 - DNA, 1000 bp, Homo Sapiens
tgcaatattgttggtactgaacagagatttccccagtaactgacacaaacctcaagcttaccaaagaaatgctcagaaaactgggataaaaaggggagatactttatagaaggggatggtatccccagcaatattcagcaacattgctgtaaaaagaagaaaatctgagtgaaggtttgactggtttcccatgagaggcagacagggtcaaggtggggtcacatttactctaaccagtctcctctctcatatttgtcttctaggctaactgccaggcggccaaaggacagtatgttcacacgggttcttctggggctgcttccacccagtcgctcttcacagcctgctatacctactagggtccaatgcccgccagcctagctccagtgcttctagtaggagggctgaaagggagcaacttttcctctaatcctggaaattcgacacaattagatttgaactgctggaaatacaacacatgttaaatcttaagtacaagggggaaaaaataaatcagttattgaaacataaaaatgaataccaaggacctgatcaaatttcacacagcagtttccttgcaacactttcagctccccatgctccagaatacccacccaagaaaataataggctttaaaacaatatcggctcctcatccaaagaacaactgctgattgaaacacctcattagctgagtgtagagaagtgcatcttatgaaacagtcttagcagtggtaggttgggaaggagatagctgcaaccaaaaaagaaataaatattctataaaccttcagctgctatcgggtttcacttttctgctcttgctgtccaaagactcagtgtatttcattacttttgactctactagacatgactgggtttcaacagtaaaggtcttcaactcttgctagtcattggaatcaagccgcaaaattttaaaaactgagatgctcaggccacaccccagctcaattaaatcagaaaccctagacttgggatcc

SEQ ID NO: 281415 - DNA, 1000 bp, Homo Sapiens
taagcactctgccaccttcgaataagtctcccgcacccagccacgtaactgggtggactagagtaccccaccattcccaatgctagcctaactaattttgtattttttgtaaaaaaccgtgtttcatgttggccaggctggtctcttaactcctgacctcaggtgatccacccacctcagtctcctaaagtgctgggattgcaggcgtgacggccgccactgcacctgggcctgaattttaatctttaacttcataaggaaaggatggattgtcattagtactcaatacagtttttgttgttatgaattgatccttgtaagaaatctaaagcaatgtgtgcttaaccgatgcttaaaactaatctgttattccccccaaatttttgcttatatgactattaataagctcagtttagaaactactgttctagaaaggaatatacgtgttaatggtgttagtaccatcatcactagactggctttaaaaaaagagagagagagagagatggggcctcagtatgttgcccaaggctgactcctgggccaagtgatcctcctgcctcctaatagcgagactacaggcatatgctaccatgccaagctaaaatatttgagttttgattttgccgagtttttgatatgtggacaatagttgattagcttaggaaagtgatagaattctacatctaaagtcatctttttttttctttcttttcttttttaataaagagcttcttttattctcgtaagaatttcatgaagccttctcaccaagggtacccacaccggaatttccaggaagaaatagagtttcttaatgcaattttcccaagtaagtttaaataaaatataaacctgttgtcttcttaaagatagaaagtgcgaacctcagagatcttctatatgagagcatacttatcgatatatagcattctacacacactaatactcttttcttgtgggtttttggttgtttagacagggtctcattctgtcaccc

SEQ ID NO: 281416 - DNA, 1000 bp, Homo Sapiens; identical to SEQ ID NO: 114760

SEQ ID NO: 281417 - DNA, 1000 bp, Homo Sapiens; identical to SEQ ID NO: 114761

SEQ ID NO: 281418 - DNA, 1000 bp, Homo Sapiens
tatttgtgatgtgcccttcaactaacagtgttgaagcattcttttgatagagcagttttgaaacactctttttgtggaatctgcaagtggatatttgtctagctttgattatttcgttggaaacgggattacatataaaaagcagacagcagcattcccagaaacttctttgtgatgtttgcattcaagtcacagagttgaacattccctttcatagagcaggtttgaaacactctttttgtagtatgtggatgtggacctttggagcgctttcaggcctatggtgaaaaaggaaatatcttcccctgaaaactagacagaagcattctcagaatcttatttgtgatgtgcgccctcaacgaacagtgttgaagctttcttttgaaagagcagttttgaaacactctttttgtaatatctgcaagaggatatttggatagctttgaggatttcgttggaaacgggattgtcttcatataaactctagacagaagcattctcagaagcttcattgggatgtttcaattgaagtcacagtgttgaacagtccctttcatagaacaggtttgaaacactctttttgtagtatctggaagtggacatttggagcgctctcaggactatggttaaaaaggaaatatcttccaataaaagctacatagaagcaatgtcagaaactttttcatgatgtatctactcagctaacagagttgaacctttcttttgagagagcagttttgaaacactctttttgtggaatctgcaatggatatttgtctagctttgaggatttcgttgaaacgggattacatataaaaagcagacagcagcattcccagtaacttctttgtgatgtttgcattcaagtcacagagttgaacattccctttcatacagcaggtttgaaacactctttttgtagtatctggatgtggacatttggagcgctttcaggcctatggtgaaaaaggaaatatcttcccctgaaaactagacagaa

SEQ ID NO: 281419 - DNA, 1000 bp, Homo Sapiens
  misc_feature (47)..(47): n is a, c, g, or t
ggcggcggtagagctctccctctgtagtcagagccgtgaaaggcggngtttactcgctgctcacgaggctgcggacctctaatccccaagcgcccgggcctcgactctgcggaccccaagcgcgggtctccttgaggaaggggcgaccgcgggttagggtcgctggtgggtccgttaccgctggtccggcgccctctgtcggctgtttgtaacagcaaaggcagctttgtgcgctgttagcagtggtcgcgtgctcagtgtcactgctgtgctggtgattgaaattctccgtgtcctgatctctgctgatgccactcctcacctgctctgctctcctccatccttcacatttcactcatcttcctattttcccaatcatttcccatagtcatgtaaattgaagctataagtatcctctccttccacccacaagagccactagctctgttttctataggagtcactgaaataattgtaagaaactcactctctggtccagaggtcataagtctcacaggtcttgtctcccacgcacctcgtgaacttacggtgagaattaactgagcaacatatagagccacctgggccatagtaaatatggttattttataccaataattatgatgattattaactttgttgattacctttagactctcagagataattaccaactgttaatttcattttgccaactattaatggtcaagatatttccttgtcattttgtcaacacatctacatatttgtaggtgaggcaaatggtcaagatatttccttgtcattttgtcaacacatctacatatttgtaggtgaggcacacattggtgaaagtatctgataatttcgaatcaatttgagaattgtagaccataaaggaacatcagtgtattataagtaaagtggaggcttctagaaaatagtgatgatcagtacatgcagttcgacagacacgtatgctgtgggtgagaggtcgagtttcgagtctgacaaatctagg

SEQ ID NO: 281420 - DNA, 1000 bp, Homo Sapiens
tggtggcacacgcctgtaatctcagctactcaggaggctgaggcaggagaattgcttgaacctgtgaggaagaggttgcagtgagctgagatcgtgccattacactccagcctgggcgaaagggtgagactccatctcaaaaaaaaaaaaaatgatttgcttttgacgtcttaggtggcagggctgttccctccaggcaaatgcccttcaaaccgacgatcattgtgcccacttaccctgggctggagagttggtttcaggttcctacaggagatagctttctttcccttactccctatctaacacttttgctctgcaggcagccttgcccattctctaagcctggcttagaaggcactgggaatgtcctgtagagagagacctagataggtcatgcaagtgagaaagacatctgaggaaaatggaagacctaaggcagacaggaaggaagcacaaaagacaagcattgggtcagacccataaaccacctcccaaaggctgtcatttcattgcactggaattttgctttatcagaagcaaggaagtaagggagtcattgccttgggcctgggaatctaagtgggagacaatattaatttggatccgattaattggagattactaactgtggacaaaagtttatctttgcacaatcaataaaaatggcatttttttagtaaattaagagcataaacaatattgctagaggtggcatgtttagtctaccaaaaacaatacttttcaggcactttagaaatatccttttagaagcagcgagtgcatgggctaattatcatcaatctttatgtatttgttaaagaaacatctacaggatctttattggtgaccttttgtaagacattagtttgaggtactacctatctacttgaaaataataaagtggcatttctttatgaaaaaaaaagaaatctcttccataattcagatttctacactttatacttgcctccctcctaaatcgtgatattgaaatatggtg

SEQ ID NO: 281421 - DNA, 1000 bp, Homo Sapiens
tcttttgcttaagcccctttggaatctcccatttggaggggatttgtaaaggacactcagtccttgaacaggggaatgtggcctcaagtgcacagactagccttagtcatctccagttgaggctgggtatgaggggtacagacttggccctcacaccaggtaggttctgagacacttgaagaagcttgtggctcccaagccacaagtagtcattcttagccttgcttttgtaaagttaggtgacaagttattccatgtgatgcttgtgagaattgagaaaatatgcatggaaatatccagatgaatttcttacacagattcttacgggatgcctaaattgcatcctgtaacttctgtccaaaaagaacaggatgatgtacaaattgctcttccaggtaatccaccacggttaactggaaaagcactttcagtctcctataaccctcccaccagctgctgcttcaggtataatgttacagcagtttgccaaggcggggacctaactggtgacaattgagcctcttgactggtactcagaatttagtgacacgtggtcctgattttttttggagacggggtcttgctctcacccaggctgggagtgcagtggcacactgactacagccttgacctccccaggctcaggtgatcttcccacctgagccttccaagtagctgggactacagatgcacacctccaaacctgggtagtttttgaagtttttttgtagaggtggtctagccatgttgcctaggctcccgaactcctgagctcaagcaatcctgcttcagcctcccaaagtactgggattacaggcatcttctgtagtatataggtcatgagggatatgggatgtggtacttatgagacagaaatgcttacaggatgtttttctgtaaccatcctggtcaacttagcagaaatgctgcgctgggtataataaagcttttctacttctagtctagacaggaatcttacagattgtctcctgttcaaaac

SEQ ID NO: 281422 - DNA, 1000 bp, Homo Sapiens
tgatcacagaggggacttccagggaaagctgttatcaggtggctgcttcctggtgatgcagcctggctgatgagataaccctggctccacagatggcttagcaggtgctgtgatgatttggttttcttctcaattagactgagctgcacatggtgtttatattgcttggcacatggtaagggcttaatatttgaggtaattatgtagggcgtacactgacaagtatctgacccccccttcctttttgactcataaattggtcatcttaaccatttaagtgtacacttctatagtgacagagttagccctctgtccaagggatttgcatctgtggattcaaccaactttgggtcaaaaataatcaaaaaggatggttgtgtgtgtattgaacatgtagacttatttttcttattttcaaaatactatattttcttgtcacttattttcttgtacactgcagttgtaacagctatgtagcatgtacattaggtattaaaagtaatccagtgaagattgaaagtctaaggatgtgcctaggttatcttaggtataaatactctaccattttgtataaggagtttaagcatctggggattttggtatttgaagggggtcatggaaccaatcattggtactgcaggaagactgctctatattctcattgtgcatcaatctccagaacttcatcttgcagatgtgctgcccctccctcacctttttgaaagggcctttgatgattatatggattcctgtcttttttattttttgaggtggagttttgctcttgtgtgccaggctggaatgcagtggtgctatatcggcttactgcaacctccgcctcctgggttcaagccattctccagcctcagcctcccgctagctgggattacaggcacccgccaccatgcccagctaatttttgtatttttagtagagaccgggtttccccatgttggccaggctggtctcaaactcttgacttcaagtgatccccccacct

SEQ ID NO: 281423 - DNA, 1000 bp, Homo Sapiens
aatttcctgaaggttggattagagaggatgaggcagatgtggtggcaagacttttcagtaaagagttacacatcctgggccgggcgtggtggctcacgcctgtaattccagccctttgggaggccgaggcgggcggatcatgaggtcggaagatcgagaccatcctggctaacgcagtgaaaccccatctctactaaaagtacaaaaaaaattagccgggcgtggtggcgggttcctgcagtcccagctacagagcttgcaatgagccgagatcgtgccactgcactccagcctgggcgacagagcaagactccatctcaaaaaaaaaaaaaaaaagttacacatcctgatttctgttttccagggtttttttgttgttgttctttttttttggagacagtcttgctctgtcgcccagcttggagtgcagtggtgcaatcttggctcactgtagcctccgcctcccaggttcaagcgattctcctgcctcagtctcctgagtaacagggactacaggtgcgcaccaccacgcctggctaatttttttttttttttttgtatttttagtagagacggagtttcaccatgttggccaggatggtcacgatctcctgacctcgtgatcccccggcctcagcctctgaaagtgctgggattacaggcgtgagccactgctcctggcccagtttttgtaaagggactgcactgggttcctttctagtactagatgtttagaaagctcaagttttgtaattccattctcaggacattgtttgcattttatattctagtatgcttaggaggtaacaaggttaaatacccagaattgcaatttaccaaatttgagtagctaaaaaagattaactgaaatgtttccccatccaaaatgctgtcataggttaagaaaagttttactttaatgaataatctttcctaagttaagtggttggtgcacttggacgatttctgagtaatcccagatcatcaatagttaagtcca

SEQ ID NO: 281424 - DNA, 891 bp, Homo Sapiens
gtaagtatcaggaatctattgtgaggtagataagttttcccctccaaagagtattctaagttggtcaattaaaaagaaacaaaacttctattagcaacctccaccttgtacaggctcagagggaagataaacctgcaaaaagtgtgagtctcagctgtaacctaccaactatgtgagcttgggaaagttacccagcttccctatgcctcaatctgttcatccataaaatgaggataacaccagtatctatctaaggaatatgaatatattatatgcgtatttatatatcaagaatacatatacaatgctcataacataaaaaatcaaacataacatcaaataaaatatatgattctgatattataagcctcttatgtattgtaatatagaaggatggctttgtaataaaaaataaattaagccacaaccaaagttttcatacaggactaagtagtaacatagttacctcaaatcctccttagaaacagggtaaggcatgggagtaagaatgtatactactacttcctttaaaagtgtaatttaatatgcattctgttaagaagatgtttatatttatacacatatgagtgcacatttttaaaaggcctccaaagccaagaatacagaggtttcttaacagttgaaaataattcataatgattgccatttgttgccattttatttaggcttatgggaacaaagtctaaaaggaaatcaggcaatgtgtcaggccccttgcacaggtaatttcttttaatccttagaagaaccctatcatatcccacaaaggaagttactgagctaaaaagtgaggaaaccaggttggcctcacttccaaacccaaattcagctgcaccatgatccatgggagtgagtcttcctttgttccag

SEQ ID NO: 281425 - DNA, 1000 bp, Homo Sapiens
agaagttggccgagatcatctggcagaaccggcagcagatccgcagggctgagcacctctgccagcagctgcccatccccggcccagtggaggagatgctggccgaggtcaacgccaccatcacggacattatctcagccctggtgaccaggtgactgctgcctgtttgccatgcccaggagcttggggcagctcctgcctgcgtggggggagccgcaggtgccttccagaccagcagatccacttcctgcctctcatccctcccaactccatctccagttgctgtggcccttgcccagtttctcctgtggacactgcaagagatgcccttgggctgcagcccatgccagcttctgtgttatctcactcccctctccatcctctccctggactctcacggcttccccaggaacagaggctgtgcccgagctcttcacctcctgagcccctcgggaggcagccccacccccaccacagagggactgagagccctttcccctgcaccagcccctcatcatgcatctgtccctgtgtcccctgcagcacgttcatcattgagaagcagcctcctcaggtcctgaagacccagaccaagtttgcagccactgtgcgcctgctggtgggcgggaagctgaacgtgcacatgaaccccccccaggtgaaggccaccatcatcagtgagcagcaggccaagtctctgctcaagaacgagaacacccgcaagtaattgtgcagcttcctctcattccctgctacttgtctcatgtcctggcaacaggaaaaaaagaattctgcctcctgtgtcagatccctgtttgcccttctggcctcttctgggcatcagcaaaggaatataaggaagttcttgggcctggtgtggtggctcacacctgtaatccaagcactttaagaggccgaggtgggcagatcacctgaggtcaggagttcaagaccagcctggccaacatggtgaaaccctgtctctactaaaaatacaaaa

SEQ ID NO: 281426 - DNA, 1000 bp, Homo Sapiens; identical to SEQ ID NO: 114764

SEQ ID NO: 281427 - DNA, 1000 bp, Homo Sapiens; identical to SEQ ID NO: 114765

SEQ ID NO: 281428 - DNA, 1000 bp, Homo Sapiens
ccacccagcaagctctctcctaccccaggtaaaaggtgctcctttgcctgggtttgaattccagcgctgccacttcctctctgcacctcctggcaagtttcttctattccccacgtttaaagcgatggcacctccgtcccagggtggtgtgaggattacccagtgtggtaggtgctcaataaatgttggtcattgttatcactgaagcccaacatgctagtgcttctagacccttctgtcagtgctgataagcccttgctaagtcccagccccttcatgcttggctggcgtctgccctagggctggggttctcaagcccctggccctggcccagagatttggattcccttggcggccgtggagcccagcctttgatgtctttcaaagcttctgtggtgcgccctggattgagaaccaccacccgaggggtacagcccctctcttccaaccgagaagttcctgtcccagaatggacccagggacaagagaccctgagagccctgggactgggagtgtctgctcctctgaggccaggaggccggtgctgggccagagaggacggcgtggcgaaagtcagcgtccactgcagcacaggatcagatggccgtgtgctgtgcatgcaggagcctcgccttctgtgtctttagtcttgagccaaaatttgctcaaagactgatctcttccttgcagggaacagctttggggctgggggaactagaacccacatgttggtctaaaccctgagaaggtggcagtgaggaagtatcccctcaggtgactggatctgtgttcctccttaacatcatctgatggaatggcaatgaaaagcgtggattgtggaaaatacagaaaaacataaaggaaaaaactccaatcccctgagcccaccactgttcaggacccctgcttttgtcacctactatttccctttagtttttagcagcggctggatgtgatatgtctagtttaaccagtccccttgatctttctatataataaa

SEQ ID NO: 281429 - DNA, 1000 bp, Homo Sapiens; identical to SEQ ID NO: 207063

SEQ ID NO: 281430 - DNA, 1000 bp, Homo Sapiens
cagccattttcttgggagaaagcttgagtgtaaagccatttgtaaaaggctttgccatactcattttaatatgtgcctgttgctgttaacttttgatgaataaaaacctatcttttcatgaaacttctctctatacaaattgaaatacataatgctttctggttcttcttcaaaccaaaacttgtcaaattcatagacaagataacagtaaaactgatgaaagtgttccattgttggtataccaggaacaaggttatagagatgaaacttcaaagcttcactcttcagtaagctataagccatctctgtaagattgattccaactattgcataagaataccctaattttggatgatttgaacgggaaagaatctgatgagcttcactagtgtaattttcactgaaatacacaagattgattaacccaagtatgcccatgcctctgaagtctgtcttgggatcatcaccctgaaaaccaatttcagcccactgcttggagattctagcgtttaacttcttcgtgggcattagaagattccaaagcttcatgagtagctcttcatgctgtaggttatcagaatcatatggccttttcctcacactttctacatccaaatacagctgtttataaccagttatctgcagtaagcacatcttcatgcatattttaaaactggcatccttctcagggttaatattcttttccttcataatatcatctacatatttgtccacttcactctgaacaacatgtgtcgccttctgtaaaaccttattcttggagtatgtcaaggaattttctatcctgtgtgtcctttgtgcacctacataggtatcaaatattcgctgcaattcacacttcccagtcatctgtcgtaatagccatttcatccaaaatcgaaaaaagtgcccatagaagaactcccacaaagaaataaacatttttttttcctcacaggagcggaagaactagggggagcaggagctgcaatgcggccgc

SEQ ID NO: 281431 - DNA, 1000 bp, Homo Sapiens
acacaccatactcaatacaccatattctatagttaggtaagcaaaacaagcaattaatatcaaacctgcaccccaaaaaatgttggtttgtatccttcctgtgctaatcaacccctcagttcctatcattatcctcttcaccctcttcacaggaactacaatcacagtatttatcttgcactgattacaagtctggatagggctggaagtaaatatactatacattattcctatcctatcctagttaaaaaagcaactccccacttcacagaacccactactaaatgattctttatacaagcagctgcatccatagtcctaacagtagctatgattattaacataaggtactctggacaataaacagttataaaagtcttgaaccaaacagtatacacaaataaagtttgtgtatctaaagctatctaaacatagaaaatgtaccgtgaaaatacagtataaaagattttttaaaccagtacacctgtatagggtacttaccatgaatcggagcttgcaggaccagaagttgctctgggtgagccactgagtgagtggtgagtgactatgaaggcctagggaattactgtatgccctaatgtatgactggcagtgcagtacgtttatttacaccagcatcactacaaacacatgaataatgtgttgcactatgatggtacaacagctatgacaccactaggcaatagaaaattttcagctccattataggctgatgggccatcctcatatattgtccattgttgacctaaatatcattatgagatgcctaattgtgtatgtatgtatatgtaaatcaatcgcatattttaaatctttatgtatttgtttttgcattaagttctttaatttgtctgaaattctttttggtgtaggtaatgaggttattattttctggaggctcacttgcctcaatgtttatcacataatccactgtttatccactaattttaactggtatcttttatcgtatactaaattc

SEQ ID NO: 281432 - DNA, 582 bp, Homo Sapiens
tttctttcacacccacttgatgtggataccaaagacttattaggaatacaaaaaccacattttaccatttgtattaaacacagaaacgagctcgattttttaaaaacagatttattccattttttcaatatcctgagctgaacattaacaaatgacatgagtgaactctcatatacaatattatacattatttgtcatttttctaattaagcacaggggagtttatagttctgatgtctttgacattttccctggaacataccaaaccctagaaatgtttccaagaacacctggaatttggttactccactgccatgtgaccgaccacattcatgctggaatggaaaccacttacaccgttctacaaaatgaaggtgaatatccaggtagtaattctagaagccatatataaaagatataactaaaggaactactttgcctaaatacttcccccaatatgatgcatcaatatgaagcatttgtgaatctgctgccctgatttcttccttctctacctccaaacaggatttttttcctgctaaatggtgagggatactgctcatttcctgacagccagtgggg

SEQ ID NO: 281433 - DNA, 1000 bp, Homo Sapiens
ctgcccgggcgagccacgcacgcagagggttgtggggcggatagctcccctccagatggaggctcacgaagtagggtgggcgggggactccatatcccagcgtgccccgcggcgggccctaccggccgcgactccgggcttggccccggccctagctcgtcggctgtgtattggggcgcgtggaggctgcagtcacggtggcgcccgcggggacggaggagggaatgagtgaagaggagcaaggctccggcactaccacgggctgcgggctgcctaggtgagccgtctcgtaccgattccttcagggcgaaaagcgtggggccgtgcggagggagtagcggcgcggccccagcatgcacctggcctgagggttgttcccggcaagcactggggcagtgggcagtggttcccggcgtgcaccggggcagtggctgctgcctccagctctaaatagtttggggttggcccggttcccagactgcactggaacactgggctttatgcccccacattcagtgcatttggtgggtactgggttcctggcttgcactgtgtcagggggtatgcactttcaacctgcattggggcacaggatcgtgcccaccttaactgaggcaggagcaatgcattcttccccccttgctttggggtagtgggccctacttttccagcctgcacctccacttggaacccagccaatggatgctagactgtctggggttccttggaccctatgtcccccataatgtgcctaggtctggtatggaagtgcttggctaggtgggtgcagagaggggaggtgtgatgtgggtctgtgccccttcccccagtatagagcaaatgctggccgccaacccaggcaagaccccgatcagccttctgcaggagtatgggaccagaatagggaagacgcctgtgtacgaccttctcaaagccgagggccaagcccaccagcctaatttcaccttccgggtcaccgttggcgacaccagctgcactg

SEQ ID NO: 281434 - DNA, 1000 bp, Homo Sapiens; identical to SEQ ID NO: 114767

SEQ ID NO: 281435 - DNA, 1000 bp, Homo Sapiens
ctcctggaaagccaggacagcccatgttgaaccccacttactactgctgaggactgtgcgccctaaggggtttggggcctctgctcttgccactggccttggaacatgtgtggcagttcttctgcctcaccctcactctggggcatggcccactctgccagggcatctgacatgttctttgtccctggctcagtttgggggcagcccagtgtcctgcgctgtggggctggccgtcctgaatgtcttggagaaggagcagctccaggatcatgccaccagtgtaggcagcttcctgatgcagctcctcgggcagcaaaaaatcaaacatcccatcgtcggggatgtcaggggtgttgggctcttcattggtgtggatctgatcaaagatgaggccacaaggacaccagcaactgaagaggctgcctacttggtatcaaggctgaaggagaactacgttttgctgagcactgatggccctgggaggaacatcctgaagtttaagcccccaatgtgcttcagcctggacaatgcacggcaggtggtggcaaagctggatgccattctgactgacatggaagagaaggtgagaagttgtgaaacgctgaggctccagccctaagccagccctgctctgcctaagtgtactccagaagaaactcatctcatccaaatacacgctattgagaaggcgagcctgacctccctcttacagataaagtcagctttcagaggctcagggtgggggggcctgcccgaggccataatgctacccaccccctcctcctaaccactggtctgttggaataacccagatgtctgcatcccctcaagtcagtcaatttcctttctgtccactgggggtggaatggggtagggtgggatactttaaagtgctcctgcttaaataaattagaccagaccagtgtatttctaaagaaaatcctgacatgcacacccattaaaaatagtacattttacagtgaaaaaaaaaaaaaaaaaa

SEQ ID NO: 281436 - DNA, 1000 bp, Homo Sapiens
agccgactgcggctccatctcagccccggcagccccggcggccttggtggctgggaccctctgctctctcctctgttcctcactccacgcctggggcaggcacggcggccgtcccggaagaggcagcggaaagacagtggaatcagacccacgagggagggcggcggggctcgaagagttggttggcacgaggtagacaccccggcgaggaagagtccgtcgctggtgtccccgttcctggtcccagcgatgggcgagcagcgggggccgcgggaactttgaaggcagcgggtctcagtgttggagggctgcacgctcccggggactccggagtcgcggccccagcgtcaggggcggaacgatctccaacccgccagaccccgcgctgccggagaggaagttctttgcaacttcgtccgagacgtcggagagccagttggagagaggcggagggggcaagtccgagccccagagactcggagaagcagagaaagaaaggatctggcggagaccgaggggtcgaggagggacctcagaagcatcgaggccgcggaaccagcctggcagcccccgggtctctccgccccctgagtgaagtcaagggccgattgttccggcggcctcctcaaagctgctccttcctggggccgggggctgctggctgtcccggaggcgggcccctacgctatgcccccgaagccgcgggcgccttggccgcagctaccccgggctgggcccggagctgctgcttgagccagccagggagggaagccaagccggagttgggcacccgctcctagcccgggtgcgctagcaccatttcccgcctctccgcgcagctccgggcggtctccagcagggaggctctgagagagaccccgaagctccagcagtgttttctgagcccagctcgcacagtgcctggcctggtggcgaggctccctatccgccctgggcagccccttggcgccgggaggcggcggcgtgggccggcctgcag

SEQ ID NO: 281437 - DNA, 1000 bp, Homo Sapiens
attgcttgaacccgggaggtggaggttgctgtgagctgagattgtgccattgcactccagcctggggaacaagagcgtgacttcacctcaaaaaaaaaaaataaaccaagccaagccaggcacagtggctcacacctgtaatcccagcacggtgggaggccgaggccagtggatcacttgatgccaggagttcgagacgagcctggccaacatattggaaccccatctctaataaaaatacaaaaattagccgggcgcagtggtgcacgcctgtagtcccagccactcaagaggctgaggcacgagaattgcgtgaacctgggaggtggaggttgcagtcagctgagaccatgccactgcactccagcctaggtgatagagtgagagtccttctcaaaaaaaaaaaagaaaagaaaagaaaaaaacagccaaactttttaaataatttcattttatttttaaaaaatcgagatgggctctatgtttcccaggctagtctcaaactcctgagctcaagccttccacctgcctcaccctcccaaagtgctgggattacaggcatgagccaccacacctggcctaccatgaatttaatggctcaacatgtgtaatctgataattctggacatcacaagtctgaaattggttttactgagaagaaatcaagtgtcagccaggatctagaggaggatccatttccttgttttttccattttctagaggccacctgcattccttggcttgtagttccttcttccatctgcaagaccagtggtgtagcatcttcaattctctctctgcttccattgtcaatctttttttgtttgtttgtttttatttttattttttgagacatagtctcactctgttgcccaggctggagtacaatggcgcaatctcggttcactgcaacctcctctgcctgggttcaagtgattctcctgcctcagcctcccaagcagctgggattacaggcacctgccaccaggcctggttaatt

SEQ ID NO: 281438 - DNA, 1000 bp, Homo Sapiens
gtgctaacctcccagcataattctgtggtttttaagtgttacaccagagctggctcagagaaatagctatatacagagaatttggtgggttccaaaagagaaaaaggaacagaaaaaaggaagagtacattttgtggttgcaagacttatggtttaggggacctcttggggttcagtgccattcaaaggcaggaagtatccattcataagtcttggtccctctctactgtatttggtatcataatttaaatgaattcagggctgaatgccagcatcaatcagttccacatgtttgatcaaatctctattcctgcctacgtagtcctttcaaaaggcacgctgtactggaagcatgatagcactactcggggctacccatccatctcgcatttctggctagtgaaggaagtcatgaagttgcctccatgctctataatgaatacaatttcaggaatttctagctccaaagaagtgatactccttttaacactacacagttgacccgagagtattgccattgtttgaaacactatggaacaccttttctataaccgtctatagagaaaggatctatgagacatgatatgcatgaacattagtttagctatatagtttattatatagagtcagtctgttactcaatagattacctattttattaagttctgattttttcctataatttattttgaaaatattcaaacatattaattatataataataaataaaaatacttaaaaataaataataaacattcaaacataatttaaaataaagctagattctaccataacattttgctgtactttaacacatatctagttgactttttgatagtttctccaatttcatttactggaaaaataaagtttacacacagacacacacagatgcacacacacacacacacacacacagaaaagaaagtaggtaatttcaaaacaagagttttgagataaatatggatcctctagagtcgacctgcaggcatgcaagctt

SEQ ID NO: 281439 - DNA, 1000 bp, Homo Sapiens
aagcctgggtccctccaacctgccagcctcagagctcatgctgtgggtggcaccattgctcggctggcatgagacccctgtgggaagcaggcgtggagaggctgctgtactggaggccggagctgagggggaggccacgcgcttcagagggccacatgtcctggagcacgactgagggccaaggagggccctggccaggatccacagatgcttttaggggcaccagtgcagcctgcacacagggccactctgcaggatctcagccacctcctggttccttgtggagagttgatcccagcagggacagaggaggaggtggctgcctgctcatgggacagatgttggggtgggggggacacagggaaagctcaccagtgcctccaggaagtgggggggacacatgagtcgtccttgagcctgcactgtctgtaaacgctgagcctcagctcctggctgggagaggttccgttatccatgagagggtccctcgtggtgacagacagtgttatcacttggtggtaccacctggtggtctgtggccactgcctgccttggtggaggcaaagtgtgtttgagataggatggcagggcctggcctggggagatggaacatcactgagtgtccgtccgcatgcgcgtgctatctggggtgcacatcgctgagtgtccttccgcgtgcacatgctgtctggggtgcattttggtcatgcacatccctgcagcccattctgtccagcagggcatagtgcctgctctgtgtgtgtgtgtgtgtgtgtgtgtgtgtgtgtgtgtggttgcatttgatgccaaagccatgcagaggagggctccgtgacagtgtcacagaatcactgcagacggctccttccagctcagtctatcttgggggtgtttcccaagagcagcgcccccagagcttcctggagagctggctagagactctcccaattgtgcatcttggggagtttcacttgctttctctcccagattcctttcccag

SEQ ID NO: 281440 - DNA, 1000 bp, Homo Sapiens
tttagcattttccttgggccttggcattttccaggcctgaaagtggcatgtatcactctgctcacattccactggcgttcaatgacatgtgcccaacttactacaagggaaactggaaagtgtaggctagttgtgatcccagaaaaacaaggaaactaccacaatggaatatacctactatatgtgccagtgaagagtcaatccatgtgctttcacaattaactgagtgaaggaatatgacatatttattttaatactttttataatttaaaactcatttttagaagacaattcaaacagcataaaacagtcaagttttctccaaagcataaatgtgttttgattttcctctaattcagtcttcaggaatctctctggggagtggctataaattttagccctgccctgacagaactcccggggaagcttacaaactgcttttcatgggacaccactttttattttattttattttttattttattttattttatttttttacatgagagcattttactgggtcaagaaagacacaaaaaggatcgtgggtcaggggtggtgttcacagggtttgaaaatctgattccttccagcccagaggatttagagaccaggctcttcagggaaaaagccaggagactacatgtggtcacagcgttgccaggccaggcgtgtgtggagtgggagaggtgctgatctaggatgacaagatgtcagggaggtaggtaccgagatggtgggactgatcagaaagcaggtgtacatgtgctgggggctagggggcaggcctagatagagtcacattggcctcagatgtccccaggtcaggtgggtgtgaagggaaggggatacatcacttgagcacaggtgacaaagtcgccgggctgactgggggtcaatttgcatttctggagaggtcaaacacacactcaccaagatggtggcagtgaaactggtcacaggggtttgagggggcctggtgcatgtggaaggcgggtct

SEQ ID NO: 281441 - DNA, 1000 bp, Homo Sapiens; identical to SEQ ID NO: 114768

SEQ ID NO: 281442 - DNA, 974 bp, Homo Sapiens; identical to SEQ ID NO: 206985

SEQ ID NO: 281443 - DNA, 1000 bp, Homo Sapiens
cctccccgcttcccctagtctcactgttaacagtgtcgtgtctctgaaactccctcagtgtctcatcaataccattgttacttctaggaaaacgagtgtgtgctggagaaggcctggctcgcatggagttgtttcttttgttgtgtgccattttgcagcattttaatttgaagcctctcgttgacccaaaggatatcgacctcagccctatacatattgggtttggctgtatcccaccacgttacaaactctgtgtcattccccgctcatgagtgtgtggaggacaccctgaaccccccgctttcaaacaagatttcgaattgtttgaggtcaggatttctcaaactgattcctttctttgcatatgagtatttgaaaataaatattttcccagaatataaataaatcatcacatgattattttaactatatgttaagtcatggaatatcttaattgtttaagtgattctcacagagaggtttttttttttttttttttttttttgagagttttgctcttgttgaccaggatggagtgcagtggcatgatcttggctcactgcaacctctgtgtcctgggttcaagtgattctcctccctcagcctcccgaatagctgggattacaggcacccaccaccatgccagctaattctttgtatttttagcagagacagggtttcaccatgttggtcaggctggtcttgaacccctgacctcaggtgatccacctacctcggcctcccaaagtgctgggattacagcatgagccaccgcgcccagccagagagaggttttaaatatatatgtttactttaatattaagttataacataattttcatgttattgaaaagctcttccatctaggatcacaccacttcagtgtcagaatcatattgaggtggggaatttgtattagtcaggtttctctaaagggacagaaacaataggatagatgtatatacgaaagggagtttattaggagaattgactcacatga

SEQ ID NO: 281444 - DNA, 1000 bp, Homo Sapiens
ataaaaaagaatatatatgaagggagagactggttatctcctccctatatggttgtgcttatcctcttacggcttacaaatgaatatttggaggtttgctttcacaatgatttcccatcaacaaatatttttagtaggatttttcctgtttctgttagtccttgcagtactcataaatgttttaagctgagcatactgtaatagtcataagtttaatttcattataataaaaataatcaaacaaaaggcctttagaacccaagacaatgagctagttttccctaaagtttgctgaactattaaggaatatgttcttatagcttttgactagaatgagtcatgggaattctaagaagggatggcctagacatttttagctcagttaaattcagcatttaatgcaggtgagttcctgggtcgttttccaactagtctggaacagtctggttctgactcaaactggtataaagcattattttaggttttctctttgccagtttttaagcagttataaccatgtaaatcaagatgtgaggacatctatatgaagtatagtaaagaagtggtgtcagcagatcaatatgtgtgtcctgggtgtgctgctctcttaagtgagactttgtgagactatactttaaatgcattattaccattgcttacattttgggggatttttcttcctccacaaaacttccatttctattgtaatattcttaatgacaatcttttttttttttagcagtgtatgtttgaaacagccaaagatggcgatgaaccaagtgtaaattgatctaagcagcccatgcagtttgtgttgaatcaacaaacagtgtattgttgaagtgaaattattttctgaaatgacttgttagaccagttttgaggacatactcaaaagtagagtaataatggctcctgggatggagaaatatgagatgaacctggaacattctattatggtgccccaaaggaaatataaaaaaaaaaaaaaaaaaaaaaa

SEQ ID NO: 281445 - DNA, 1000 bp, Homo Sapiens
ctagcaatatggagaataatagctttcgattttattagaactgtggaatcgctgaactcagtgctctttagagatcatcatgctgactacccaatctctttatttcacagccgagcacgccaagaaccaaggagcccagggcaggctgcacggcatgccctgtgccccacccacactgcttcctcttctgaatctctgcacccctaagtctggttcagttttgagcttcaggcgtggtctcatccctttggcacttcttttctccaaccaaaagttctcagcttcaaaaaaaaaaaaaagatgagcatgttcaatgacaagaaagtctgtttgatggtaatctataaatttgccacataaagcataaaccataccacaaaaagcttaaaggaatacccactgaattccagctgctgaaggttgtcctgccctttccttgtggtctccaaacacaagcttgttttatgtcacattattttctcccctctttatgggccagattcaatttgtcactacttggatattgaacactttttgcaaattaaagagaaagtcacctcaggcaactttcaaatagaggcttattggggacttgatgatactgcaaatcattaaagaacttaggttctgtacctctgccctcactgatcaaatagaggccactcctttgaagccagcaaggacccatgggactgacctaatgctttttgccttcagcttctgaagcttatcacattactaatgtttgagtctctaatccagctggctagtttaatcatcttgaagtaaaacaatactattaacattgttagaaatgatttatccttctctgtgctgttaccctcttcttgattcattcattttatttataattttgcaattacaagttttcttctcagaatccttctctttctcattgttaaaagtaaagactatatcatcctctttcttttacgataatctgttgctatagaaatagagtttccaaacaggaattaat

SEQ ID NO: 281446 - DNA, 1000 bp, Homo Sapiens
ttagttcaaccactgtgaaaagcagtttggagatttctcaaagaacttaaaccagaactaccattcaacccagcaattttattactggctatatacaaaaaagaaaataaatcactttaccaaaaagatacatgcacttgcatgttaaacacagcattagtcacaatataaaagacatgaaatcaacctaggtgcccatcagtggtgggctggataaagaaaatgaggtacggaagatggctgaataggaacagctccagtctgcagctcccagcgtgattgacacagaagacgggtgatttctgcatttccaactgaggtacctggatcatttcattgggactggttggacagtgggtgcagcccatggagggcgagccgaagcagggcagggcatcacctcacccaggaaatgcaagtgttcgggggatttccctttcctaaccaagggaagccttgacagactacctagaaaaatgggaaactcctgctcaaatactgtgcttttcccaaggtcttagcaaccggcaaacaaggagattctctcccgtgcctggcttggcgggtcccacgcccacagagccttgcatactgctagcgcagcagtctgagatcgaactgtgaggcggcagcctggctggggaaggtgtatctgccattgctgaggcttgagtaggtaaacaaagcagccaggaagctcgaactgggcggagcccaccacagctcaacaaggcctactgcctctgtgggcagggcatagctgaacaaaaggcagcagacaccttctgcagacttaaacatccttaaacatccctgtctgacagctctgaagagagcaatggttctcccagcatggcatttgagctctgagaacggacagactgcctcctcaagtgggtccctgacccctgtgtagcctaactaggagacacctcccagtaggggctgacagacacctcatacaggtggctgcccttctgggacaaagcttccagaggaa

SEQ ID NO: 281447 - DNA, 1000 bp, Homo Sapiens
tttttctgtgctgccggtgtgttctttttttcatttgaatgatttgttccctttaattcattctgtggagaatgggtaatggaagggggtgaagattctacagaatctgctggttcaactttaacttttatttctgaactgttggcagtattattagggcctttttctcttttagagtttgttccagaaagagttatcttgtggacaatttgcatatgtcttttaagcattatttgtgaactatatttcctcttgcaaaggaggcatttgcatgcagttaaattgtattcagcctttgaagaagacttttgttttcgagtcttaaaagattttttaggagaaatagaatccaggaacaaaggttgcccaggctttgttgctatatcaggagtaattgaatccctccttagtcctctatgaacttcatcaaaatgcctccttacattcgcttttgtagcaaatgatttacaacatactggacaactcctacttaatggaactagaacattcttactgcgtcctttagaggattggtttggattctttcgtgtttcaatgtacttttttagttcttccatctttttcttgtgtacttttcgaatgtgacggcgaacacctcgtctagaattgaattcttttctacaaagacaacatatcaactggtgaccaaaatcagaattgtcagaagtttccaagtcagcctgcgactcctgaggttgttcatcagatgtaggtgcaacttcatctgtaacaatctcaacaggagggggctctacagtttccacctctgtatctgtaaccggtactgtttttgactgttcagtgctagtttcctgtatctgaacttcggtttgttcaggagtactgcttgactctgtgacttcaataggattatcagtcctcgaaatatattgaaatactgcattttgattagtttctatgggttctagcttaataatatattctcgtttgtccacacttggatatatggcttctagga

SEQ ID NO: 281448 - DNA, 606 bp, Homo Sapiens
  misc_feature (527)..(527): n is a, c, g, or t
ccggcgtggggtcctggtgagtgggcaggtgcagggccatccacgggcacagggacccagctgggcgcatggtggcctggataggggtggtgtgggtgtctgcgtttgagggccagcctctggatgaggcatcggaggagcgggactcccaggggactgccactccacagagggggataaccactgagtcaggctgggcctggtgcctgcgggcgagggtgggcggtggtggccacctcctccaccgagtcttctctctgccacagacccaagtcccccggaccctcgactgtgaggagcgtgtgtgcccaggaagccctggaaaccctacagctggagaacgctgagcctcctctcacatgcggcaggccgggcagtggaggtagggcgggggctgacctgggctgtgggacctcggctaagcctccagcaggagagctcaggaggcatccatgcatgtgtggggctgcaggctccctctgctcattcattcattccttctgtctcctgctcattcattcttcccncaactccccgccccgccccgctactcattcatccttccttccccaccaccccgctcattccttgccttctctctggcca

SEQ ID NO: 281449 - DNA, 271 bp, Homo Sapiens
actgcttttagtttttaagttgcagtatatacacacgtattctgtgggggaattatgaaaatatttaacagagagcaatcgaagaaccaaaaaaccacaaaagaaagtcacaatccaattgacccaccggaagttactctagtctaaatattttggcaattattaaataagcacatcgtagacacacacacacacacacacacacacacacacacacacacacacacacacaaacaaaaaggttgaccggcattataaaaataaaacagct

SEQ ID NO: 281450 - DNA, 1000 bp, Homo Sapiens
tttgaaattattttgtggctttttttgtaaatattgaaatgtagcaataatgtcttttgaatattcccaagcccatgagtccttgaaaatattttttatatatacagtaactttatgtgtaaatacataagcggcgtaagtttaaaggatgttggtgttccacgtgttttattcctgtatgttgtccaattgttgacagttctgaagaattctaataaaatgtacatatataaatcaagtggagtcatttgattgttgagattcgttgagattaaactttaaagcattaaagtgcaatcatcctgacaaagttttgtacgcagttttcataaaatatgtgcagggctatcagatcacgctaggatttacatgcttcgagattcaacagatattaagaattttcatacgtgtgatattttctcattttagtcttacaacctgaggtctctatttaaattgaaaaatagatacagagaaggtgcttagtatgtatgagctgggtgctgtcatgtgggtgaaacattatgcatgcccaattggtaccgtccagaccactggaacccaaacagaggctgagagttcttcagcttgaaacaaaaggaagcaccctgaatcacataatcttattaagaatgaggcacccacacaccctcagtcatgactgtctttattgacgtgacatctacacctgcagaaatgtctcctgaaaggaaagggaaggggtgaaaagtgacctgtaatgaaaaggaatccttttaaaatccagagggaattgtgtggcaaggaatgcgtcaataatcagtgaaaaacagacccacatttcagtcaggcaattcccattattttattgcagacaggaatgaatgctaattgaccacaaaacaaagaagtcttttctttccaaatgttttcactgtcatttagcctttgtcatgtgtgagaaatttgcgttagaagcagttgacagtcccctgtgttaagagtctagctaattttcctc

SEQ ID NO: 281451 - DNA, 1000 bp, Homo Sapiens; identical to SEQ ID NO: 201589

SEQ ID NO: 281452 - DNA, 1000 bp, Homo Sapiens
aattttaagtgcaatgcatatttggagccaatgatgagggataacttcagaaacgtagcatcatcatctagtgctttcatagtcctttcaacatttccagatagttttaatggcctgctcatggaggcaatgccctaattttaacatatctcttcacaactctgatttcttgcttcctaacattaaatgtcttcaaagcttctttcaccactaattccttatcaagaggataagccagtttattctttaagaaaaactagctacacaaaaccgtaagtcattccaacataaatccttcactatcctctctctatagatttggttttgattcctcctgctgaaattcaaccttctttcttcagctatccacacgtcttaccctctaacttccctcaggagtgtctattagctcccattacagtgaccacagtaatatagtaatcccctgctgttctcactctccacttcctttacactgcgttttaagtctcttcatattctttatcaccttgtatcatgcatcggttttcttagttgtttattttatgttgccttcataaattccatgagagctcactgccgtatctttagaacatggaacagtgcttggaacataatgggcattccttaaatagctgtagaataaactttcaaaatcaacaataatgtatttgccaaatccattggcttctctgccattttatcttgttcaataccactgcgatattccccttcctttttttttttttttaaagtctgtaaccctttagcttctgtaatattcctagttttttattcctctcatgtgtcaaaatcatcagttgaggcttattgttttctctttctcactctgacctcacctttgtttacatctcatcttctggctttggctatcctgttttttatctctgttccaacctgtatttctagccctactacctggacatgacatgtggatatctccgtatgaccgcagtttccatatgactttgcaaattca

SEQ ID NO: 281453 - DNA, 1000 bp, Homo Sapiens
  misc_feature (255)..(255): n is a, c, g, or t
  misc_feature (593)..(593): n is a, c, g, or t
gtgtgcacatgcccgcagagatcctttggtttccaatagtttaagacaaattcaaggcaccaccagagggattgacttgcagttgaattgtggtagtttctcctggtctgcttaggaaaaaaaaaagtttttccaagtcgtttcatgatacttgcttaatttcccagaataaaaataagtaatgattcttctgaggtggctctgtatcctaaatcttcaccctcataatcccaaggagagtcctgaaggtatccngaattcttgtgatttaggtcttaaaaatatagacatgtattcccactccttgatcaaacattgcgcccttcatgcctgggctactcagggatgcttcccctagtatcctcccttacccccattcatttacctgacatcacaggagtctaccaaagttaaagcacctttgtgttttgtctctcctggagggtgctaagctccttctgatggactacagaaaggcgttcatttttgaggactatccaacgttagtcgcatcgtttctctgacagtgaagtcccttaaaagtttgtacatgctactgaatggtggggtttacaagttattataaaagtgcnctggagatatccacatctacaactcaggattcctttgttctatttgttcagttgtgcccccccctgcctctcccacaccaaatacgtgaatccgactcctaacatctcatctctattctacttaaagatggtttctttactgggatactcaagttaaattacattcattaggggatatcaccactgatttcacagaaatacaaactaccatcagagaatactataaacacttctatcgaggtaaattagaaaatctagaagaaatgtataaattcctggacacttataccctcccaagtctaaaccaggaagaactcaaatccttgaataaaccaataataagttctgaaattgaggcagtaattaatagcctaccaacctaaagaagtccaggaccagatggattc

SEQ ID NO: 281454 - DNA, 1000 bp, Homo Sapiens; identical to SEQ ID NO: 114771

SEQ ID NO: 281455 - DNA, 1000 bp, Homo Sapiens
  misc_feature (746)..(746): n is a, c, g, or t
  misc_feature (763)..(763): n is a, c, g, or t
  misc_feature (777)..(777): n is a, c, g, or t
  misc_feature (839)..(839): n is a, c, g, or t
aagcatgagaaaccaccacagtagctttagaatagatgcggtcatattcttctttggcttctggttcttccagccctcatggttggcatcacatatgcctgcatgccattaacaccagctggccctacccctataatgatcctgtgtcctaaattaatatacaccagtggttcctcctccctgttaaagactaatgctcagatgctgtttacggatatttatattctagtctcactctcttgtcccacccttcttctcttccccattcccaactccagctaaaatatgggaagggagaacccccaataaaactgccatggactggactctattcattcattcattcatttatcatagatttattcagtctctgctaagcactagatacagcttttcagttccagaactcacagtctaatggacttcagagctattttgctcgactgagggataaatgctgactatggctgggggagggataaaaacctttgacctgtaggtgctctgaggatggagctggagcagggactagtgtgttgggagtctaggcatatttggaaacataagaaatgacttctgtatcagcatgccttctgtgttcgacaattgaaccaggttgggttgtaggggaggtgggtgtccagatggcaccaatcagacagcatgatcagtcatcatatgggattgctgctgaaagcaaatatcagacgatggtgtactgggctgggtgagctctatggaggttnttgggcaagtgggaccnttagagggccagantgggtcagtggtaggtaaggcaaagggaaataagttgggtccaaatgggggggtcatctccnttcaagtgcatgggtggtggtcaaggcccttgttcaatgcctgttcctgtttttcagagctacgaggaatatttgcctgaaagaatttaaacctcaggagatgctgccagtcctactcgtgacccagttcttttcagaatgggtctagagactccaagctt

SEQ ID NO: 281456 - DNA, 1000 bp, Homo Sapiens
ataggttataggtaaaatctctgaaggatcatctatgtattcaagtaattattttttagataataactgtcttctggacttggtcttgaagtctgtacagattcagcctcagtagtagcgaactgcactgctgtttggtttggagtacaaattagacttatagtcctcctggaacttgagttattaaaatcataggaataaaattatgggatctcaacaaagggtcgagggtttgaggcttaaacaagccaacatatgaatatatgttttgtctcgctatactgcacttacgctatccagttgcaggtaattttttgtctgctagtagtgttctagattatgtctttccaaagcgctgaggctgtgcacctattctgtagttgcagctgatgcctgaatgtatcctagctgacaaattattgattaataagaacttgaatttctggaagattcttactgttaaccaaattttgagcaaggagtctcaaaggtaattctgaaccagaattacatgttaatgaacagtgtaccttttaacagtgtaaatcacggaatatccgtgaagggatttcttaatttattttttaccggttgattgaaatatcagttaaaggttgccagcatggttgcagataaactgatgtttgaaattcgctgaaatacttaatgtggaataggataatatacttccaatgccctcaaggctgtgaccttacagccattttacatagcacatcattcctcctatagggatgaactttttcctggcacgaaaagtagccgctctggttgaagctttgcttattgtaacaggcttttatttccaggtaatatgtcttggaagacttaattctgattagagatatagatattactggaaactaattgttttttttctattgtactctgctttatcaaagaagtaaaacatttaaatcgtactacagaaattaagatgttgtcttgcgatccttaataaatgaatgatttccctttaata

SEQ ID NO: 281457 - DNA, 1000 bp, Homo Sapiens
gaggaagcagcagcctcaaagttctggaagctggaagaacagataaacaggtgtgaaataactgcctggaaagcaacttctttttttttttttttttttttgaggtggagtctcactctgtcgtccaggctggagtgcagtggtgcgatctcggatcactgcaacctccgcctcccaggctcaagcaattctcctgcctcagcctcccgagtagctgggattataagtgcgcgctgccacacctggatgatttttgtatttttagtagagatgggatttcaccatgttggtcaggctggtctcaaactcccaacctcgtgatccacccaccttggcctcccaaagtgctgggattacaggtataagccaccgagcccagccaaaagcgacttctaagcctgcaagggaatcgggaattggtggcaccaggtccttctgacagggtttaagaaattagccagcctgaggctgggcacggtggctcacacctgtaatcccagcactttgggaggctaaggcaggtggatcacctgagggcaggagttcaagaccagcctgaccaacatggagaaaccccatccctaccaaaaataaaaaattagccaggtgtggtggtgctcgcctgtaatcccagctacttgggaggctgaggtgggaggattgcttgaacacaggaagtagaggctgcagtgagctatgattgcagcactgcactgaagccggggcaacagaacaagatccaaaaaaaagggaggggtgaggggcagagccaggatttgtttccaggctgttgttacctaggtccgactcctggctcccagagcagcctgtcctgcctgcctggaactctgagcaggctggagtcatggagtcgattcccagaatcccagagtcagggaggctgggggcaggggcaggtcactggacaaacagatcaaaggtgagaccagcgtagggctgcagaccaggccaggccagctggacgggcacaccatgaggt

SEQ ID NO: 281458 - DNA, 1000 bp, Homo Sapiens
acaaatggcctcagcctgcatattccaaccacccagcaaaacaaacatctagtaactaccgggtcagcaagagaaaatcggaggccctagccatagatagatcaccttatcatttctccagcacattccaggaaggatctcaattcgttctgtcccaatatacctctacatcctttgttttgatgatcacatagaattcattgtatgcatatatcattatttatataactaagcccccaattttgaacaagaggctacatactgaaaatcttttatctaccaagtcttttttttcttacaaacccatccaatacagttgcactgtatccgccaatacagttcatgcaactgtatggaaagcaaactctagaagagtatttgatagctccataagaatattaaactcttatacttctagagcgtaaaaccccagaaaagtattttgtcagaaaaaaatcatgtttttgaaatagtaggttttaaaagaaaacaaagagagttagaagtaagaaaattcaggttatcaggggcttgatatcttttttttgtgactgtagtcaggttacccaggcctttgtggatcaatttctcaaacaaataacagagatgaaaacaactgtcagtagctactgtcacaaaaataatatgataaacatcttttcgtttcctatggctgccataactaattatcacaaacttggtggcttaaaataacagaaatgtattttctcacagctccagagtccagaattccaaaatggaagggtcagcaaggctgcacgccctcaaaacactcttggagagaatcttttcttgcttcatccagcttctgatggctctaggcaatcccccgcttgtcactgcatcactccggtctctgcccccatcttcaaatgaccttcctctgtgtccctgtcttctcttctgtctcttataaggacacttgtcattgtacagtatttagggtccacatagataatccaggaggatctcattttaa

SEQ ID NO: 281459 - DNA, 900 bp, Homo Sapiens
gccaccacgcccggctaatttttgatttttagtagagatgggctttcactgtgttagccaggacggtcttgatctcctaacatcgtgatccacccgcctcggcctcccaaagtgctgggattacaggcgtgagccgctgcacccggccttttctttcttttttttaaaaaaagtcattttctgcaacaaaacccacattctttttttgtgtttttttttttaaggcagggtcttgctctgtcacccaaggtagagtgcagtagctcaatcacagctcactgcagcctcgacctgcctgactcgagggatccttccacctctgcctctgcagtagctgggaccacaggtgcacaccaccacaccgagctaacttaagaaaaattttttttggtagagatggtgtctccctatgctgcctaggctggtctggaattcctgggctcaagcaatcctcccacccaacctcccaaagtgctgggattacaggctgagccactgcccccaagccagttactcagtttttctaaaacttgggtgcctgggggaggctgacacccttcccactcctctgaaaggcagtttcctaagggaagggtcttctgctgctcaccacccttaacagccctgtgtccccagtgctcagcccctgaggaagggaaggcgtgctgacagggtccatgtgatccatgtccagtggctctggtgacagcagtctgaagtcaactggctgtgagaactcgagtaaggccagtcccgatctggtcctcagtgatggagaaaagcccctcttaacctccaattcaatgatcctaaaagagcaggtgcttcgggggtgctgaaactgcgcttttggagggggcttttgggaaggccgggctggggactcaggtctggagggtg

SEQ ID NO: 281460 - DNA, 1000 bp, Homo Sapiens
gatcttacagattgtagatgaactcacttgttcaaggtcactcagtgaagggtggagtcgggggtgaatctgagcagttggcatcagaggtcatgccttatcgtatcaaggacatgattttcaaagcgagtctcagccctaggcacatcagattacctgggaacccctacagactctagactgagtagatgagactctttgacaggtggtgcctacatttgctttgttttgttttttgtttctttttctttttctttttcttttttaattcattttgtctttttgagacagagtctccctcagtctctcaggctagagtgcagtggcacaatcatagctcactgcaacctcaaactcctggccaaagtgatggcattaaaggtgtgagcccctcctcccagtcccgattttttttttttgagatggagtctcactatgtcgcccaggctggagtgcagtggcacaatcttggctcactgaaacctctgccttccgggttccagcgattctcctgcctcagcctcccgagtagctgaaattgcaggtacgctctaccgcacccagctaattttttgtatttttagtagagacggggttacaccatgttggccaggctggtcttgaactcctgacctcagatgatccacctgccctggcctcccaaagtgctggggttacaggcgtgagccactgcacccagccccaagtttttaaatataatattgttgaccagaagtacattcactcgtgtaaaaaataaaatacccagtgagaagtaatggtgctacatatgcccttcatctgcccagtttcttcatgtgtataaaggtaaatactttcacacctagtgcatcctttcatagtatatttagccaaacaatatatgtaattagtcaccctaattacatattagcatgcctacattacaatgagtgtgcttacttgccactcctgtattttcatggctcatcttaaaatcacattaaattttcagaatttg

SEQ ID NO: 281461 - DNA, 1000 bp, Homo Sapiens
tggctctctgggggctctgcatggcatttccaggggttggtggatcagggattctgtccctcaggagaatgtgggcactagcccaaggccactcacttctgtgtacatagccacctgagggcccaggaatggagggggccaggctacagctggacatctggcactcggatgggctctggagcccccaggcctgcagcatctgcccagggactgccctggcccttggccatttcctcagggacccacagctccaccagccggcccctcccagtgctggaatagacagttcctcagtccacatctgccaaaggcggcactagaaggcatcctgccttttttactgcgttctggaggtggggtcacaaagcactgctcactgcataaaagggacagcatcctgcccctggcagccctgcctgaccagctccgcctctcccactgctatccaacctgtacaccctggtgaccatgtccaggccagtggccttaaggactgtctctgtactgatggctccacatctacctctccagccagactctcctctgaactcgggcctcacatggccaactgctacttggaacaaatcgccccttggctggcagatgtgttaacatgcccagaccaagatcccaactcccacaacccaactcccaggtcagatggaacctcttcttcccaggcccttctgttcctctcctcagcccctcccacctcccttcagaataagtctagactcttatcgctttcaccaagcctgcgcccagcatccctgcacagggattgttaggacagcctgacgccctgcttccaccctgccccaagatgcccctgctctgcagcccggcgcctccaggcttctcacctcctgctgctcacagctcagcctcactccctccctccccgcctctgctccagcctcagtgcaggtcccctgctcccatcttctggcagcagctgcccgacctggtccctcttcatctgtccccattccttcacccc

SEQ ID NO: 281462 - DNA, 1000 bp, Homo Sapiens
caccgacaaattaagtacatagaaataaattatatgtacaagattattattaggcaaacaaaaaactctaaaaatttataaaactcagataaataaatatttaatgtgcatacaagaaaagattcaatactgtccagatatcaattttttctatgttgatctattcatttaaaaacaatctcaattagaattccagtaagttattatataaataccaacaaactaacttttaagtttatacaaaaaggaacaaatatacagaatagctaatataatcttgaagaacaaagacaaacctgaaggactaaaactatgtattctaaagatttattataaaagtacagtcaccaatcagtgtggtatttgtgaagaaaaagaccagtaaaaaattgtaacaaaataagcagaagtatactcaaacagtcaagtaattttgataagaatcaaaaacaataaactggagaaaatatttgtttcttttaaataaacatctgcctttataacaaatgacattggaacagttggatatgtaaagcaaagaaaaaaaatctggatgcagatgttacactctgtatacaaattaactcaaaatggattatagacctaaatgtaaaatggaaaacaataaaagataactcctagcatgtaacatctccatgcctttgggtttggtaatgatattttaaatccagcacaaaaaagaaaaatttatgaaagaaataatcttcattaaaataaaaatgtctgctctaagatagtaccaaaaataagaagataagccacagacttgggaatacatttgcacaaaacatttaagataaatgactgcatctgaaatatacaaaaaaaatcttaaaattcaacaaaataaaacgaacaacctgattaaaaatagacaaaatatctggacagacacttcaccaaaaaagatatacaaataaaaaacaaacatataaaatatgctgtatatattttgttatcacataattaaaaattaaaa

SEQ ID NO: 281463 - DNA, 1000 bp, Homo Sapiens; identical to SEQ ID NO: 114772

SEQ ID NO: 281464 - DNA, 984 bp, Homo Sapiens
aactgtgtggtatcttaaatgctaaattaggtggtggtaataaaaaaagaatcacctctaaccaggtgcagcaaacacaaaatacagtaaacaatgaacatatccttgtgctgtaatttgttatcaaaatattatttctgggaatgtgggatgtccactgctttttttccccttcttctttctcttcttcttttctctctctctttctctctctctgtgtgtgtggtgtgttctccagtctccagagacatagactagaattttaaattaaaatatttagacaactagttacatcaaacttctcccacaggagtggaaggaaagtccaatggagaaatgttttgtaaattaaagacattactgcacaagcctaaatgatgttactggggattttatcttttacctggattcagaaaagtcatcagtttccctctcatcaacaatttattcattcatccattatatttttatggattgatatgcccaacattatactaattaatccaatttataaggtaatctataatcctatttaggttagaagggtttttggcaaatgttcactctggaaaactgggttgtaagaatattggcgatctcaattttatttctgtgtatgtaaaaagaaaggcttcatatctaaaataactttacctaagtatacaaagttgtttcagggtaacaaaagagcgaaaaacaaaactgtaaaagggccaaggacagaggaatgggcaaatgaaggaagggcggagaggcagaacaagagctgaaggagaaaattctgtggaggggtgtgggaaaggggtggagctggcaaccttgccttaaaagctgagtgatagcccatactaaagactggttgagccgggtagggaaagcagcctaaagcccgggacaggcacacaggcccaggtgtgtaggccacagcagccgcagtcctgaaaggctgcaacacccagacctccaggagagaccaggcccagg

SEQ ID NO: 281465 - DNA, 1000 bp, Homo Sapiens
attatacatattttaaaactttgttgttaggcccagtggtattcctaaaataacctgttgtaaagttctggtttagtggtatgtagctgaagttacgtgcgtctattttttaaaaatagaaataatgtggtgaataaactgtgattagcaacacacaacttgctgaaacaacggtttaccatatcattcaaaaatggtgtatcttttagcatctatatattaaaccatcatgcccttagggtcctaagaacacaaatagtgggacattaaaaaaaatgtgtagattaaccaagaggtaggatctttttgttttgttttgtttttacatgcatgctttcagctaagctgacattttggtcttcagagtcattgaacctattttattaaaaaatcttcccatcacagtaccctgttttaatatttttttgcccactaatgtgacataactagatcaatatctatctataggtatgtatcacgcctgctcaacatcacactgctaagtggcagctcctgttatttggaaatggttataccacagcagtgttaaaatgaatttaaacgcagtaccaatgtcacatgcaatggaattcaagagtgaagcctgttgttggaattatgtaactggccgtttaaatcccagttgtattaagtgccaaagtgcattgcaaaggacaagttctgtttcacccaagtggtaaaaggcacagtcaaaagaagtcgtgcatttttttagctgtggtaaaaaaaaaaatacataacctaaaatgtaccatcttacagttcagtagtgttctgtgtatccatgttgctgtggaagggcatgcatttttatgttgcacgtgctttatgaagactaatagggatcttttttttgaatttctccagtggtattctctgatttgggggtaatatttgagaacagccttatatttttcctcttagcacaacctaaatagaatttgaagcttctcctatgacagactctgtgtgcaattta

SEQ ID NO: 281466 - DNA, 1000 bp, Homo Sapiens
agtggtgcgatctcggcttactgcagcctttgcctcccgggttcaagcgattctcctacctcagcttcctgagtagctgggattacaggcacgcaccatcacgccccgctaattcttttttttttttttttgtatgtttacaaaatagggacggggtttcactatcgttggccaggctggtctcgaactcctggcctcaagtgatctgcccccctcgggttcccaaagtgcacctggcctctctccctgcatctttatgtgcctgcaacaccaagagggagctcttggcccctgggttaaggtcagggctccagaagcccagggtcaaggctatggccgcatcccaaggacgtgcatccctgcaagaggctgcatcagacaggcatggaagaggcgccgctggggcctccttgaattcctgctgggaaaagcaagtggaggtgctccttgaagaaacagggggatcccaccgatctcaggggttctgttctggcctgcggccctggatcgtccagcctgggtcggggtggggagcagacctcgcccttatcggctggggctgagggtgagggtcccgtttccccaaaggcctagcctggggttccagccacgaagccctaccgggagcgcccggccccgcccctccaggcctggcactcgtcctcaaccaagatggcgcggatggcttcaggcgcatcacgacaccggcgcgtcacgcgacccgccctacgggcacctcccgcgcttttcttagcgccgcagacggtggccgagcgggggaccgggaagcatggcccgggggtcggcggttgcctgggcggcgctcgggccgttgttgtggggctgcgcgctggggctgcagggcgggatgctgtacccccaggagagcccgtcgcgggagtgcaaggagctggacggcctctggagcttccgcgccgacttctctgacaaccgacgccggggcttcgaggagcagtggtaccggcggccgctgtgggag

SEQ ID NO: 281467 - DNA, 1000 bp, Homo Sapiens
atttatcaagttcttcctatctgttgtcatacgtctggggatataaagacatttgagtatagttcttgcttcaaggagctcacaaggtggatttatcagacagtaattcattttctccgatagtctgctcagagctcacagtgattatcagacagtgattttgtaaactgcaaatcaccacctccccaagtatctctatttaactgaggcagagggattgtgagctctagaacaaagtctccttgggggggaaaaaagttcatcttcaacccaaattcatttcaagtattaaatggcacagagatatcagttgtctctggaactagaagtaagtccactgacaggccagcatagtctcagagctgtcctgtctatacaccatatagccagttagacgtaccgccagttccttcctgctccctgaaatgaccagtgcctccctgaggacaggcacatcaggtctcagccaaccttcccttccaaacataactcagccagacccctctggtctctaaatagtatctcttctctttgtctttttctgtttcaggcctccagttaccaactcctgtctggtttcatgtccttttctatctggcagtgggaataatgtttttagtgaacactgttctctgggtgacaatacgtaaggaactgaaaagaaagaaaaagtggaatttagaaatctctttggattctggtcatgagaagaaggtaatttccagccttcaagaagacagacatttagaagaagagctgaaatgtcaggaacaaaaagaagaacagctgcaggaaggggtgcaccggaagagccccaggggccacgtagcagcggctcagtgggtggccatcgatctggaccgtcccctgtccacttgctccccgtgagcactgcgtacaaacatccaaaagttcaacaacaccagaactgtgtgtctcatggtatataactcttaaagcaaataaatgaactgacttcaactgggatacatttggaaat

SEQ ID NO: 281468 - DNA, 1000 bp, Homo Sapiens
agaccagcctggccaaacatgtgaaacgctgtctctattaaaaatacaaaaattagccgggcatggtggtacatgcctgtaatcctagctacttgggaggctgaggcaggagaatcgcttgaacctgagaggaagaggttgcagtgagccaagactgagccactgcactccagcatgggtgacagagaaaactctgtctcaaacaaaaaaataataaaatttattcagtaggctggattctacacaaagtaatctgtatttgggccatgatttaagcacatctgaaggtatatcactcttttcaggctataattatttgggtaatcttcattctgagacaaacttaatctatatcatttactttgcaacagaacaaccctacagcattttggttcccagactaagggaactaatatctatataattaaacttgttcatttatcattcatgaaatataaaatacttgtcatttaaaccgtttaaaaatgtggtagcataatgtcaccccaaaaagcattcagaaagcaatgtaactgtgaagaccagggtttaaaggtaattcatttatagtttataactccttagatgtttgatgttgaaaactgctttaacatgaaaattatcttcctctgctctgtgtgaacaatagcttttaatttaagattgctcactactgtactagactactggtaggttttttttggggggggtgggtagggatatgtgggtaatgaagcatttacttacaggctatcatactctgaggccaattttatctccaaagcaataatatcattaagtgattcacttcatagaaggctaagtttctctaggacagatagaaaacatgaattttgaaatatatagaacagtagttaaaatactatatatttcaaccctggctggtagattgcttattttactatcagaaactaaaagatagatttttacccaaacagaagtatctgtaatttttataattcatcaattctggaatgct

SEQ ID NO: 281469 - DNA, 1000 bp, Homo Sapiens
tttttagtagagacaggatttcaccgtgttagccaggatggcctcgatttcctgaccttgtgatttgcctgcctcggcctcctaaagtgctgggattacaggcgtgagccaccgcgcccggccagatgcttttgcaattaatgtacattaagatgaagtcatatgattagagtcggctctaacccaatcattggtgtccttataagaagagatagcgatacagagactctgtggcgctggggagaaggccgcatggtgacagaggcagagattgcagtggtacagctataagccaggaactgccgaggactcccagagcccctggaaactggagagagtcctggaacaggttccccctcagcctccagaaggaggcacctgttgatacctcagttttggacttccggcctccagaactgtgagagtaaacttttgttgtttgaagcccactcagttatgggagattgttataacggccctgctggcatcttggaagccaacacacgtgtcggtgatgacctgactaacgccttccttcctgcaggaaatgcatgttccacacgagggtctcttccctgcccagcactcacaatccccgtcgtctcctgggctcccagcagggagctgcttttggcagtaggcgtggtccctcccgcgctgcatgcgcctcccgcgtgccagagctgctgccttgacactgctgggtctccgcattggcgctgctggacacttgccctggctggtgcttggcgggcacactttatctgatttttttttgaaacggagtctcgctcggtcaccacactggagtgcagtggtgtgatttcggctcactgcaacctctgccccacccggttcaagtgattctcctgcctcagcctcctgagtagctgggactacaggtgtgcgccatcacacccagctaatttttatatttttaatagagatggggtttcaccgtgttggcccaggttggtctcgatctcctgacctcctgatc

SEQ ID NO: 281470 - DNA, 1000 bp, Homo Sapiens
gcccacatcctgaccccattaccaaggcccactccattgtgggccctctccccacctcctccagactccccttgggattccccattgcaccccctctcctctgatccaaagtccctaatcacgtcaccctgtccacactcccccacggctcctgtctgccaacctctctgggtctctgagccctccacacccctctccccagccctgggaccccgctcggcctccctgctctccctgcagactgaactccttctggacctggtggctgaagcccagtcccgccgcctggaggagcagagggccaccttctacaccccccaaaacccctcaagcctagcccctgccccactccgtcctctcgaggacagagaacagctttacagcactatcctcagtcaccaggtaagacatccccccaggaggcaaacccaggcctcctggtctcttggcccctgttctctttggggctctactcctgtttctccctaggcaccccatcgccttcacaggtttcctatatgcctccccataccaacccttgatcctctcaagaacctcctcctctcagaccctcaccaaagctctccctctccctccactcctccagtgccagcggatggaagcccagcggtcagagcctcccctccctccaggggggcaagagctcctggagttgctgctgagagttcagggtgggggtcgaatggaggagcaaaggtcccggccccccacacacacctgctgagacttgagccccaaccagcccttccttgccactggtctcaaagctgggcagcccattgcatgccctcaactcttgcttggcaggggtaccagagactgaaagacacggcacaaatctcaatattcatctcccacatcaccttccctgggaactggacagggtgaaagtcctcaaactctgggaacaggcgagatggaacagggatttaactccccgcccacaggtccatgggagcttgaggcagtaagggggatc

SEQ ID NO: 281471 - DNA, 1000 bp, Homo Sapiens
cacctcagcctcccaaagtgctgggattacaggtgtgagccaccttgccctgatgggaagattttacttcataagctgcctgatgttcacaaaattattctttgtaatacatatatatttatgcatataaattataattttatatgtataaaataatgcatttatttttaaatttaaaaactcttccctgacccagctcactccctcagtgttccacttctctctccacttaacaaaacttctcactgcctctactttctcacctctcattcactcttgaatttctctcaatcaggctctcatccccaccactttacttaaaccacatgtcagagtcacaaatgacctccaagtttctaaacccaatggtcaagggtcagtttgtggcaggccaattctccctgacagtcacacagacaggcctgcatagcaccccagttacacagacagatttccacagcattgccttaacattgagcaaatagttaaacctaggggaattggtgtacagacatcaaagctagaaatgaaacacatggtgagtaagagccttgcatgggcttctcccttgctggagcaagtcaaaataacagagacagccttacattcctagtgccaggactcgtctcgggtcgacgatatctgagacaagtcaaggtaacagaggcagctgtttgaatagattcactggacaatctaaggcagctctccgcaccaagctgtaaaggagataagatagaaataatcactctggtaccacagtaaacaggccttgaaggtactggggccctcacagcttaatcagacttagcaagaatttttttgcctctgaccctctagttgaaacaaaattagttactgatagactttggtgaatgccatactgcatgtaggcatataacctaaacctgtataaacactaagaaaatagtaacactggccgggtgtggtggctcacacctgtaattctagcactttgggaggccgaggtgggtggatc

SEQ ID NO: 281472 - DNA, 351 bp, Homo Sapiens
ggtacctgagatgttttgatataggcatccaatgtgaaataagcacatcatggagaatggggttatccataccctcaatcatttatcctttgagttataaacaatccagttacactcttttaaaatatacaattattattgactatagtcaccctggagtagctaggactacagacgcatgccaccgcacccagctaatttttttattttttgcattttgtagagatgggggtcttactgtgttgcccaggctggtcttgaacccctggcttcaagcgatcctcttgtctcggcctccccgagtgctgagattacaggtgtgagccaccatttattacctaaagcatgata

SEQ ID NO: 281473 - DNA, 577 bp, Homo Sapiens
atattggcctctggatgcattctctccctctcatgactcatttctgcattcatcactagcctcttctctgcctgggcttctgccagcggccctagagcaacctatggtattccacagggacccactactggcgtctggacaccagccgggatggctggcatagctggcccattgctcatcagtggccccagggtccttcagcagtggatgctgccttttcctgggaagaaaaactctatctggtccaggtgtgtattgggggagaggcttgaggtagagactgggacaagcatatccaactctgtatttattaccatcctttgtcctccagggcacccaggtatatgtcttcctgacaaagggaggctataccctagtaagcggttatccgaagcggctggagaaggaagtcgggacccctcatgggattatcctggactctgtggatgcggcctttatctgccctgggtcttctcggctccatatcatggcaggtgaggggcttctgggggcttagagggcagcttgttctgctacctgtctgtggcatagatccccaccagggcatgagaaggcc

SEQ ID NO: 281474 - DNA, 1000 bp, Homo Sapiens
tgaaaggtatatgactgagcgtagcatacaggttaacctgcagaaacagtacttaggtaattgtagggcgaggattataaatgaaatttgcaaaatcacttagcagcaactgaagacaattatcaaccacgtggagaaaatcaaaccgagcagggctgtgtgaaacatggttgtaatatgcgactgcgaacactgaactctacgccactccacaaatgatgttttcaggtgtcatggactgttgccaccatgtattcatccagagttcttaaagtttaaagttgcacatgattgtataagcatgctttctttgagttttaaattatgtataaacataagttgcatttagaaatcaagcataaatcacttcaactgctcttctgtagttcttggatttcttttcccttttgactttgaataaatgtaaaatcctttcagccagaaaaagtaaaatagaaacaacctgtattaaaaatcttccatagaagcaaatttgccacccaactgaagcacacctctttcagcatcaaaatattttagaaatcttaactatttttggatgggaatttgtcttaaagagtgtaaatgcttcacggccttctgaaaggacaaatggaatatgtatgactctttttttaggggagccttctttaatcaaatgcagttctgggccataagacagtaagatcctcaaggaccataatattagagctactatattgaagtcagctgcgtggcaagtgccagattaggcagtctacctatattcattcatttaatcttcactgaactccatgagcattttcttcatttcacagatgaacaaatggaggtgcaaagagattgacagagtagaagtcagacaaaaacagcatctagtacagtatgtccaggttatagtgattattttaagatcaaatagggagctgttttctattcaatgtcagaaaccatcaggaccaccctacattctggttactcaacagatatctactgagag

SEQ ID NO: 281475 - DNA, 1000 bp, Homo Sapiens
tcatacacagattcattgagccataaacgtttactgggggcctactatatatgtggcattgataggtcttgaggcccaaatgtagagaaggacatttctgttcaaacacctgaaccagagaccctctcaaaatagtgcatcaaaaatgcatttttcagcctaggtgcagtggctcacacctataatccagcactttgggaggctgaggtgagaggatcacttgaggccaagaggttgagactagccggaaacatggagagacctagtctctacaaaacaaacaaacgaaaacgaaacattagccagcatgtgctgcacctgtagtcctagtagctactcgagctagcggagactgtttgagccaagaggttgcagtgagctatgattgcgctactcattccagcctgggcaacagagcaagaccttgtcaccaatttttaaaagaaaatacaattttcaatgtgtagaagaaaatataaggctccaatgaatgttgggtggctagtcccatcttcacgatcctatcaatggcaaaaatcttaggataaactcaaattattgcttcccacgagaatccaaaggacgctgatttgagaacaggctatgcgggagtgatggtgtgtccgctggggtatcacaaaagcttaagcacaccagttaccaagctttctctttttctgtcttgaactactgtcccgaatctcatttctcgagttgacgctcagcatgattcaatttaagctccaaccttgacttaaaccctttatcatgcgtatccagaaagcaaaaaggatcataagcatcttactattttgagtactctaagctgttaatgaaagtatttgcccatgttcccaaagagacaaaaccctcgcccagcttcctcggcttaagtggtgacagcaacaatctttgctctttcagggcacgaaaggtctctcacccgatttcaaagaaactatgatatcttccttcagaagctgctcatgcaaatgaattc

SEQ ID NO: 281476 - DNA, 1000 bp, Homo Sapiens; identical to SEQ ID NO: 114773

SEQ ID NO: 281477 - DNA, 1000 bp, Homo Sapiens
cctgttgattgatggaaagtgtctgcactgacacttttcgtcagtagtctgtagtttcgtggcctcttttgattataactggggtcaccaagaaggtttacttaattaaataccgcatttctaagagaagatactttgtgtaagaaaagatgccacatttagtggtttaacttttgtaacttcacttgatagtttttaagcaattagaatggagttagggaaagaacatatcatactgaacaaatgtcattctagtttagatagcatttctaagataactgatactaatacttgttttcttccctataacataaaaaacttcactgttaagtcatgtcccttgaaacatgatagttacatacacagttttctctccacacataaataacaccactaaagttgttttgtaaggttccaaactaatatggcatatatcaactctacagtttcaaataaatgactttttaattgtaaaagattagttgaaaaactgtatgaatgtgaagatcacatgcttagtcatttttatgttcattccactttgtatatcttttctatttattgacttctcatgttctagagagtaggacttttattccgtgtacctgatatatatacaattaaaatatctgtgtaattatgttttaatgaagtttatttcaacagatattttatgaaatgcagtttaaccacagtgaatgaattttagctttgcttttgaaatacattgtaagatttgacttgaggtttttgacacttaagtacatgcttaatgatatattttcaaaagtcatcagtctacttacataaactttacctaatttttttcactttaacaaaaacataactatgcccttgttttttcatactttgacccaaaatatgccattttgaaataaaatttaagctttgatacactctcagctttttaatatctgtaccatataattcatttgtctgtatagcagagtttgaaatgcctctgttagagaactcaaga

SEQ ID NO: 281478 - DNA, 1000 bp, Homo Sapiens
gtatctgtagttaacagttacgcacaattttgtcatttgttattgtggtctacttggtactgaacttgattttcactccttttttttttattttttattttaatttttgagatggagtctcactttgtctcccaggctggagtgcagtggcgtgatctcggctcactgcaaactctgcctcccagattcaagcgattctcctacttcagccttccgagtagctgggattacaggcacgcaccaccacacccagctaatttttgtatttttagtagagacggggtctcgccatgttggccaggctggtctcaaactccagacctcaggtgatccacccgccttagcttcccaaagtgctgggattacaggtgagccaccatgcccagccactccctttttttataatcagatttttagtaatatttggacttaaagatgaatgatctttgtcttgaggatcatagttaagccattttttaaaaattctaaatttatggtctctagaatgaagaattagataaaaagtatgctggtcttttggaaaaaaaatggacatctgttattagattacaaaagaaggtaactaagtcttttttctttaaaattagttgtattcagttatataaactttctgaaaataacattcttctgcattaattaataattgcatctaatctttaaaaagcaaataaaaatacattttttgtgcttcatgaaaagtatgacctaggcatattattgcagatacatggtaattcacatatctggagttgctgactgggttcaatctgcatagtcctgactttgaggaattgatactgaaagaactcatttgtgcacttagaaggaaagaatacatggagccattgtgattaatgctgggaaaagaacactaaaatgtgctcgtagacaagttgtttttatctctgagcttttatttttatctgtaaatacaacaaataatattccagtcctaaaatggatacttcataggcaaagt

SEQ ID NO: 281479 - DNA, 328 bp, Homo Sapiens
tctgccctgactcagcctgcctccgtgtctgggtctcctggacagtcgatcaccatctcctgcattggaatcaacagtgacatttgcggttgtaactatgtctccgggtaccaacagcacccagccaaagcccccaaactcatgatttatgaggtcagtaatcggccctcagggttttctaatcgcttctctggctccaagtctgccaacacggcctccctgaccatctctgggctccaggctgaggacgaggctgattattactacactcatatacagacaccagcactctcgggtgttcggcggagggaccaagctgaccgtccta

SEQ ID NO: 281480 - DNA, 1000 bp, Homo Sapiens
agtatagataaagataggaaaaagaaagacaaagaaagggaacgtgaacaggataaaagaaaagagaaacaaaaaagggaagaaaaagattttaagttcagtagtcaggatgatagattaaaaaggaaacgagaaagtgaaagaacattttctaggagtggttctatatctgttaaaatcataagacatgattctagacaggatagtaagaaaagtactaccaaagatagtaaaaaacattcaggctctgattctagtggaaggagcagttctgagtctccaggaagtagcaaagaaaagaaggctaagaagcctaaacatagtcgatcgcgatccgcggagaaatctcaaaggtctggtaagaaggcaagccgcaaacacaagtctaagtcccgatcaaggtagtatactttttaaagtattttgtctgatttttaaaaaaaattgactgaatttattcaaagttgaaagtgtcctttctctctctctttaataaactcagtttggtacttgataaataatcatagtcttaaatgttagaaatcctatataatattatttatttaaaattgcagatttttaatttaaaatacatttttatttttaaattttgtcttttcccttttttttcagatcaacaacccctccccgtcgtaaacgctgaggaatgatgtggcaagaatgccatgatgttctttaaaaaaattccatgagttttaagggcttgtctcattatagaggcacattgtggctgtgtaggtgaaaccagaatcttttttttttttaatctgtaaataggtgtactttttccaatgctgctccaagttacttaataggatttctttgtattacgtttttttcaaaaaatatagbgcataataagactataaacatgccattctctttcagctgtaatgttcttaaaattattcttgaatgtactgtgatgtcaataaagctctttagttcatttttgttaaaaaaaaaaaaaaaaaaaaaa

SEQ ID NO: 281481 - DNA, 1000 bp, Homo Sapiens
  misc_feature (689)..(689): n is a, c, g, or t
aggtgcctttttttagaggagaaaaacacctagacttcttccacacatgaaaagggaggttaaatagttgctaccagcagagttgatgactcgtagggacatacttgtatggccaaactggtggtttaaatattgcactatttccataccatttggtaagtaagcgcttccccaagggctcccagacctccccatggtccaaccactaaagggttcactccgagaataccaatgaaccttcaagagcttgctctattctgacatgcggggaaactcatatgttaagtatttcaatgtcatcctgggagtggagacctgtcccaggttggtgacaggtgagtgaccatgggttagaccatgggattgaaagccttttgaatartctttcttgagtggcttaaaacagcaaatgtttatttattttcawttttttgtttgtttgtttttgtttttgttagtttrttttttgaaatggartctcaactctgtcaaccaggctggaggamagtggtgaaatctcagctcactgcaacgctgtctccgggttcaagcggttctcctgcctcagcctcccaagtagctgggattacgggcgtgtaccaccattcccagctaattttgtatttttagtttcatcatgttggccagactcgtctcaaactcctgacctcaggtkatccgccgctcanctccaaagtgctagattacaggtgtgagcaccacaccagccttattattatcattatgatgattatttttgtattttaggtagagacgggttttcgccatgttgcccaggctggtctcgaactactgttctcaacgcgatctcgccgcctcggcctcccaaagtgctgggattgcaggcatgagccacggtgcctggcctatttcttacagttctatgtgttggttgggtggttcttccgggaacagcctcactcctgtgctgaggcctctgctgggagagccaggattgcttgtcttctaggaggttcgc

SEQ ID NO: 281482 - DNA, 1000 bp, Homo Sapiens
tcattagaaataagttgctttgacttttaaaaatgacatagttagattatttaaagtcaatgtatatagtatatattatgtatggatttatataccaaattttggaatacagcctatctcatgaccatattgaaatgtacggaatttgatccatgcgatactatgtgtgcattatttgaaagttattggaaattttattcaaaccgtggaacaaatgtatgtgattttgttatacttcttaatttaaataaaatatttaatgcactattaaaataatttcttatgttctattctttttaaaacaattcataatagttgtatcacatagatttttttggtgtcagtaaaatttttttttttttttttgagacagagcctccctctgttgcccaggctggagtgcagtggcacaatctcagctcactgcaacttccgcctcccgggttcacaccactctcctggctcagcctcccgaatagctgggactacaggtgcccgccaccatgtccggctaattttttttttttttttttttttttgagacggagtctcgctctgtcgcccaggctggagtgcagtggcgcgatctcggctcactgcaagctccgcctcccgggttcacgccattctcctgcctcagcctccggagtagctgggactacaggcgcccgccaccgtgcccggctaattttttttttttgtatttttagtagagacggggtttcaccgtggtctcgatctgctgaccgtgatccacccgcctcggcctcccaaagtgctgggattacaggcgtgagccaccacgcccagccatgtccggctaattttttgtattttttagtacagacggggtttcactatattagccaggatggtctcgatctcctgatctcgtgttctgcccacctcggcctcccaaggtactgggattacaggcgtgagccaccgtgcccggccaggtgtcagtaaaatttttgactggtgccaatctacttcctct

SEQ ID NO: 281483 - DNA, 1000 bp, Homo Sapiens
ccatttccaggacagaaattactcattgctctgagggttattcagtatcctgttcttagtggcatctgtgcattgagggacactaatgggggcgctaatgcttttacctgtttaattcaatttttctgcaaactggaatttgttgagtattatcacaggaagggtagaggcaacaaaggctaagtcgtgtttttctttcccatgcatatgtattcacttgcctttttcaaatttatccactgcagcctaggtctcccactactcaacatcctaggactcatcacatgtccaaaaatttgggaagcccttggaggactgtcactaagcctgaatacatcttgaggaggaaaggaaaaaagtggaatgagtttttacataacctgctccaactaagaagtactaaagtccaggtcagatcctgatatggttaggctttgtgtccccatccaaatctcatcttgaactgtaatccccagaatccccacattttaagggagagaccaggtggaggtaactgaatcatgggggcagtttcccccatgctgttcttgtgatagtgagtgagttctcacgagatctgatggttttataaggggctcttcctacttcgcttggcacttctccttcctgccaccctgtgaagaagggcttccccttcaccttcctctatgattgtaaatttcctgaggcctcctcagccatggtgaactgtgagtcaaacctctttcctttataaattacccagtctcgggcagttccttatagcagtatgaaaacagactaatacagatccaaagacttcatgatcctgattgtatttaaacacacaacacagataaacaacacacttccttaagtaacagagaagtttgtttaaatttttcctgtaactttttagaaaccaggtttccaatatctatcaaaatttgaaatgttcatgccctgttgacctaaaacttacagatatatatgtttgcatagatgtcactgaggcattggt

SEQ ID NO: 281484 - DNA, 1000 bp, Homo Sapiens
ctcagaagttgaggcccagagatccaggtagagggggctccagtcctgggactgccctgcaagtcatgtggcctgggacagggcttctccaagctctgtcccctcctgtgtagggcagggaggtcagaggggaccctgcagatccagtctcatgtctgggggtcaaggggtggcctcgagagggaccagtctctgtgtaggggaccgtcagccccctcaccccttgagcaagactgtggtccctgcaccaagggagcaggcctggggtgggaagaggccagctgggctgtggtggtgcctggggactgcatgggagcccctgccagggagggagagggacagaggacaagctgggggctctggtgcttgggctgggggctgagcgcctgtgacctccactggcttcctccttctcctctctgaggactgaatctggggtgcagcagagcacagactcaggcccgcctttcctctccctgaaagagcctgcgctggccttggacagagaaagggatgagaagtgaggctgagtgcggtggggtctgcagggatccaggtgggaggggcccagccagccaaggtgaggcccagcccctcagcaggaagatgggcactggggcccttgggcagggctgacttgacacttttgtgtgacttgagccactgtgcccagcctgaacaccctttcctggtaaaacactccacaaaccaggaagagaaggaatgtactgcaacaaaataaaggccagtcatgcaaggcccatggctgaaagtctttcagtcattttagatgaaagactgaaatctttgcctccaagatcaggaacaagagaaggatgcccgctctcactacttctattcaacacaggatttgaagtcaggccgggcacagtggctcacgcctgtaatcccagcacttttggaggctgaggcgggcagattacttgagcctatgagtgtgagaccaccctggccaacatggcaaaaccccatctctact

SEQ ID NO: 281485 - DNA, 1000 bp, Homo Sapiens; identical to SEQ ID NO: 202048

SEQ ID NO: 281486 - DNA, 1000 bp, Homo Sapiens
gcaaaggaggaagtgaggcgaattctggggctgctggatgcttacttgaagacgaggacttttctggtgggcgaacgagtgacattggctgacatcacagttgtctgcaccctgttgtggctctataagcaggttctagagccttctttccgccaggcctttcccaataccaaccgctggttcctcacctgcattaaccagccccagttccgggctgtcttgggggaagtgaaactgtgtgagaagatggcccagtttgatgctaaaaagtttgcagagacccaacctaaaaaggacacaccacggaaagagaagggttcacgggaagagaagcagaagccccaggctgagcggaaggaggagaaaaaggcggctgcccctgctcctgaggaggagatggatgaatgtgagcaggcgctggctgctgagcccaaggccaaggaccccttcgctcacctgcccaagagtacctttgtgttggatgaatttaagcgcaagtactccaatgaggacacactctctgtggcactgccatatttctgggagcactttgataaggacggctggtccctgtggtactcagagtatcgcttccctgaagaactcactcagaccttcatgagctgcaatctcatcactggaatgttccagcgactggacaagctgaggaagaatgccttcgccagtgtcatcctttttggaaccaacaatagcagctccatttctggagtctgggtcttccgaggccaggagcttgcctttccgctgagtccagattggcaggtggactacgagtcatacacatggcggaaactggatcctggcagcgaggagacccagacgctggttcgagagtacttttcctgggagggggccttccagcatgtgggcaaagccttcaatcagggcaagatcttcaagtgaacatctcttgccatcacctagctgcctgcacctgcccttcagggagatgggggtcattaaaggaaactgaacattg

SEQ ID NO: 281487 - DNA, 1000 bp, Homo Sapiens
caaatcagagaatggcaaaatttcctgagagcattaaggcctggcccttcccagatgtgctggagtgctgcctcgtcctgcttctcatcaggtcccactttcctggctgtctggcccaggaaatgcagcagcaggcccaagagctccttcagaaatacggcaacacgaaaacttacagaagacactgccagaccttctgtatgtgaattttcacacaccttgaagaaactgccaaattgaaaatgtttgacatctttcacctctgcagttatgcctcaccagacattcactctggtccctagatgtttttgcagtaatccaaaagaatacaaacaaggattaagtttgaatcaaccctgcctacccatagacaacggtggatctgactttagactcaattgtggtctcctactggagggaagatcatgaaaagcccacagtagttattcagaactaacacctgcagagtgttggtcatctctacagccttaggcaggtttcacccaaagaggagaaacttctgtcgtcacccaaagtgttacatgcttaaaacacaagctacctttgtaaatacttcatctgatcagaagtgtgtcatgcttgtttgagatggagttgctgcattttaggactattgatacctttttttaattgtttttataatatttaatttgaaagaggagacccttctctctctactctttcatagactgaagtttgaatatgaaataggccttaaccatcatgttgactctcctgtcagaattttaggttggaaatttggttttattctttcatgtaattgcttatttgaacagatcacttactaaagctttagaagaagtgattcaaatgtgtgttttcccttcagttttataacaaatggattgatgccagtcaaatagctcaggaataaattactgtttcaatggttcttaaactttcttggatcataggatccttttgagaatcagattaaacccaaaaatactctttggag

SEQ ID NO: 281488 - DNA, 1000 bp, Homo Sapiens
gctgctggctataaaagggatcatccagtggagttgtaaacaagggaaccatcttgcaagatctaggaagaggaaggggagggatgtggactgggtcagatcacagcccttggccctgcttcatactttggagcttattaagatcaattttgataaccatgtaatttcttagaaccatggcaggtagtattgtgctttaaaaaccagaggctcctgaaagtcgtttacaccaggtggattgataccatggctgtagctgatgcaactaacaagtactggggccagtgatcacaatccagggttggaaacaggagtgaagcccaccagcctgcctggctgatggacagcaggctctgccttctggaggcggcttatatcccaacagcctgaggcagggctctgtggcccaggccagcagtggctgcctcttttggttctgcatggtacattttgccaaccctgaggaccagttcttggggttccaggcctcggccttcctgctccacgtgctcaagcccccacatggggctgcgacaccatctggctcctcacagggaggtccagccatgttctctgggctcccagtgagccccctgccctccagctacccccagaatccatccttcattcctccaccaagctcctgtgtgagctgcagcacccacacgggggaagccctgcactccagcagcatcttccagccttggcacagaactgatggcaaaggaagggctgggttttcagcttctgggacccgaggaagaccccacctcactcctccttccccagtacatcagactggttaggaggcatcccagaaggggcagcctcatgcccaggtttcagccctaaaggtaatgattgtcttgactctgccttggcatttcgctcggaatcacggcagacttggagtgtttcttcaaggcaggcatctgcttatgagcaaggtcaaagatttttcaaaatattgtgcattaattcattaaagctactgttaaat

SEQ ID NO: 281489 - DNA, 1000 bp, Homo Sapiens
caaaacttgagaagtaactgagaagtagaagcagctcttaacaagcatcaggggctcagaagaggtagctcttcccagggcatccagcgggcgagctgttccatgtgcctctgaacccagcttcccacttagcagcaggtcttgagtgcacctggcatacacctgtgcaattctcgtcaacacagaacacctgcctgcccacccccggtgctgaagaccgaccagtcaaggaggtgttggtgggagtgttgtgttcaccatgtggagatcaggcggcgattaccgcatcttctttgctgactttggtaaccgggtgtccagggaggagcgatcgggagtggccaagcagttgcctggactcagcttctgactctgcagctgggagtcagatgcaggcccaagggtccaggggagttgttcagcgcctggaatcgccatgcactgcgcggtggaccgcacgacgctcctgctctgttctcccaggcacagacaggcacttggaaggcagctttgctcctctggccacccggaaacctcccagcagttcagatgggacaaactgggggcctgtcagaacagccacttgtgccgggaaggccaggccccggcctgctccgatgaacgtcaggacggtggctgcagcagggaaccagggctggccttggatctgtccagtagggtcactgactgggcagggcttgctgcatagaggatggctgcattttgtgctcagagttggttgaaatggctacgaagtgtggagaataaccactgaatcccaaaaagtcactgcgcttgatctgatccaagtaacagtgactgcagttagggtcgagagcttctccgaagcagcggtcatgcaggcttttgtgtggctgacgcttccctttttcacaacagtaaaaagctatcaatgggaaattgtggacttttcccaccagggactcaatggggactcaatgtgcaatattcagtcaacataaaactctttaagaactcc

SEQ ID NO: 281490 - DNA, 1000 bp, Homo Sapiens
ccagcctcaccttgaactgtgttcctgtcactgcacgccagtcacaccggcctctaggtcctcctgtaggccactcttctttctggcacagggacctgcacacctggagtgcccttcctcccccactcgcctgttcacccctgcttttcctttacacctcctcctcagggaagtgcccaccctccgtacatctttcacagccctgattgcagctgtgttcactcaccaggtacctgcagaaggcctacagggtgccaggcacttctttaatgtgttctttctttatgtgattatttgattaatctctgcctcccccactagactgtaagctccctgaaggcaagaatcctgtgcttatgctcaatattagctctcccttggcacagagtaggcactcaacaaatgctccccaaaaggctgagtggctgactgaattaagtaccagtgacatgcagtaactgctaagatagatgagccatctgtatgctctgacagttacagactgaataagttggagacttccctaaagggtggcatttccccagggtaacaacgcagagctcaggtgtgggaaggtgccaggggcaggggtgcagaggggctgaggctgaggggggtgcagaggctggagaaaggataacaggagagagtatacaggcatgccttgatttattgcacttcacaggtagcagaatttttaaagaaattgaaggttttgggacatatatgtgacagcaataggttaagaaaagcaaagcagagaaattgaagatttgtgtcaacactgctttaagcaaatctgttggcaccatttttccaatagcatgtgcccattttgggtctctacattgcattttggtaattgcttgcaatatttcaagcattttcattgttattatatgtgttatagtgatctgtgatcagtgatctttgatatattattgtaattgtttcggggcgccatgaaccgcacccatataacacggtaaacttaatcagc

SEQ ID NO: 281491 - DNA, 1000 bp, Homo Sapiens
ttcacgttgtcaccaaagaggtgcacagatcaacaacctggatgacgcaggtgttctccagggaaaccagaccaagtcaagtctccaggtaacttttttgaagtcttttttttaaggcgcgcaggtaccaagcaacagaatagagtaacctgaacgttcttactctcccaggcatggcccacgtggtgcttcaggtagaaatgtgcttcaccctcctggtggggggcgaggacacagcccactgcatgcagcatggtagagagctggggcgaatatctccatgtctttggaggatgtcagctggccgctttcagggcagagtcgggtgggcgttggtgccaccttaggaaggagagcgatgcgtgggtctggccagagctctggagccaatgccgggctgcctgagagcagaggaaatgcatggcccatgtgcatttctgagtattttaaactcgttcaggccctgcagccttcatgatgatgtagctcgcagagaagagcaggagcagaattagccctttcttcaggccatcttgcctcaaagggtacacatgtttggcggttaagatgaaactaacccttatgtttcatcctggccccatgatgtacacatcttagccatgtagtggccttggggggccacagagatttcctttgaggagcatggtagagtccacagccatggctgaagtcagtggacaccgaggggacaggactgcaggccaccaggggcctctgcccagagggaggcagagaggatggcggccacgggtgctctcctggcatcctcatggggtgatgccaggccgggcacttcaaaacaggctcagccgactgggagatcctttgtactttgcacagttcacacacacaaacacacacaccctatcccaagtgtttttgttagacacaaatgtcagcgtgtgattttggaagacttgtcagtgatgacaaaccatgatgcctgtgtttctgagtctttaaataaaaatgaacatgg

SEQ ID NO: 281492 - DNA, 1000 bp, Homo Sapiens
actgcgcatgcatttggtgattccagtgctagatatttaattactgtgtatttagtgttttgattttctataatttcagttccgcgtgtttttacacttgttcattttaaattgatgtttcattttcacttataatactgtttgacttgtctctatcatgtcaccataaactgtaatattttcaagggttatagatcaaagatatttatttagaaatgtacaagataatgaaatttagattccttatacttaaggctgattttattagaagattattttaatgttctattataaattttaagaatttgtattcaaattgtatgtaaaatatgtaaaatgttgacggtactatattaagtggttctataaaagctattcacaagttctactgtgatggacatcctcatcatagacaaacctcctctgttttatcctcaatttctagttacagaaatttggtgatgcttatttttgccaattttatgtcaaaataagttaaaacttccctcctgttcacctcttgggtctctatcctgtgtaacctctggtgtagtatttgcccataggcaaccagagccacttcctctgaacccaacatctcctggggaccttcgcagcaagaggaaagcactgagacaatagcttgctaagcaggggcccagtggtgtctcagagaaaccatgggtgtcctcgccacttcccagggagggtgaggtgagctcgggaacataacgatgttttgacttacaataggcatgaaatcgcaactagaaattagggcagtttttaaaaatgtcatagttatctattgcatgaactggagtaattccacctggtggtgaaaggattgttatttcacacatgaaaaattcatccagttttactaaaatgtaattttttctgtcatttgaaagtactgacaactatttgtaactaatcttccttaagaactgtatttgagggtatcaaatcaagcttgtaatttaaaatctgtaccaac

SEQ ID NO: 281493 - DNA, 1000 bp, Homo Sapiens
cccccgacactccactcctgctgcccctgagctgagcagagtcattattggagagttttgtatttattaaaacatttctttttcagtctttgggcatgaggttggctctttgtggccaggaacctgagtggggcctggtggagaaggggcagagagtaggaggtgagagagaggagctctgacacttggggagctgaaagagacctggagaggcagaggatagcgtggcagttggctggcatgcctgggttccgcagaggggctggggatggttcttgagatggtctagagactcaagaatttagggaagtagaagcaggattttgactcaagtttagtttcccacatcgctggcctgtttgctgacttcatgtttgaagttgctccagagagagaatcaaaggtgtcaccagcccctctctccctccttcccttcccttccctttctttccctcccctcccctcccctcccctcccctcccctcccctcccctccccttcccttcactctcccttccctctcccttcccttcccttctccttcgttcacagcaatggggtcttgctatgttgcccaggctggtcttgaactcctggcctcaagtgatcctcctgccttggccttccaaagtgttgggattacaggcatgagccaccacacccagcccagcctctaccttctttgtctaaagtgaggcaaacacttttctgtttttttcctggaaactcgtgttctggaccagttctggggcaaactggggtcagagtggattggaatcagctctgatccagcttttggctgtgcttaccttgagaccaaatcatgtagagaataagacaagaccctcctgccctgttaccctcttctctctcccctccctcattcctaccatcaagacccaggcattttgacaagctctaggaaatgagggtatcagaacagaaatctaacaaatgtatgtagctgcagatccatctttcatataaacaatgtggagtc

SEQ ID NO: 281494 - DNA, 1000 bp, Homo Sapiens
tggcacgcatcttgcatagtctgcttgacctccaccttcgcctaaaggaggagaaggcccctggcccagaggacctcagctatagtgatcctgtggcccaaagcttcaggtcttcaaaaagcagctttctaaaccggtcccaggttgacagtgacgatgtgccagataagtgcagggaacacttgctggctgtcagcagttttctttttgccttgatctggggctttggagcccaccttccctccaggtacctaccaggatgggggatgggagatgcagagggctgagatggactggcccatggaagtaaaaacccacatgacatcactgttagggtatggtggagtgtgtgagtgtgtcataaatggaagtgttgtaactgtctgacgcttttgcctgtgtgtccatctgagcaggttctggcccatctttgataccttcataagggattctattagtcgcctctccaactaccctgagccaccaccctcagccttggtgtttgatctacatgtaagccctgaagatggaacactggtccccttcactggccaatacctgagcagccacatcaaaggaactttgggcacctttcacccttctatccagactgaacggctcttgtatgtggtggacctgcttctgtcagggggacagccagtgttgctggctggagaggcagcaacagggaagtcagcctttgtggaggtgctggtagagccacatcacccttacatatacagccccatccaccctgccttcagttcctcccacctccgtctcctgctgagcagaggaatccagggccaaacacaagccagcccacagcctgggcatcaccaggattctaaaccctccctcctcttcttgctggaggacctgcacctagccacttctggtgaggagctgcgaagagggaaggaaggagctactgtcatctcttgagactataaaatccctagcaatattcattgactctcaaatatatgtctgtagatct

SEQ ID NO: 281495 - DNA, 192 bp, Homo Sapiens
tgatgccttaaagaagccttagagaaaagatatctttctttctctccatggtgcacacaggacaggaaaggccatgtgaggacatagggagaaagcagccaccattgcaagccaagagagagccctcaccaggaacgattggaccagcagcaccttgatcttggattttctagcctccagaactgtgagata

SEQ ID NO: 281496 - DNA, 1000 bp, Homo Sapiens
ttcccatcagtattaattcctcagaaatttagtacattcctccaccatttcaaaatgctcccagaactcacactagttggtacttaactacaaccttcaacctcaccatttaattttgatgtatgtttttggatttaccaacagtactttctttcatgactactttgatttagttaagaatgctcactgtacactgaatgttaattactcagctaattcacactgatttcctgtttaaaaatatgatcccctccaggccattcatgtgaagtcagggtacagctgatgccagctacagaatcactatgtttcaatatggaatatgaaaagtcctaacacataattgcaaatcattttctactatggtatacaaattttatcattacaaaatagtatcagcttttttcacttaaggaaaataatacatcttcattcaaatattcagtgcataaataattgccttaaattgagtctttgctgtggaatttgagagttttggaaatcaaaggcccttgtgaaacatttcctgttgccatttatttatagatagcaatagcttcaaatgagtgggaaagtctacttaggtgaagtggtaaatagtcactaagattgtataaatagcgcattgatgagttgcctaattgttttctccaacaataaccactggtccattggttcactacttactcaagaaagacatatactgagatggcttgaaatgtttaatgcatgtgaacgttatttttaccgtgttttggaaaaagatcttgatgttattgtcttcctttattttccacaattaagtgcatctaactgtgaattgtatatggaattacattattcagcatatacatatatttacctgctttgttcattctctgtattcaaaattaacagatcatgctgaaaaccactcaaacgattatattttttacattataagaagtaaaatatattattctgaataatgaaaccaggcagttgtactcgtaaagatttt

SEQ ID NO: 281497 - DNA, 1000 bp, Homo Sapiens
attgctcttcccttcccttcatcccttcccaaaacacaggtctgaggcctgagcatccatcctaggggctgggcccccatcccatgactgcagtcatggggtacaagactcatgcagactcgtaagaacagccacttctgacctggggcctcgatgttccaggcactgtcctaggcatttgcatctacaaacttctcaccataatccaatcaccactgttttacagatgaggaaactgagccccacggggtgaagcctattgcctgagatcttgcagttggtaacgggtgcaggctggactcaggcccccacacatgcccaggcccttgagtatttgtaagggaagcagctgtttggttttcttggcacagagcatctgcctagctggtgagggcatggggaaagaggtgcccaatctagttggggatgggagggtaaaatggtactacctctttggagagctttctggcaatatggacccaaatgcaaattacatgtgccctctaacctgggcccgaagtcatctgcacaaggctaccaactgcaatgtcctttgcagcagcaaaacacgggatcccctagctgtccatccaagggggatgagggagatacatctgggaggttctattggctgagtactcagagaatggaagcaccacatggattaattggagcagtcttcaagttggtgaaaaaaagtgcagtgtagaaagtgtgtacagggccgggtgcagtggctcacactgtaatgccagcactttgggaggctaaggcaggaggattgcttgagcataggagtttgagaccagcctgggtaacatggggagatcctacctctacaagaaaaaaaatgaactaggcaggtgaggtggtgtttgcctgcggtcccagctacttgggaagctgaggtaggaggattgcttgagcccatgaagtcaggctgcagtgagctgtgactgcaccactgcacagtctgggcgacagagcaagaccctctctc

SEQ ID NO: 281498 - DNA, 1000 bp, Homo Sapiens
taagtcttaattatcacttagtattttacaacctcagttgcagttataaagtaagggttccacatacctcctaacagttcctagaaaatggagctgtcttggcatgtagtctttattgccctgctaagtttttcatgctgggggtcagactgggagtctgatagaaatttcatttccaccgctggtcctctaaccaatgacttgctgcacaacctgagtggtctcctgggagaccagagttctaactttgtagcaggggacaaagacatgtatgtttgtcaccagccactgcccactttcctgccagaatacttcagcagtctccatgccagtcagatcacccattataaggtatttctgtcatgggcacagctcctcccagcaggaagcacccagaatccagacgagaaaacagtgcagtgctaccggcgactcctcaaggccctcaagactgcacggcttcagcccatggtcatcctgcaccaccagaccctccctgccagcaccctccggagaaccgaagcctttgctgacctcttcgccgactatgccacattcgccttccactccttcggggacctagttgggatctggttcaccttcagtgacttggaggaagtgatcaaggagcttccccaccaggaatcaagagcgtcacaactccagaccctcagtgatgcccacagaaaagcctatgagatttaccacgaaagctatgcttttcagggtgagtacacattgacctgatggtgacccctcggcaaccttcatcacacaccttccccatcctccttagagcagattcgacatttctcccaactcaccttcagcagtcctcttatgtctgtgcatagggagaaattaatattgtaaattgatttcccactggcgataggaaggggtagctaacatggcaaaacactcagcatttcctttgaaaaatatctttgcatgtcacgcctgtaatcctagcactttgggaggccgaggtgggcggatc

SEQ ID NO: 281499 - DNA, 1000 bp, Homo Sapiens; identical to SEQ ID NO: 207054

SEQ ID NO: 281500 - DNA, 1000 bp, Homo Sapiens
gtgttaggtaattgactatgcactagtatttcagactttttaattttatatatatatacattttttttccttctgcaatacatttgaaaacttgtttgggagactctgcattttttattgtggtttttttgttattgttggtttatacaagcatgcgttgcacttcttttttgggagatgtgtgttgttgatgttctatgttttgttttgagtgtagcctgactgttttataatttgggagttctgcatttgatccgcatcccctgtggtttctaagtgtatggtctcagaactgttgcatggatcctgtgtttgcaactggggagacagaaactgtggttgatagccagtcactgccttaagaacatttgatgcaagatggccagcactgaacttttgagatatgacggtgtacttactgccttgtagcaaaataaagatgtgcccttattttacctacttttgttttctctcttatttgtcactatggacaacagttacactttaaagaaaatggagcagactcaaagcactttcctctaataattgcacaccatatgcacttcgtgtgaagaagccaggaatcattacaatggagaagaaagaacaagcaaactgagttaaatagttcacaaacaatcacatggacaatggggaggaatcttccagaatgcatcagtcagggtctagcggcatttgagtgcggatgctgtaaggggaattcgttcacaaatgtactgataccacagatgtgggcaggggctaggagagcaacagggtgcagcctgaaggcacctggaaggccgcctggagggggacagtcaggaaagcaggagcccttgagaggagcactagcctttgatgagaccactgccatcgaaggagacctcacagggagggagccaagggtaaaccctaactttgtttccccatttctcctatctctgcctaggggtcctcactggcagaaccaaccagaagctggaggacaagggagctc

SEQ ID NO: 281501 - DNA, 1000 bp, Homo Sapiens
ataagggctgaggcataaaactgccagagggtctcaaggcaggcaaagaagaaccatgaggctcatcctgcctgtgggtttgattgctaccactcttgcaattgctcctgtccgctttgacaggtaaatcttacttcctgtgttccagtctctgtgtagaagagaattaaaggttgtttccttacagttcactttttttttttcatttgcctccacaaagggagaaggtgttccgcgtgaagccccaggatgaaaaacaagcagacatcataaaggacttggccaaaaccaatgaggtaagcatttagagggatattttatcttttcttactgttctctaaaagatgcttcttcttattttactgtcaatgcccatgggactacaaaagactattgaacataaggggaaagcaggagctatctggataattcagccaatggccaatacttcacctgttctggttttggtcttggtttccaagactaccacttctgtttttcctcccaaaagcttttcaaacaccagctttttcaaggtaaaactatgaaatcaggagctgttcttggcctccttatcagggcatctttctcttgcctacgggtgccattccctctccattctccccactccgaccctcatctcctctggtgccataatttctcttgagtactaactgaaaacgttgaggcactggctaatatcaagatgtgaccctttccaagagcaggtacattttcaaataagacttttaaagttagatcaatcctttaaaatccaacagcctaatataattttatcatgtattcagctgctcctatttatgttgcaccagccaccttatatatgccatttcaaattctccagcagattctcaatgtcagggttataatgtaactcatttgaaacagaagagctaaagtgcaaagacaataaattaaatgaccaagattacacatcaaatttaaacccacaactgggtctgggatttattccagtcaa

SEQ ID NO: 281502 - DNA, 1000 bp, Homo Sapiens
gggtgaatgtcccattacttaaagtccatatggcacagctactagtctgtcctacctttgggagccatcagtctcctacatcattttgaaatggcccccatgttgagtggccctctgtaccctctgtagggtgggatgaatagtgcagccccatttctaggacagcaactcttaaagggagaggagctggattgcttatgtgtccataaatgtacattggagagtactatggttagagatgatactactatgctatccatcaagcagaagcaagctagtgttagctgcagtggcagttgcttcaggatcgggggataaatctagacattcatttcttcttcttatggaattatgccacagttagagatcacagataagctcattttaaattctgatctggcttaatataccagcttttaaaagtattgcctcactgtgcaaaacttaagtgtgcatgcaccctgctgctgctctctgctcagagcttccacactgagactccttgcagggtcaaagaatgcctcatcttctataggagcttgtcttctgtgcagattatgtgactacaattttctttaaaaaaatcaaagccctcagaaaaggacctgatattttttccaggatagctgttacatattagcgtacaaaatgcagacactatacccagcaaacgtgagagcagacatttttccaaatgcgttttccactctgagctgaccatcttacaatagaaatggattggactttgatgtcagacagacctgagtttgaatcttatcttctccacctaccaaccaggttacttagcttggtgttatgaccttaaaaatcttcaggatctccaatatcttcctccaatatcttcaggatagtaatctttattattatgaacttattgcagttaaaatgctcagtataggtcaagtgtttggtccaataaatggataagttggaactcaataatccttattataacttccagagtagagtgatgtttaaa

SEQ ID NO: 281503 - DNA, 1000 bp, Homo Sapiens
aataatgtttggttggaagttctttttacaattagtagagagtatgatggccaagctctcaatactcctgaataaaatattcatgaattgtgagaaccctgaacaggtcaggggcgaagatcacgggacagtatgtatagagcacttgctttccatatcatgatgattagaaatttcttacgaatcagaatgggaaaatggagagactaagatattaacaacaacaagaaaatggtacaaagaacaatttattttcacaatgaagagttttctatgtttaattatttactcaatacaaatatatactttccaaatatcgatatatttgttttgattctctcctttagtttatgtttaaacacagcccaactcaagcttttctcttctagcaatctgtagttttataatttttctctctatggctagtcttttcatctcctgaaacccaattttcacttgaaaatatttatccaatcctgcccaaacccagtgccacaataatagtttattattttgtaccatacatgctgggattatagctagtttggtgacagagagcaagcatcagcctccagtattcattttcttcatgcacacatttatttattcactcagaaaaagttcaatgagtgtgagtgatggcactgttgggcttattttctgtactcagaaaataaacatgaaaagaacaagaacgtatctgctggaagggggtcataatttcccaagtaactctcactgtctagttataacacttaatacttactggcctaagtattaaaatttttctgcattaattagagaatactgacatggtatcataaaagatgctaactagtaaatggaacaaattaaattatttctctttgatctttctagaaattactatgatcttctgctatgtggtcataaataaaataggttaaaatagagagagacatgactgcaaggaagctgtattctcttacagcaggtaaagaaaccaatatttaattgagat

SEQ ID NO: 281504 - DNA, 1000 bp, Homo Sapiens
taactttatcagttgtagatttgtcactctatctctgttttaaatatattaccaattaactgatgctatattatactaaaaaacaatcatgactcttcaaaaaggaaaaggatatttaatacagccacctgttaggagaagaatgtctttgtaggctacagttctcatcagtgaatgccatctttggacaacttgcttctactgtgagctgcaacaatgggatggggaatataggctttcctggcttgtgacattaagtgatttcttagtctgaaatcctctaaagttattgcttctataatgtttcctatgtcatattgtgaaatgtagccctctgtgttgtagttcaaaaatttgcaattaatcaccaggtatggattccacaattgttgcttcatcccttagttggaaaagagtgaggcaagttttccttccagcttcatatccttttcattaatgaaggaacttgagtctactgctcagtaacatgatgggttttgaggtaaattccctgacctgaagctaccacaagcatgaaatctgcaaggggattctgaatttatcttttagaagaacagtaactattagactctggagaaaataaatagcagctatagaatgtatggaggactccaggttggattagagatgtcagaaataactaaggtgttcatttaagggcgactaagggaaaataaaaggatttgagttgtttgtcttggctgaaagcactttaaatggagaaaagcaactacggcacttatttataagcttaggtaaggaattaaattgaatttcactgagtactgtgatagctctttccatggacttaaagcctatattttattgtatttcattctaagactgtcttttgaccaaatgagcttttccagaataaagtatttcaaagtcgcatcagctctaccttgctctaaaagatatctattactgtttactaccataatgaatagatacatttttcatctactcagtgggaaca

SEQ ID NO: 281505 - DNA, 1000 bp, Homo Sapiens
tatgctatattccaaaagactggaagccactctaatacaagtacctttgcttttctttcttttttgattcatctgtagaacctagtaaggtaaaggttgtaatgtttaccatattcagcttcctggtattttaccatacaaatcttcaaattatttgccactctttcatagataccaagatgggcttcaatagatcagttaaattctactggttgagcacagatttctgtgtattgttatcatgtgctttttcctgggtggactgtagagacgaaaataggtaaagaaaagaaaaatggaaaggtggttgtagaaaagattctatttccaggatcatgaggcttttaaagaagaactttaattatcttaatatatccaagaagggaagtcaagggaagccctcaggaagcccaaggaaaggggaccacgtgggagaaacaagtattaactgtgacttaactaaacatattggctaactagagttctcatttccctaaaggcacaaataacatcatttatatgtgtaagatctgtagtgatattctgtaagtatcagcaaactactgatactataaaaagcacccagtatggaacaagaaaaattgtggaattgtttccaagtactaaaagataatttttataagaagatgacgctttcaaataccaagctttgtaatgcttcaaaagaaagatctgaatgtcatgctttgtaaaagagattttgtgagcaagtttgtactctgtagaacagccgctcatcttgagaccatttgcttcgaatggttttaaatgtgatggtgtcacggtatgtgagtaccatcatgcccctggaaacatgtagcacaatccccaagactaggagaagaatgttcaacgtacatctattaggaagtgctcccgctcttgaccatcggaaactctacagatgacttactgttggtttcaagactctcacagagttcacttttcacctcgccatttggtctgtcatttccttttt

SEQ ID NO: 281506 - DNA, 1000 bp, Homo Sapiens
tatcatttctgtagtcaaatgtgtttctcacgtctagacgaatttaaagttagtcattgcagggcaatgagcacattcataagaaagtaccctcatttttaaatgtaactactacttaaattactttacttactactacttttacttactactactttactccaagcaagaaattaaattcaatttattcatattttaacattagtacagtgattttttttaaagttatgctaaatctttattccaaaagtttttgtttctttaaaacctcttccacggaaatcaaatttgtaacagtgaccttaaaatgtgagagctggccttcgtaaaacaaacgtgctattaaaaatattaaataactgaccccatttttggaaagctgggtaaggctgtgctagcatggatctatcgttaaacgttttttgtttttttttttgaaaactttttattgtcactcgatctgcatgtaaacaaggaggaaaaagtgagtctgacttatgtacttgattttgtttaccagaattttgcttaagtcatactatggacctttctgacttgaaatcattttcgagttggttatcagactaactctcctaactagtatttgtattaattatttttaagcaagcatttattatcattgattatgcaagcattattgagcaagcaaatgcaaatgcaataagcatttttaagcattaactatgtgttaagcacaaggtctctgtcctgaagaagcttactagccactagacaaaatggacacagaatcaagaaatgtcataataatatggggtaacacatgacccagatttggagttcagctaacagtttcccaagggaaatgagtgcaatcaaggtcttaatagacaaatcatacataggcagcaacaacaacaacaaaaaaaaagggggtggggggcatgaaaggctttccaggggaggaaaatagcacaagctaaggcatgagggcactaaatagcacagtggggtgtgtcct

SEQ ID NO: 281507 - DNA, 1000 bp, Homo Sapiens
gatttattgacttcatatccatatcagtatttaagtattgttaactctatggaatagcatttggcttggggattggtgtgtttccagttgcatgaaggatagttgtattatgttaggcataattatgaccttattattgtctttatttgaagattacatatgatctcaggatgtgtatgggttcaagttggcaagggtggacttgtgatggttaatattgagtgtcaacttgatgggattgaaggactcaaagtatggatcctgggtgtgtctgtgaggatgttgccaaaggagattaacatttgaatcagtgggctgggaaaggcagacccaccctcaatcaggggttcacctaattagctgccagcacagtcagaatataaagtgggcagaaaaatgtgaaaagctagactggcctagcctcccagcctatatctttctcccgtgctagatgcttcctgcccttgaacaccagactccaaattcttcagctttgggactcggactggcttccttgctcctcagcttgcagacagcctattgtgggaccttgtgatcatgtgagttaatactacttaataaactcccctttatatatagatataaatatgtcctattagttctgtcactctagagaaccctgcctaatatagattttgtcattaccctactcagtaatacattatgactccctattatctatggaatcaagtttcttttttatgaagttattgccttgaaaagataaccctaaaattgaataattctgttatttttaccattttacttaggagtaagaattataacctgtttggttctgaaaatgattttagacctttcaggcggatgcaccttttggttcatgtgatatatacctgcatatgcctcattttatgtaattaaaagtttcctgataattatactcccagtttccaataaattcttccaccacacacacacacaacacacacacacatgcatgaagtagaagaaaagcttt

SEQ ID NO: 281508 - DNA, 1000 bp, Homo Sapiens
aatatccagccctgaaatatcattagtttttacccaatgtcctttttctgtcctctgatactataatacgtttagtcatcacgtctccttgggcctctcttagctggaacagttgggacactatcttttacaatgtctctgccatctcagactcaacctccatgcatctccacaccacctagaccccaggaacccatgagcacagggaggaaggtcatagaggaaaataagtcactcagggtgatgcatggagcctgatccaaactacagtttctaaaggcctcctagaactagtgaaataaattttacaatggtgttaagagtcgtatcttgtcctgtaagaaatagtactttggtttctacagcacaagatgagaaacaggaaacatatcaagaaaaagccacacggctgggaaggagacatcagaatatgtgttaatgaggaactgctctatcaaaggggacagagagaaggcagacagttggagggccctgggtgcaggccagccagggaacaaggacagacactactagctctccactgtggagattaggaacacagttagctttgagcattccccgccccaagattcctcaccctccaaacagatgcgtaaactgtgtggcaagctcacggggcctggcatcccaagggcatttgctccccaggtccagagatgcctctcatgtgggaacgcccttaagagtaaggggcatgaatcctattccattctctattttcatcagcacattctccattttctctgcataaggaatagaactgccaactctctccttgtctggggtcagagtcagtttcacatagtaaacattctgctgattgtagtaggggtgtaggagagggaaagaaatacatgggaaaaaaagggaccactctgagatctgaagaaagaacccaaggagcaaaaaactaatcggagacacttttctaatctctccttcatgtcctctaattacttatcactatttttgtctccct

SEQ ID NO: 281509 - DNA, 1000 bp, Homo Sapiens
ttgggaggctgaggtgggtggatcacgaggttaggagtttgagaccagcctgaccacgtgaaaccccatctctactaaagatacaaaaattaaccagacatggtggtgcgggcctgtaatcccagctacttaggaggctaaggcaggagaattgcttgaacctgggacttggaggttgcagtgagccaagatcgtgccactgcattgcagcctgggcgacagagcgagactctatctccaaaaaaaaaaaaaaaagtactggagttggggtcggaagatttgggtctgtacttgttcagtcactgaatttttgtcatcacttgagcaaagcacctccttgagcctcagttttgtcgtctataaaaatgaacatttcattgtctacaactctgcagcctcacagagttgtcatgaggattaaacacatcaacacatctcaaaggaaggaagaatattaaagcttcttgggtttcgcatgtgctaggtactctcacaaacatttcacaagcacctagcataagacctgacacatagtaggtgttcattcactgttaaaatattgaccacacccttctgcaattagcgtcccccctcctgcttccacttgggaaaacacctaaaggcagcccatccagataactccttcctatttccttcaggcccaaatgaggaatttgggattttatttgccaatcgctccttccttgtattgcgaggtcgttatggctatgtgggctcctcatcgggccatgacctcatacagtgcaaccaggatcagcccgaccgcattcatctactaccctgccgaccgggtatctaccacttccagggtgagtggctcctcttccctgcccaagggttcacagtctagtccctgccttagccccagctcagacttcagggcctgccactcagggcttgctcattataaaaggaaaaacaggccaggcgcagtggctcatgcctgtaatcccagcactttgggaggctgaggcgggca

SEQ ID NO: 281510 - DNA, 1000 bp, Homo Sapiens
atccagagcccatcaacattcaatccagtccctcagtcaggaatatcccttgtcccttccagcctagaagtccactcttcctcctgagagaagcaccaagtccctccctcctgccctctcaagctctcacctgacttgtagttaggatctgaaagaaactctgaagtcagtgaatcatcaagctgaggtcatcagcagcataacactccctaaaatatttagtcttcggtgctccttagggagcagagaaatgcccccacagtgtcccttaatttgcttcttaaatggtgaaatctcttaaacagagaatgagggttttcattacagcattaacatcaccaacatgcagtggctcatgccagtaatcccagcactttgggaggccaaggcaggtggatcacttgaggccaggagttcaaggccagcctggccaatgtggcaaaatcccatctttgcaaaaaatatataaaaagtagctgggcgtggtggcacatacctatggccccaactattcaggaggctgaggcatgagaatcccttggaaccgggaggcggagactgtggggagctgagatcacgttactgcactccagcctgggtgacagggtaataccctgtctcaaaacataaatcaccaacaagccacccattgcttttgaagatactctaccctactttctcagaggaatcactgttcttgctacatgttctaactgatgttcttatctggatacaaaattaaaaaggtttgtcactctggagtaattatttaactatgacttgtttacataaaacagcatcctagaaaatgagtttgcactggtttctttcacagcagagatcagattattgacaaaatatccggagaacttataacctgctttgtaacaataatggctattcatgtatagtgcccaatatgttccaggcaccagaaatatgtcccttctaatccttgcaacaggtggggacaatactggtcagagaagttaaataactt

SEQ ID NO: 281511 - DNA, 1000 bp, Homo Sapiens; identical to SEQ ID NO: 114777

SEQ ID NO: 281512 - DNA, 1000 bp, Homo Sapiens; identical to SEQ ID NO: 114778

SEQ ID NO: 281513 - DNA, 1000 bp, Homo Sapiens
  misc_feature (56)..(56): n is a, c, g, or t
  misc_feature (857)..(857): n is a, c, g, or t
  misc_feature (922)..(922): n is a, c, g, or t
ggttgggaaaagagaagatgttgatcaaagggtgcaaagtttcagcgagactgganaaatatatttcagtgatctattgcacagcatggtaaccacagttaatactaatgtattgtgtatttcaaagttgctaaaatagagtttaaattttttaaatttgtaaatattattttttattttttgtactacgtgttctcatctgattttttttttttttgagacggagtctcgctctgctgcccaggctggagtgcagtgggacaatctcggctcactgcaacctctgcctcctggggtcaagtgattctcctgcctccgcctcccgagtagctgggactacagcgtgtgagaccacgcccagctaaattttttttgtatttttagtagagatgggatttcaccgtgtcagccaggatggtgtcgatctcctgacctcgtgaaccacmcgcctccgtctcccaaagtgctgggattacaggcgtgagccactgtgcccggcctctcatctgattttttttatttttattattgtgctttttgtagagatggcatctcactacattgcccagattagtctccaactcctgggctcaagccatcctcctgcttcggcctcccaaactgctggatttataggcgtgagtcaccgcacctggccctgacatcttgatgtcaatttatttgcaatatacacccagaagtgggattgctggaaccatatgtgtaattttattttttatgtgtttgtttgtttgtttatttatttattttaagacagtctcactctgtcgcccaggctggagtgcagtgggacaatctcggctcactgcaacctttgcctcccatgctcctgtgancctcctacctcagccttctgagtagctgggactacaggtgtgcactatcacgcccggctaattanttttatttattattattattattttttaagacagagttttgttctttttgcccaggctggagtgcaatggctggatcc

SEQ ID NO: 281514 - DNA, 1000 bp, Homo Sapiens
ctctaacagacatttttttacttcttgaggggggctatgactcaggtaattcttttaaaaaagtcacttgggctcctgttttaaaagtgaacttatttttagagatgataagaagctgtggaatgggcagctactcacagggagaggagccatgactttaggggtctattgtcccacctgctgttaatttgcagtttgagcttgaacaaagtcactcttacttctcaatatttatacccattgatttaataagcatctcatttgccagctttctggtcccactttgtagtttaattaactgtctcctttagctctaaaaacttgggtgaacaaaaagattatcataagaaatgcaaactgccacacgagtccctgctgtgacttgggtgccatcagtgtagagctatgtgtgtccacaccagtcgtgaaacgccatggccatcatgctgataggacaaggcagtggaatagccacaaacgtgaatttaccatctggctgttgtaaaaatcattgtctggaggacctagagagaaagtgttgcataacttccgggctctcacttacgaatgaccttgaagctgctgctgagggatggcaatgacttgtcccttctctgctttcccttggcaaaggtttagtaacagctgtatttaggtgacaatcttcagatgatctacgtggccctgagcagcctagatcaaggctactgcctcgcacaggcttttcctgcgtacctccttgaatgtgggaaggattcacagaggaagatcttcaaaatacggaggtggcaagcattgttgtgtagccctaagtcaaatagttctccactgtaagaaaaactcaaaatatttccagataaatttagagctgagggattggggaagtggaaaaaaaaaatcacgtaagtaaataacataacttaaacctgcttaataatccagtttccagcaactgttttccacaagaggtgggtctgtggaaaggttgaagcaagaattc

SEQ ID NO: 281515 - DNA, 1000 bp, Homo Sapiens
tccgtaactgacttgtagtaagcagtgtttctggcccctaagtattgctgccttgtgtattttatttagtgtacagtactacaggtgcatactctggtcatttttcaagccatgttttattgtatctgttttctactttatgtgagcaaggtttgctgtccaaggtgtaaatattcaacgggaataaaactggcatggtaatttttttttttttttttttttttgttttttggctctttcaaaggtaatggcccatcgatgagcatttttaacatactccatagtcttttcctgtggtgttaggtctttatttttatttttttcctgggggctggggtgggggtttgtcatgggggaactgccctttaaattttaagtgacactacagaaaaacacaaaaaggtgatgggttgtgttatgcttgtattgaatgctgtcttgacatctcttgccttgtcctccggtatgttctaaagctgtgtctgagatctggatctgcccatcactttggctagtgacagggctaattaatttgctttatacattttcttttactttccttttttcctttctggaggcatcacatgctggtgctgtgtctttatgaatgttttaaccattttcatggtggaagaattttatatttatgcagttgtacaattttatttttttctgcaagaaaaagtgtaatgtatgaaataaaccaaagtcacttgtttgaaaataaatctttattttgaactttataaaaagcaatgcagtaccccatagactggtgttaaatgttgtctacagtgcaaaatccatgttctaacatatgtaataattgccaggagtacagtgctcttgttgatcttgtattcagtcaggttaaaacaacggacaataaaagaatgaacacattcctcgtgtgtgattcactcttgtctaaatgtcccaacctgtgacttctttactttccacaccactaattatccaagatcttgaagaagtattgaac

SEQ ID NO: 281516 - DNA, 1000 bp, Homo Sapiens
agcaagtcccagctgaccagccagagtgaggccatggccctgcagtcgatccaaaacatgcgtgggaactcccactgcgtggactgtgagacccagaatcctaagtgggccagtttgaacttgggagtcctcatgtgtattgaatgttcaggaatccaccgcagtcttggcacccgcctttcccgtgtgcgatctctggagctggatgactggccagttgagctcaggaaggttatgtcatctattggcaatgacctagccaacagcatctgggaagggagcagccaggggcagacgaaaccctcaatagagtcaacgagggaagagaaggaacggtggatccgttccaaatatgagcataagctctttctggccccactaccctgcactgagctgtccctgggccagcacctgctgcgggccaccgctgatgaggacctgcggacagccatcctgctgctggcacatggctcccgtgaggaggtgaacgagacctgtggggagggagacggctgcacggcgctccatctggcctgccgcaaggggaatgtggtcctggcgcagctcctgatctggtacggggtggacgtcatggcccgagatgcccacgggaacacagcgctgacctacgcccggcaggcctccagccaggagtgcatcaacgtgcttctgcagtacggctgccccgacgagtgcgtgtagtatctgttttatttgactgcagtctccttggtgtaaaaacaaaatgggaaaaataaggataactcagaatttcaaaaggaaatcacaaattcagctaataatagcattttcagtacttttcgtaaactaagtaaatacacaaaatgttgatttttctgaccataagacatattttatgtccttttgccgaggtgggtgtgttagtctcaggccctcctggccacattgcccaagtcacacaggcttctgtattatgtatttagataagatgtgtgaaaatatatttgaaaaaaagttc

SEQ ID NO: 281517 - DNA, 1000 bp, Homo Sapiens
ggatggcatgaacctgggaggtcaagattgcagtgagctatgatcatgccactgcactccagcatgggtgatggagagagatactgtcttaaaaaaagaatacttgtggtaacgtttgggtagaggaataatgaaatcattgatgctttataaaaaggttatggggacaatgcccaaaagaaataaacagtttgtaaacggataacttattttgagttagggcaagacaatgttgacagtgatgcatgaagcagcaggcagaccttccacatcatttttacagaaaaaaaaattaatcttgttcatgctgcaatgaagaggactgacagcaaacagcagaaacatagtcagaatttagagaacagcctggttaacatggtgaaacaccatctctagtaaaaatacaaaaattagctcagcatggtggcatgcgcctgtaatcccagctactcaggaggctgaggcaggggaatctcttgaacccaggaggtggaggatgcagtgaactgagatggcaacattacactctagcctgagcaacaagagcaaaactccatctcaaaaaaaaaaaaaaaattgtcaagttccttctcttccattctttgccatcgtggtgtgtgcttgactctgcttcttgccacatcttctcagaagactttcaggattaagcgattcctggccaagaaacaaaagcaaaaccatccgactcccctgtggattcagatcaaaactggtaataaaatcaggtacgactccaaaaggagacattggagaagaaccaagctgggtctataaggaattgcatgtgagatggcacacatatttatgctgtctgagcatcacaatcacgttaccatatcaagctgaaaatgtcaccactatctggacagttggacatgttttattgggaatatgttttttctctgtaaatttgttataaacgcattggttggctgtgttcagtaataaacgtgagacttttcatttcaaaacaaaagtc

SEQ ID NO: 281518 - DNA, 1000 bp, Homo Sapiens
tctgtattgtaaatagagccctgtaatgcttttacttcgtatttcattgcttgttatacataaaaatatacttttcttcttcatgttagaaaatgcaaagaataggagggtgggggaatctctgggcttggagacaggagacttgccttcctactatggttccatcagaatgtagactgggacaatacaataattcaagtctggtttgctcatctgtaaattgggaagaatgtttccagctccagaatgctaaatctctaagtctgtggttggcagccactattgcagcagctcttcaatgactcaatgcagttttgcattctccctaccttttttttctaaaaccaataaaatagatacagcctttaggctttctgggatttcccttagtcaagctagggtcatcctgactttcggcgtgaatttgcaaaacaagacctgactctgtactcctgctctaaggactgtgcatggttccaaaggcttagcttgccagcatatttgagctttttccttctgttcaaactgttccaaaatataaaagaataaaattaattaagttggcactggacttccggtggtcagtcatgtgtgtcatctgtcacgtttttcgggctctggtggaaatggatctgtctgtcttctctcataggtggtattcacagccaacgactccggcccccgccgctacaccattgccgccctgctgagcccctactcctattccaccacggctgtcgtcaccaatcccaaggaatgagggacttctcctccagtggacctgaaggacgagggatgggatttcatgtaaccaagagtattccatttttactaaagcagtgttttcacctcatatgctatgttagaagtccaggcagagacaataaaacattcctgtgaaaggcacttttcattccactttaacttgattttttaaattcccttattgtcccttccaaaaaaaagagaatcaaaattttacaaagaatcaaaggaattc

SEQ ID NO: 281519 - DNA, 1000 bp, Homo Sapiens
gtgtgatctgttatggtcagatccagatgatcgtggtggatggggtatttcaccacgtggtgctggctacacatttggacaagacatttctgaaacctttaaccatgccaatggtctcacactggtttctcgtgcccaccagcttgtaatggagggatacaattggtgtcatgatcggaatgtggttaccattttcagtgcacccaattactgttatcgttgtgggaaccaggctgctatcatggaattagatgacactttaaaatattccttccttcaatttgacccagcgcctcgtcgtggtgagcctcatgttacacggcgcaccccagactacttcctataaatttctcctgggaaacctgcctttgtatgtggaagtatacctggctttttaaaatatatgtatttaaaaacaaaaagcaacagtaatctatgtgtttctgtaacaaattgggatctgtcttggcattaaaccacatcatggaccaaatgtgccatactaatgatgagcatttagcacaatttgagactgaaatttagtacactatgttctaggtcagtctaacagtttgcctgctgtatttatagtaaccattttcctttggactgttcaagcaaaaaaggtaactaactgcttcatctccttttgcgcttatttggaaattttagttatagtgtttaactggcatggattaatagagttggagttttatttttaagaaaaattcacaagctaacttccactaatccattatcctttattttattgaaatgtataattaacttaactgaagaaaaggttcttcttgggagtatgttgtcataacatttaaagagatttcccttcatttaaactaaattactgttttatgttgatctgcatatttctgtatatttgtcatgacagtgcttgcatcctatttggtgtactcagcaaataaacttttcattttaaacaaaacattcatttattgtgttgtgcattaaatgaaaactt

SEQ ID NO: 281520 - DNA, 1000 bp, Homo Sapiens; identical to SEQ ID NO: 114779

SEQ ID NO: 281521 - DNA, 501 bp, Homo Sapiens
cccaggttcatgccattcttctgcctcccaagtagctgtgactgcaggcgtctgccactatgcccagctaattttttgtatttttagtagagacaggttttcactgtgttggccaggatggtctcgatctcctgaccctgtgatccgcccgccttggcctcccaaagtgctgagattacaggcgtgagccactgtgcccagcctcagatttttataataaacttatagaaagtttttgaaacttctttagccataaagttttacctatatatttcaatattgtaagtgataatatggaggaaaatgttgagtggagatacattgatgattctgcctcaacgtaatttaaaagaggtagaccctaaatgtgaagaagcactagaaatagcttaaccaacttgtatcgtatttaaattgtactatttaaattcatattaaactgttttattatttagtttattgtatttattattatttagaagagaaatatgtgttacagat

SEQ ID NO: 281522 - DNA, 1000 bp, Homo Sapiens
gaggggccgggtccgcggccggcgaacggggctcgaagggtccttgtagccgggaatgctgctgctgctgctgctgctgctgctgctgctggggggatcacagaccatttctttctttcggccaggctgaggccctgacgtggatgggcaaactgcaggcctgggaaggcagcaagccgggccgtccgtgttccatcctccacgcacccccacctatcgttggttcgcaaagtgcaaagctttcttgtgcatgacgccctgctctggggagcgtctggcgcgatctctgcctgcttactcgggaaatttgcttttgccaaacccgctttttcggggatcccgcgcccccctcctcacttgcgctgctctcggagccccagccggctccgcccgcttcggcggtttggatatttattgacctcgtcctccgactcgctgacaggctacaggacccccaacaaccccaatccacgttttggatgcactgagaccccgacattcctcggtatttattgtctgtccccacctaggacccccacccccgaccctcgcgaataaaaggccctccatctgcccaaagctctggactccacagtgtccgcggtttgcgttgtgggccggagctccgcagcgggccaatccggaggcgtgtggaggcggccgaaggtctgggaggagctagcgggatgcgaagcggccgaatcagggttgggggaggaaaagccacggggcggggctttggcgtccggccaataggagggcgagcgggccacccggaggcaccgcccccgcccagctgtggcccagctgtgccaccgagcgtcgagaagagggggctgggctggcagcgcgcgcggccatcctccttccactgcgcctgcgcacgccacgcgcatccgctcctgggacgcaagctcgagaaaagttgctgcaaactttctagcccgttccccgcccctcctcccggccagacccgccccccctgcggagccgggaattc

SEQ ID NO: 281523 - DNA, 1000 bp, Homo Sapiens
gatacagagatgaaagaggggtgggatccacactgagagagtggagagtgacatgtgctggacactgtccatgaagcactgagcagaagctggaggcacaacgcaccagacactcacagcaaggatggagctgaaaacataacccactctgtcctggaggcactgggaagcctagagaaggctgtgagccaaggagggagggtcttcctttggcatgggatggggatgaagtaaggagagggactggaccccctggaagctgattcactatggggggaggtgtattgaagtcctccagacaaccctcagatttgatgatttcctagtagaactcacagaaataaagagctcttatactgtggtttattctggtttgttacattgacaggagacacactgaaatcagcaaaggaaacaggcatctaagtggggatgtgaagaaaacagggaaaatctttcagttgttttctcccagtggggtgttgtggacagcacttaaatcacacagaagtgatgtgtgaccttgtgtatgaagtatttccaactaaggaagctcacctgagccttagtgtccagagttcttattgggggtctgtaggataggcatggggtactggaatagctgaccttaacttctcagacctgaggttcccaagagttcaagcagatacagcatggcctagagcctcagatgtacaaaaacaggcattcatcatgaatcgcactgttagcatgaatcatctggcacggcccaaggccccaggtataccaaggcacttgggccgaatgttccaagggattaaatgtcatctcccaggagttattcaagggtgagccctgtacttggaacgttcaggctttgagcagtgcagggctgctgagtcaaccttttactgtacaggggggtgagggaaagggagaagatgaggaaaccgcctagggatctggttctgtcttgtggccgagtggaccatggggctatcccaagaaggaggaattc

SEQ ID NO: 281524 - DNA, 1000 bp, Homo Sapiens
agcccctagcccctagcccctggcagacatagctgcttcagtgccccttttctctctgctagatggatgttgatgcactggaggtcttttagcctgcccttgcatggcgcctgctggaggaggagagagctctgctggcatgagccacagtttcttgactggaggccatcaaccctcttggttgaggccttgttctgagccctgacatgtgcttgggcactggtgggcctgggcttctgaggtggcctcctgccctgatcagggaccctccccgctttcctgggcctctcagttgaacaaagcagcaaaacaaaggcagttttatatgaaagattagaagcctggaataatcaggctttttaaatgatgtaattcccactgtaatagcatagggattttggaagcagctgctggtggcttgggacatcagtggggccaagggttctctgtccctggttcaactgtgatttggctttcccgtgtctttcctggtgatgccttgtttggggttctgtgggtttgggtgggaagagggccatctgcctgaatgtaacctgctagctctccgaagccctgcgggcctggcttgtgtgagcgtgtggacagtggtggccgcgctgtgcctgctcgtgttgcctacatgtccctggctgttgaggcgctgcttcagcctgcacccctcccttgtctcatagatgctccttttgaccttttcaaataaatatggatggcgagctcctaggcctctggcttcctggtagagggcggcatgccgaagggtctgtctgggtgtggattggatgctgggggtgtgggggttggaagctgtctgtggcccacttgggcacccacgcttctgtccacttctggttgccaggagacagcaagcaaagccagcaggacatgaagttgctattaaatggacttcgtgatttttgttttgcactaaagtttctgtgatttaacaataaaattctgttagccagatctgggcctaatg

SEQ ID NO: 281525 - DNA, 1000 bp, Homo Sapiens; identical to SEQ ID NO: 201416

SEQ ID NO: 281526 - DNA, 1000 bp, Homo Sapiens; identical to SEQ ID NO: 201415

SEQ ID NO: 281527 - DNA, 1000 bp, Homo Sapiens; identical to SEQ ID NO: 114781

SEQ ID NO: 281528 - DNA, 1000 bp, Homo Sapiens
gctaatttttgtatttttcgaggtttcaccatgttggccaggctgatctcaaactcctgacctcaagtgatctgcccacctcagcctcccaaagtgctgggattacaggtgtgagccaccgtgcttggcatatcctaaagtttcatccatgttgtagcacgtgtccgaatttctttttttcttttttttgtatttttagtagagacggggtttccccgcattagccaggatggtctcaatctcctgacctcatgatccgcccgcctcagcctcccaaagtgctgggattacaggcttgagccaccgcacccggccaacgtgtcagtatttctttcctagcctgggcaacactgtgaaaccctgtctctccaaaaaatacaaaaattagctggctatggtggtgcatccctgtagtccctcctacttgggaggctgaggtgggaggtcaattgagcctgggcggtgaagtctgcagtgagctgtgagtatgtcagtgcactccagactgggtgacagagcgagactgtctcaaaaaaaattttttttttcctttttaaggctgaatgctattccattgtatgaatggaccacattttttttttcccaattgcagatgtcaggctgaaagaatggaccacattttaggctgggcacgatggctcatgcctgtaatcccagcactttgggaggccgaggcaggcggattacaaggtcaggagttcgagaacagcctgtggtgaaacgctgtctctactaaaaagacaaaaattagccgagcgtggtggtgcgtgcctgtaatcccagctactcaggaggctgaggcaggagaatcgcctgaacccaggaggtggaggttgcagtgagccaagatagcgccactgcactctagcctgtgtgacagagtgagacttcgtctcgaaaaaaaagaaaaaaaaagcggccaggcacggtggctcacgcctgtaatcccagcactttgggaggccgagacaggcagatc

SEQ ID NO: 281529 - DNA, 1000 bp, Homo Sapiens; identical to SEQ ID NO: 201418

SEQ ID NO: 281530 - DNA, 1000 bp, Homo Sapiens; identical to SEQ ID NO: 195106

SEQ ID NO: 281531 - DNA, 1000 bp, Homo Sapiens; identical to SEQ ID NO: 201417

SEQ ID NO: 281532 - DNA, 1000 bp, Homo Sapiens; identical to SEQ ID NO: 201419

SEQ ID NO: 281533 - DNA, 1000 bp, Homo Sapiens
tacatcagttctttttgatatgaaaacattcatgtttcagacattgaattgagagcttttaggggaagcataatggttattgtcactatcaacagtctaaaaagaaaaactgaggtctttttaatcttgattacagcactcacggcatgcaccctactcagtgtgggtgtcttcgtttgggggctttttttttttttgcacttctgaggctagatatgtctggctgaagatttgatgtggttcctccttaagctatgcgtcctgttaataataggtactgtactgggctctgtgtaagtgtcgttggggtaggacctatattttaatactgttcctaacatttcattttactagcgagaaatctttgatttcattttattctttgtaattctagacactagattgtagtttagccataactgatgttttttaaaaagggatatattttcttgcacagttgttcaaaaaagagacaagtttcagtcctcaatgctgtcctttgttttacaggtacaagttttctagctcagacaaactatgaaaaactgtagactattctcaaggtattaactcgcagaccctctgggggtaggggctgttttctaagttacaggcagagtgggactgagatggtacagtgtgcacagacaggtactgagctgacagactgggattttctgtactaaaatgttactttgtatcaaaagttaaacaggctttagtacaacaaataaaggtcaatttctgtaaggctgtgtttgaagatgtgagtttttaatctcttcctagtcagtcagctttcctgtatttctaaacttgagacagcttctcctctgcagcacgtagctggagttggctgatgtgtaggttctttctgtctcacatgacaatttgcagtccctgctacccgctgcatcagcctctctctcactccttcctgcccttccctgccacccatctgtccagtgtggcatgaactggtgactgcagccaggctgcc

SEQ ID NO: 281534 - DNA, 1000 bp, Homo Sapiens
tagattgaaaaatgctttgggtttatatagaaattggaattagattgtaagctcaggccactataaacagacaattcagcaacatgaatgtctgaagggacattcaagaatcattaggaacatggggcaatttttcattgtctggggctgtcctgagtattgcagactgtcacccactaactacctatagcaccttcgagtcatggtgacaatctaagacaccttcacaaatgtgcagataaactctagagggagttactgctgccagcaaaaccactggcctaaactaacccaggtttagctttagatgcaggtgtggggcttggccttttctgtaggacttggccaacaatatcagaattgggtcactgaggaggaagcacatgtattcagatgtcccacacattttctcatctgtatgtaaaaataaatcatatatatgttttagaaataatttccaatttcctctttaaatttagtcaggaagcacatgtattcagatgtcccacactagaacaggggctgttggatttggcagggcttttaaagcagattggtggagtcaatacagcatgaaagaagagcaaattgcttcgggattagacaggctgggttctagttctggctcctctacttgccagcaatatgaatttgtactagttacaaaaatctcaaaaatttaattttcttttctataaactaggagactaacagtaaccttatggggttgtaataaccaaacaaaataatttatgtgaagtgtttggttgctataaggcacttaataaagtatagcaattattatgttaagtaacataaatcaagtcaatttgccgtcattcatttgtgataagttgctgtttgctttctgttgatagcaagttgacatttctagctgaagttaaaagcttcacaggttttataaagattgcatttaattgcataaaatgtgaagaattttgacctgaataaaaatatgtactcgttgtgttctttccag

SEQ ID NO: 281535 - DNA, 1000 bp, Homo Sapiens
gcagtggggtaggggtgggggaattcaggggtgtcgaactcatggctgccacctttgtgtccccatcctgcagaaacgtaagagcatgaccaagctgcgaggcccaaaccccaaatccagccggactactctgcagtccaagtcggtaaggagcccctcccagatgcaggggcgtggggcggggggcactgcctggaatggttgggcagagaccagagaccactgatgtgcctccatccctccaaggagtccgaggaggatgatgaagaggatgaggatgacgaggacgaggatgaagaagaggaagatgatgagaatggggactcctctgaagatggcggcgactcctctgagtccagcagcgaggacgagagcgaggatggggatgaggtggggcagacagggcacagtgggaggggaggggagtcctgccaggagggccacctggtgactccacatcctttctcaccccccagaatgaagaggatgacgaggacgaagacgacgacgaggatgacgatgaggatgaagataatgagtccgagggcagcagctccagctcctcctcctcaggggactcctcagactctgactccaactgaggctcagccccaccccagggcagccagggagagcccaggagctcccctccccaactgaccacctttgtttctcccccatgttctgtcccttgcccccctggcctcccccactttctttctttctttaaaaaaaaaaaaaaaaatacggtgggggtagggggctggaggagcccaggccaggactctgcagcctcagagacatcagcccttgggggtcctcctccagggacagcaactatcagactaagccagcaccggaccagcctggcccaccccacccacttctgcacttgcggttccggcatggacaatggaccggagagtgggggtggggggtcccaaagagtttgatgaggccctccacacctgcggcccaatccaaggtggggtggaagctt

SEQ ID NO: 281536 - DNA, 745 bp, Homo Sapiens
cttaccgacagacagacgctgggacccacgacgacagaaggcgccgatggccgcgcctgctgagccctgcgcggggcagggggtctggaaccagacagagcctgaacctgccgccaccagcctgctgagcctgtgcttcctgagaacagcaggggtctgggtaccccccatgtacctctgggtccttggtcccatctacctcctcttcatccaccaccatggccggggctacctccggatgtccccactcttcaaagccaagatggtagctgccatccctgggagcctggaaccaggcaatgttcgggggaggcaggggacaggctggaacctggtgaagtcttaaagtagactcctcctatcggggtgtagaagggaatctgttaatcaaacagagcaatattagaaaggctacagaggtcaactcagtggaacatggttctcccaaacagattttgtaattccgaaaatccacgcatgcgcaaacatacgcatacactcccatgttcctggacagtttatagctaccataacctggcattttccaaaacataccatgtagactcttggatacacaaggtaattttagggccacattaggatgaaccttttaaaaggttatgcatttatttttatgtttccccactagctgtattataggacaatttttatatgtgatatgtatttaccttagtgtgttaaataaacactggcatttcaaaaaaaaaaaaaaaaaaaaaaaaaa

SEQ ID NO: 281537 - DNA, 1000 bp, Homo Sapiens
ttccattccattttatccagggtggttttatctccaccctggcgtttgcagaatccgggcaagtacacaaatggatgctccacaatacttgtctagatatttaaaaggtataaataaaataacttaaatgaatgaaatttttattatttaaatctgttgaagtcttgtgtgcatgaaaataaaactcctcctaatgtggcgttcagtgcccacgccgctgccaccgtgcctggccctgcgcctgggcgcgctgtgtccgctgctacagacgccggcgggcaggcgggcaggcgggcaggcgggcaggcgggcaggcgggcaggcgggcaggcgggcggggggaggcggcgcagagcccggcagcgccgccgttgcctcgcctccgcgcggtctccccggggccagctgggaccccgagggctggggcgggggcgggggcgcggcgactgcggcggggcctggagggcgctggtcccagcccagggcggggtcccggggacgcccctcggccttagatccgcgagcggcagctcgggcctgggggcggggcctggaggagagcgacccgctcactctgcccgggctgatctcgcgagggccgcctggtctcgcggcgctggcctgtgggcggagcgagccctgaaaggctataggcgagggggcggctccgcggggccgggcgaggagtccagagagccatggccgccctgcgtgtcctgctgtcctgcgcccgcggcccgctgaggcccccggttcgctgtcccgcctggcgtcccttcgcctcgggtgagtgcgcggtgagagctggcggcccgaatctcctcctgactccgacctgcacgcccagaccagatcccagaccgcacccccctcccacctgaccccgcatcccccacctgaccccaacccacacccctcttccgcctgaccccgcaccctcacctgacccctacccgcaccccactccgcctgaccccgcacccccccgcctgaccccgca

SEQ ID NO: 281538 - DNA, 1000 bp, Homo Sapiens
caccgtgcaggaaaagttctgcatgtaatatctccgttcataactctgggactttgtttttcagcttttgaaatgacattaacagaaggaagtaagttggagaagaaactcttttattcaacctttgccactgtgagtaaacagtgttcaaccggagaatcaagcaaattccagtcacacaagttgctgggaatttccttttaaatgttatcattaagtatcgtttctttctggtcagaactgccagcctcacctttaacgggatcagattggttccatcagtgggtcttgatgttaggaaaaaagtagagcatgtacaagttcaaaagtacagaaaccttacaggggcttttcttgtttttcctgttatgtgaggtctgtgaattgcaccctcaagcagctcctttattgaaaatgcagtttcagccgggtgggtgtcgagcatccgtagccccagcttcctgggaggctgaggcgggtcattcgagtccaactgggcagcaaagcaagaccccgtctcaaaaaaaagacttttttaaaaaatgaggccgggcgcggtggctcaccctgtaatcccagcactttgggaggctgaggcgggtggattgcctgagctcaggagtttgaaaccagcctgggcaacatgacgaaacccgtctctactaaaaatccaaaaaattagccgggcgtggtggcaggtgcctgtaatcccagctactctggaagttgaggcaggagaatcgcttgaacccagaggcggaggttacagtgagccgagatcatgccactgcactccagcctgggagacagagtgagactctgtctgaaaaaaaaaatgtaactcattttacccatgtttttttagatcattccaattatttggaataggctcaaatgtattctaataagataagctgaagctttagagcaatattttataagatttctgccagtaacttaaagtaattcctctaattaccatcataattttaattttctt

SEQ ID NO: 281539 - DNA, 1000 bp, Homo Sapiens
ttgagctgagaactgtcgatttcttttttctttttttttttttttggagacggagtcttgctctgtcacccaggctggagtgcagaggcgcgatctcggctcactgcaagctctgcctcccgggttcatgacattctcctgcctcagcctcccgagtagctgggactacaggcggccgccaccacacctggctaattttttatatttgttagwacagacagggtttcaccatgttagccaggatggtctcgatctcctgacctaatgatccacccgactcgccctcccaaagtgctgggattacaggtgtgagccaccgcgcctggccgagagctgtcgatttcttaccacccacagtttcagggggttctgtgctcttctcccaggaagaagggatggatgggcagaagccctgggcctccagggtggaggttggttctgtgctcatcttggcttcactttctttttaccatctttcttgcagtttgctattggctccctgatggacgattacttgggtgagtgcctgatcataggtgctggggttattgcctggagaagggatgtgtgggggtggggagtaatataggattcaatgcccaaatcagagagacagaagaaactttcatgctgtctgcttgaaagatccaggacatttgccttgggatgaggagtacatggttgtggctaccctaaattccggttctaactgatatgctttttctggtttcgcagggcttgtaagctgagcctggtggcctcctacccttggtcctactctaggaagtgtgattgtcacacttatcatgttgtccagaggtccagtctggctgctgttgtggaggcaaggaaggcaactcatcccagaaggcatctggtgcttcttgtagcttaactactgcctcctcatttttcagtatgtgttctaagtataaaaagtcctttggttctcatggaagtgttatcttcttttttttttcagaggaggaacaatatctct

SEQ ID NO: 281540 - DNA, 1000 bp, Homo Sapiens; identical to SEQ ID NO: 201613

SEQ ID NO: 281541 - DNA, 1000 bp, Homo Sapiens; identical to SEQ ID NO: 195086

SEQ ID NO: 281542 - DNA, 1000 bp, Homo Sapiens
tgccatggtcctgggattgactgagatgctccggagctgcctgctctatgccctgagaccccactgctgtcattgtcacaggatgccattctccatccgagggcacctgtgacctgcactcacaatatctgctatgctgtagtgctaggattgattatgtgttctccaaagatgctgctcccaagggctgccaagtgtttgccagggaacggtagatttattccccaactcttaactgaaaatgtgttagacaagccacaaagttaaaattaaactggattcatgatgatgtaggattgttacaagcccctgatctgtctcaccacacatcccttcaacccacacggtctgcaaccaaactctaattcaacctgccagaaggaatgttagaggaagtctttgtcagcccttatagctatcatgtgaataaagttaagtcaacttcaaaaacaacttctagaacttattttagcttccatgtgtgacagagcatttgacccttggctgggattggagtgacaagtgctaccgtatttctagcatttgaggtaagccaagatgctccaactgctgaagatttgaaaccaagtcaacacactgtgtcatatttcaagtaattccattggttcagcgctcctcaaacttttcccctaaactagtctgaagggcagagggagaataaatccattccactacggggtctgaagcacaggctgaattgctggctaaaagtgcaacatttctttgaagtcttgtgttttatctttagaatccacaagaaatgtattttctatcttataatatcttcatgtttgttttcatataaatatttaaaattatttacactaagtaacacaagaacatgagtcatgtccctaagagtagcatagtctattttgattattgttattacacaaatggagctagtctttaatcaactacagttctaaaaggaggaaaatagaaaatgcaaacttatatgtttataaaagacatataa

SEQ ID NO: 281543 - DNA, 1000 bp, Homo Sapiens
gggggtttgggaccccatggggggatgttccaccaagcagggggcctggaagggggctgggcagcctggtccctcctctcccaacctggtgccctcagggcctctgaggggggaccctgcccaggaccgtgccccgaggagggagtggagaggaggggcgtgcaggcaggaggtggctctgccggggaagccccggcagcggagatggacaggtgctctttggccactgcctatgtccctccaccccagaggccggccaagttggtgatcccagggcaggagctgggcctggcagagccatctccaccaccccaggtgcccagcttcagtcccctctgggcggcggggtcccgggaggacaagctggggcgggggggcctgggtggtggacccaagagtgaccccgatgtgcctccgccagggtcagcaccccgcactacagccccgggctgctcattgagaagagcgatgcctacaccaaagtctactcccgcgccggcctcaccctcatgtggaaccgggaggatgcactcatggtgctcaggggtccccggactcgtggggctggtgggggctccgtcaggcctctgggcagaccccaagggagggcagggagggcagtgctctgacccctcaccgagagggcatgggtggggcagggcctcggcagcgcggggcgtcggtgctggacttggggggcagcagcagaagccgacctggccctgacccccccaggcctcagccttcccccaaacgcactcggcttctcagggacctgccctgccaggccgctccctggctgctgaccccagccttcctgccccaccttcctctggctcaaacaagccacgagtcttgggggttcctggcggctgtgggccgggcgggaggccagctcacctgctccctcccgcaacagctggagctggacactaagttccggaaccacacctgtggcctctgcggggactacaacggcctgcagagctattcagaattc

SEQ ID NO: 281544 - DNA, 1000 bp, Homo Sapiens
gccttttccctgttacattttcttgtcagtcttgggtttggcaacatctcctgagcaattctttttttttttgagataagtctcgctctgttgcctaggctggagtgaagtggtgcaatcacagcgcactgcaacctccgctcactgcaacctccgcctcccaggttcaagcgattctccggcttcagcctcccgagtagctgggagtataggcatgtgccaccatgcccggctaatttttgtatttttagtagagacgggatttcaccatgttggtcaggctggtcccaaagtcctgacctcaagtgatccgcctgccttggtctcccaaagtgctgggattacaggcctgagccaccatacccggcctcttttgagcactttctgatgccaagaactaggtttagtactggctcaactctgggggagctgatgcctcaaaggacagatagagaagtaaacatatgattgacacccatgtcattgcgcccccacgctccccaccgccatccaggagtaagcatagaagtctcacagcacaaggcctgaactcggtccccaacagacctgtagaaacctttcccctctctcttcccagcctgaagtccttgaacccattgagagtagtaagcaggactcctgacccctcagtctagcaggttgtacagagtagactgcttggtctcaggggacatcactgagtctgggggcactgagtcagagccagctccgcctgcccaccatgactgggtggctcttatacacatgtactcttcccatctccaggtcccagatgtcgaggcctgtccactctccttttcccctaggcagggatggaggggcgtgtcagtcctgtataatttggagtgactggaggggtgggggtattgatgcatggtattccagtaaacttctctgcttgtgtcctaactctaggctccctcattctgtcccgtgctcatttgggtgaagacccatctgtacccagtgtaggtctgac

SEQ ID NO: 281545 - DNA, 1000 bp, Homo Sapiens
ctactacaagcgtcccgtgcttctgattgagtttgaccctagcaagcctttctctctcacttcccgaggtgccttgtttcaggagatctccagcaatgacattagttccaaactcactcttcttacacttcacttccccagactacggattctctggtgcccctctcctcatgcaacggcggagttgtttgaggagctgaaacaaagcaagccacagcctgatgcggcgacagcactggccattacagcagattctgaaacccttcccgagtcagagaagtataatcctggtccccaagacttcttgttaaaaatgccaggggtgaatgccaaaaactgccgctccttgatgcaccacgttaagaacatcgcagaattagcagccctgtcacaagacgagctcacgagtattctggggaatgctgcaaatgccaaacagctttatgatttcattcacacctcttttgcagaagtcgtatcaaaaggaaaagggaaaaagtgaacagtgatggctgttttcttatcccatgcctgtacttttcagcggctccttgccagacatcataggtcattattaattattggtttgctatttcattcttttccaatgctcttaatgattgtacggtggaccagaagccaggattcctctctgaactctgcagttaggcatcacttgaacttgcctgtgcctgctctttttcctccctgcaccgtctatgccgggcttagcatgtttctttttaaatgaggtttgtcaggatcaggtaaagttcctacaagtgattacagaaggtagaaactttacctgatcctaacagatctcatttagaaaggaatatgctaagcctggcatggacggtgcagggagggaaaagagcaggcacaagaaagctaccatttttaacagtccttgttatctagtgcaacataaataacagtcttaattgcacttatacccatgtcctgtggctctccaaatctggtctttgctgttgtg

SEQ ID NO: 281546 - DNA, 1000 bp, Homo Sapiens
gggattacaggcgtgagctaccacatccgccggtctttttttttttagtgacttggttaccattttcttttttcttctgaaagcaagtcccacacagctcttaatcttgaaccctctataactaaactataaaactggttcttacaataagttttttctctctgtacttgcaggagttgcaggagaacccctgccagtggatagtgaaaaagacatctttgattacatccagtggaaataccgggaacccaaggaccggagcgaatgaggcctgtatcctccctggcagacacaacccaataggagtcttaatttatttcttaacctttgctatgtaagggtctttggtgtttttaaatgattgtttcttcttcatgcttttgcttgcaatgtagtcaataaaacctcatgtactattattggatgatgatgatcttattttcttagcaagtatgtttagtttaaattttcatattgtgttcatgatcatactttactatgggttttgtagagagaaatatgagatgatagcagatctttaatgggaatttttattttctcatattctgctctatgctataaaccacattacccctacttactgatcaaaaattgttaattaaggtacacccagagactagcctctggaagactgttcaatattttctagaaactgggggggggcggggcacggtggttcatgtctgtaatcccagtactttgggaggctggggcaggtgggtcccctgaggtcagcggttggagaccagcctggccaacatggtgaaaccctgtctctaccaaaaatacaaaaattagctgagggtggtggcatatgcctgtaatcccagctacttaggaggctgaggtgggaaaattgcttgaacccgggaggcggaggttgcagtgaggcaagatcacaccagtgtactctagtctgggcgacagagtgagactccatctcaaaaaaataaactagggaccttcataaatttagttt

SEQ ID NO: 281547 - DNA, 1000 bp, Homo Sapiens
gggcttggaatgtcagggaggtaattctactctagattctaaagttgtaaagccacttctaaatcaagggccccttcatttcctggcccgtggtgaagtgtgagctctaagttctaatttattaatcaatcagaaaaccccttaatgcctgaagaaaaatagacaaaagattaggacagacaatttacagaagaaatacaaatggtaataaacataaggcagaggagaggtgcagaaagtgtttaacttcactattaatcaaataaatataaactaacactgagatataagtttacaactatcaaattaccataggtttaggtcgggcacggtggctcacgcctgtaatcccagcactttgggaggccgaggcgggcagatcacttgaagtcaggagttggagaccagcctggctgacatggcaaaaccccgtctccaataaaaatataaaaattagccaggtgtggtggcgcacacctgtagtcccagctaatgaggaggctgaggcaggagaatcacttgaacccgggagggagagaatgcagtgagccaagatcgtgccactgcactccagcctggatgacaaagcgagactctgtctcaaaaaagctaaaataaaaattcgaaaggtttaaatgacatgggttgattagagtcttctctgatacactgctggcaaaacaaacagggacggcctttcaataaagcaatttggccacatttatcaagagcctttaaaagagcattccctttgactcaataattccacttctaggaatctatcctaaagaaatactcacagacacacccatatttaaggaagttcatcacagcattatttgtaataatgaaaaattagaaactcttaaatgcctgacatgtacacattacaaagtcattaagaagtatttttgagccaggcgcggtggctcacgcctgtaatcccagcactttgggagtccgaggcaggtggatcgacagctggtgtccatcacaacca

SEQ ID NO: 281548 - DNA, 1000 bp, Homo Sapiens; identical to SEQ ID NO: 207000

SEQ ID NO: 281549 - DNA, 1000 bp, Homo Sapiens; identical to SEQ ID NO: 114785

SEQ ID NO: 281550 - DNA, 1000 bp, Homo Sapiens
tctgtggttcttcacaagtatcatatttggctcctttgtgggtccacatcaactgccatcaccaccaccaaccgcatcccacccaccataacccaaggcagtttagttaaacaataactgacctctcctgtattccccgaatgctcccattcctgcagtctgtccagtgttgaattctgcactatggggaacaaaaaggtttttatcatcctttactttcccagtgattcatggaaaatactacatctttaggatactacatctttcaggatttgctttttacttttaaaaccaacttttagaatttcaattactccctttttctatcagcgagagacaattgtaataaaataattttactattaggatcttgcatctgacatgaaattacaaaatctatttggcattcacaaccaaggtgttactaattgtcctcagccagctctccctgaggataactagaggagaatgccgtctctactgtcttacggagtgagcaataagtgttaaatagaaaaacagggaagttgaaaaagtaggaaagcacttggatttggataaaactgaacacagatttgcacccattatatctcacacctttaacaggggccaaggcatatcagcctggtgcagtagcagaggaagtggattgaactacatcagcatcagtgggcttcagcctggggttctggggagtattactgatgcctgactgggagtggtcaaatcactgtggcggagcccctgcacacaccctcctgttgcctattcaggggcccaaattttgaggaacttactcatttagagagaaaaagggaaacttctcatttgccctctaaaggtttgcagaaaatgaacggacaaaacgcaaattaatggaaggaagaggcaaaaaaaaaaaaaaattctgtaaaatgtaggggaaaaatcacagggtctcactcggttacccaacatgaagtgcagtggtgtgatcatggctcattgaaaacttgaattc

SEQ ID NO: 281551 - DNA, 1000 bp, Homo Sapiens; identical to SEQ ID NO: 201624

SEQ ID NO: 281552 - DNA, 1000 bp, Homo Sapiens; identical to SEQ ID NO: 201619

SEQ ID NO: 281553 - DNA, 1000 bp, Homo Sapiens
acaaaaccttcaagctgagtgcagaaagcacccgtcttttactagaagaagacaataaatgtggtcaatgactgactcattcgaagaaaaagaatgccatttgaaaaagagaagccgaaagagaagtagctgtgagacagcttcaacaaaaacgagatgatgtcttaaacaaaggatcagcaacaaaagctctgctggatgcttcatcgcgtcactgcacctatttagaaaatgggatgcaggattcaaggaagaaattagaccagatgagaagtcaatttcaagaaatacaggatcaacttacagctactataagatgtactaaggagatggaaggcgacacacaaaagtaaaatttgaagcagcacacaaaataacttgagtatttataaagcaaaagagcactgtagtatgaaaattgtatcagttatgataattagtatgtctttgtgaagccaaaaaagtttcatttgtaagctatatcgaaatacatcatttttctacattattcctaaattttgcatattatcaccaaaacacaggtagaaaatgacacagtagcccaatcgtctacttttgtgattgctaagaatttgtgtaattataccttcagaagtttgtttagaatttacatgatttaaaaaaaattacgtgtgagagtaattattttaaaatgcacattttaggcttgaagtagaacatgtgatgatgagaaaaattattaaaaaacaggatgaccaaattgagcggcttgagaaaatcctgcagcattcaagtttgatgctgcaggtgtttgagagctagatgaagatatggacatttctggaattaagagccccctctacattgagcacaagacagtgacgaatccacattcttcagccagaaagtcacctctgagagccaaatgtctgactatagaaaggagagtcaaagaatgataacgacatctcaggaaaattgtgaaaataatcagcagccggatgtggataaccctttc

SEQ ID NO: 281554 - DNA, 1000 bp, Homo Sapiens; identical to SEQ ID NO: 201627

SEQ ID NO: 281555 - DNA, 1000 bp, Homo Sapiens; identical to SEQ ID NO: 201605

SEQ ID NO: 281556 - DNA, 1000 bp, Homo Sapiens
tctagggaacagatgcttagttgagcatcaaggggcaggaagacacctttccctccttgttcctcgctgaccgatgaccctggaactccacggtgcctctctgaatctctgttatggatcccccactatatttgatgggaacccagtgagccaggggccagttttgacaggtcagtgtcccagacattttccactcaggctctcttgggccttacttgtctctcctgctggagcctgggctggtcgggggtgagctgtgcagggagaaggctgggcccccttggtctcaggtgaggagggcccgttccctgcctcacctgagggggacctgagaaggcagtcttccctctgctgtttctaagactgcggtgttcaacgtgtgcctggtgctctcagcataactttcccttctcctttccagggtagcatcacgcccacagactacaccctctccaagtgctacctcccacgtgaggatgtggttttgatcatctactgtggagaggtgggcttccttgtggtcctcacactcactcactttgggcttctagcctcaccttttctttctggtttgaacttgctcggaaagcgtaagacaagatgaagagcaggcgccattataaatatcaaagcccaagaaatggaactttgggcagagatcatgttagaatcaagtggatgatgagaccaattacaggccgtctctctgcacagcacagaaattctcaatcactgaaatgagtaactgcaaaataaatagttgattgtactgttctcatgctataaaagtggacaggtactctacaacaaatctgttttctcatttttatcaaatatatgtatcatcaaaggttgcatctgtacagtatgtaaatgctattaatgtcgtcactcacatgcacgagagtccttgttcccccaggaagggcctggtggccccagcacacacttgggattatgtgtatacataaataaatattgggctgtttccctcttcctg

SEQ ID NO: 281557 - DNA, 1000 bp, Homo Sapiens
ttaagttactgagaaagtgagaatgtcactctgggcagagagaaattctttttttctagagtgtgcctttctttgtactgcagaccacagtgggccgctgagacttgcaaaaaagatttcttttaatccaccttcctttttcgcaggcagcagtagaagggcctttaaatcaaatgcaatcaccaagcttgtctcttgctcttattcctcacttcactccctggaatttggcatttgatggattctggatctgacttaaggctttttctaaatccaagacttggggaattttgttaacagtgcaataaaaataacttcatagtgttacaggaggcacattaaagacggtgtgtgtgtatgtgtgtgtgtgctgctctctttccttaaaaaaaaaatacagacaatgtttctttaaaagtctccatctgcaaatcccattagatgtgcatataaggtttctgatgattaatagttgcctgctagggttttggttggaggggatcttgtgtgtgtgggttaacccctccctctcctctctcacatttcacttcagaaatttgtcactctctccccaccgcaggatttaaaagtgtgtcccagcagccctggtccagccctctgcaggcatttgctctgggctccaggacgaactcctcgtcagctggtgcgtctgggttgggacagtgaaaatgtttagtgtcattggcgacaaatacacatacaggggatcccagtaggtaggctggtgcattggaggggcaggagcaagcccgacataggtgtgtgcacacacataggagtagctggccacatgtgtgtgtactttaaggagagactttagttttgggtttttttttttttttggttcctggggtaaattttctgttgaacatttttccctcctatttagttttttttcttttgcatttttaaaaatttgaacataaaaagtataaagaatcaaatctttgaaaggaccgaggcgtgcagcggacagcag

SEQ ID NO: 281558 - DNA, 1000 bp, Homo Sapiens
ttaaagtctgcaatatttgaaaattcaaggaagccctgaattatgggagagagttcatgtctcctgtagccagctctgttccaggtttagtggatagtggacttgtgcagaagcaccagggcataaggatccactgctaagaaaaagttgagagtcaacacaaatgttgtgtgatactggttggcactctagtggttgggaagagattttaagttctgtgactgactgactgactacgtagaaagagggggagcgaaatactcacccttggtgaccactgttctggaaacatcactgctagcatccaccccacaatgtctactcttgccatttttacaaatgcttataggcttgttcttaaagttctcaggaaggtgttggaaaataaagttgttgtttttttttcttgaaagaccagagaaaatgaaataattccctgtaggatgatacactcctttggggaagccttaatcatgatttggtttctgtgtctgtatttcccttcttttcattcctccttcttcatactgtgatgatgttcttttaatacaattaatgagagacatcaattcaaaagagaaggcaaggagttcaattgtttaagcagttgagacatctcccatgactacttctcttttcttaaccttatgcactgttgttactaaacattggttttttgagaactcagatcttggttgattagcctgctaaagtcttgcatagagaaaaagaaaaggtatcaatatcttaaaggaaaaatctaataataataaccatcccgctttagaattgttttcttgtcatcttccaccagtttgggcttccacattaagcttgggcttaatgtgtctgtggaactccttgctttctgccttatgtatctgcgtggagtttgtattaatatgataaagatatctaagatgcagattaaaaatcaaaaaggatattggactttaaagcttgaacatattgcagatacatagagttactatctttaccc

SEQ ID NO: 281559 - DNA, 1000 bp, Homo Sapiens
atgagctgcactgggccccagagctaggagtctttgcagactttgggaaccacacaaaagcagtacagctgaagcccaggccccctcaggggctcgttcgggtggtgggtcggccccaacctcaactgcagtatgtagatgctcttggctatgtcagtctttttcccttgctgctgcgactgctggaccccacctcatcccgccttgggcccctgctggacattctagccgacagccgccatctctggagcccctttggtttacgctcccttgcagcctccagctccttttatggccagcgcaattcagagcatgatcccccctactggcggggtgctgtgtggctcaatgtcaactacctggctttgggagcactccaccactatgggcatctggagggtcctcaccaggctcgggctgccaaactccacggtgagctccgtgccaacgtggtaggcaatgtatggcgccagtaccaggctacaggctttctttgggagcagtacagtgaccgcgatgggcgaggcatgggctgccgccctttccacggctggaccagccttgtcttactggccatggctgaagactactgaagggagggagaggaggggagccaagacactcatgccactctggctctgaaggacaagggacaaaggcttctggcttttgcccccagccccttggataccagtaattcaaaccttcctcatttcatctcaggtgtctccttgctgtcatcccacatagccctggggtgaatgtgaatccagagtctatttttctaaataaattggaaaaaacattttgaactctattgcttttgccagatttgcctcaccaagaggccttaggtcagtccaggcctcagcactgtctgctgtcctcagggaaggtggggtcaagtggccataacctgtcccttcaaacccagtcaggtcaagtgcaatgcagtgagttgagctttagtccacccaaatccacaagtagctggttcaca

SEQ ID NO: 281560 - DNA, 1000 bp, Homo Sapiens
ccagcatccgatccccatgtctacagcctcagaaactttcttcccaactgcaccttccagggtgtggtggtgccaggctgcagttcactcattctcccatcataaccctcaccaacataggctttcctgggggatggcctgcctgcatttaaacagagattcagacctgaaccttgtcactcagtttccagccagttcattttctacccatttacaccacccattcagttctttggtgatccaggcaagcaaaatttttaaacacctgctaaggcgtgcaagcccctctccctgccttcacatgtctcagggaagaaaagccccagaacagcccctacagtgctctgcaataagagctggggttgtagatagagaagcatcacttacaggaagggaggcggccttacggagaaggtaatatctgaactgagatataaggaagcagtcatatggagcaaggagtggtacattattcttaccttccttgggttccaactgtcttacaaagccaccacctgttccctgtgcttcctttacagacacgttctccttgctcacctgccgcccgcccaccacagatttctgcttgcaggatccccctatacctgcaggccctgcactggcttttgctatcttgttgtgaccctagtggagctttgtgaggtaattgcagcctccctatgagggaggaataaactgtgagccccatttagaaattatccgcagacccctgaagattaggtgtcacttacccccaaaagcccatgaatgccctattttaaaaacatttgctggctgggcgcggtggctcacgcctgtaatcccagcactttgggaggctgaggtgggtgaatcaccagagatcaggagttcgagaccagcctggccaacatggtgaaaccccatctctactaaaaatacaaaattagctgggtgtggtggtgtgtacctgtagtcccagttacttgggaggctgaggcaggagaatcacttgaaccca

SEQ ID NO: 281561 - DNA, 1000 bp, Homo Sapiens
accactgtagaaagtgtgcctgtgtctccatcagaagtgaatgatgctggggataacgatgagagtcaccgcaatttcatccaggacgaagtgctgcgtttgattcatgagtgtcctcatcaggaagggaagagcatccatgagctccgggctcagctctgcgaccttagcgtcaaggccatcaaggaagcgattgattatctgaccgttgagggccacatctatcccactgtggatcgggagcattttaagtctgctgattgaggcagggaaaacatcctttcatttttcgaagacccttgcatccagctgtgagtaattttgacctgttgactttttaggaagtaggactaaaaaaaaaaatctcaagtggcattctttgtcaactcgctgcttttctaactgctttgaacttttcggattttctgtatttgaagctcagagagagacggtgatggataaattgacaactctgtaggatttactagcaagctaatggaaacatgattttcggggaagaaaaactacagaaaatgtagaaatttattatttaattgtgttggagcttctttttccaaaagaaaaactagttgcagtcagggagccagcgaaaagacaaaaaaaaaaaaaaaaaaaaaaaaagtcttgcttgtttttatgttagacttattttccgtgtttggatttagcttattataatgatactgttatctcttgctcaatatagtatttagtatttgattaattcaaatgagctgaagatactaatttgtgaattctaatgctcagttcaaacatttatgtgtgatttgctcttattactatgaatttatgttttcttaaaataagattatactgtggtttaaataaaccatttttgccaggttatctttgaaattttttaaaatgtggtgaagttcaatgattatttcatatatgatgtggtatttggatgaaattacaatttattgtagttgtatggtaaatggatgccagagtt

SEQ ID NO: 281562 - DNA, 1000 bp, Homo Sapiens
aaagctaggtttatattctgatcatgtgggtctctgcaggcaacttgtaaatctctatctaataatccaatgtacacacagcccctgggccaggtgtctgattcccatccctccattcccctcacctctctagcaaccatatttctagatgactcctctagtgtgatctatcagtttttgctcaaagattgtatgaacatgtctcaacatcagcctggtccaagtagagtttggtgtgcaatttgctaaccacactcctgaagaagcagatggcagtgggttcaggtttgcctgtagtttaaaaagactcatgttgctggtccctcagagaaggaagataattaatcattggttctaaaggattctgggtcataacatgtctgagatggaagagaattctgacctgtgtctctgtccacatgtgtgagccattcccagggtggtgtggtctgcggggacctggactccactgcctcctgtggctcagggggtgtggccatcagcagtggtgcactgtgttgcccctctgcagtgggggcctgctccagtgcccaatctgtgcggtttgcatagagggggtgggactctggacggacctgttctgatgggggcagtgtgggttggggagtggaaatcttttctcttgcatgaccaaatgtcagtttagtaatttccccttacagagaacccagaactaactctcctgtttccttcttattggagttaacaatttactttctctgtgtaaaccctgggtttgacattattttcacttccattgcttctccccttccctgtggttcaggaatgaaatagaaaggcttttttttgaatgaatttctcggtcattgtcttccccaattaacttcaggccagcagatgttaaattaagtcctgactgtgtgccagatcctcttggaacggagccagctagagggtgtggagtatgtgggaacatctctgcgctttgccctcggatgacaggggctccagatgctgc

SEQ ID NO: 281563 - DNA, 672 bp, Homo Sapiens
gggaggaccatgtgaagatggaggcagagattggagttgtgcagctacaagccaagggatgcctggagacatcagaaactagaagagagcttttcacaagatggtgccaaagatgaagaaggaagcttccgtccctcctaaagccaaggccaaagcaaaggctttgaaggccaagaaggcagtgctgaaaggtgtccacagccacatacacacacacataaagaaaatctgcacgacccccgcccaccaagacactgtgacttcagaggcagcccaaatatcctcgaaagagcacccccaggagaaacaagcttggccactatgtcatcatcaagtttctgctgaccactgagtctcccatgaagaagacagaagacaacagcacacctgtgttcattgtggatgttaaagccaacaagcaccagatcaaacaggctgtgaaaaagctctgtgacattgatgtggccaaggtcaacaccctggttaggactgatagagagaagaaggcacatattcttctgggtcctgattatgatgctttggatgttgccaacaaaattgggatcatctaaactgagtctggctggctaattctaaatatatgtatcttttcaccagaaaaaagaaactagaagagacaaggaaaaatacccccctacagccttggaggga

SEQ ID NO: 281564 - DNA, 627 bp, Homo Sapiens
cagactgaaggggaagaagaaaaggcacaaaatatgacaggagtagagaatttcattaaaacattgctcccagccagcaccacgtccccagcttgcaaccatggctgcctacacactggtgcagatccagcatggccagagtgcctggaacctggggaaccgcttgggccataaggagtgaagtgcagcaggcaggcattgcaagatgctggctatgagtttgacatctgctgcaccttggtgcagaagagagtgatctgaaccatctgaacagtgctggatgcgattgactagacatggtggcttgtagcaaggacttggcgcctcagcactatgggggaactgactaacctcaataaagcagaagctgctgccaagcatggtgaggcccaggaaaaggtctcaagccctcctatgatgtcccaccccctctcatggagcctgaccatctcttccatagcaatgtcaatgaggactccaggtatgcagatttcaccgaagatcagctaccctcctgtgagaatctgcacccactcccttcatacgctgtagtcagaatagcacctctggggcataggttctcagtccaagccaaaagaaatctccccttacccaagagaattgaaa

SEQ ID NO: 281565 - DNA, 1000 bp, Homo Sapiens
agcctctgccagggtcccacccctgtttacagagctacccggccttgaaagggacactggggacccaggcagggcgccacagggtacaaagcttgacctgtgactgctagaggtcgcagggtgaattgggcaaagggtggcccgtgtgggtgttgtgtggggccggatggcttcacagggaaggtgaaggtgggaggctgagtctgccaaataagagagatgggcatgggcccaggatgtgccacacagcagggggtcccatgggggtcagcgggggagatggagcagggctgggagcagatggatgcagggcacgggctcaggaacgagaccgtttccagctgctgagactcggggagggggctccctgaaacagcctcatccctccacccctctcaccccacggggaggaggctcagaaaagacagaggcgtgtgggtcccaggcagggcctgtttatcctgagagcgcgcatgcgctatggcttacgaggcaacagcggtgccggtcgatcggtggtcggttcgggggtgcggggcccgggagggaagtgcaaagtcaacagggtgtccacgggggagcccgccaagcagggctgagccagaggccaggcgtccttcccgggtgccgctctcacacacctacgttccccaggcctgggagctgccgcgcggaatgaggggcctgtccagaggccgccctcctcggggacgtggggcctccatcctcaggcccctcggagagcccaggcccccagcagggcacaggcgcacagggtagctgggtggggagcagggtgtggcctagggacccccacaccagggcaggtgggcaggggcagctcctacggccacatcaggcctccctggccttacccaaggtccccacgaagaggctgggcgccccaacttggccactgggaagtcccagggactcccactcaggacggccgctgctgaggggagggggcggggaggaaatggtttgcagagaaaggttt

SEQ ID NO: 281566 - DNA, 1000 bp, Homo Sapiens; identical to SEQ ID NO: 206698

SEQ ID NO: 281567 - DNA, 1000 bp, Homo Sapiens
tcctggatttgtcctcagtccccaactgccaagtaggatgtgtccatggataaatgtgtggggcatgactaaagtaccacgtagctgttctttatatttatttacctagaaagatctggcaaagaactcaaagaaaattgtaccatttaatcagtaaatttgtcccctggtgctagcatggtgttatagaaagtggacaggctttagagttaagtgaatctgggttcatatgttagtgttgctattcattagctctatactgttgaacaaattgcttaaactatctaattttggggttttttttccatctaaaatagggataataatatctacctcataggattattgtgagaattaaattaacttcactatagtagaaaatatcaactaccatccttttctctacttcccttgcccctcattaaagactaatacaagttagcatttcagatgtgtagatcattctttattccagttaaaagaacaaactttatctcatcagttctgaaactttaagatgcagtagcatcacctaaagtgcttttaaaatgcagattctcaggcctcaaccgtacaccacccccccacacacgtactaaatcaagaatatgtgcagaaggtactgggaatctacttgttaatatgtgctccaaatgattctgatgtaggtaattagccagccacactttgagaaccactgccttatctattctttacaaaaatgtacattgccaggtctttctttcctgtggatgctaactataggatatttaggttcctctgttctttgtctcccatagtggccccctttgcaaactccaaatacattatatttatttattcttgtgtcttttttcccccactagactgtgagctccttgagggccaggacttatctctgttcgcagtgccaaggacatggcctggaccatagaagatactcagttttttgttgaataaataggtaatatggatttcaaccaaaaaaaaaaaaaaaaaa

SEQ ID NO: 281568 - DNA, 955 bp, Homo Sapiens
  misc_feature (26)..(26): n is a, c, g, or t
aagaattcggcacgagcagtgagctngcttctgagttttcccttctttttatactgttttctgtgctggcttttttgaatcttcctaatttttcatctctttaacaaactcctatgaagttgaaaccgggaagtttgctctaacatttccagagaaggtattaagtcatgatgcaggaatctgcgacagagacaataagcaacagttcaatgaatcaaaatggaatgagcactctaagcagccaattagatgctggcagcagagatggaagatcaagtggtgacaccagctctgaagtaagcacagtagaactgctgcatctgcaacaacagcaggctctccaggcagcaagacaacttcttttacagcagcaaacaagtggattgaaatctcctaagagcagtgataaacagagaccactgcaggaattgcttccagaaacaaaattatgtatctgtggccactcttctggtgatgggcatcctcacaacacatttgcagtgcctgtgtcagtggccatgatgactccccaggtgatcacccctcagcaaatgcagcagatccttcagcaacaagtcctgtctcctcagcagctacaagcccttctccaacaacagcaggctgtcatgctgcagcaggtaatgtgggttacctgctttggtgttctagcatgacttagaaggtgtgcacttattttgaaagtgcagtgggcatatttgacaattcagtctccatttgaaaggacaacctattagcgtgctagaacataaatgtaacattttaattatagaactcgtaagaaaatctagattgcttatttttttaaaaaaattattaaagtctagaataagagcagagagaggtgtaatttgaaaatggaatgagccaatatttaaatattcaaatgcttaggtacattcaatttgttgacttgccaaaaaaaaaaaaaaaaaaa

SEQ ID NO: 281569 - DNA, 1000 bp, Homo Sapiens; identical to SEQ ID NO: 114787

SEQ ID NO: 281570 - DNA, 1000 bp, Homo Sapiens
gccactgcacctagcccaggatctttttttttgatctggctactaattgctcagatgtcatcactctgtgaaaatttttttggtaaagcacttgtgatgtgttcccttttctacatgcatgttactctttaatcaaatttacattaatatttttataaattatccttgttagtatttagctctgatctccaaactgtcagcttccccaggtcaggaactgtactatgtccagccctgtatttttagagtccagccttggacacagcacatgaagtgtactcagtaaatctttgaaatgacctgaactcaatccaggtgggaaccacaaggttggactctgatgaggcctcacaagttacatttccagcccaggcctctctcctaagctctaatctcctatattctcctgcacatctctccccgaatgacctgcaggctccatgcttttaatgcaccccaaactggactcatctttccttaagcctggttgtcttccaggtttgccatccagaggtgtgaggattcccatctgcagtcacggcacctggtactcaatgcctgggtgtcttagtttgtttgggttactatagccaactaccataaactgggtggcttataaacaatagaaatttatttctcacagttctagagtctagaaagtccaagatcaagggaccagcagattccatgtctgatgagggctcattttctgattcatagacaatgccttctcgctgtgtcctcacatggtagaaaggcagggaagggagctctctcaggtcgcttttataagggcactaatcccattcatgggggcttcaccctcatgacctaatcacctaccaaaggccccaccttcaaataccatcacactggtgattaggcttcaacatatgaatatggggggacataagcattcagtctatctcaatgagcaaggagagcataacacccctgtgccgagttctaacctcccaccaagacaaaatttctggcctac

SEQ ID NO: 281571 - DNA, 1000 bp, Homo Sapiens
tttctcaaataaattctaaaacatataattcaggtattaggaaagtgatcccagattagatttttgagatccaaaaaaaatgaaaacctaggaaagtagcaaatatgtgagcaaaatgaaacaaatacttgttgtaaaaatgatggtttgtagaggggtcaaacatcaaatgtaatattgaaataccaatattatatagcccagaaactataataacataaagttcagaagagtgtaaatagaatttatattacataaagtctttatatttttccagagaaaattaaatgttatgatgaatgttacatttggataatttattattgtaatctcgaggaaatttacttaaagattcgaagccaagtttaccacctgtgaactagaggaagtataaaaggtgatagaaacattattcagtcaaaccagagaagacaagaaataagagattaaagaaaaaaaggatggatagaacatgtagaatacaagtataagattctgtatttagactcaaatacagtctaagaatcacattaagcacaagtgaattaaatgctacagttaaaataccagcatagtaagactgggggaaagtgtagctatacgttgtttataagagatctacataaaagataaatataggggaggttgtgtgtagaaggatgaaaaaagacataccatgaaaaccgtaaccaaaagaaactgatgtagtcagtcaagtttccactggaaaaaacaagtctgtaggatgtatgtattgaaagattcaactattcacaatagcaaagacatggaatcaacctaaatgcccatcaatgatagagtgggtaaagaaaatatggtacatatactcaatgaactactatgcagccataaaaaagaatgagatcatgtcctttgcagggacatgaatggagctggaggccattatccttagcaaactgacacaggaacagaaaaccacataccacatgttgacacttctaagagggagctaaatgat

SEQ ID NO: 281572 - DNA, 1000 bp, Homo Sapiens
actcaccctgactctgatctgaggactccagaggattcatagaggaggcatctttggacccagacctgagaggactgggagatttcacccagaggttgtgagcatgtcatggcagggtggaggtggcactcctgagggtgggcactgcctagcagggcatggaggcagggagatgtgcagagcatgagcctggacgggagctgctgcactcacggggggcctggatcctgacgtccatgtacatgatcagctgtgtcacggggttttccacagtgcattggtaagtgcccatctgctaccaggccagactcaagagatacaactttgcatatgagaagtttaggaaggagctgttgtggatccagcagtacttgagatctgggaaagaataggagacacactccatttccacctgggagccgatctcagccgtcacgatgccattgaaggcatcaggattgcccctcagcagcagatagtcaggcccatctgcagagacagggaaggaggcctgaggctgtgtttctgaccctttggggtcctgggtaccacctcatgaggtcctcctccagccaagaggttccccactgtgcaccctgagctgacccctagacctgccccaggcaaggcagctgtgccaacaacaataaccataataagagcacctgccatgatcagggacctactaggggccagccccatggtagccctttacctcgtaataaaatcattggagtaaaagcaaacacatggggcctactgtgtgccagacactgttctaagctctgtgcctgtccccacatttgttgaattcccagaacaactcatgtgattggttccactattgatccattttatagatggaaaacaatgaggctcggaggagaggattaggacttcatgactgcaactgacacagaaggattgagccagtctcagggcctgggggcaaccgccctgagcagctgaagcctctggatcctgggtcttggttccaagc

SEQ ID NO: 281573 - DNA, 1000 bp, Homo Sapiens
gaagagatgacgcagacatagtcctgggtaaggatgatgaatctcatgtggagaagttgggttctggacacatcttgaagatgaagccaatagtatttgcgaatggagtgacggagtgcacgtagggtaagagcaaagatagctcgtggcctctgcttgataggtgccacagatatcacaggtgagtccacagatatcatagatgtcatggatatccatgaagacatccatgacctcaataatatcatggagagtctgattacacctccatagatgtcacagatgcccacaggtgccaaagatgatgcccatgtggttacccagaatggagacttaaataatttaactgccaacaactaaaattgccaaccctgcaggaggagaatattcttaagtgtagatcaaatattgttttggttactgtaatttggaggtggtcccgagccacccacgtagggattgtaggtagaaggcaggagtctgaagttcaggaaaggggtccaggtgggagatacacaggtttgggagcctccacattaaggtttgatgatggacgaatccacaaagaagagaaggggtccacggacacagccacaggaccctccagcatttagtgtcagggagaagaggtggaaacagcaagaagactgtatagagcagctgctgaggagaaatgagtgaccaggagagtgcaagttcaggtgatggtggccaacgggggctggagtttcaaggagagattggtcatttgtttcaaatgctggtaagtctggtaagatagggtttgagaaacgactatttgaatttagctaagttgtatcacaactggtattgacaaaagcagatctggttgcctggtagaggaagatctcttgactagaaagagttcaagagagaatggaaggagagaaggcagaaaccgtcagtgccaagtactatttggagaaacactgcaccaaatctagaaccaagaaatgggcctgcagcagaatatggtcgt

SEQ ID NO: 281574 - DNA, 1000 bp, Homo Sapiens; identical to SEQ ID NO: 114788

SEQ ID NO: 281575 - DNA, 1000 bp, Homo Sapiens
gtcagtagcctactgacaaattatgactaaacaaaggtatttgtatgactatgtaatagatcatccgctgaaaagtaaaacaaaataacaaaaaaacttgtcctaatgggaaagcatgcttaataaaaggaaatgcagaagttataaacatgttttgtaagtaagtattcagaattaaaattatgtgatacatttttatgattgcttaatgatccttggatgtcagattccttgggtctatttatagctaaattataatgaaaaattcaaggcttgctggagcaactttgtcaacaaatatattagttttgcttatatatttgatttttatgtggaaaaattactacccttttttacaagcagagaataaactgttgattacttgatttactagatttagaagaatcacaaaagatatgtagattttcttaagcaaaattcagctcttaatatcataaaaattatatctttgggcagatttgtaaacaataggaacaagtaagaagacaggtatgtaagaagtagcaaagtgtaagacggtggagctttaatgtgtggttttactcagggggtcacaagaaaataacccaatggtccttttgaaagtagtacatacacctttaaatggaacttggtctgaagggtgtggaaatgctggtccagggcagatgcacttcagctaccgttccttgcctggtgtgtgcttgtcttgagggttgagaagcacccttcttatgtgcctttctggaatgggaatgtgttttgccctattggtgaagtccgttagagaacttctctctgcagctagagaaactgaactgattaataaaaagtatgatatctaagatatactgccactctacaggtagtaaatgattcttcacatttgtgcgccagctacatcatgacccttggtaataccgaccaacaggatgaaaattggatatgctttacttttacaaagcacaccttatcttttagttgaagaaatggtggcact

SEQ ID NO: 281576 - DNA, 425 bp, Homo Sapiens
ggactgtctataaaatgtaggtggggaccgtccatttctccaacagctgggaaggatgttggtgttgaagtttacacacctatcaaggacagtaactaccatggcttctggtgctttgacaaaacctccaatgcatagccttctggttaagcgtctgtgatttcatattattggagcattcatggtatccctggtggttgcagctttctacaagattgctatggccgaaccaagaaagaaggcatacgcagatttctacagaaattatgattccataaaagattttgagatgaggaaggctggtatctttcagagtacaaagtgatcttggaatatgaagaatttctttgagttgaaatatctagaagtttgtcactgacttgtgttcctgaactatgaaacatgaatgaatatgtcagctaaga

SEQ ID NO: 281577 - DNA, 1000 bp, Homo Sapiens; identical to SEQ ID NO: 201630

SEQ ID NO: 281578 - DNA, 1000 bp, Homo Sapiens
gttttttaggacgatttctgtctccacgatggtggaaacagtggggaactactgctggaaaaagccctaatagcagaaataaacattgagttgtacgagtctgatcatgttttctgtactcttggggcctctattgtgggacttaacattagtctagatagctttttaaatgctggattaaaatggaaaagagctgttttcatggttgactatctgattgttgatcaaagaaggcactgatgtttattttaagtagtgctaacatttactgagcatttaccaaccaggtgccaggcatgcacctaagtgccttaggagtatgttcatttagtcccaggcttgcttccatgctgctttcagacttctaaggaaaggaaggtgaagtctcacatcaccgcaggcatctgcatcaactttagtgaaattttcctgtagcttgtcaaaagaattattgggtctatgcattattttttgacaaaaacaaattccagttagttaaaataacctgatattttcaaattgtttgacatgacattttatcctactgtacaaatagaataggaagtttaaacatttccatttttttttctttaatggagattatgcttggagaaaggctaagtcaaaacaagtcatgtccaaataattcagactacacagaaatgtttgtgtatttttcaagtttgatttttttttaaacaccttcacactcaatgactaatacgtgctatgctaaatattacagcttagtaaaaattgattctgaatgggcagcaagatgtctctggggaaaaaagctttcagcttgatgacaacagatgatgacaacagaataactaggggttcaggttgttgtaagagcattatggcgggggcggggaaggagctcttgggccaactggatctaggttcaaattccacttactagctgtggaccgtgggtaaattactccaaaacctgtttttatctgtaaagagggcataatcatctcaaaggact

SEQ ID NO: 281579 - DNA, 1000 bp, Homo Sapiens
ataggtcaatatgaaaaaaaataaaagatgaaacaaagaaactgagagcagatcaccaagttgcggtaggttagcctaagatagcttttggttttctcagccttctactattcacagctttgtgtaatcccctccacttgagtatcttgctcataccaatagaatatggtagtagagtagaggtcacctctctgataagtttacagaagattgcgacctccgtcttgccagagtacttcctctcttgctggttttgatgaagcaggctgccacagaagagaggctcacatggcagggacctgagggcagcctctggccaacagcaagcagtaaacagatgccctcagttcaatatccctcaaagaaatgaatcttaccaacagccagttgtgttagctgggaagcaaatctttccctaagggagatttcagatgaggcccccagccttggtagacaccttgattgcagtcttgtgagagattgtgaagcagagctattctcagaattcatgggtgttttaagctatgaggtttttttgggggggagaatggtcatttgtgattcagctatacataagtctacaaaagtcattccagaagtgattcagtggaggtagaatcatgtggttgtgagccccaggcacttggagttctgatagaattgtgacttctaacactggacaccttttctttttctcttattctcccatttttctcctttccccttttcctcccttccttcccttcattccttctactttttccgtactttaaattaatagagcagttggaaacacaaaagcaatgtctgtatctacaaaatgtcattatttatactttgtatccacagtgtgctgcctagggcttcatgcctgaggtgcatctgtagaaggtgctcaacaaaggcttggctgttggtattattgaatcactgtggagtttattcattgttgtccatgccattttgagttttcatttttttatttatgggagtgtcttta

SEQ ID NO: 281580 - DNA, 1000 bp, Homo Sapiens
gtgggggcaggatggaggctccagggatgatactgtgccatgactgccatgggcattcctttccccagataccttcctgcatctgggtcacgcccagaggcagatgggagcctgtgcaggccccgtggcgtcgggaggggcccacacgttggcgcagcctccccaagaccccccacttggcctggtctctcttgttcctcttgggaattggacacctccccggtgactgcctatgacccgcagactccctgggagggaaacgtccagaaagcttctcattggggcggacattttacattaacttaaacaaccaggtgctcttcaactgcacggtgccaggccccaccccagctcaggcttgtgtggtgggggccacaggcatcccccgggcaggtgacctgctcaccaggcagcgacctgacctggcacagttggcccccaccgtggccacccttagaaccccctgtgggctttagcatgcctgcatccaggccacagcctggccactgaaatcagtctctggagtgaagctggccaggagcttctggaagcttctggagctcctcaggtgctgagtggtggtggcgtggcaggcggggcttcggggggctcctcctctcctagggtccagatgtttagtccttgccctgctgcaatccggcactgtccctaggcctcaagttaactggccatgaaaatcaaatgaactttcggtaaacagaaaagattccggacaaggcctgccgtgtgtctcccaaacgtctcctgcagtttgcgtcttgtgtaatgtccctaagcaaagttcaacagttctagtacaaaaactccccaaaaaagtcatgagctgggcaaaaccgttcgtaaacagatgttgcgaagtcagggaaaatcaaagtggacaggtgttcgacctcccagaaacggtctgaggaggggccggtctcccagggtgggcgggagggcattcctggcctgcccgctctgaggccttctccgtgga

SEQ ID NO: 281581 - DNA, 1000 bp, Homo Sapiens
ctatactttcaccttcatcagtcactgaatgagggctgcctggggaaaggcatgaacttggacaaggcagctctctgcagctcaggcagtccctgaagggactgacagttgaagaatgtctactgacatatattcccgtgtccactgcagcccctccctttaagagactctgatataattgactgggggtgagccagtacattaggattttcctaaagttatctggataattttagtatgcaaccacaatagatactcttcaagaattaagctagttgctgagagggaactgttttttgttggtttgttttcactaatgtttgcactctacttcctttaaataaaattatgcctggagaaagggtttttgtatggagcaattgataaatatttgtagggtggttggctaaaataattataattcctttaaaagaaattctacccactaaagttaatttagaagtaaaatataatagaaatccaataatatattcaccaaatggattaagatgttcatgaattatcttcaaagtgttaatcgaataagtaatgtgtatgcttttctgttaaagaggaagttagaagatctgagctctgagtggaaggcggtaaaccgtttacttcaagagctgagggcaaagcagcctgacctagctcctggactgaccactattggagcctgtaagtatactggatcccattctctttggctctagctatttgttcaaaagtgcaactatgaagtgatgactgggtgagagagaaaatttgtttcaattctaaagatagagataaacctttgtgttattgactgtgcaaaaagtcttagagtacattccttggaaattgactctgattcaaagtgttgcatgacaacgggatatggggagtgttctctggagatacacccacaaggaagagaagagcacaagggagattgtgggagagtctgaaatgtgatttgtctgcagcagaggcctaagccagtctcgcaggagcc

SEQ ID NO: 281582 - DNA, 540 bp, Homo Sapiens
taggatcatgtcttctgtgtttctgcctctctgagggagatgggctgactgagaggaatttgggccgtcctttctgagagtagaaggtggcttagtaaagccgagtgttttgcccctctttgtgttgttaaccctagcagccactgactcttttgagtggatgtttaagatttgccttcaccaatctctctacatgtggcactggtttcatatccatgtccctcctttctctgcaggccaggggttatcaccatgcaagctttgtcggaaggggaccggaggctctggatggaagccatggatggccgggaacctgtaagtaacaattcagggaagtagagcaagaatgaaggccctgagttgtttgttgcttccctagtgcagtgatttttgctgctgttctaaagccttgggttcttgaaaccagtgtaccagaggtggttttttattcctaggtttatgtttgtggatattgatattgcttctgtatagatgtagttcttgagctttggcctctctgtcctaaggcatggcttctgc

SEQ ID NO: 281583 - DNA, 1000 bp, Homo Sapiens
gatatattacaattgaatttaagttctggctttgtaaattattttttaaaatgtttaaaaccatatatttgaggaggaatcctatgaattctctttgttgatgatgtcagagattgatagtaatataactgtttagaaaatcagcaattgttcagtgccagaaactcaactacagtaccattacattaaaaatcataacagtccatagagaacccactattcatactccaaaagaattataagccaagaaaatggtagtggtggcttaaggtatagcgtggagttcgtctgggtttgggggttgagttctgtagcagggaggcagtttctggagaactgttattgtttgtgatccgctccattttatggaaacaagctctgcggagagggctttgatgctctaattggcgcatgcgttcttccggagctggagctaatggcaggaagccctgcagtaaaaaccaactggttcaggaaattaaaaccaaagattcgaaaatcaacaacacagacagactcagtggagtgaccctcaaatcctcttggttaatcggtttggatgaacagataatttatgtgatcaagttaaaatgtaacccctcagttgttcccttgcagaaaagctcaaagagtaattatgaatatcatttatgaatgtgttgataggtgtgaagttggaatacaagaagcattttaaaagagaatttggagaagtgtcatttagggtgggggatgggactggaggttggtggatgagattttcattttcaagtcttcttggccctctaggagaagtggtcatttttcctgataaatgcatccaccagatcctacagagaaggaaataaaatgcctgaaatgagaaaacaagtagtttgtgtttcctgcaacatctggggtgaagggaattagggagttgggagtggggaggaagttaggatccccactcttcattctctcgcactggctccctcctctcccctcttgccaggagaagctg

SEQ ID NO: 281584 - DNA, 1000 bp, Homo Sapiens
gtcattgttgaaggcttgtcctgcatagccccatggacacttgccttttcagggagatgtttttgctgttccagattcttttttttttttttttttgagacagaatctctctctgttgcccagactggagtgcaatggtgcgatcttggctcactgcaacctctgtttcccaggttgaagggattctcctgcctcagcttcctgagtagcaggaattataggcacccaccatgtgtccagctaatttttgtatttttagtagagatggggttttaccatgttggccaggctggtctcaaactcctgacctcaagtgatccacccatcttggcctcccaaagtgttagaattacaggtgtgagtcactgtgcctggccggttccagattcttaaacagctgatgtggggacttaaactttgattccaaagtttacactttacacttgttcagccactgtttctcaaagatcaatacctttagttctctctggatagcagaaggcttccaacatgagccataggctatgtcagaatcagcctcatccctatgaacccttaggacattgtcttgactcatggttgataaccacattagccatgtatctacctaacatgcattaaccatttgccatgctgtcaggcactgtgttaagaattttacatggattatgttatttcatttaagagagatcatgacttaagaaaaggatatgttactgaatatattagataattcaaaatttagataatttgatactaagttttccagaataataactgtaaaaggtagggagagaatcttcaaccattgtagaatttcttgtcttcaaactattgtttattttctaaatacaaaaatctctaatatttctcagagtaggcactcttaaattaactgcttggcatatcaggacagctatttgggctttttcatagtgtcttatcatatctaactttcattacaaagttattgattttggagggtgtttttagcactagt

SEQ ID NO: 281585 - DNA, 1000 bp, Homo Sapiens
aatcatgtcacttaacatggttattgttcttttttgcatatctgccttaacatctcttctagactgcaaagtcggagttatagtcatctgtacatctccattatccagtatataagaatatcattttaattttgtatttcccataaaacctagcatactgcttggcatatagaaggtgtcttatgcttggcatatggaagtcttgttgaacaagaataatctaaaaagagatgcttggccgggcacggtggctcatgcctgtaatcccagcactttgagaggccgaggcgggcagatcacgaggtcaggagattgagaccatcctggctaacacagtgaaaccccgtctctactaaaaatacaaaaaaaattagccgggcgtggtggtggacgcctggagtcccagctactcagcaagctgaggcaggagaatggcgtgaacccaggaggcagagcttgcagtgagccaagatggcgccactgcactccagcctgggctacagagcaagagactccgtctcaaaaaaaaaaaaaaaaaaaagagaagctccttgtgtgtaaatcagaataagtggtgggtagacttgactcaataggcttgaaagagaagactgttttccatgtgaaaaaaaaaaaaaaatctatcaaaaagaagcttaggcggccgggagcggtggctaatgcctgtaatcctagcactttggggggccgaagcgggcagatcacctgaggtcaggagttcaagaccagcctggccaacatggtgaaaccttgtctctactaaaaatacaaaaattagcggggtgtggtggtgggcacctgtaaccccagctattcgggaggctgaggcaggagaatcacttgaactcaggaggtggaggtttcagtgagccgagattgcaccattgcactccagactgagcaacaggagtgacactccatatctaaaaaaaagaagcttaggcaacaaagaagtaattcttcataacctagggttagg

SEQ ID NO: 281586 - DNA, 1000 bp, Homo Sapiens
ccccgcagtgggggccggtccccggccatggccgggcccccagcccgggcctgcctcacatggcagggtccccaaggcccgggcaggccgtgcttgccatgggcgcgggcccagcccgatcccgggcgcccggactccggctcccgccctgagaatggaagatccgccgatgatcctggaccctgacccgccgcgccgggtgagtgatcccggttggacaccgcgccgctccggtcctcgcagggcctgggcttgggcctggaacggtcggtggcggtgaccgaggctgcagcgctccagtgcgcctgagggctgtcttgcctgtgtcggaggttgctgggctgactgacggtggttgcttcccttactcgccgggaacaggctccgcggtctgcctggtgcggggtttgggtcggaccttccattaacttctttcagtccggcctccctggcgtcgccactgcctgcttagaggcccactctcgaatacccacttttacgtgccgagtaatgccctgaacgccgccctaattcatataatccttctggatacgacttgaaagaactcttaggaaattaaaaggctgactgattcggctgccatatacaatatgaccaaagggatacgtcattccttacgtgataaacaagaccttgatggatccgtcgcaggaaaccagcctggtactgggtctctaatttactattgataaagatagttatgccacttaggctgaatgtggccatggaagacaagactattgacactttttgtataagaccctaacaaggttacattatcacagtatctcgttccacatctaaactcgatggtgattaatcttttccttgctgagtagtatgatttctacaatttttgataatatgtcacataacattcgtactatactctaattatttccacgatcagtagaaggtcatctttactctcgggacctccttttactatctcactggccgacatgtttatctctatttt

SEQ ID NO: 281587 - DNA, 1000 bp, Homo Sapiens
aagaaactgaaggggagcaaagttcacagcccctttgggcatcgtgtccagggtcccctaggaggtgggtcttccagcgtccacgacatgtgagcccagtcccgactccttcgtgccttagggttggtagttagatgggagagacctcagcgatcacctgataataatacttgttttatagttatatttagtgaaaattcacaagtgtcaggattgatgccttttactcattttgttcaccattttgttcatgaattccacccaatatctacctgtgtagttggagttattaaattcattgttatatggcagaatttccctttcgtaaggcctgacgcacaccaactcctgcttttgggatgagtgagattcacacgaagctgggataacaaaagtttgccttctgtaagacaactcaaagctcagagagagacagagatgctgggggcataataacgtaaatctaagtgatgtactacgaggcaatcactggagctgtgctaaaagtctgactgtctctgggtgcttgaggcttaggttgttttctttcatctcctcctttgtgttcacccatttgaaatcatctccattcaggagaaaacaagatggaacccagtgactggccaccatggacacatgcaagggagaaggagaagtccccagtaggaaaaggtgagtcggagggagagtttaaagagcccacgaggcttagggctggagcttggtagtgaaggaagaagactaaagaggatcccaggtagactgaaagaggggcaactgcttgggcagcagccagggttgagaacaaaggttgccaagacctttgaggaacatgaggggcaacctgaatagggcacaggacccacccctaatccttcctctatggtggatgctatggacattgcaacaggcaactggaacccaaggaaagaatccttgaatttcttgcaagtgactacctggctaatcctcagacagacactcttctccagttatggtt

SEQ ID NO: 281588 - DNA, 1000 bp, Homo Sapiens
  misc_feature (94)..(94): n is a, c, g, or t
  misc_feature (325)..(325): n is a, c, g, or t
  misc_feature (329)..(329): n is a, c, g, or t
  misc_feature (349)..(349): n is a, c, g, or t
  misc_feature (351)..(352): n is a, c, g, or t
  misc_feature (360)..(360): n is a, c, g, or t
  misc_feature (461)..(461): n is a, c, g, or t
  misc_feature (476)..(476): n is a, c, g, or t
  misc_feature (582)..(582): n is a, c, g, or t
  misc_feature (615)..(615): n is a, c, g, or t
  misc_feature (623)..(623): n is a, c, g, or t
  misc_feature (827)..(827): n is a, c, g, or t
  misc_feature (907)..(907): n is a, c, g, or t
  misc_feature (942)..(942): n is a, c, g, or t
  misc_feature (947)..(947): n is a, c, g, or t
  misc_feature (966)..(966): n is a, c, g, or t
  misc_feature (980)..(980): n is a, c, g, or t
atcaataggcataaactctcacttaacgcgaaatgctgaagttcttgagatctgctgtataacattgtgcctatactgaacagtattgtattgnacaattaacaatttaagacagtagatctcatattaagtgttctttccaagataaaataaaatttgaaaaagtttgaaaatttaaaaaataaaagctagcaaaagacagcmctaagattttaatatttgattccaatcctatagccatagaattgattgtaaggggtataggcagtgcctgggattagaatattactactgtagcctggaaagtagtaatgagaacttgatnttanacagaactgacaggaaagantnnagaaggtnggattctaaaggaaacatgaaagtggtgttaataggatttgacaactgagtatatgtggcaggtacattacagtgagtgtggggttttgccagaatggatncatcttacagagcanttggtcatggcgggccaatgaaatgaatctatgttcacataccatctaagagaatcaatttatcacctgtttaaatgaagaagaatgatatgatcatgagaacttnagtaaaaagtgttgttgggacagtcctgattanagaaatancaaagttagtaaggatctgtgattcttactgtgatagtactattccttagaaaaaaatgctttaatgagcatatatgaataaatctaatcaatttagtagctagacgactgttggaaaagtttgctagggttaatgatgtattgaaaataaggtatcacagtatattataaattgaaacagtcttagaggtcacctataatagntctatcatttccttaaaaaactatttatagatcatttcaacatatacaaaagtggagataaatatcatgacttaccattnaattcatttaacaatttgacaattttcattttatnggccnatctttaatcatttttccnccctcaaataactnttttatttctgaaaaaacaa

SEQ ID NO: 281589 - DNA, 945 bp, Homo Sapiens
ccaggaagttgaggctacagtgagccatgattgcaccactgcactccagtcctgggcaatagagcaaggcattgtctcaaaaaaaaaaatttttttttaattaaaaagaaaacatatggcaaaactccctgttccacacttagcatcctgccaatagcatgtttgaaaaccccaacttaattcttatagtcatgatacttcataaatttattaataaatgtgtattttattcttttcatttgttagattatgtctaagcatttggacagtcccccagccattcctcctaggcaacccacatcaaaagcctattcaccacgatattcaatatcagaccggacctctatctcagaccctcctgaaagccctcccttattaccaccacgagaacctgtgaggacacctgatgttttctcaagctcaccactacatctccaacctccccctttgggcaaaaaaagtgaccatggcaatgccttcttcccaaacagcccttccccctttacaccacctcctcctcaaacaccttctcctcacggcacaagaaggcatctgccatcaccaccattgacacaagaagtggaccttcattccattgctgggccgcctgttcctccacgacaaagcacttctcaacatatccctaaactccctccaaaaacttacaaaagggagcacacacacccatccatgcacagagatggaccaccactgttggagaatgcccattcttcctgagttcctctgtactgggatgtatattttcctagccccaaatccattgctggcaatggatgcactgaatgtgccagcactgaggagttaaaatgagaactccaaacactaacgactcttcttcaagatgcagtataagacaatgaattttaacctagatgtaattatacaatggaaatggtattccagtttagaatatggaaagaccga

SEQ ID NO: 281590 - DNA, 1000 bp, Homo Sapiens
ctaggggtgaaactactgggtcataacatgggcacatcttcaactttacgtggatattcctcagctgttctccaaagtggctgtagtgattcaaaatccaaccaatagcgtatgggagttcatgttctacaaactcatccacacttggttttcacagacataagaatgtttgctcacatgatgaggatgaaatagactcatacttttaactttttatgtgcttctttatatttttctactttttctatggtgatcatatattacttgtataattatttaaaaatcacttgctccatgaattaatcttactggacttagattgttcttttgttctttgttctctcagtatttgtgtgtccttgctgataaacagttttgtaattgttctcatgtcatttcttgtctttccttggccctcaaaccagagagaacaagaagaaaacaatacttatttcttttatgtcatcattactaactcctaccaggtccctaagtttaggagattctcagatgcttattaaataactctaaattcttttttctcagttatattgctttgttcactctctctgtcatctggtctctcaacctaaaaaaaataccagctgactataatagaatattaagtgaagagcagaaaattctccataagctacaatcacaactatgtaacaagacaaaaactgatgtagagtaaaaaaaagactagaggaaaatacttgtataattctttaaaaatcatttgctccatgaattaatcttgcaaacagtgttgggtttgggtagtcagattaaaggtaaatctatttagaaaaaaattaataagcaaacaaatacatatctctgtgcaaatatatgcagaaagagatgaagcaatgtggcaaaataccatcagttggtgagtttaggtgaaaggcatacagatttttattgtaccatttttttcaatgtttttggaggtatgaattttttttttttttttttttggagacggagtttc

SEQ ID NO: 281591 - DNA, 1000 bp, Homo Sapiens
aggcatgagccaccacacctggcctaatgacttgtttctaatgaatagactacggtagaagcgacaaggtgtgacttccaagactaggtcataaaaaacattgcaagaggagaaaaaagcattgtgttttccttgttgtcctctctcctgaatcacgcaatctgggggaagccacctaccaagtatgaagacatacaagcagccttatggagaggttcatatggtgaggaactgaggcctcatgtcaaaaaccagcaaagacctaaggcctcccgccaatagccaggtaagtgaaccaccttggaaactgctccttcagacctaagttaagcctttaaactactacatccccagacaccatattgactacaacttcatgagacaccctgagccagaactacccatctaagctgctcccaaattattgagtcataggaaatgtgagataataaatgtttgttgctttaagccactaaattttggggttatttgttacactgcaataattaagtaatacacttcccactagaataaaaactccatgaagataggactctgttttttcactgatattaggctgaaccacatgaaatcatcatagtcaaacaccggcaatttcatataaatcaatctaatatatcccatggaaacagtggttcctctggtgaggggaaatgagtggttagggaataagggtgggaaaaagaattttcagcgtataaccttttgtaccttttacttcaaatggtataaaaagtattgcagcccaccgccatggccgcctacaaactggtgctgatccggcacggcgagagcacatggaacctggagaaccgcttcagctgctggtacgacgccgatctgagcccggcgggccacgaggaggcgaagcgcggcgggcaggcgctacgagatgctggctatgagtttgacatctgcctcacctcagtgcagaagagagtgatccggaccctctggacagtgctagatgccattgatc

SEQ ID NO: 281592 - DNA, 1000 bp, Homo Sapiens
ctatgaaatatttttagtccagaggttttaagctgtgtgtccattcctactctgaaaatgcatagctttgttctggatgtcatctcttgaaagtagaaaactcctatgtgtttatcacattgcagggctttcttatgtatttctggcagacttgcccaaatctttagatgggctgggttatacagcatgccctcccccaaataagggatctgaaataaatactacactattgatagtggagatatattaatttttaaaactgtaaagtaaatgtggtctctaggtttgtggtgtgtacctttgtgttaatgtgtagggaagagacagtgacttgatggttatggggagtgtatcttgatgtgtgtataggggtaagtattgctaaattatttacagcttttattcagggtgagtcatgtgatgaatggcctaatcagaaaagtgaaggagcgaagatgcaagcttgccaaatgatgaaatgaacaagattttgtatctattttttatcaggtgttgtaaaatttgtgcatggctttttgttgttgttgcttagtaactggtagaggagaaaagatgaggaaagaaactcagctttcctcacagtcttttcaaaggtacacagttggggagtaaaatctgactggcctaatcgatggaaaagaccctgtccttttcaccccatcctgcaatcctccgtgcagaggaactacactgttgtattctagtaattcactgtgatttataacaaaccggtgatgtcattctattgtgcacttttgtcaaaccatttatgtgactttaataaacatagtaaacttgctgactgcaccagaggtccattagtgatttatatattgcatgacattttctatttgagtttgacatgtagagtcatttttagtttcatggcaattgacagtcctaataactcagctaatttgaaactaacaatcttgctgtgtaaaaggaaaaaatggtgtttgtgttcagtaaatgtttg

SEQ ID NO: 281593 - DNA, 1000 bp, Homo Sapiens
gggaaagaatgcatactgcgaaaatgagtcttttaaattctgtctgcctactagttttaagtatatggtatgttgtaaaatttccaatgatgagagacagcacaataaatgtaccttatctccttaggctgaaggccataactacatagtggagtaatttaagaactctcttgccttcaccaacccaaaaggttgctttttgatagcaactggctaatgaatttttaaaaagagaagaaaaatactagttttcccctcttttgggaaatagattttaaatggctaaactactagccttaaaactactagtctaataaaatcaactaccacttttgtgaatctgacaggccacatttttatatggccctttacagaatggagtgtgttgaacaggatactaacgccattgagttgagctggcctagcgatggagggacactctaacacaactttccctcagctattatgcaacagatcagggaaaaagatgggatgacagatggggtcagacagaaagagcttctgggaaacaagcttacatagtcttttttaaaatgcacaaagcctcccagctaagaggtcacttggtttgggcttcattaggactgagactttgttgagttctttctgggacttggagagtggatgatattcaggctctgaacattcccagcgctctcccgagggtgccactttctcaagatgaaaactgtgactgaaaaaattaataataaatgtttctgagctgcctgtgttctccctgtgtgggtgagagaagggactagactcctaagcctgcctcagatacaagaggcatcattggctccaattttagagaacttgaaagcaaggctttggacaaaattttgagaccctaatcactttaccttcctccaaattacccaacatacggtaaacaacatttgtgcagaagtatgtatgtatttagttcaggttgacttgtgtccttataaactcttactcaaatgatttgaacttt

SEQ ID NO: 281594 - DNA, 1000 bp, Homo Sapiens
ggggatggggagcctctgctccccccatgctcccaccctggctgagggccagcctcatctgcagagccctggaggaggcccacctatggacacagcccgagagatgggcgcaaggggtgctgggggaggcctgctatcctgcctctgggccacttgaggggcctcaggaagtgtgtgcttgtggctgcatctgcccgtctccctggcccaccatgtggctgcaggccaagctcttcattgctgaccatgaagagacctagttacctgccaagggattccccttccctcctcctcagggtggggtgaacaaggctcctatcccaccccaccccaaaaagagaaaaatgaaaaactcatagtttggagccaggaggcagggtgtcctacagggctgcacagccctgaggggtcagtgctgggatctggttggttggtttgtctttttgtcttttttttttttttttttttttacacaatcattaatgagatttgtcttcagccaccagtgttggccttgaagcagagggcacagcccttggtgtttgtaaaataagtatgaatacacagtgtggcagtgttgtggtttttgttgttgtttttcctctccttttgagaattttcttttgtaaaagaaaaatattttttaaaccgaaatccgtggatgaaatagaagctggagccctcctcttggaatattcagcctaagaacctcataggactatgaattcacccgaaattctcatttgccatcaggccgagcttttaaagaaaaattgttctctaaccaggattgtaacaaaagtgtaaatactgtttcagagttgagagttggtggtgcaaatatgtatataatgaactgtatttttacaatgatcgccgcatgactatttcacaccctttttatactccatatctgtcttccagaaacgtcacctgcctttctcctgtggtctcttaatccagtaattgtattactgccattaaaggatgcagttatttt

SEQ ID NO: 281595 - DNA, 1000 bp, Homo Sapiens
atacacaggtggattaaaatttacattaaaatttacattaaaataccatcatacttcaggcttctataacaaaatatcagactgggtggcttcaaaagcagacatttcttacagttctggaagctgggaagtcccacaatccacatgctggtaaatttggttcgtggtgaggcccctcttcctcttttactgaccacatccccaaaagtgtcaggtagacatgttacaaatagctctgtagagagccatgggaagagacaggaggcagatgtggaacataaagggtttagaaacttctgcaggcagcagtggcagggagcaagccctagagtgtctctttttacgagagcaggaatcccatcatgagagttccttcctcatgactttatctaaacccagtcacccccaacaaaggccccaccccctaaccccatcacattggctgttacggcttcaatgtaggggatggggcacaaacattcagtccataacgaatactgattcctcaaatagggtttaaacatagttaactgagcccccaaagaatgttaaaagagaaaatccattttatttgaatagatgcagtgaccacagcttcttccctcaaatcaacacattacagttagatgtctcccatctgaaattggatagcccactgaaattgaacatgccttctcttataaatgtgtggtgagaataaaagcaacaaagaaatgaatgtggtggctcacacctgtaatcctaacactttggaaggttgaggcaggaggatcctttgtgctcaagagtttgagaccagcctgagcaacacagtgagaccctgtctctacaaaaactaaaaaaattagctagggatggtggcacatgcctgtagtcccagctacttgggaggctgaggtgggaggattgcttgagcccaagaaggtcaaggctgccatgagccataatcacgccactgcactccagcctgggtgacagagaccctgtcttaaaataaaat

SEQ ID NO: 281596 - DNA, 1000 bp, Homo Sapiens
tgggatttcccaatgtgacacatcatgaatgcaaacccctccagcccatcagacgccaggctgcctactggtaatctgtgtatagtatataaacatgtaaaaataggttgtattttactctatgtatgatgctaatcaatgaacactttatttattttacagagaaaacttatctgtgaactttactatatatctgtttattttactttatttttttttttaaataaaaagggttttaaatgctatgcagtcattagtagaaaattttttaggactctgcctgctctgtaactatcttaatatgatctggcagaaactcgcatgtatccaagtaaagtagtttagctaaagaaaggttcttcattgcttttctgttcacagttgtggctctgttttttaagaatgtaacttgtttttagattatacttgcatctgtgactttactaccagccacgttgacacaaaacaggttctggttcaggtaaagttgcgtcagtcacctgcagcagaaatccctcttcattcctcttctctgtgttcattcctcttctgtgctgttctgaagcttctaccaatactctttccatattgtctttttcagtgaagagaaatgcattcaagattaggtccctcctgtctatccagtttcaggattttatgttgttttatacacagttatttcagtatagaaactggctttattgccaagtgtttttttaaacatgttttaactctcatatgagcaaactgtccaacttcagtttttcataagattaaacttcttacgatcaaatttgtctcttgcaatgatgtgatgagttgccaaataattgagattattttaaaatgttttgttcatattcttgttttataattaaaatttacattcagtgtgtatgggtttttttttttattttgactcttaatgtaaggtggatatttctgtcattttacatggtttcttactgagattttatatataaattataaaatgtttacc

SEQ ID NO: 281597 - DNA, 631 bp, Homo Sapiens
acgcccatccgctgagtaaggcggtggcaggacctgcagtggatggacagaccctcagacggatggtgggccacagcgccccgacggtgcccggcccctcctgctggctcctgcactctcctgcacagttctcccctttgcagtggtccacttcctttctccatctgttttggggcctcattacctgtcattctcctttcccctgctccccaggtgctggcctggtttgaggaaggtgaagagaccatcactgcctttgttgaaccctttgtcatcctcttgatcctcattgccaatgccatcgtgggggtttggcaggttagcgttgacccttccttaccccttcatgtcccaacagtgaagaagaggccaaccctccctccagtctcctcctcctccatcacctcccccatacttgcctcttcctctggtcctatcccctggtctggaatgggatggagtgtggggaagaggtgggagactgtgacccactgtcacttcctggctatgtgaccctgagcaagttccttcatccctctgagcctcagtttcttcatccataaaatggggctagcaatccagtgtgaaatcgactaagatgatgcatgttcctggcacacagtaggaattc

SEQ ID NO: 281598 - DNA, 1000 bp, Homo Sapiens
aaaactctgtatttttttcatgatgtaactacttaacttagaaaagagcataaaatgtaatgttataaaaattaaacctagcccatagcattgaatttacaatattgtcttgtaatccagcagacttaaaattcacgtctaaactaagagccaagaatgctcttttttatattggcctatctaaagcgttatttggctcttactaataaacctgaatagttatggttaatgaagttccagcctgggcaattaaactagcttccctctgtacttaatggtaattctgaggaaagagaggaatggaaagagtattcagcaattgagtaaagtgtatttttttcttggtcttttgctattgacttactcttttgtgtacttcttctttttcagagtttgtacaaatgatgacagcaaagtgaagaccttgtacagaatgtgttaaatttcttgtacaaaattgtttatttgccttttctttgtttgtaacttatctgtaaaaggtttctccctactgtcaaaaaaatatgcatgtatagtaattaggacttcattcctccatgttttcttcccttatcttactgtcattgtcctaaaaccttattttagaaaattgatcaagtaacatgttgcatgtggcttactctggatatatctaagcccttctgcacatctaaacttagatggagttggtcaaatgagggaacatctgggttatgccttttttaaagtagttttctttaggaactgtcagcatgttgttgttgaagtgtggagttgtaactctgcgtggactatggacagtcaacaatatgtacttaaaagttgcactattgcaaaacgggtgtattatccaggtactcgtacactatttttttgtactgctggtcctgtaccagaaacattttcttttattgttacttgctttttaaactttgtttagccacttaaaatctgcttatggcacaatttgcctcaaaatccattccaagttgtatatttg

SEQ ID NO: 281599 - DNA, 1000 bp, Homo Sapiens
tatatggtgcttagtttcactggatacaaaattcttggctgataattggtttgttgaggagccggaagacagggccccaatcccttccagcttgtaggttttctgctgagaaatctgctgttcatctgattggttttcctttacaggttacctggttcttctgtctcacagctcttaagattctttcctttgtctcaactctggataacctgatgacaatgtgctgaggcaaagatctttttacaatgaatttcccatgtgttctttgtacttcttgtatttggatgtctaggactctagatggctgcagaagttttccttgattcagaattctcttcttcctcaggaacaccaattattcttaggtttggtcatttaacataatcccagacttcttggaggctttgttcatattttcttatacttttttctttgtcttcgttgaatagggttaatttgaagaccttgtctatgagctctgattttctttcttctacttgtccaattctattgctgagactttccagagcatttcacatttctaaaagtgtgtccaaagtttcctgaattttcaattatttttctttaagctatttcattgaatatttctcccattcaatattggggattgtgttgggagaggagggtctccctttcccacttccgcaaatggggcactcacagtatttggagtgtcttctgggtcctgcaggagcagtctggttccttcagagagtctgtgggtccttttgggattgctggtttttcttgcagttgatctggagctaaaattcaccatggaagcctccagatgctgctctgtctgaagctgcaatctagtcctgccacccagccactatgatcccctccatctctctgtctactttagtcagataagctcaaagctaggaccaaggagccataaatgagccagcggacctaccttcaaacacttgagaagccctccaactcaccatgagatcactgaccccaatcggga

SEQ ID NO: 281600 - DNA, 1000 bp, Homo Sapiens
acatggtgaaaccccgtctctactaaaaatacaaaaattagccaggtgtggtggcagacgcctgtaatcacagctactcgggaggctgaggcaggagaattgcttgaacgcaggaggcagaggttgcagtgagctgagattgcaccactgcacttcagcctgggtgacagagcaagactccgtcttgaaaaaaagaaaaaaatgtgtccacaattttgattagaaaactttcctctttttcacgagagaacctccagtcttgtaaatgtcagtcatggttcagattatttattttaaaaagatgtaatcaaaagactccaaatgtatgtatttttgttccaaaaatgcattttgcctctaaagagaatgtcagttctattccattgtctttagtttctttccctaatcagatataaatgaaagacttattcattggtgtccattggtgtctttagttttatttgtaattcataaaactacttgaaagaaatatggatatactattaagtattgttttcaagtaaagggccaaggaacagcacaaagaagaaacagaaagaaaaagataagatagagccctattcttgctctgaaaaatgagctgcctgtggggaagctgctcccctaaagaagggatcagggatatcttcctgtgatattcactggaatactgtctcccaacagacactggcaagtgcagaagacctcacactgccttgctggcgattttctcctcaatagagtatatttaagaagaaaactttgaaatcttaaaagagagcaaaggcagcggtattagggtaagactggataatgctctggatccattaccataaggatagcaaataacaaagaaaagtaaaatgtatctgacagagacgggctcaggtgctcagttaccaccttggaatcactcttggtccatccttactgtctctgtacatttttctcgcacaccagcacagggcacttctttgctgcttctgtttccatcttgcca

SEQ ID NO: 281601 - DNA, 1000 bp, Homo Sapiens
atacatctaaattgaactgtaggaaacaggcctctcaaacatgctgacacattcatctcttccagccctggcacaaaaactgtttccgatgtgcaaagtgtgggaagagtcttgaatcaacaactctgactgaaaaagaaggtgaaatctattgtaaaggtaaaattcatttcagttactgctgtccatatgaatatccacactggttcttgtttaatgaaatgtcactggcattaaaaaaaaaaaaagaaaagtatgccactattttctgaaaataaaatatcccaagatgcttatagatgacagagaaccacagttaagttcctgatcatttaaaactccccaccagataaaaacaccacaaatagccatcttttgccttcatgtcttgagcaaagcgtaagtatatggaagaaaacagacaaatacataccttacctggcctgactcatgcttgcaactcagcaggaccacgctgaacactatagggccagaatgtgtggacttgtctttgcagctttaagatatttagtacatgacacatttaacatcttaaataagttgagctcttttacacagcagtttaatttatgggggtttgttgagtgggtcttaagcagtgctagcaaagcttaatggacttgcactaactatccttcctccctttcctttgtaggatgctatgcaaagaactttgggcccaagggatttggctatggccaaggagcaggggctcttgttcatgcccagtaagatgtaaaccctgaactaaacatcacacactgagaatctcttcataatctaggcacagataatctttaacactaaactactgtgaaattctaccagcattaagtactgtatatcgccctgtacttggataggctggctaactcgtaggaagagagcactgtatggtatccttttgctttattcaccagcattttgggggaacatttcttttacattttaaataaaacttcagcttgatttgggtgtt

SEQ ID NO: 281602 - DNA, 1000 bp, Homo Sapiens
agccacccccgtcatcacccaatgggcccataaacaaagtggccattgtggcagggatggaggttacgcatgggctcagcaacatggacttccactcaccaaggctgacctagctacagccactgctgagtgcccgatttgccagaagcagagactgatgctgagccctcaatatggcaccattccttgaggtgatcagccatctacctggtggcaggttgattatattggacctgttccatcacggaaagggcagaggtttgtcctcactggaatagacatgtactccagatatgagtttgcctgtcctgcacacaatgcttctgccaagactaccatccatggactcacagaatgcccggtccactgtcatggtatcccacacagcattgcctctgaccaaggcactcactttgtggccaaagaagtgtggcagtgggctcatgctcatggaattcactggtcttaccatgttccccatcatcctgaagcagctggattgacagaatggcagaatggccttttgaagtcacaattaaaatgccaactaggtgacaatactttgcagggctggggcaaagtcctctggaaggctgtgtatgctctgaatcggcgtcctatatatggtactgtttctcccatagccaagattcactggtccaggaatcaaggggtggaagtcgaagtggcagcactcaccatcacccttagtgatccaccagcaaaatttttgcttcctggtaccgcgacattatgttctgctcgcctagaggtcttagttccagagggaggaatgctgccaccaggaaacacaacaataattccattaaactggatgttaagattgccacctggacactttgggctcctcctacctttaagtcaacaggctaagaagggagttacagtgttagctggggtgactgacccagactatcaagatgaaatcagtctactgctccacaatgaaggtaaagaagagtatgcatggaatacagta

SEQ ID NO: 281603 - DNA, 1000 bp, Homo Sapiens
gaactactgtactttgccatttttctataaatcagtatttttttttaattttgatatacattgtgtgaaaaaagaaaatggcctaataaactgtattaaatcttaaacaatgtataaagattgtacttagccagttcaaagtgtatatttattcataatgaattatatttttgtgttttcttgtaaatgtttcttttcccttaaatacagataattcatttgtattgcttattttattatgagctacaacaaaaggacttcaggaacaagtaatgtattagtatggttcaagattgttgataggactgtctcaaaaggatggtggttattttaaatataaatagctaatgggggtggtaggcctataaaattaaatgccttgtataagatccaaaatgaatgcaaaattgttttcacttgtattgactttatgttgtatggattccaatctctgttctgtttggcacttgtatttaattcttcacctttgtaagacatttgtatattgtggatgtgttcattcaagctatttaatatctggcactgttaatacacagtactttattgtacagactgttttactgttttaattgtagttctgtgtactttttttggatggggctggcatgttttctttgtttcctggcaatacgacgtgggaatttcaatgcgttttgttgtagatgctaacgtgtcagaatcctttacattcaacttttctaagaaaagcattttcagtcttgtagtgtgtgcttacagtaactaattttgttgaaaatggtttcaagttattcaaatttgtacaggactgtaaagatttgttgacagcaaaatgttgaagaaaaaagcttatagaataaaagctataaagtatatattaggatctgcaaacaatgaagaattatgtaatatattgtacaaatgtaagcaaaggctctgaaataaaatgccatagtttgtgaatccttaaaaaaaaaaaaaaaaaaaaaaaaaaaaaaaa

SEQ ID NO: 281604 - DNA, 1000 bp, Homo Sapiens; identical to SEQ ID NO: 195101

SEQ ID NO: 281605 - DNA, 1000 bp, Homo Sapiens; identical to SEQ ID NO: 207072

SEQ ID NO: 281606 - DNA, 1000 bp, Homo Sapiens; identical to SEQ ID NO: 195102

SEQ ID NO: 281607 - DNA, 1000 bp, Homo Sapiens
ataatcagttgctgtagctattaattgattttggtagttttgtctttgtgcttcatactaaagttatgagtgggttgcacactgcagttatagcattgcaatattttggtttgtctgtgtacttaattttaccctaggttttatactttcagatgttttctttttatacgtgagtgtttttttctttcagtttgaagagctccctttagcatttcttgtaagacagatgtggtggtggtgaattctctcagcttttgtttgggagagatttatttctccttcatatttgaagttcagttttgctggatacattattcttggatgacagttgaggattttttttttctgttcaacactttcaaaatgtcataccactcactcctggcctgttgagtttcccttaagaattctgttgccagatgaactggagctgctttacatgtctgcctattttctcttgccacttttagggtcctctttttgtccttgacctttaagagttttgattattatatgtgtcagggtagtcctatttgggtcagatctctttggtgttctctaactttcctgtatctgaatatttatctcttcttcaagttttggaaatttttctgttattattttttgaacagcttcctacccctggtgcttgcttaactccctcttaaacaccagtaattcttagatttggtcttttgaggtaattttctatatcttataggttatcgtcattccttttcattcttctctcttttttctcctttgtgtactttcaaatagctgtcttcaggttcattgattcttacctctgctttatttattttgctgttgaaagcctgtaatgaatttttcagttcagcaaatatatctctcatttccaaggtttctatttgactttttagattatttcaatgtcttcgttaattatttctcctaaatttctgaattgcttttctttgttatcttggagatcactgagtttccttaaaactactatttt

SEQ ID NO: 281608 - DNA, 1000 bp, Homo Sapiens
tcctaggtgaatgtgggtgttgtctctttctctggtggtcctgggtggatgtggggtgtgtctctgatggtcctgagtgaatgtgggtgtctgtcactttctctagtggccctgggtggaatatagtagccctgtctctattggtcttgcatgaaatgtagtgagcttatgtccactagtcctgggtgcagtgtgtttagcctctacatactcatcaactgctttattataagtccaggagggacgctgtccagcaggtaagtaaggaacacaggtgaaggtatcagtcgtgtggctgcatgtggtagaggaaaagagagcacaacctctgtccatcactatggtgacagagaagtaaaaggtggatgtattccacggaacactcctcaactgttaggacccctgagctagacatgtatacaacaataccgataaacctctaaaacaaaatgctgagcagaaaacccaagtagcaggatttctaatgctcactaaaacctctatgaacccagaaaccggaaacacaaaccagcacaatctgttctgcatgagcacatgtgtcttggaggactggaggacgcattgccaagcacctaggcatgggtgtctatgaggggaagagaaaggcagtaggcacaggaggtttgaagaaaactgatcatttaaaatatgaaagatcataaaatcagagctgtgccctgtaggaatcttgaaaatggtctgccatgaacttaggaatctaattagctcaaaggtcagagtcatgatcaagtaagataaaaggggtcagtacccacggctcattaccctgctcttaccaaacactgtgctctctctgataaaagccacgtctccagccccgtctctcagacacctgtgaaaagagaaaccatcaggggtaagcacaggcagccctccccagcccctccctgtggaacagtagccctggcactcagcatctatgggtttctactccctgcagggcagggctctgaagctt

SEQ ID NO: 281609 - DNA, 1000 bp, Homo Sapiens
cctgaggtgaggagttcaagaccagcctggcaaacatggtgaaaccccgtctctactaaaagtacaaaaattacctgggtgtggtggcacacacctgtaatcccagctactccagaggctgaggcacgataatcacttgaactcggcagatggaggttgcagtgagctgagactgagcccctgcactccagcctgggtgataaagcgagactgtctaaaaaaaaattatttttaactaatataaaactctctgaacccttctttttctgagctgcttctccacttgagtccatcccacatcattgaacatttaattacacagaattgtgtaccatcttccttgacccccaagatctttagccttctatagtaccctgtctctttttgtcgtactagtcacagttgcacttttttttttttttttgaggcagagtctcattctgtcacccaggctgcagtgcagtagcacaatctcagctcactgcaacctccgcctcccgggttcaagcaattctcctgcctcagcctcctaagtagctgggattacatgcgcgcaccaccacgccaggctaatttttgtatttttagtagagacgaggtttcaccatgttgtcaggctggtctagaactcctgaccttgtgatcagcccacttcagcctcccaaagtactgggattacaggcatgagccactgcacccggccatagttgctattttatttgtgtgattgattaccatatgacgcttttattgaagtgcagtgaaggcaggaaacatgaccggtttttacaatattttcaacacttatcaccataggtggtacatagtagggccttaataaatatttgtaaaatgaacaaagttaatgagtgtttatgtttgtagttttaattgctctgaagtaaatatctgattttccaatttccaccagagtgctctgcacatagtaggtctaattatttttccctctttactaatcacccatgccttgtaagaattc

SEQ ID NO: 281610 - DNA, 1000 bp, Homo Sapiens
gagtgtgtagagttccagggctccaaggcccaggtttcaggcaggggttagggcgtttgcttggggagcagcgctgcccttgggttccctcactgtagggggcagaactgccaggcacccgcacagcgccgggtaggagccacggtgggggcctgtgtgtgctgggtgtctgactctagtgcctctttcaggccctgatgagccagaagagaagcctgcatcaggtgaggcagccccagacaggcagggagaggccaggtggccatgggtgctgagggcctgagcctagggctggctgcagtggaggtgtgggtggccatgggctggctcagggagggcgcagcaaggagacagcccggccgagggggaagcgtggtgctgtccaggtgctggctgtggagagccacctgggcgtctgcagacatcatccggggccaggaggcgggcggtgggggctgtgccgaggtctctgccagccagcctgtgtcccctagatgtgcatgagcagctggtgccgccccgaatgctggagaggttcacccccaagaaagtgaagaaaggctccagcatcaccttctctgtgaaggtagaaggtaaggcgtttcctgcccgcagctatggaaagatcacccctgggggatgggacagaggtgccccctccccactcacatcatcccgagggaaggcctgtggcagggctttatctccagagaccccgctcctggcggggtgcacccaccacctcctgcctgcccctaggacgcccggtgcccaccgtgcactggctcagggaggaggctgagagaggcgtgctgtggattggccctgacacaccgggctacaccgtggccagctctgcgcagcagcacagcctggtcctgctggacgtgggccggcagcaccagggcacctacacatgcattgccagcaacgctgccggccaggccctctgctccgccagcctgcacgtctcgggccgtgagtgggggtggggggatgg

SEQ ID NO: 281611 - DNA, 1000 bp, Homo Sapiens
attgaagtccgggtgaagaagatgggcccgcagggtgtgtctcccaccacagaggtgcccaggagctcatcggggcatctcttcacactgcccggtgcgacccccggaggggaccccaattccaacaactccaacaacaagctgctggcccaggaggcctgggcccagggcacagccatggtcggcgtcagagagccccttgtcttccgcgtggatgccagaggcagtgtggactgggctgcttctggcatgggcagcctggaggaggagggcaccatggaggaggcgggagaggaagagggggaagacggagacgcctttgtgacggaggagtcccaggacacacacagccttggggatcgtgaccccaagatcctcacgcacaacggccgcatgctgacactggctgacctggaagattacgtgcctggggaaggggagaccttccactgtggtggccctgggcctggcgcccctgatgaccctccctgcgaggtctcggtgatccagagagagatcggggagcccacggtggggcagcctgtgctgctcagcgtggggcatgcactgggtccccgaggccctctcggcctctttaggcctgagccccgtggggcgtcaccaccgggaccccaggtccgtagccttgagggcacctccttcctcttgcgggaggccccggctcggcctgtgggcagtgctccctggacgcagtctttctgcacccgcatccggcgttctgcggacagtggccagagcagcttcaccacagagctttccacccagaccgtcaacttcgggacagtgggggagacggtcacccttcacatctgcccagacagggatggggatgaggcggcacagccctgatgctgctgccatggtggcttggggcagcggggagaaaggagtgtccttgaggcctaggacgctgcccggcctcagcagcagccctgggatcctcctgagggccctccctgtcgccctgcgggcccttctt

SEQ ID NO: 281612 - DNA, 1000 bp, Homo Sapiens; identical to SEQ ID NO: 210476

SEQ ID NO: 281613 - DNA, 1000 bp, Homo Sapiens
agtgaattcttatgccttggtcagagtaataactgaaggagttgcttatcttggctttcgagtctgagtttaaaactacacattttgacatagtgtttattagcagccatctaaaaaggctctaatgtatatttaactaaaattactagctttgggaattaaactgtttaacaaataatgctgctcattgtgattcttacctataagcagcctaatttgaattatttgctgcaatcaagagaagtgtacaatagttttattacttttttagtgtacttctatcctttttccaactatatctcctctatttttcctcctcgttaacaggctagaatgtgcattcctgggttaccgatttttacactcaattggatgtgtaatgagggatctatctaatccatcttgtcttggaaattttgcactctagaagaaagtgtgtcactttcttcagcagcgagaccttttaagattggtggtttggttgtcctgttctgtggtctttggtggaagccagtttgttgtaagagaatgtagagcttattaatgtaagtcatttggggttatattgtggagggttgtttaggattgcatggcaggaattgggtaaatgaaaggtaacactaaagattggagatggtataatggcatatctacaggtctgtgtttccttatctgcgaagtgagacattgaaatagatctgttttgcaaattgtggattgcaaccctttagtgatttacgaccagcattaatcactaacccctttcctaccccagtgtaaaacagaaactatcagtgtatcctatataattatttacttatttattttttcagtaatatatagatacatgggtgatacaaatgtttggggccttgtagataatgtagaaacagcatgcaacctcaccgctcttgctccacggagtccaagtgtctgaaaagttgataatacatcaaattagaactgacttggtagaccagggaaatgagatagctggtag

SEQ ID NO: 281614 - DNA, 1000 bp, Homo Sapiens
acttcctacttcactttctccacacaccagcaaacctcctttcccccagccaacataccacacacacaccacaccacacacacatcacatacacacaccacacacacatcatatacacacatataccacacacaccacgtatacatataccaaatacacacacaccacatacacaccatatatgcacacacaccccatacatacacacacccatgcacatacatagcggcaggaagagggctcccggggaatttgcctttcgacactgcatttcccagtaagcccgccgtttttcctttctgtttcatatcacagacagaaaagttttccaaagattcttttatttacatttacatacgattctgaaaaagcgtctccaagctaccacttcttgtagttgccattgtctcattccaccaaaaaacatctcagaccgcccgcggccaccccaaatacgcctgtccactgaagcctcactaaaaggaggaagcgctgatgtcagggttacttaaattcccaggctccggatccctagaagaggtatttccctttacgcccgcgaatttgtcatagaaggcagggcactagagccagccccagccaagtccagggggaggggcgaaggtcagtagcggccttcctaaggcttccttcaacccctccttgcctgccagtcaagtaccgtattttcgcagtactggttaaagtttcactttgacccgcctccatcactcacctgattagatgtttatgagtcaaaaggcggggtcatggggtgtcgagattttattggtggatacatacgcctgtcggcagtgtaccgccccctgtcttcaggagcttgctctttaatggctccttacctcgtccatcttcgaggtttctccctcgctattggcttgtggccccgcctgtcgcgtcccttgctcgtacttgttggtgacagcgcccaaagagactcgcctttctccagaggattggtggatgagtgcacatatag

SEQ ID NO: 281615 - DNA, 1000 bp, Homo Sapiens; identical to SEQ ID NO: 114790

SEQ ID NO: 281616 - DNA, 1000 bp, Homo Sapiens
ggagggccaatggctggtccttcaagtgctgttttgaagtgcagatttccattaaatgatgcctctgtttaatacacctggtacatttctgaagaggggctttataagcaggctgggcaggcccagcttataagttaaagggcatcacagtgagggtgtagtagataaattcaaggaaataagagatttgtaagaaactaggaccagcttaacttataatgaatgggcattgtgttaagaaaagaacatttccagtcattcagctgtggttatttaaagcagacttacatgtaaaccggaatcctctctatacaagtttattaaagattatttttattaccgtacatatttctcttgttttatgtaagcggatgtatatcctcttgttttatacaagccagttcccacttatgagggtacttttttggttttgctggcttaatattgtgtattggtcaatgaggccatttttacatttattacgttacagagttcatggaggttcacctttgtgactgattggtgataaaagatagccaagtgtcttacaagcagcctctgagtcaagtgttctaattttggaacaaagcaggttttactgcttttccagacacaaggctgctaaaccaattaagaaaataattaatttctttcaagcaactaaaaaatatatggtaatttaaaggtgtctgcttatttggttgaacaatttaattgggaaagtttgtcatcatttgaaaaaggaaatataaaaggaacaaccatatagccaacctgtggtctggcagaaacaacgtctctagcaatagtaccaaagtaagtaatggagtcttttttttggcaggtctgcagtaaaagataacattttcttttcttagtcctcctgctctcaacccccatattttgcctttgaatacgtgggttttagtatatatagcccaaaatggtaactgtctccagaacagcaaccacattgaattcttgtgacttaggaaagctt

SEQ ID NO: 281617 - DNA, 1000 bp, Homo Sapiens; identical to SEQ ID NO: 114791

SEQ ID NO: 281618 - DNA, 1000 bp, Homo Sapiens
ttagtttatttttatttatgttgttcttttcttttgtaagtataatccatacacatggtaaaaatgtccaacagtacaagatactagtcacatggaagtaaagccctctaaaaaaaccaaatcttggctaggcgcagtgattacgcctgtaatcccagcactttgggaggccaagacgagtggatcacttgaggtcaggagttccagatcagcctggccaacatggtaaaacccagttctctactaaaaatacaaaaattagctgggcatggtggtgatcgcctgtaatcccagctactcaggagactgaggcatgagaatcgcttaaacccaagaagtggaggttgcagtgagctgagatcacgccactgcactccagcctgggcgacagagtgagactctgtctcaaaaaaaaaagaaaaaaaaatgttaagtgaaaaagttaagaaaccaaacaaggtttacaacactacatgatttaagcaaaaaaaattttttttgttttagagaaagggtctcattctgtcatccaggcagtgcagtgcgatcatagctctctgcagcctcaaactcccgggttcaagcagtcctcccgcctcagcctctggagcagctgggactgtaggcacacaccaccatgcccagctaattttttgatttttgttttttgtagagacggggtctcagtatgttgcccagcctgatctcaaactcctggcctcaggtgatcctcccaagtcagcctccccaaagtgctgggattacaggcatgtgccaccatgctggccaatttttaaaaattttctgtagagacagggtcttgctatgttgcccaggctggtcttgaactcttgacctcaagtgatcctgcctcaggctcccaaagtgatgggattacaggcatgaactaccacacctggccttaaacttaagcaaatttttttttttttttggagacagtttcactctgtcgcccaggctggagtaaagtggcgtgatc

SEQ ID NO: 281619 - DNA, 1000 bp, Homo Sapiens
tgaacaactgcccccaaagcctgcgccggaggctggagttgccattgctgcttgtgtggagatggagcagctgtatgacccacttgactcagacatgccagccatggacacagctggcctgttcaaagaaagtcatgaagatatgaagaagtcagatgaagaggaagagaaacagaagatagaagattctctgtgggcaggtgtggaggcgtgtcaaaaggcttctggtggttcatttaatggattcacacagccccaggatacttcattattcacaatgcagacagaccagagtatgatctgcaacttgatcatacctggagctgatgctgatgcagctgttggaaccttggtgtcagcagctgagggggccccaggagaggaagcagaggcggagaaggccactgtccctgccggggaaggagtaagtttagaggaggccaaaattggaactgaaaccactgagggtgcagagagtgcccaacctgaagcagaggagctcgaagcaacagtgcctcaggagaaggtcattccttcggtggtcatagagcctgcctccaaccatgaagaggaaggagaaaacgaaataactataggtgcagagcccaaggagaccaccgaggacgcggctcctccgggccccaccagcgagacaccggagctggctacggagcagaagcctatccaggaccctcagcccacgccttctgcaccagccatgggggctgctgaccagctagcatctgcaagggaggcctctcaggaattgcctcctggctttctctacaaggtggaaacactgcatgattttgaggcagcaaattctgatgaacttaccttacaaaggggtgatgtggtgctggtggtcccctcagattcagaagctgatcaggatgcaggctggctggtgggagtgaaggaatcagactggcttcagtacagagaccttgccacctacaaaggcctctttccagagaacttcacccgacgcttagattag

SEQ ID NO: 281620 - DNA, 1000 bp, Homo Sapiens
cagctgctgaccccggccaacttgcttgctaaaatcaacgggaaggacagcattgagaaagagcatgtcgaagagatcagtgaacttttctatgatgccaagtcctccgccaaaatcctggctgaccagcaggataagtacatgaagtgagatggctgaggttttcagcagtaagagactccccaggtgtgcctggcctgggtccagcctgtgggcgcttgcccctgggcttggggctgccgtccccactcaggcgtggtctgcagcgctgtcagttcagtgtggaaagcatttctttttaagttatcgtaactgttcctgtggttgctttgaaagaacccttccttacctggtgtgttttctataaatcttcataggttattttgattctctctctctctctctctaagttttttaaaaataaacttttcagaacagttttagatgtacagagtcattgtgaacatacaatagggagttcccatgtatcttgtacccagtttcccttcttgttaacgtgttacatcagatagcacatttgtcaccgtgaatgaccaatactgatgcattattatactgcgttcacattttctcagttttacctaatgtcctttttctgtcccaggatcccatccaggataacccattacaactagttgtcatgtctccttagatgcctcttggctgtgacatcttcttagattttccttgttcttgatgaccctgacagttttgaggaggactgatcaggtatctgtagaacatccctcagttggggtttgtctgatgcttttctcatgagtagactgggattgtgggttatggagaggaagactagaggtgaaatgtggttctgatcacatcgtatcatgtgtggttctcatcacatgctagcaacatgactcatcgttgatggtgagcttgaccctttggctgaggtcatgtttgtcgggtcttctcactgtaaagttactctctgctgcctttccatactgaattc

SEQ ID NO: 281621 - DNA, 1000 bp, Homo Sapiens
  misc_feature (64)..(64): n is a, c, g, or t
  misc_feature (673)..(673): n is a, c, g, or t
  misc_feature (839)..(839): n is a, c, g, or t
  misc_feature (863)..(863): n is a, c, g, or t
  misc_feature (946)..(946): n is a, c, g, or t
  misc_feature (988)..(988): n is a, c, g, or t
tagttccgtaataccatgaagataatttgaggttaagggtgaattttattttacagaatgaaanttgaggccctgagaagttaaggtcttgtaccaggtctcaccagcttacaaatggtaggaccagagccacaactcagggcttgagcctgctctcctcaccactctagcacacaaatctttgatttgttattggaaaatttcacctacccataccttctgttgacatctaatcaaatgtgtttattatctatctcacctcttttttctcatccccatcgtcacttcctccaggcatttatgtttgaatcatctttaagtctggcggtcacaaagtggggactcaaggcctccaggtgtttggatgagaactaccacaagtgctgggagccactcaagagccacttcactcccaactccaggaacccagcagaacctaattgagactggaacattgctaccataattaagagtagatttgtgaagattcttcttcagaatctcatgctttctggtagtattggaggagggggttggttaaaatgaaaattcacttttcatagtcaagtaactcagaacttttatggaaacgcatttgcaaagttctatggctgtcaccttaattactcaataaacttgctggtgttctgtggacgtagtgattggtcataancaagtcttgatgagacaaacctggcaggtcaggtcagtcttgctaagattgaaccaaggcccagggccctttgccttgtggttggcctgaatgccttcattctaggagcacaagtccaggcatatactaggtatcacaaaaccaggccataaggccaaacgttaanaccatgaactgaaactgggaggtntggcaaacctcttaggatccaatccatacatggggaaatttaggggatcatgaatgccccaaatatccacctttcaatcgatnaagaaccgggccaataggctgtctaatcctggtagtcgcttnccaccaatatga

SEQ ID NO: 281622 - DNA, 773 bp, Homo Sapiens
  misc_feature (217)..(217): n is a, c, g, or t
  misc_feature (248)..(248): n is a, c, g, or t
  misc_feature (707)..(707): n is a, c, g, or t
  misc_feature (756)..(756): n is a, c, g, or t
  misc_feature (768)..(768): n is a, c, g, or t
  misc_feature (770)..(770): n is a, c, g, or t
gaattccgaaggtaaggaatctgattatcctgctctcccctattcggacaaagcttttcccaccagacaacctcataggcccctggccttcccacaccacagctgccctgggttctggtcaggtcccccatgggatgaggaaggccagtagggagtcaatgtcacccagaacaaaacatggctgcccaaggcaggctccctcaggacgggcactggntgaggcaggcatcgtgattgccgcgtctaancaaagatggtcagaaaccctagggttaggttctggctagagaagccacaaagcacctggaaagacaggaagatactggagtcaatctgaaactccagggtgtggcaaacacatgtagaccctcagaagcctaagaggaggttttgcagaaccacgaggaaaaaataacttcagggaccagaaataagggtcaggactcaaagcagtggacataatcaggacagaacaggccgaagtgcagacacaaaacagatcaataaaacccaacagctcagcaaaggtgaggcagctgtgtctccctctggctgccttttctcccctcctctctcaccagaagccaaccgtacacgctgagtggagaggccgcgaggacaagacagtgggacatgcgtgtgctggggaagtcgagaagcaggacaggaggcaggtctgagagatctggtttgtgtcttgtgcctgnttctctctgcattccttctctgtctctttccctctcatgcctttcttantgttccctaggnanatt

SEQ ID NO: 281623 - DNA, 1000 bp, Homo Sapiens
gtcctgtttctcccctctccctgccatgggtgttaatctcagggcactgtctaataaatatattgcacactaaattttgtctcaaagtctgctcctgaacaacctaacctgcaacagagatgatgctgacctttgaggaactcccaagtctattggtaaaagcactcagtaaattctaacattactgcggttaccgattcctaactcaggttaaacaagcgatggcgcatgtataccatgataggttatgcagccattaaaataatgttctgggtgccatgtataacacatgatggctccagaagtcagggaagaaggaaaaaagaagggaagggaagagaagagaaagggagggaagaagaggggagggaagaattggacatcagataatcacttgagccctctctctccgtgaatttttcccaatctgtttctttccacatctcttgctccttatcagtctttgggccacctacagtatgagcattacttgggcaattactgtctctctgaatttggcatatgcaagttatagaaactaaaactggacatggccctacacaggtaagcacatatcagcatcgctgtgagcggtcaggactaacaagccttcaacacacaaaagcaggagtaaggatcaaattacacaaatcaaatcaaatcaaatcaaaataaaatccctgagtttgtattccagtaaagcccaaacctaggagggatccaggaaagcgatgagtgtggctgtcaaggtgcttccatctgtcagagtcacacattccaaagcagcagaaatcaactgacagcctccggttactcccccgcctcagcgaggcagggcaggcagcggaaagctcagcccatgtgaggtgcctcctgccaatcacagactacccttccctggtcctggaggttgaaagaattgcaggagggtagaaaagcacctgggtcgggtgcagactgcggagcgggccctaccgtgtgcgcataaagaggaggcgct

SEQ ID NO: 281624 - DNA, 1000 bp, Homo Sapiens
gcggccagcgcagttcactggacgttagtgggggctcaggtcctgggtgctggcgctgagggtccgaggggccttgtccaggtgccagctgggaaactggagacaggcacaggggatggttggaggggaggtgaggggcaagtgttacatccaccctccagctccaggtccagcctggcagccaactatccaaccccctcgcctctaccccaagtaaaacccaatctttgctcctgtcctgggtctcttctgacaccaacccaccacctgctgactccaccactggcccgaccgccctgcctttgcctcatctctgcacctacccacatggcctcctctatttttgacccagatgtccccctcacctgagtcccaggagcccttggagcatccacgttcagtgtgttgagtgacatggctctcttcattctgcaaagagggcagcagggaggaaatgagtgaatccaggagtggcccccctccacgagggacctttccagcacagggtttgatctgtgtgtatcacaggggagatgggagccatggaaggttcttgagcaagatgggggtgggggtggggtgggctgtggattctgctgatgtcagggctctttgccgacctgatcaacactcacccggctgctcctgccgccgcctcgcctcggagccgggagaccagcttctcacttcctcgcctgatagactcacggatcttggagagtgagctgctgcggcgaagggcctggggaggggccggggatgctgctcagtcccccaggcccatgcagtccccacgcccaccccaggagccgaagcacagcccatcctcacctgttctgcgtcaccagctgtgcctgtgttgggggcacctagggggaaagatgggggacactgagatggggacatagagaagccaccaggagggaagacagacaggggctaggggctaggggctcaccgagaggggcgggtaggtcctccttgtggaggatttctttgt

SEQ ID NO: 281625 - DNA, 1000 bp, Homo Sapiens
catgaccctagaacagcaggtattgggacagatatgaactgagttgttttgccccactcttttgaatactgctgctcagcaggcaaagtggaatatggtctttacgggtcaggaatttggggattctgaaagactttggtcctgagatttaaaaagctgtcttaatctctgttttcagaagggtattactcaaataaggtcctttgattttccttgcttactctcactttgctttccttcaggacatggtctgctatacagctcagactctcgtccgaatcctctcacatggtggctttaggaagatccttggccaggagggtgatgccagctgtgagtgaccactgtgggtcaggggttttgtattgtaatctggtacagagaagctgtacactacttaaatgtctttaatatttccacagtgtaagtaatgacttttatgctgggctactcgtctaaatcacctttttctcttgcctagatcttgcttctgaaatatctacctgggatggagtgatagtaacaccttcagaaaaggcttatgagaagccaccagagaagaaggaaggagaggaagaagaggagaatacagaagaaccacctcaaggagaggaagaagaaagcatggaaactcaggagtgacattcccttcactccttttcctacccaagggggaagactggagcctaagctgcctgctactgggctttacatggtgacagacatttccgtgggatagggaagatagcaggaagaaaagtaaactccatagaagtgtcattccactgggttttgatattggcttagctgccagtctcccatttgtgacctatgccatccatctataatggaggataccaacatttcttcctaatattctataatctccaactcctgaaaacccctctctcaactaatactttgctgttgaaatgttgtgaaatgttaagtgtctggaaatttttttttctaagaaaaactattaaagtacttcctagta

SEQ ID NO: 281626 - DNA, 1000 bp, Homo Sapiens; identical to SEQ ID NO: 195085

SEQ ID NO: 281627 - DNA, 1000 bp, Homo Sapiens
gagtaggaaattagtgtgtctagggccggagctcttaggcaaactggtgaagccccttctcagaataatgcttttaacgcctaaaataaaaaatgagattgtaaatgagaaactaaaaattagcttggactttaatctgccctcgtattcattagcctggactgataaaaccagcctcaaaattaccagaaaacagtacttctctcaaaccacagtaaatcataaagtgtcataacaacctcctttcttttctacttaatttttttttttttgccaagtcctttatggaagttgttgtgcgtgtctctgttgtctttgtggaaggccagagccacacggtcctaagagctgggaaccaggaagcataggctgatctgaagaagacacttcaatcatgggtgatattaaaaattttctgtatgcctggtgaggcaaaaggaagatgactccatcctatgaaattagagcattggggaacaaaagtaggcagaaattcttgtgtgaggttcaggtggaagggtataattacagtggcataggaaattccaccaataaaaaagatgcacagagcaatgctgccagagactttgttaactatttggttcaaataaatgaagagtgaagaagttccagctttttggggttgcatctctgcccccacttactgatattcctgacactacagcaaatgctgaaggaggtttaccaacaaccatgggaggtcctcttccgccacatctggctctcaaagctgaaaataattctgaggtaggggcctctggctatggtgttcctgggaccaaggagccaacttgaaggattactactcaagaaaggaagaacaagaagtgcaagcgactctagagtcagaagaagtggatttaaatgctgggcttcatggaaactggaccttggaaaatgctaaaactcatctaaaccaatattttcagaaagaaaaaatccaaggagaatataagtacacccaagtgggtcctgatcc

SEQ ID NO: 281628 - DNA, 1000 bp, Homo Sapiens
gcaatcccaaagtgaagtgctgggattacaggtgtaagccactatgcccagcctataaaatacattcttatgattaatttcgtttgtcccttcttattttttgacgtggctccgctgtaatcccaccacactgccctgaaactgtccttcggcttccacactccccatggggcctgggtcttgggaggcaggaaatgtgtcttcatcttaatatgtttccagctcctggttccaagcctgacacacagagagtgtttaggaaccagctgacgatggaatgaacgatgatcgtgtgaatgaatgaaagcacacaggcactcacacggtgcccctcgctggtgtcctaaaaccacatttgcaggttccctgggagacaagctgcatctgtgagccagtctttgactttccccaaacagctgcagagtgtctggggtctgggcagtcagcggagtcctttagacattcaaggtgaccttcatgttgggcatctggctatgggcccaaagcaaagaacaggtgcgttctgctccaaatgtcccttccttctcctcactcctgtgcctggtgatatggtctggctgtgtccccacccaaatctcatcttgaactgtagttcccataatccccatgtgctgtgggagggacctggaaggaggtcattgaatcatggaggcggtgaccctcgtatcgctcataccattctcatgatagtgagtgagttctcacgagatctgatggttttataaggggctttcctccttttgctctgcccttcttgctgctgccatgtgaagaaaagcgtgtttgcttccccttccaccatgactataagtttcctggggcctccccagtccggtggaactgagtcaactaaacctctttcctttacaattcaagcaatctttaaactgtaatactaatagacctggcttctgattagaccatttccccagctccagctttgaaaattcacaactacattacctccccaagtaggatc

SEQ ID NO: 281629 - DNA, 1000 bp, Homo Sapiens
ggctaatttttatatttttagtagagatggatttcaccatcttggtcgggctggtcttgaactcctgagctcaagtgatccacctgcctcggcctcccaaagtgctgggattacaggagtgaggcaccacgcccggccacaagtcctttattatactgtatgttttacaaatattttctcccactgtgagcctttttatctgttttcctaatttttaatttttgatgaagtgcaataattgacagaatgaatagatagaaaattggcaccaggtgcagtggctcacgcctgtaatcccagcactttgggaggccgaggaaggcagatcacctgaggtcgggagttcgagaccagcctgaccaacatggagaaaccccatctctattaaaaatacaaaattagccgggcatggtggcgcatgcctgtaatctcagctactcaggaggctgacaggagaactgcttgaacccaggagacagaggttgcagtgagccaagaccgcgccattgcactccagcctgggcaacaagagcaaaactctgtctcaagaaaaaaaaaagaaagaaagaaagaaaaaagaaaagaaaattggcaaggatacagaacttgaactccactggacctgacattaaaacacttgactcaacaagagcagaaaacattcttctcgagcacacacagaacatttaccaggagagaccacagtctgggctatgaaacaaaccctgttaacttcaaaaagattcaagtggttttttgttgttttttgatacacggtctcactctgttgcccaggctggagtgcagtggcaggaacatggctcactgcagcctcaacctcctgggctcaagtgatcctcccacctcagctttctgagtagctgggactataggcataggcgtgggcaaccgccccagggtgattttttaaatttttttgtagagacagggtctcgctgcattgcccaggctgacctcaatctcctgggctcaaatgatc

SEQ ID NO: 281630 - DNA, 1000 bp, Homo Sapiens
aaaacaattttactgtgatgatttttgcagattttttcatttgcctttatgaaggggcagaattgggagttccttgctccacaatttttgctgatatccttgagcaagtcaggattaactttttaaaaactgctttattggctgggcgcgcagtggctcatgcctgtaatcccagcactttgggaggccgaggtgggtgggtcacgggaggtcaggagttcaagaccagcctggccaacatggtgaaacccaatctctactaaaaatacaaaaatttgctgggcgtgctggcacacacctgtaatcccagctactcaggaggctgaggcaggggaattgcttgaacctgggaggtgaaggctgcagtgagctgatattgcaccattgcactccaacctgggcaacaaaggcgaaactcaaaacaaaaaaaaaaaccccaaaaactgcgttattgagatataattcacataccataagattcctttatttaaagtgtataattcaaagcttcctagtatattcacagacctgtgcaaccatcacccaactgaagtttagaaaattttcatctctctaaaagaaaccccgttcctattagccatgactctccagcccaccccacccaaccccagcctctggcaaccgcaaatccactggctgtctctccgaatgtgcctgctccagacagttcacagaaagggagtcatataatccgtgtactttgtgtacactgttctcaggtttaccgccatgttccagcccttcacttcttcctaatccctggatagtattgcatacatgcatccacactgactcctgagcagttgtgaatgtctggctggatggttaggatggttaaggacttggaaatgaatggattgggagcaaggtgtctgggagttctgggaccaagtaccagatggacagctgtggggatagctgtgccgggcgggtgtctctgaggtctgttcgcttcagaggggctctcggtgctcagatc

SEQ ID NO: 281631 - DNA, 1000 bp, Homo Sapiens
gtgccgcaataaatatacatgtgcatgtgtctttatagtagcatgatttataatcctttgagtatatacccagtaatgggatggctgggtcaaatggtatttctagttctagatccttgaggaatcgccacagtcttccacaatggttgaaccaatttacactcccaccaacagtgtaaaagcgttcctatttctccacatcctctccagcatgtattgtttcctgactttttaatgatcaccattctaactggtgtgagatggtatctcattgtggttttgatttgcgtttctctcgtgaccagtgacgatgagcattttctcatgtgtctgttggctgcattgctttgaattcttctggctatatacccagaagtggaattggtggatcatatcgcatagtagttctatgtctaattttttgaggaaactccgtactgttctccccagtggcgtcaccattttccatgaccaccagctgtgagcggggctcccatttctccacatcttcaccaacacgtgtctttttgtttgtttggtaatagccgtcctctgcctaggtctgaagctcattgtggttttgctttgtatccccgaatgattagtgatgttgagcatgttttcatgtgcttgttgaccaggtttacatcatctttggaggaatatctattcaagtcttttgcccactttaaaatcagattttgttgttgttgagttgtaggagttctttacatattgtggatattaaccccttatgagagacatggtttgcaaatatttgcttctattcagtagattgcctttcaccctgtggataagttcttttgctgggcagaagttttagagtctgatgtagtcttatttgtctgttttcgtttttgttgccggtgctgtggggttatatcaataaatgattgcaaatccaatgtcatgaaacttttcccctatgtttttgtctaagagttttatagttttagctcttatgtttaggtctttgatc

SEQ ID NO: 281632 - DNA, 1000 bp, Homo Sapiens
ccaggtcaccagcagggcctggcttatgatctatgaacccccggccgatctagaggttagggctctagatggggcggggattcggttagagagggcagggtggaggggaggatagacaggaaccagggaggtccaggcccagtgggggctgagctgagcgggggaggcggggccgagaagggcggggcagaggagtgggatgagcgtggttggggcagggccagtggggcagggtcaaggctgtgttgaggggtagagtgggcgtggtcggagcggagccggtgggcgggacccggcggtgtggagctgcacccggagtttgtaaggatcaggaaagctgcctggagctgggcagacaggctgacccagggaccctgaccacctacctgagcttccacccagcttcaaggctgtggggatcgtttcttagccaaggtgaaaggccctgagccctccagtgggctctgagggtttgaatgtttattctaaatgggctccaacacggagtgcgcgtgcgctcaaggaccagctggctaggagcgccttctctccccgaggggatctggaatgttcatccgcggtcttcccagtggtcctctcctgagcaccctgggcatggggttgggaagtgggcacacttcttcagtgcgtggtactttctgtccctcccaatgacattggtctcttccaaattccccaggcataggaacagccacaagagccaactcacatttcccaaagccctctgggggcacggcagcgccctgggcagaggagagaactgcccagctcagcggggagaaatcccagtggtgctttccgttccccccaggctcgatgactgccatacttaccagctgggggcgctggtgagcactgccagtctccagcgcccgcccttaccccggggcagtgctgcttacagcacggcgactcctaaaggcaaggagttaaaggcacacggatcctagcactttggggaggctgaggtgggcggatc

SEQ ID NO: 281633 - DNA, 1000 bp, Homo Sapiens
tttggatcatgatgtcagcaagacaactgtttaaaaaaaacaactataagacatgtggattgtctgaacactgctacatattggatgacattagacatctttttaggtgtgagaatggtgttgccgtcactagtagagttacatcttgggctatctgtggatggcatcacatgcctgggattcatgtaaacatctccaggggcgggcagggagtggggcagtgagaggtgaacaagagtggccctgcaccgatggtcgtgaaagctgggggtctttatgccattttctctatttttgtgtctatttggaattatccataataaaagttataagaagaaaaatggccagacgcagtggctcacgcctgtaattccagcactttgggaggttgagctgggtggatcacttgaggtcaggagttcaagaccagcctggccaacgtggtaaaacctcgtctctactaaaaatacaaaaaaattagcctggcatggtgacgcgtgcctgtaatcccagctacttgggaggctgaggcaggagaatcgcttgaacctgggaggtggaggttgcagtgagccgagattgcaccaccgcactccagcctgggcgacaaagcaagactccgtctcaaaaaaagaagaaaaaggacacagcttgagactcaccctctgatgcctctgaggctcccagcagtcctccagagagggctacaaacttctgaccccgggcagtgactcctgccaggctcaccgtttcctgtattactctctgtgggcacaggggtcactgatggcatcttcactacaaaaggggttgggggctctgctgtggggactgaggccgtgggcagctagaacccgagtccggatgcccacatggggctatcagagatggctgggggcagtccaggtgaacttgggtgggtttgacactcaaggccaatgacaaccctgtgcttggcagttggagcctctgctgggaggaactaaggactctcgagatc

SEQ ID NO: 281634 - DNA, 1000 bp, Homo Sapiens
tcgtggtgttctttcacttctcagagcctttcctggctccaggattaatacctgttcacagaaaatacgagtcgcctcctcctccacaacctcacacgaccttctcccttccctcccactggcctctttccctccccttctgtcactctgcctgggcatgccccagggcctcggctgggccctttgtttccacagggaaacctacatggttgggctagatgcctccgcacccccccacccacaccccctgagcctctagtcctccctcccaggacacatcaggctggatggtgacacttccacacccttgagtgggactgccttgtgctgctctgggattcgcacccagcttggactacccgctccacgggccccaggaaaagctcgtacagataaggtcagccacatgagtggagggcctgcagcatgctgccctttctgtcccagaagtcacgtgctcggtcccctctgaagcccctttggggacctaggggacaagcagggcatggagacatggagacaaagtatgcccttttctctgacagtgacaccaagccctgtgaacaaaccagaaggcagggcactgtgcaccctgcccggccccaccatcccccttaccacccgccaccttgccacctgcctctgctcccaggtaagtggtaacctgcacaggtgcactgtgggtttggggaaaactggatctccctgcacctgagggggtagaggggagggagtgcctgagagctcatgaacaagcatgtgaccttggatccagctccataaatacccgaggcccagggggagggccacccagaggctgatgctcaccatggggcgcctgcaactggttgtgttgggcctcacctgctgctgggcagtggcgagtgccgcgaaggtaagagcccagcagaggggcaggtcctgctgctctctcgctcaatcagatctggaaacttcgggccaggctgagaaagagcccagcacagccccgcagcagatc

SEQ ID NO: 281635 - DNA, 1000 bp, Homo Sapiens; identical to SEQ ID NO: 195084

SEQ ID NO: 281636 - DNA, 1000 bp, Homo Sapiens; identical to SEQ ID NO: 114794

SEQ ID NO: 281637 - DNA, 1000 bp, Homo Sapiens
caggtctcatgggaaaaatggggcttgaagcacaacactcaaatgagtgacacatttaaaaaaaaaggatagcttggtttttacatatgtcaaatggttgagaaattatatcacaataaatatggccttttatcttgaagacatgcactttgcttttggaagtggacgtcggaagggttgctcaacacaggtggggagatgagtgaggtagctggtacatgtttaggtgtgagttttgtgtactacttaggcttggttcagctagatacagtttcccatattcacctactatttctcgaggatgaaatcacacacaagcaaacatgaagtctgcgttatgatcaaactgttcccaaatatattaaatgggttggaacaaatgcgcaatttcgaaagcaaataacaagggttatagcaggattatacttaaactctgctgttgtagcacaaaaccagccacagaaaacatgtaaatgggtgagcatggctgttccaacaaaactatttatggatgctgaaactggaatttcatgtaattcctacctatcacaaaatactgttttaattttttccccatttaaaaatggaaaaatcattcttagctcatgggccacacaaaaatgggcacttgggctgggtgcagtggctcatgcctgtaatcccagcactttgggaggccgaggcgggtggatcacctgaggtcaggagtttgagaccagcctggccaacctggtgaaaccccttctccaccccgtctctactaaaaatacaaaaattagccaggcgtggtggcacgcacctgtagtcccagctactcaggaggctgaggcaggagaatctcttgaaccatggaggcggaggttgcagcgagccgagatcatgccactgtactccagcctgggcgacagagcgagactccgtctcaaaaaacaaatcaacaaaaaaaggggcacctggccctagtttactagtcactagtctaaagctttcattggctgaa

SEQ ID NO: 281638 - DNA, 311 bp, Homo Sapiens
ctgtgatttggtaaataccatatgttgaaaatagacctataaatggttcttcattgtgtaaatatttaaccttacttgtgctgatttatatttcaaagactgtgcttcctttcctttgaactttcaggacccctacaagtcttttggtttaccatctattgggagattgtctcagtaccaagaaccgttacatctacctggtgtaagtcattaagctgtaataccagctgaagggttaaaatcgtgatttatgtcatacttttatgttaaagcatgtcaacaccaaagggtgtaaattgaaggacaagtga

SEQ ID NO: 281639 - DNA, 1000 bp, Homo Sapiens
  misc_feature (87)..(87): n is a, c, g, or t
aaggaggagcctgaagaacttcctgcggccccagggcctctcccgccacccccacctccgccgccgcctgttcctggtcctgtgacnctccctccaccccagttggtccctgaagggactcctggtgggggaggacccccagccctggaagaggatttgacagttattaatatcaacagcagtgatgaagaggaggaggaagaaggagaagaggaagaagaagaagaagaagaagaagaggaagaagaagaagaggaagaagaggaagaggaggaagactttgaggaagaggaagaggatgaagaggaatattttgaagaggaagaagaggaggaagaagagtttgaggaagaatttgaggaagaagaaggtgagttagaggaagaagaagaagaggaggatgaggaggaggaagaagaactggaagaggtggaagacctggagtttggcacagcaggaggggaggtagaagaaggtgcacctccacccccaaccctgcctccagctctgcctccccctgagtctcccccaaaggtgcagccagaacccgaacccgaacccgggctgcttttggaagtggaggagccagggacggaggaggagcgtggggctgacacagctcccaccctggcccctgaagcgctcccctcccagggagaggtggagagggaaggggaaagccctgcggcagggccccctccccaggagcttgttgaagaagagccctctgctcccccaaccctgttggaagaggagactgaggatgggagtgacaaggtgcagcccccaccagagacacctgcagaagaagagatggagacagagacagaggccgaagctctccaggaaaaggagcaggatgacacagctgccatgctggccgacttcatcgattgtccccctgatgatgagaagccaccacctcccacagagcctgactcctagccatcttctgcaccccacctctttgtttccaataaagttatgtccttaaaaaaaa

SEQ ID NO: 281640 - DNA, 1000 bp, Homo Sapiens
atttgtttccttttgtgtttatctggcctagtgtgctgtttctttaaaccaggaagaagttttgtcttttggaggctcttctcacctgtccagcctggcatgtcagagaacacatagcctgtgacaatgccgtttttaaaggtttacttaatttgcagtaaatccagctgcctcaagaactcctacaccaagatggacatttcctttccagaaatgggatcaagtatctgctcactttggtattggatggactaataatgtagctccaaaaatgcaaggatggaagaatatgtgtaatccaaaccaaggaaggaaatgaaaagtgaacgtactgtttttaccacccctttctgtttgcttattgttggttgcttcactgtgcataaagttgttttcaatgcaacgcttgttaaataaatattgtgaactattttgtaaatgaaatgtattatgttgaaagctgtcagttcaaaaataagcttttttgttgttgttgaagatgaagtgtgttaggtgaaaccaaaaagccaaaaaaagtaatttcatatatagcatctatttgaatataatctttctttaaaatttcttttagcatagcattttcagtgctaagaaagaatctctatgttatattttgttaaaataatggctttctaacaaagcaaatggtaaagtacaaagttggaagatgtcaagttaacgagacttgctgcaaagccttgcagaacggaggaggctcgcctgctggctgtctctccctccaacctctctacaatcatgcctgctttgaggtgttctgttgcagcaagctgcaccttgggtcactcttttggaatattttgactataggctgcgtcacaggcagaaaaggagttgatggaaaatggactaaaaaactgacatgtttgaatcagtgctagagggaacagattgtgaattttgtttacagcatccaatatttggatttttttgtaaataaaaaagttatttttttctattg

SEQ ID NO: 281641 - DNA, 1000 bp, Homo Sapiens; identical to SEQ ID NO: 201637

SEQ ID NO: 281642 - DNA, 1000 bp, Homo Sapiens; identical to SEQ ID NO: 207003

SEQ ID NO: 281643 - DNA, 1000 bp, Homo Sapiens; identical to SEQ ID NO: 206995

SEQ ID NO: 281644 - DNA, 1000 bp, Homo Sapiens; identical to SEQ ID NO: 205654

SEQ ID NO: 281645 - DNA, 1000 bp, Homo Sapiens; identical to SEQ ID NO: 195100

SEQ ID NO: 281646 - DNA, 1000 bp, Homo Sapiens
atatgatacgtaaactaataaaaaatagctgtatatttggagcttaaattttactgagtaaagacacaataaatagtataggcaatatataaatatattatatgttatattagaagataattgttatagaaaaactatattggggtaaaaacaattcaaaatgcttgaggacactacttgcatatttaaataaatggttaccctaattgaagaggtaatgtttgtgtagagaagtaagttatattttgaaaggattgctctagctgctagattgaacatacactaccgtttgagttttcaggggtggagaaggggggtaaaaagaagagacagaaggacaactttggaatttgtagatctagtcttgagagtagcactagaaacttggttagaaatgcttacaatttggaacaggattgcagcagtaaagatgaaaaaactatcaagattcaggcattattctgaagggaaaaagggaaaatttctggcagaagaatgtagtatataagagaaaaacaatcattgagggtgattaaaatacattggttttgagtaggttgaaagatgaaattaccatcagctgagacagggaagatttggtattttgggggaagtttagatgttactgttgagatgtctatttaaagctcaagtaaagatgtgaatagtatttagatatacaggtttggcacttagggaaaaaatgtgggccaaaaatcttaattgcatagttttgagtttagatgacatatgtaaagccatgagacttgaaaagatgaccaaaagagttgagtgagtgtagagatccaaagactgcactttggattctcaaagcttaagagattgaagaaaagataagaggaagaaaaaggcagaagaaggatatgtttgtaggagcatagccatgagactttgatatgttggacatcatataaataaagtatacagaggaggacatactaatcagctgtatacaatgctaaatgccaacatagggatc

SEQ ID NO: 281647 - DNA, 1000 bp, Homo Sapiens
tgtccagaaacacagacataaaataactgctgcatttccaactactcatagtaacatgtgctctaatgcctatgtaccttgtttctgtgggcggaaggcactaaggttaaaaaaattcttagtactgaaaccaagtaaaggataactaggtgggcttacacacttatagccctgatcttttgctgagaataattactactcataagacactgtctcggggaactgaaaacttttgtcttccctcgcccgccatctctcaaaaggttcctgaaagattttggatccaaaaggtatattcaaactatattcaagcaataaaaactcaatggcaacaacttatttaatggttaaaccaatttgggcagaaacactggcacagttctatgagtcctatggtaagcccgatttgcctttaatgaaaagagacatactgagcaagacgacttaatgacctactggttgttgacaagaaatgttatttcaggaggaagggaaatggtggcaagcagcctggaaaaatgataaaacaaactcaacagttacataaagatgggaagacacatgtacccagactcaagaaggattaagtacgctcctcaattaaaagccaaggtagtgcaaggaaaatggcctggtatcttggcagagcgagcaaaaagaatgaatttatgggaaacttatggtgcctcagtcaattacaacattttggtatataagcaagagctgattttgttgagaaagatgagaaaacatttagtaagcaatctaaatcataatgtaattgctacttggtgcaaatggtatcattggtgaggttcatatgaacacatcctatgaccaaatgaatgagcaaatgtataaggaaactgaattaaaatccctacaagatggtcttctggtaaaagactagattatcagagaaataactagattaataattgttataaaatttcacaaaactcaactttctgtggtagaaagaggtaaaactgtcaagctt

SEQ ID NO: 281648 - DNA, 1000 bp, Homo Sapiens
taaaagaacagaaatcacaacaactctgttgcactcagaccacagtgcaatcaaagtagaactcaggattaagaaactcactcaaaaacacacaactacatggaaactgaacaacttgctcctgaatgactactgggtacataacaaaatgaaagtacaaataaagatattctttgaaacaaatgagaacaaaaacacgacataccagaatctctgggacacatttaatgcagtgtgtagagggaaatttatagcactaaatgcccacaagagaaagcaaggaagacctaaaatcaacaccctaacatcacaattaaaagaactagagaagcaagagcaaacaaattcaaaagctagcagaaggcaagaaataactaagatcagagcagaactgaaagagttagacacacaaaaaacccttcaaaaaatcaatgaatctatgagctggctttttttaaaagatcaacaaaattgatagaccactagcaagactaataaagaagaaaagagagaagaatagatgcaataaaaaatgatacaggggatatcaccactgatccaacagaaatatgaagtaccatcagaaaatactataaacacctctatgcaaataaaccagaaaatctagaagaaatggataaattcctggacacatataccctcccaagactaacccatgaagaagttgaatctctgaatagaccagtaacagactctgaataggcaacaactaaaaaagtccaggaccagacagattcacaactaaattctaccagaggtacaaagaggagctggtaccattccctctgatactattccaataaatagaaaaggaattctccctaactcattttatgaggccaacatcatcctgataccaaagcctggcagagatacaacaaaaaaagagaattttaggccaatatccctgatgaacatcgatgtgaaaatcctcagtaaaacactggcaaattgaatctagcagcacatcaaaaagctt

SEQ ID NO: 281649 - DNA, 1000 bp, Homo Sapiens
ggttcccacacaggaatctctgaagtaggagcaggcatcccatctcacaggtgaggacaaagcctctcacagagtgtatgtgcctcatctgtggccacgtgctctgcagaatcagggttcaattaccatccctgtgatgcctcgtggagtgctctgcattgctgctggaatcctatgtctcctcctacttactttcctctatttcattctcatacatagctgaacctctctgtgcctcactttcctcatctgtatatggggagaacaatagtggctactgttttgttgtgaagattaaataaggtaatacatgtaaagatagttgaaagagtacataacacataataattacttaacaaacattaggtactcatagttactattaacaattactagtattaccattactgctgatactatgatgcacacacaagtaacaattataaagatatatgcaaataaatgcaaatgagtatatgcacttgcttattattttacaatgaaagtgctgaatgatacgaagcaaaaaaaagtgatataaaataagatttcctaaacttggctgtttttgatatatatatatccctaacatttcatgtttcagtaattaaggccatgaagagaactaaaatattgactaaatcctggaggaatttccaaatgggaatgatggaaagacagacacagagacaggccagccaccacagccaccaggttaaaatgagggaaggcctacaattgccatgggaacagagaagacaaggagagggaaaagagagaagcatttttttttttttgaactaggccagctaacacagttatgtaacttaattgtcataactgtcatgtgagatacatggtattagcctcattttacaaatgtggaaattgagactcaagttcaagtaccttgttgaagtcacaaaatgaaatggaattttaacagacttttactctaaaacccatgctttctctacctctctaccaccaacagaagctt

SEQ ID NO: 281650 - DNA, 1000 bp, Homo Sapiens
agcatggtgtgaggggtgcgccgggggatctgggggctgggggctctcgggcaggttcctttgcctccctgggcctcggtccccaactgtgaaggggggacagtgggaccaggcggccctcctacaggctgttgggagcttggagaggtcatgtggatcaaagtcacagcgtcttccatccctcctcggtgcctggtgcatgccagggactcagtcccagggaaggtggccttggcctcactgcctgcatcgccacctattgtatcccctcctgaaaggcgcggggcagccctcccgaggccaagtgacctcctggaaacgggagggccgagctctgctgagcagtagctggctccggagagctccgtgtggcagcctcccagctgccattgtgggcgtgggaggaggggctgctggggtgggagcacagccagtccccaaacagcaccccacatgtcccccaccaactctagaaagcctctatcctgggggccagagcccgtcccttctgagatggtggtagtgtccggagccagcactccatgggacctggccccaggcaggaggctccctcagagaccaggatcggggcccagattctagttctgggccagcacgtccctcttctgggctttgtttccttgttggaaaacaggcatcttggcatctgctttgacttctcgaggctgagatgaggatggtaaacacagcagcccctgtttgccgagggcttcctgtgtgccagacactgttccgagaacatcacagcacactttcccatgtaatcctcgccatagtgcgggcggctctgttacagggtctcccaacctcagcactactgacgtttggaggagatcctctctgctgtgagggccctcctgtgtgacacaggtgtgtggccgcctccctggctgccgcccactaggtgccagtggcacccaccgtcgtgacagccacaagtgtgttcagacatggccaagggtccgctgggggcaggatc

SEQ ID NO: 281651 - DNA, 1000 bp, Homo Sapiens
aatgtctaggttttccatccggcctttgctgacaagggtgatgatggaacttggatggagcggagcaggtatggactaaaagagctctgtctttctaggatgcccctttcctcgttctttggctagaaaagcatagttttgctagaacttgttctgttgggactttttcttgtttgtgccccttggcattttcagttgttggcttctccagtattcagcctgagatatatgaggcaaagagaaatcccagggaattcaccaccattccttaagtcccgaggttcctaaccagtctgcttctctccatctttcagtcttcttatgcttgtcttgtcacgttcaaggttttcagttatacttggcagaataaataaatacatctactccatctttccagaacatcactgctttttgttcattttatttatttattatttactgagacaaggtcttactttgttgcctgggctggagtgcagtggtgctatcatggctgactgaagccttgaactcccaggctcaagcgatcctcctgcctcagcctcccaagtagtttggaccacaggcatgggccaccatgcccagctacttttcattttttgcttttgttgactagccccacagagttttgctgtgttgttcaggttggtctcaaacttctggccttaagcaatcctcttgccttgctctcccaaagcgtattacaggcataagtcaccacacccagccctatcggtgcttttggaagaaggtgttcttccctctctctgtttccctccctatggccagctgcccatagagggcagtggtgctggagtgaagacctctcagcgcatccctcttcatctgtaggatgtgcatggcttccaatgctgtctgttctgctcctgagacactcgctggctacaggattataaaggtgatgaggtttcagcctaaagactctccattcaataacacttcctacaagatatcttttttgtttttttgagacaggatc

SEQ ID NO: 281652 - DNA, 1000 bp, Homo Sapiens; identical to SEQ ID NO: 114797

SEQ ID NO: 281653 - DNA, 1000 bp, Homo Sapiens
taatgggagaaaaaaagcagtgtaaaggggaatcgattgtcaagaggtggaggtgggcatgtggaaaaaggcaatttaaacaggttagataatgagattatagttgagccaacttgaagaaggtgaggcagagagctatgggaagtccaagcagagagcagccagtacaaaggtcctaaggcctttgagtgcttggtgggctcaaggaacagcaaggaggccagtgagtgtgcagtagagtgggatgcaggggagaatgccatagaatctctgtttaaagattaactcaaattcccataattaaaagacatagccaaagtctggttaaggtagaacttgaaactacttacgtgactctagattagttgcttctgtgaatattttccctcatatttctagaaagggaggattaaaaaaagaaataatgactgattaatgacctgtattataatttacacttttatttttacttgacagtctttattacatcattctcagctagtctgagtttattttcacacactgtttttactaaaggagaaaatactgctttgtcacagagtgtgatttcattctctactgtgttttaagttattaattaaattgaaacctaagctttaattttgctttcaggggtaacacagtaatcatttgacttatttaatactaattcagaagaccttattttatatttattgtttcattgtatgtcctctaatctttcttttaaagatacggatataatgcaggagaagctacccaccatgcggtggattctgcggtcaatgttggcgtaactgcctacaatattaacaacattggtatcaaagcaatggtgaagaaaactgcaacacaaacaggacacactctccttgaggactatcagatagttgataattctcagagggaaaatcaagaaggagcagcaaatgtcaacgtgagaggggagaaggatgagcagacgaaggaagtaaaggaggcaaagaagaaagataaatga

SEQ ID NO: 281654 - DNA, 1000 bp, Homo Sapiens
  misc_feature (981)..(981): n is a, c, g, or t
  misc_feature (996)..(996): n is a, c, g, or t
gctggcactactgcagcacagccgcccttgatcggttgctgtcccttcaggcgtgcgtcccatgtgaattctttcctgccaggactttccttgataactcttgtccatccatggtactagatgattatagctccctttctccagaacctctagaatggaatatctgcagggccccttcagaccatttcaaagacccctttaggtgtccacgacctccccaggtgaaaaattttttaaggaatgtgaattcatttttccatcattacttgaggcagcaccataaattgtgacagtggaggcctaatggaatgcagcatcgcacgcgagccccatggatgggaaacagacctgattaggtgccatcaaaacaacacaactgaccattggaaactctgctgaggtctcaggtgctgaggagcaggagagaagaagagaaagaagtcctgtggggctcacacagccggccagcctctcatctcaaagacagaaacgaggtttggcttcattcttttctgcccactgattgctttatttcaaattaccctaactacttagcatggcaaattaagttaaaacccccaagagtctgccgaagaggactagaatctgattaaaaggaatagtcccgtcacaagctagggaggaaatggaaattactctgagtgcagtgctattaaataatttgcatagacttgcatatggtatacatcaagaaaagcatatgctctttagatttaatgaaataattttccctttctaaagactcttacagtctctgtccttccctatctgtcttttcctcttcccagcttgtcttctttttgaatgctaaaattatttcattgaggaggggtacatagcaatgcacaaattacatgaaaatatgttaataatcttccttgctggcagggcttgggaaggcccttgaaactgcattgccaaacttcccaaatgtcccccttgtcaatctcacataattanaggctccctttacancctt

SEQ ID NO: 281655 - DNA, 1000 bp, Homo Sapiens; identical to SEQ ID NO: 201623

SEQ ID NO: 281656 - DNA, 1000 bp, Homo Sapiens
aaattctgtaatggtttcctgtgaagcctccactgaaagggactcaaatatgcaacacctaaactattttccaagggcacatgccccttgaatggtgcttctagactggtcagggttatttattaaattttatatatgaaagtattggggaattatgtaaattctttatatgaaactatctagttcataaatcatagatttcatattactcagtgcaactgaactaaaagttcagaaaagtcattcacattgttccaaatttgtaatggttgtcacatgtcacatgcgtctttttcagtaagtgccagagtgttcccactgtttctgcccagtgcttgacttctcggcccggaagagaacctgctttctctggtttccttcctgagtctggcacagacggggctattgtagttcttgatcaagtcctggagtcagccttgcctggctctccttgtagcagattcagtccacagacctcttgctgcccctcagtgacaagtatgctgtgaattcaacctttggacttgctgcccaagcctttggttgctgccctgactattgtaagaggtaaacttacctggtttgtttgagaatgaccattttcctaatgtgaaaaccatctctctcaccacttttattagtagggctaacatttttttccgttataaatggttgagcaatttgaatgacttaacacagtgtcattatcttgcaatataaactggtaacctcacaactccacacttcatcaccatatgaagtaaatgaagctagctaagcggatgctgtatcaactagtaacttgccattaaggattattttatagcatgaatttaagactatttattcaaatgatattttactcttgtattcactttgttttagatttgtgacatgaatatttcagtgctgcttaattttgttctgaattcttgtttcttgcttgtaaatggcttttttatggtataaataaagtcaatggacattgctgtttgtaaat

SEQ ID NO: 281657 - DNA, 1000 bp, Homo Sapiens
cctgaggtcaggagttcaagaccagcctgatcaacgtggagaaaccccaactctactaaaaataaaaaattagctgcacatggtggcacatgcctgtaatcccagctacttgggaggcaggagctacttaggctgaggcagaagaatcacttgaacccaggaagggttgtagttagccgagatcacaccattgcactccagcctgggcaacaagagtgaaattccttctcaaaaaagaaagaaagaaagaaagaaagaatctcaggcttctgggagacactgaatttgtgaatgtgtacagcatgtcacaataactttttttttttgagacaagtctcactctgctgcccaagctggagtgcagtggtccatctcagctcactgcaaattctgtctcctggattcaagcaattctcctgtcttggcctcccgagtagctgggattacaggtgctgcaaccatgcctggctaatttttgtatttttagtaaaaacaaattttcacatattggccaggctggtctcaaactcttcacctcaaatgatccacctgcctcagccaatgggtggactgttaactcaaaatacgcacattgaatactgaggaaaatgtatagccatcatcaccagcagctgagatgccagttgagataccaaaaatgccccagcatgtaactcctcttttaattcacacacacacacacacacacacacacacacacacacacacacacacacacacacacacactcatggtaaccagttcaggatggacaaagaaacagtcacagtcttttttgggaacacactcccctgtgacacttagatcctaatgctgactccaattccctcctgggacctcccctctccttgcggcatgctgggctttcccttagaaaaccccatgtcatttccttcaatggaacatgaatcagcttcacccacagtgtctgcatgtctctgtccatagcaaacgtttttattaccttaaaatatagatc

SEQ ID NO: 281658 - DNA, 1000 bp, Homo Sapiens
atctgtctaggcacacaatgacaaggactccaccgacgcaggaccttactgacaaggcctcattgacaaggcctcacggaccaagtctttactgacaagtcctcactgactaggtcattattgacaaggcctcactgatcaggttccactgatcatgacctcattccctggccccaaagatgaggccccactgaccaggcctccagggaacaggttgccaccgatcaggcccctaataacgaggccttatgtcaccagatgcccctgactgggaccctagtgagtagaccccactgaaccagcaccaaatgctgagatccccgctgaccaggtcaccctgtagaccggtgctacaaaagtcaccactgaccaagtcctctctgaccaggacactacagattaggtcccaccgacaaggctgccctgaccagggccccactgacaagggcctcactgatgaggacacgcccaccagggtctgctgactaggtcccatgtgcccagtcctccactgaatagcaccccttgacctggtcaccagtgccccagcccatgctgaccaggccagcactaagccccagctgaccaggtctccactgatcaagccccacagcccaggtttgcactgaccagacaccaaacaactggcagccaataggtccccactcaccaaaactcccactactagaccccactaatgagaccctctctaagcagacccctgctgaccacgatcccactaaatagtcctcactgacctaggtccactgaccaggcccacactgatcaggcccctcctaaccacaccggaaatccaagcggcaatgacatgtttcatatggcaaaagttggaacaagacagagagaggaaagaggttccacagccttttaaactactagatctcatgagaactcactcactatcaggaggatggcattaagggcttggtgctttgccatttgtgaaggattcactcccacacctttatgattaaagctt

SEQ ID NO: 281659 - DNA, 1000 bp, Homo Sapiens
ccaattcctgagatatttgggaattctgtatggtaaattaagttgcttttaggttttctccactgtcagtttaacaattagctttcttttgtcagttaagtcagttaccactaatgcatctgcttttcagcttccagaattttgtgttgatagtgccctcttctgttgtctttattcatgtgggattatcctttaaaaagatttctttgtttaatgggattttagggaaagcaaaagtaaacatctttggctgggcacagtggctcatgcctgtaatcctaacaatttgggaagcggggtgggagggttgcttgattccaggagttcaagaccagccctgggcaacgtggtaagaccccatctttacaaaaaaagttttttaaaaaaattaaccaggcatggtggtgcatatctgtggtcccagctactccagaagttgagacaggaggatcacttgagcccaggaggtcagtgctgcagtgagctgtgatcataccactgctttcccacctgagtgacagagtgagaccttgtctcaaaaaaaaaaaaaaaattctatccctttaattttataaatgaagagccaagcccaagggaggtaaagtgaccttttccaggtcatataattaagttcaactaagtagacttactggacttgtgctgtattgttcttattactgcatctaaacactgaagcacagattttcaaataaaacctaaagctacagggaaggaataaaaacagactttgaagttagtttatgacaacacatagattatacctgaatattaatatttccgaatcaaaaatatgtaccttcattcagttcatttttgtaaattgtaacagtttgatagtttttgtttagagagaaaagatgttaagaattgatgaggctttgcctgtaattcttggtatcttgagtttttgttggaatgaataataaaggtcactgaagtccccatatctaccttaacttaaacatatattgttttacag

SEQ ID NO: 281660 - DNA, 1000 bp, Homo Sapiens
agaacaagtttgtggagttcgacatgaagcccgtgtgtaagaggtgctacgagaagttcccgctggagctgaagaagcggctgaagaagctgtcggagctgacctcccgcaagcccagcccaaggccacagacctcaactctgcctgaaggccctcttgcgcagtgcctctcggcccctccgccttctcccctcctgctgtccatgcttggccccctcgtccccatccacctgtgccctccgcatcttaccctccctttctctttcctcattgccttctcccttcctgttccctcatctctgccttccccatgtctctcctctccttggccgtggcttctgtctgtgaggaggcaggagctggggagtgggagcctatgaccccacgtctgacagccatgtccacctgtgcccacagcttccgcccacagacctccagggacaggagcaaattgcaccacagctccccgcctggcctggccctccccaggcggctcagtggctcatgctgtcctgtgagagcccctgccccagagcggccccactaagcgcatgtggctcctgggctacccacagccagggcagcctgctggagccacagggccagggccatgcagatggaggcctctgggagccacctccaatccctcaccactcactcaaccagtggcacagtgtccttgtgcccacactgagccagcaagtcctgctgtccacacccacaagctacctggagggacaggacccacctccatccttcggaaggccttcctggaatcccaccttggcctccgccctcggttccgccccgcccctctccccccgaccttggggcttgtgtcgagcccttgggtggggccaggaggaggtgatggcgtcagaggaggtgtggtcagaggtgacttgttcccacctccagggaggacgcttcgtcttcggccagcgcagacctggtgtttgtttgttgggctcacgcttgcacaatgaaggcttgttcacac

SEQ ID NO: 281661 - DNA, 1000 bp, Homo Sapiens
gccactggtaattcaccatatttacagaatgaagaagaaagatcatatcatttcaatagatacagaaaaagcatttgcaaatgtcaaaacccttttataacaagcactcttagcaaactaggagaagaaggaaaatccttgaacctgatgagggagtctctcaaaagctaccagatgacatcctgctcgatggggagctgctgggcgttttcctcctgtgaccaggaaggggcgcctgccctcaccactgccacccagtctcattcaacacagagtttgtcccctgttagaaaccgagacgttggttacacgtggaggttgggagtggctcaggcaggcagaggggcttctgggaacctggccatgttccctttcagtctgggcgctacttagagcagggggcagttgcttcaataaaactttagattcccacacaggccaggcgtggtgctcacgcctgtgatcccagcactttgggaggccgaggtgggcagatcacctgacgtcaggagttggagaccatcctggccaacatggtggggccccgtctctgttaaaaatacaaaaattggccaggcatggtggtatgcgcctgtggtcccagctggttaggaggctgaggcaggagaatcgcttgaacccgggaggcggaggttgcggcaagccgagactgcaccactgcaatccagcctgggcgacagggcaagcctctgtctcaaaagaaaaaaaaatctacacatccctcaccacactgtacataggacagctgggtgtaaattacatctccatttaaatgcctgtcatagttttatacaactataaaatatatacgtgccaaaataaatttgataggaacattggaaccaggtaaggtgacgcatacctgtagcacttcgggaggatcctttgagcccaggaagtcgaggcttcagtgagccatgactgcaccactgcactctggcccaggcaacagtgagatcctgtcctagaaagaaaagag

SEQ ID NO: 281662 - DNA, 1000 bp, Homo Sapiens
ggatgatactgctttaccaacgagtgacaggaccatgaacctcacagttgtgaggttcaatgagggctggccctgccacataaatcctctgagggagatgatgacaattcactgctgattaatgccattctgcctttactgtaattagaaggaaataaccccagaatacaaggaatttagcaagataaggaacccctgctgctacctaaacatccatctaaacaaagatgtttggcttttgaagcaaagagtttggttcttaagactgtgttctttgacagttaattttcaagaagactgaagactgaattatcattgttgagaattctctaggtctcagtaaccctctgaaccagcagtttgggtggtcgatgcctagcaaataggagtgggtggccttttctctggtgtataagattcatctaatttttaggaatttttgtaccattttccccctctagaaacacatttactccccaataattgtacgggaggtgatcgaggaagaagaaccaagtgaaaaatcagaggccacctacatgaccatgcacccagtttggccttctctaaggtcagatcggaacaactcacttgaaaaaaagtcaggtgggggaatgccaaaaacacagcaagccttttgagaagaatggagagtcccttcatctcagcagcggtggagactctctcctgtgtgtgtcctgggccactctaccagtgatttcagactcccgctctcccagctgtcctcctgtctcattgtttggtcaatacactgaagatggagaatttggagcctggcagagagactggacagctctggaggaacaggcctgctgaggggaggggagcatggacttggcctctggagtgggacactggccctgggaaccaggctgagctgagtggcctcaaaccccccgttggatcagaccctcctgtgggcagggttcttagtggatgagttactgggaagaatcagagataaaaaccaacccaaatc

SEQ ID NO: 281663 - DNA, 1000 bp, Homo Sapiens
gagggctctagggagagcctgggaactttcatcccccactgaagatggatcatcccacagcagcccaggactgaataagccatgctcgcccaccaggcttctttctgacccctcatgtatcaagcatctccaggtgacctactgtctgcctatattaagggtccacacggcggctgctgcttttttttaagggggaaagtaagaaaagagaaggaaatccaagccagtatatttgttttatttattttttttaagaagaaaaaagttcatcttcacaaggtgcttcagacttggtttcttagctagaaaccagaagactacgggagggaatataaggcagagaactatgagtcttattttattactgtttttcactacctactcccacaatggacaatcaattgaggcaacctacaagaaaacatttacaaccagatggttacaaataaagtagaagggaagatcagaaaacctaagaaatgatcatagctcctggttactgtggacttgatggatttgaagtacctagttcagaactccctagtcaccatctccaagcctgtcaacatcactgcatattggaggagatgactgtggtaggacccaaggaagagatgtgtgcctgaatagtcgtcaccatatctccaagcttcctggcaaccagtgggaaaagaaacatgcgaggctgtaggaagagggaagctcttccttggcacctagaggaattagccattctcttccttatgcaaagattgaggaatgcaacaatataaagaagagaagtccccagatggtagagagcagtcatatcttacccctagatgttcatcccagcagaagaaagaagaaggtgttggggtaggattcttcagaggttagcctggtactttctcatcagacactagcttgaagtaagaggagaattatgcttttctttgctttttctacaaacccttaaaaatcacttgttttaaaaagaaagtaaaagcccttttcattc

SEQ ID NO: 281664 - DNA, 1000 bp, Homo Sapiens
ccagcccctctctaccatattgggaccctcaagaggtttgtgctagcccgatgcctccaccgggcacttagaaggcaagaggacaggatctctcaagacacagcacaattcagtctcttaagattaacttcacaatgatggaaattatttcatcaggtggaaagtctgggtctaatagcagactgcacatgagcagagtgacatggtggtggcacttatggtggtggcttgagagccttggggaaattagggccctaacagctagaatcaaagatgataccgcagggccctgtagcaagaaatgggaagcagggggaggggcaggggctcagaacaatattctagaccaactttgactacttcctgtcttagtaatagaccaatacatggctctatttagcaaagtttttatactgaaacttgattattgctgccctttataatttcctcttcaatgatatttcagcagtttccctcttggtcctagttttgtgcacatttttttgaatgtggttcagattaattatatttctctcactttcttagctggtcctattttttcacattctggcatgtggctatcaagttagattgctgtaggcatcatattgtcatggtaactactgaacctaatgatgcagatggatggcacatcagtataataaatgatggaaaacggttcctaaaaattcatccctttcataagaggggaagaatgagtgcctgatattgttaatacctccctttctacctcaggcctttgcaaattgatgttcagagggtcactggagtgagagggaggaggggggcgtcttggaaatttccatttctcttttcaaacccaaaataggaatgactcttgctgtttgtcagatttgctgaaaattgctcctcacaaagaacatttttttttgtacatgtaattgtaaatttaggtttagtacgttaatgttctatagttctgatgttgataataattaaacccagataattttatagc

SEQ ID NO: 281665 - DNA, 1000 bp, Homo Sapiens
agggtcagtagattgaaaagtggggttagcatctgggtggcctgggttctgttaacctcaagtcccattatacctctacccagcatctgaatagacaaccagccctctttagggtgggatttgaaaggaagggcctgcttttctccagaacacctcagaatggctccatgaatgtcttgagaacctgatatatatgccaggcacctattttggcaggtggtgagttaacgatcttaagttctggaatcagacactcctgggttccggcccaagtgctaccaatttgtaactgtgtgatgctggagcattcacttaacagctctgaacctcagtctcttcatctttaaaatggaaataataacaatagctaacatttaaagagttcgtactaagtgctgggcactgtgttatgtgtgttaaccattttaaccttcccagttctggagagaatccttatttctattttatagatgaggaaaccgaagcccagagaggttaagactttaggtcaagtaccttcagctagaaagagcagggaggcagtttggttccagagcctacgcacactcctaaccactaagttaaaagcacccacattgtgccctagaccactcctagctattaaccttgccctatccagagagaaaagaagggagccccgggctagattaaagagacttggttctagtggtgtatcttccctggcttcctctaaactctggagtaagtcattttccttgctggacttcactttccctctctgtgaaatggaaacagtcatcacaggcctgcctgtcttccagggctgttaggaggctcagatgacacccggtgtaagaattctcaagactaaggagcctggaccaagggtgagagctgaggaatcctggaccatcacccctgggacagccctgatttttctgtaccttggctaccacaggttctgctgaatgtcctgaccttgaaccggaacctgagtgacagcctggcccgcggccgc

SEQ ID NO: 281666 - DNA, 1000 bp, Homo Sapiens
gagccactgcgcccagcctttcttagtgttttgatagtcatccttatttactttcaattaatattcatggctacctggtaatgggtcactgtgttcagtccatttgaaaaccaagagagtggacctctctgctttttcactctttgcctgtaactactgtacgtttaaggcgccacaccctgaggggttcaggaagggtgacatcaagggcatagtctacactgatggtctcagctccagactagagaggaaatctccagttccattgccaatagcccttcttggagcccatccgcctactttgtggttgtttttaactctttatttggagacttttgaacttgcaaaagtagacagagcaatataatgaatccacctgcacccataacccaagcccaaccaccatcaacccatggccaatcctgcccctttcccctccactcccctgtatcactttgaagcaacctgaggcatcctatttgaccttaaatagttaactatatgtgtcaaaaggttaagaattctttcaaaaatcacaactctaacaccattatcttatctaaaaaattaactatcaattcctttatatcatatatcttatgttcaaatttccaagcctcaagcatcctgttttattttttgttaaaatagtatctacataaggacacacattgtgattggctgatggcttccaatcaatctaaaggtttttttccccgtttctttctctgcttgcaattaatttgatcgatcccaggttgacctagactatctagactttgctgcttgcaggaagtttaacggtagtttaatgtatttctctgtcttctgtagttcctgaaaactagtagttggcttcaaggatccactgaagtcaggtgtattttgttttttgggtatgggggtatataaacaaggcctccatgggaagcagaggctgcagggagccgagattgtgctactgcaccccaggctgggcaacgaagtgagactctgtctc

SEQ ID NO: 281667 - DNA, 1000 bp, Homo Sapiens; identical to SEQ ID NO: 114798

SEQ ID NO: 281668 - DNA, 1000 bp, Homo Sapiens
gaatctacagacctggctcctcggatctgaagcccagcacaaaataatctccccgtccaaggagcttgtggaacttgaattgggaactttggagtcttgtctcccatcccagcacattgaggatgtagttggtgaatggactcttccaggcatggagatcctccatcctaaaagtacctgcctccttcccagccatccctgacacattccagccagttggatctcacagcacagctatccacagggagactgggatgttcacgcagcactccattactcagtacctccatacccagccctatacgcagacccacaggtggggaaactgaggcaggaacagggttctgccctcccagagcctccactctgggatgccagaatggaaagccagagggaacctgagaatcatccagtcttactgtctcaatgtacatacggggaaactgaagccaggagaagaagagggagaaactgtccagggcctcacagggaggcattcatggagctggagaaaccagggatcctgaccgcagggcccatcaattgctacatagagatacacatggaaagagggtttaacagaccctctctaggacacaactgtttctgctttgagcaataatttctaacctgaggccaacatgtcccactgccccttgggttggctggggttgtttcctgagccaagcatccaatatcatgccccactcaatggcctagaagctgcctgtactttggggaaacagatggagctcttgggcccagccagctgggcctgggacttctgcctctgccgcctccagagtggcctggcagctttgccagaggctgtggagcgagggtagtaggagcttttcccagagtgctgtgacttgcatgatggattctaggctgtggcaagggctgatttctgggatagggggagggttggaaaatttatttttatgaaacagagggaagactttattgttgttatttttggtaaaataaaagccaaact

SEQ ID NO: 281669 - DNA, 1000 bp, Homo Sapiens
tggctaaacctggcgcccacgctcagagggccagcagctgagcacactcgagtcagctaaaactgcccccagcacgtcctcaagacgcctgagggttttgttttttttttcaaaagtaatacggggaattaaaaaggcctgaaggagaagggtggagtgagatgggaaagtcttcactgccttgggcccagccctggcctctggcttaaaaagcaagtctttctttggcagccctccggcccttaccttgtctggagacgcgccccccaccccgcgctccctgaactgctgtgcgtcgagctgagtcctcgccaacggccgcacggtgacgttgccgtgtgagcccagcagtcgcgggcaacaggggatttttcaagggggaaatgacgattagaagagagaatcatctaaatatcaaagtgacacatggggagacttggaaaaaatatttaagctaatgaaaagcaaataaagaagcagacacttaggctgggaaattaaatattatgtttaaaatggtgcttttgtccgggcttgaagatttccgattcatgtacacataataaacactcaggtttgtcatctggaggtgcaaatctgaaagatattccgacaaatgaagtgctggcagagagaggaataaagagatcggtgcctgtcaggggtcaggcagcctgagattgcttctagagatcttttgaaaatttcacacgattgaaggcttaggggcttcactgcgttcgcatttcaaactcagatcagtgggatcacaatcaaaaatagaggtctggaaaattttgatgcaaagatggccacgcgcatcagggcttctctcactagctctctctctctctctctctcttttttttctttctaagacagacaccctgacatggctgtgatcctttggatgacagagttgtcagtaaagaaagagaaaattgcatcttgtctgataacttcctttcagtcaaaaggaatttagggtcttattttcaat

SEQ ID NO: 281670 - DNA, 1000 bp, Homo Sapiens
gctttaaataccaaacaagtaaatcagaaagcttattttctatttaaaatatatctaagacacacttatataaaaagaaaacagaccctcctaacatgtaacattaccgttcgtggcaattgttctcaacctttcactctccttttgaccttagcattaagctcctttgctcacttctgagctctcagttacagttcttgaggtggcatcctaaccaatttgcactatctttcaggtgaagcgctggatatttaccagataattgaactcaccaaaggctccttggaaaaacgaagccagcctggaccatagcactgcctggaggctctgtatttgctcccgtggagcttcatcggggtgggtgcaggctcccaaactcaggctttcagctgtgctttttgcaaaagggcttgcctaaggccagccatttttcagtagcaggacctgccaagaagattccttctaactgaaggtgcagttgaattcagtgggttcagaaccaagatgccaacatcggtgtggactacaggacaaggggcattgttgcttgttgggtaaaaatgaagcagaagccccaaagttcacattaactcaggcatttcatttattttttccttttcttcttggctggttctttgttctgtcccccatgctctgatgcagtgccctagaaggggaaagaattaatgctctaacgtgataaacctgctccaaggcagtggaaataaaaagaaggaaaaaaaagactctatcttctcatcaaagcctttgttagtcatgctttccccactttcccactcacaggaggtaattatgttgttgaagaagaggaaggagtcctccaaagtgtagagtaataagacagtggcacctccttttaggacttttgctatactgaggatacttatgggacaaaatgacaagagaagaagccattgacatcaaaatgctacatgactctcctgagtgcagctgccaagtgggtaaagagagtggatgg

SEQ ID NO: 281671 - DNA, 1000 bp, Homo Sapiens
ctatcgcatctgtaaaaccgaagggtgattttcctgggctggaaagtttaagaaagaagagagagctgcgtacctagggcttaaggggcctcaggctggcactcgaaaccaggcgttctcatttccctttggcatcaccctgaacggctgtgcctggagctggcgcggggctgaagaggggaggaaatacatgtgaggaaaatcagaggagagggtcgggaacagatgtgggcataaagggaaggcctctgacttgaaataaacaaataggagtcccgcagctggaaggacaaatcctttcacgtcgcgggtgatgtgggattggggcgattttgctctccctttgttctttcccctgccttccacgtttccagggtatttgattgatgtctgtcttctctgttaagttattccaccgtgaggagagagccggtggcagtacctggcacgcagcgggcgcccagtatagacctgctgaacaaacgaatggattcaggggctgctgtgtccccctcacccaccccccgccccctatgtgtccacagcgccccgcacgtagtaggcgacccctaaacatctgtacagcaaatgatttgcaagttttcggcgctgagcacgtggagctttggaaaccaggacagcaaatgagtgtctcggagaccacaaaagcggttccggcgcgtgcgaaaggcggtggctgggcgacggcggagggaacggcgcagagcggggcgccccgccgggagcgctgcctgcgtggcgcccgaggcgggggcgcggggggccgcgcatagcacgtgctcgtctgggagccggccgggccgaggcgggcgcgcgtgtgcgcgtggggcgtggggtgtgtgcccgcgccgtgccccccgcgtgtgctgccgggcgggcgccggcgtgagtcacggcggggctagcctttataacggcccggaggctcgcgggagccgccgcgcccgtccgcccgccgctccgcgctccacccagcgca

SEQ ID NO: 281672 - DNA, 1000 bp, Homo Sapiens
ggcaggcatgccagtctctgccagttccactgcccccttgatctttgaaggagtcctcaggcccctcgcagcataaggatgttttgcaactttccagaatctggcccagaaattagggctcaatttcctgattgtagtagaggttaagattgctgtgagctttatcagataagagaccgagagaagtaagctgggtcttgttattccttgggtgttggtggaataagcagtggaatttgaacaaggaagaggagaaaagggaattttgtctttatggggtggggtgattttctcctagggttatgtccagttggggtttttaaggcagcacagactgccaagtactgttttttttaaccgactgaaatcactttgggatattttttcctgcaacactggaaagttttagttttttaagaagtactcatgcagatatatatatatatatttttcccagtcctttttttaagagacggtctttattgggtctgcacctccatccttgatcttgttagcaatgctgtttttgctgttagtcgggttagagttggctctacgcgaggtttgttaataaaagtttgttaaaagtttgttttgtgcaagtgtcctttgtgcgtccaggccagggcatccatggacgtccttgggctgccctttcccttggcgcctcccagggttcccatagcaaccaccgtctgcaggaggggccgcccttgcccctcctccccgccctgccgctcagtggaacggcccaaccctcccctggctgcggtgagcgctgggcccaacccccggcctggagcagcgccccaactccgagcaccgtggagcaccggctgccagctgagaccccagaggggtaactaacggcctgaggaaggcatttcttcggggaacatggcgtgcccgtcgtggctacgttctgccaagccctgtgacgttggaggggagccgcctgcatcccccgctcagccagtgtttctagactccgagacatctg

SEQ ID NO: 281673 - DNA, 1000 bp, Homo Sapiens; identical to SEQ ID NO: 201639

SEQ ID NO: 281674 - DNA, 1000 bp, Homo Sapiens
tgcctctgtcctccccaacccgctcctctttcccttccccactgtctttatctctttttgtcttgttttcctctaatttagtcttgaggcctctctctggagaggtcatatccatgtcatccacattccaggagaggctgcacccagaggagagtgaggctggggcgtgtggctcaggtggacacagaggaggcagcggcacaggacacatggaatcagagcagcgcactccttccagatccagagagagagggctgtgcctcttggggctgataagaggggatagtccagaacacacatgctcaaccaccggtggggagagggagagggagaaagagggagggtgggggagagagggaaagggagagagggagacagggagagagagggagagagaggaaaggggggagagggtgagagggggagagggagagagggagagggggagagggagagagggagagggggagagggggagggggagagagggagagggaggggggagagagggagagagagagggagagagggagagagggagagggggagagggggagagggggagagggggagagagagggagacagggagagagagagagggcgagtgagaaagatggagagggagaaagggagagagagacacctgtgggccaaagtctttattggggtccagggtgttacccaagcagctttcccacaagggttctaattggtggggttaggacaggcagcctcaaggtctctggttgccgactgactgagaggccatcactgtggcctgcctgcatggccacacagtgggtgggtcggtccagcaggctgttccagctgttccacagcgaggtggtcaccaggaggtggtggcacaagacagatgtctggatcgaccacactgaggaactgggggagtgctgcaggcacagaactataaactgtggccgggcgcggcggctcacacctgtaaccctgacactttgggaggctgaggcaggtggatc

SEQ ID NO: 281675 - DNA, 1000 bp, Homo Sapiens
gtcttctggacaggctctgcttctccaaggaaaccgcctagtttactgttttgaaatcaatgcaagagtgattgcagctttatgttcatttgtttgtttgtttgtctgtttgtttcaagaacctggaaaaattccagaagaagagaagctgctgaccaattgtgctgccatttgatttttctaaccttgaatgctgccagtgtggagtgggtaatccaggcacagctgagttatgatgtaatctctctgcagctgccgggcctgatttggtacttttgagtgtgtgtgtgcatgtgtgtgtgtgtgtgtgtgtgtgtgtgtgtgtatgtgagagattctgtgatcttttaaagtgttactttttgtaaacgacaagaataattcaattttaaagactcaaggtggtcagtaaataacaggcatttgttcactgaaggtgattcaccaaaatagtcttctcaaattagaaagttaaccccatgtcctcagcatttcttttctggccaaaagcagtaaatttgctagcagtaaaagatgaagttttatacacacagcaaaaaggagaaaaaattctagtatattttaagagatgtgcatgcattctatttagtcttcagaatgctgaatttacttgttgtaagtctattttaaccttctgtatgacatcatgctttatcatttcttttggaaaatagcctgtaagctttttattacttgctataggtttagggagtgtacctcagatagattttaaaaaaaagaatagaaagcctttatttcctggtttgaaattcctttcttccctttttttgttgttgttattgttgtttgttgttgttattttgtttttgtttttaggaatttgtcagaaactctttcctgttttggtttggagagtagttctctctaactagagacaggagtggccttgaaattttcctcatctattacactgtactttctgccacacactgccttgttggcaaagtatccatcttgt

SEQ ID NO: 281676 - DNA, 1000 bp, Homo Sapiens; identical to SEQ ID NO: 206213

SEQ ID NO: 281677 - DNA, 1000 bp, Homo Sapiens; identical to SEQ ID NO: 201643

SEQ ID NO: 281678 - DNA, 1000 bp, Homo Sapiens; identical to SEQ ID NO: 201641

SEQ ID NO: 281679 - DNA, 1000 bp, Homo Sapiens; identical to SEQ ID NO: 114799

SEQ ID NO: 281680 - DNA, 1000 bp, Homo Sapiens
cagtggaaaccttaaaggagcaatcaaatccagctttggcaataaaaaggaaaagaacagaggccttagaacaaggtaagattcccccttttaaaagaaattaaatgaatttagaaaactccaaatagctcgtgtatggctagcgactgaacaacagcaaagaaatgtagcttgctagctatttaatttttataaatttaattgtataaagtagagagactgtgccgttttaggtatgtttactttcattgtgaatacttcggcagcttttgtgtatacctcagaattatgggaactatgtatgtgtaccttgttcccttcataaattccttctgtaaactacatgctaaatgtttaacaagtgctactggaaaaaatgtgtcagtgaaataatgtagttggaatgcagtgactggttaaaattgctatgagaatgtgaactttgttaaatgtgaacaacttttttttttcttgttctttttgcttcctaggaggattgcccaagaaactaattttttaaagagaacactggacaacattttactactgagggaaatagccaaaaaggcaaataatggaaaaatagtaaacattaagtaaatgctgtagaagtgagtttgtaaatattctacacatgtaaaatatgtaaaactatgggttatttttattaaatgtattttaaaataaaaatttaattctggtttttctgattagagtgcaaaagtgagaaaagttcaatactcttgaaatgtagaattgaaaatgcattagggaaaacttaataaaaattattaccagttatttggaagatctgacccatatagtatcacaaatctgtagtagcatgggtagtgtttaaaaataaaaatgttggccgggcgcggtggctcacgcctgtattcccagcactttgggaggccgaggcgggcggatcacaggtcaggagatcgagaccatcctggctaacacggtgaaaccccgtctctactaaaaatacaaa

SEQ ID NO: 281681 - DNA, 1000 bp, Homo Sapiens
cactttgctaggagatactcttctgcctcctagacctgttctttccatctttagaaacatcagtttttgtatggaagccaccgggagatttctggatggtggtgcatccgtgaatgcgctgatcgtttcttccagttagagtcttcatctgtccgacaagttcactcgcctcggttgcggacctaggaccatttctctgcaggccacttaccttcccctgagtcaggcttactaatgctgccctcactgcctctttgcagtaggggagagagcagagaagtacaggtcatctgctgggatctagttttccaagtaacattttgtggtgacagaagcctaaaaaaagctaaaatcaggaaagaaaaggaaaaatacgaattgaaaattaaggaaatgttagtaaaatagatcagtgttaaactagattgtattcattactagataaaatgtataaagctctctgtactaaggagaaatgacttttataacattttgagaaaataataaagcatttatctaaagatttggctctatattttctttcagattttttttttttaaggggtcttactgtcttgcggcgcaggctggactcctgggcttgagtggtcttcctgagggctttgcctcagctggccctcacaaccaccgtgtgtggtggaaaggcattgttcgggaaacagtcccagctcctcaggactgcaggcacccacacaccactgccgtgcccagcttctttcagatttaagtcggtaataacacccaggtgacagagcaatgtattcatatgttgagacagcatgaaagagtccattttgttttcatggaggctggaaattcattacatatggaattcttctgtatttagtgaagagatgttaatctttgagaggagccattaaaaatcggagtcacttttatccaagggaaacaaacaaaacacttgagttatgactcatatgtggcaagaggctggctggaacctcttgttgagaaacag

SEQ ID NO: 281682 - DNA, 1000 bp, Homo Sapiens
aagaacagaatggtttggcatagttcaaaatggattcttttcccttccccttgccaaaagcacaaggtgacttttctccagtattcactgtgaggacctgatagagaccctggagataataaaacataaatggtacacctctaccctctacccccttccatgactaagtcttcctggattttttaactgttagatttttccacactgagcctccagcaatttgtcaattagagcttatgttttcttaccccagcactgcttcctgcagaagtttctggttgtgggtttttgctctagtaagctgtgatgctctatattcacctgaccatttttggagcagcatttagccctgtgagctcacttctctgacaaatctaagaggagttgttgtctttctggtttgttcagcttcttccttgtttttctgttttattttttaattccattattttctttgttccaaggtaaaggaagcacctgatgaggctgaagtggtgttcacggcacattgcaaagcaacggtgtccttccaggtgagcggggactcctggcgggagcagaaggagaggcgagcagccatgatggtgggaattctgattggcgtgtttgtgctgtgctggatccccttcttcctgacggaactcatcagcccactctgtgcctgcagcctgccccccatctggaaaagcatatttctgtggcttggctactccaattctttcttcaaccccctgatttacacagcttttaacaagaactacaacaatgccttcaagagcctctttactaagcagagatgaacacaggggttagagagacatgggtagattttaaggaggaaggaacttggactttttcgtcagtgatctgagattcttccctccacagctgagtgctaatgctgtattgagagttataccattgggcctggactgtagaagcagcagagccaaggttctcaagaaagacagcaaaggtctggcagatgttgtaactatgc

SEQ ID NO: 281683 - DNA, 1000 bp, Homo Sapiens
gtctaattgttctcatctggaaagaccctcaccttcatatcccaatgtatttattccgtgggagtttggcctttgtggatgcttggttatcatccacagtgactccaaagatgctgatcaacttcttagctaagagtaagatgatatctctctctgaatgcatggtacaatttttttcctttgtaatcagtgtaaccacagaatgttttatctcggcatcaatggcatatgatcgctatgtagccatttgcaaagctttactttatccagtcattatgaccaacggactatgcatccagctattagtcttgtcatttataggtggccttcttcatgctttaatccatgaaatttttttattcagattaaccttctgtaattccaacataatacaacacttttactgtgacattatcccattgttaaagatttcctgtactgattcttttattaactttctaatggtttttattttcgcagattcaattcaagtttttaccattggaactattcttatatcttatacacttgtcctccttataatcttaaaaaataagtctgtcaaagggatacaaaaagctgtctccacctgtggagctcatctcttatctgtatctttatactatgggccccttgtcttcatgtatgtgggctctgcatccccgcaagcagatgaccaagatatgatggagtctctattttacactgtcatcgttcctttattaaattccatgatctacagcctgagaaacaagcaagtaatagcttcattcacaaaaatgttcaaaagaaatgtttagatctcatacaatctctgttctctgtttactaaaattttcccaagattgttcaagttaaaggtatctgtgttttgctagcattcaaagattttgcaaagtcctagcactttaaggacctaaggtgttaatatctagtaaactaataaatacactcctaatgttattcaacggcatttaaaaatttttagtcatgttcatat

SEQ ID NO: 281684 - DNA, 1000 bp, Homo Sapiens
cttcctctccaatctctcttttatggatctttgtttgaccacttgtactgtccctcagacactggtcaactttaaggggaaggacaagaccatcacctatggtggctgcgtgacccagctattcattgccttgggactcggggggagtggagtgtgtcttattgtctgccatggcctatgaccgctatgcagccgtctgccgcccactccactacatggtgagcatgcatccccaactttgcttgcagttggttgtaaccacttggctcacagggtttggcaattctgtgatacagacagcattgaccatgactctccccctctgtgataaaaaccaagtggatcatttcttctgtgaagttccagtgatgctgaaactgtcctgcaccaacacctccatcaacgaggctgaaatctttgctgtcagtgtcttcttcttggtggtgcctctctcactcatcttagcatcctatggtcacattactcatgcagtcctgaagataaagtcagctcaagggaggcagaaggcttttggaacctgtggttctcacctcctggtagtgatcattttctttgggacactcatctccatgtacctccagcctccctccagttattcacaggatgtgaacaaaagcattgcactcttctatactctggtgactcctctactgaatcccctaatttacactctgaggaacaaggaagtcaaaggggcaactaagaagactagtggggaggaccatagatgcatgagaaagttaacgcagggtttgcagttccaaacatttgtgcactagaagactgctgagaagctacaaactagttttaactgaattcaacaaatcttcctaaagcatctactgtgtaccaggcactgtttaggtacttgagatatacacagatatatagatatcagtgagtgaaacagagacccctgtcctcatgaagttaaccttatggggagagcataagttaagtaagataagctaaaattaaa

SEQ ID NO: 281685 - DNA, 1000 bp, Homo Sapiens
tggttaccattaccaccagccaggctctgagctcccccatgtacttcttcctgacccacctttctttgatagacacagtttattcttcttcttcagctcctaagttgattgtggattcctttcaagagaagaaaatcatctcctttaatgggtgtatggctcaagcctatgcagaacacatttttggtgctactgagatcatcctgctgacagtgatggcctgtgactgctatgtggccatctgcaaacctctgaactacacaaccattatgagccacagcctgtgcattctcctggtggcagtggcctgggtgggaggatttcttcatgcaactattcagattctctttacagtatggctgcccttctgtggccccaatgtcataggccacttcatgtgtgacttgtacccattgttaaaacttgtttgcatagacactcatacccttggtctctttgttgctgtgaacagtgggtttatctgcttattaaacttccttatcttggtggtatcctatgtgatcatcttgagatctttaaagaacaatagcttggaggggaggtgtaaagccctctccacctgtatttctcacatcatagtagttgtcttattctttgtgccctgtatatttgtgtatctgcgctcagtgaccactctgcccattgataaagctgttgctgtattttatactatggtggtcccaatgttaaatcccgtggtctacacactcagaaatgctgaggtaaaaagtgcaataaggaagctttggagaaaaaaagtgacttcagataatgattaaataagaccattgagcactcaacatagaggtaataggtatttaagcttcttgatttgtagatgaatatgtcaactctaacaaggggctggctaatgcttgcagatagtcagtaaagcataaagctaaagcttggactgtaaagcttactgtctcttatcccacactcttgtcatcaccactattgctttttaattaataca

SEQ ID NO: 281686 - DNA, 1000 bp, Homo Sapiens
gcccttctttgtgttccgcaatgtatttcttccttgcctgcctgtcatttatagatgctgcatattccactaccatttctcccaagttaattgtaggcttattctgtgataaaaagactatttccttccaaggttgcatgggccagctatttatagaccatttctttggtggggctgaggtcttccttctggtggtgatggcctgtgatcgctatgtggccatctgtaagccactgcactatttgaccatcatgaatcgacaggtttgcttccttctgttggtggtggccatgattggaggttttgtacattctgcgtttcaaattgttgtgtacagtctccctttctgtggtcccaatgtcattgttcatttcagttgtgacatgcacccattactggaactggcatgcactgacacctactttataggcctcactgttgttgtcaatagtggagcaatctgtatggtcattttcaaccttctgttaatctcctatggagtcatcctaagctcccttaaaacttacagtcaggaaaagaggggtaaagccttgtctacctgcagctccggcagtaccgttgttgtcctcttttttgtaccctgtattttcatatatgttagacctgtttcaaactttcctactgataagttcatgactgtgttttataccattatcacacacatgctgagtcctttaatatatacgttgagaaattcagagatgagaaatgctatagaaaaactcttgggtaaaaagttaactatatttattataggaggagtgtccgtcctcatgtaggtaaggaggtatgtagtcaaggtcttcccagtgaagttttcaggtttctaagggcaagtcaaggatcccaaagaaagaagacaggatttggatgctcctagctcaattacaaagtcatcccatcatgacatctgattgaagttcaagatctcaacttctacatcgagactgagtgtggatggggctccttgggggcgggt

SEQ ID NO: 281687 - DNA, 1000 bp, Homo Sapiens
agtttgttttcctgggattctccagattccacaaacatcacatcactctctttgtggtttttctcatcctgtacacattaactgtggctggcaatgccatcatcatgaccatcatctgcattgaccgtcacctccacactcccatgtacttcttcctgagcatgctggctagctcaaagacagtgtacacactgttcatcattccacagatgctctccagcttcgtaacccagacccagccaatctccctagcaggttgtaccacccaaacgttcttctttgttaccttggccatcaacaattgcttcttgctcacagtgatgggctatgaccactatatggccatctgcaatcccttgagatacagggtcattacgagcaagaaggtgtgtgtccagctggtgtgtggagcctttagcattggcctggccatggcagctgtccaggtaacatccatatttaccttacctttttgtcacacggtggttggtcatttcttctgtgacatcctccctgtcatgaaactctcctgtattaataccactatcaatgagataatcaattttgttgtcaggttatttgtcatcctggtccccatgggtctggtcttcatctcctatgtcctcatcatctccactgtcctcaagattgcctcagctgagggttggaagaagacctttgccacctgtgccttccacctcactgtggtcattgtccattatggctgtgcttccattgcctacctcatgcccaagtcagaaaactctatagaacaagacctccttctctcagtgacctaaaccatcatcactcccctgctgaaccctgttgtttacagcctaaagaacaaggaggtcaaggatgccctatgcagggccatgggcagaaacatttcttaatgcattattcctctatataaatatacatttagtcatagaaatgtgtgtccttacttacattaaacaaccttacgactctgtcccatgcagtctatgctgca

SEQ ID NO: 281688 - DNA, 1000 bp, Homo Sapiens
tgggagtgatctttgatgtttcccaaaaatcaaatatcaagcctagcttcaaaggttcagctgctgcagctgggaattgtgaaggaaatttacaaagagaaactccctagttcccagatcagttctgagcttgggtggcttcctgggaataagtggggacccatcttaaatcacttaaaatcactggggacccatcactgagtggagtcaggccttgccctacccacaccttcagaccacaccctcctctaagctggccctctgcccagtagcccctgtcagtgccccagaccttcagagaactcagcctctggcttaatccgggattcttttcctctcagcctgggggccagggagctagctttccccaccactgctcttgtaatgtcaagggcacacacttgtcccaaggtgcacaagtcctttctttaagacacgatgtaatgagattgcaggtgcatgtgcccaggagagaggggaccctcagtagctactggacattggggctggaaacagtcaatctgcgtggcctgcaggctaggggacagggcagctgggcaggagtggcagggcctgcgtggagtcactgggggagtgagcagggctccaggcacagaactgtcctctcctcctgggctgatggctggtctcccgggcaggtgcagctggaggttcagaagaagtggcagcaatggcacctccgtgagttcccactgcaccccgtggcctccttcagcaacagcaccaaggccagccacttggagcagagccagggcacctgcaggaccagcatcatctgagaggctggagcagggtcacccacggacagagaccaagagaggtcctgcgaaggctgggcactgctgtgggacagccagtcttcccagcagacaccctgtgtcctccttcagctgaagatgcccctccccaggccttggactcttccgaagggatgtgaggcactgtggggcaggacaagggcctgggatttggttcgttt

SEQ ID NO: 281689 - DNA, 1000 bp, Homo Sapiens
gctttctcattcaggtttctctgatcatcatgctgctgtcgtccatgcttttcattgacaagccacacaactggtcctgcatggctggccaggtcactctggcactgggcttttctctttgcctgtcttgccttcttggaaagactagttcactgtttttagcctacagaatttccaaatccaaaactcaacttacatccatgcaccccctttatcggaaaatcattgtgctaatctctgttctagcggagattggcatatgtacagcctacttgatattggaacctcccatggtatacaagaacatggaatctcaaaatacaaagatcattctgggatgcaatgaaatttccatagagtttttgtactcgatgtttggaattgatgccttcttagccttgctatgctttcttacaacttttgtggctcgccagttaccagataattactatgaaggaaaatgcatcacctttgggatgcttgtctttttcatcatttggatgtcttttgtccctgtttatttgagcaccaaaggcaagttcaaaatggctgtggaaatatttgcaatcttggcatccagccatggcttgttgggttgtatatttgctcctaagtgcctcattattttgctgaggccagagaggaacaccagtgaaattgtttgtggaagagtctccaccacagataattgcatccaactgacctcagcttttgtgagcagtgagcttaacaataccacagtgtcaactgttctggatgacagagttttgatttacatgtgtcctttgaagctgcaatgatgatgtggttcaacattccctttcaggatgctcctacagcagctgcctaatactctcaggtaacattgaggatttgggttctggtggtgtagtcttagcatggtatatcaaatcttgtactgtaagatagcatttagcatgaatcagaataccttttactattgaaattaaaaactattttattcaagcatttcaaaata

SEQ ID NO: 281690 - DNA, 1000 bp, Homo Sapiens
accttgctgctccaagtatggtcctcaaactagtagcactggtgtcacctaggcccttgttaaaaatgcgcatctctgggaccaccccagacctgctggcttagaatctgcattttaataattattttaaaaaacaaacaaacagctttttactaaaccccagggggattcctgtgcacaacagagtttgagaaacacctagttaagtggctgtgtgcagtgagtggggaggggtgagggcttccaatgaaggttgagttgctgtggagctctggttacattgcacaaaaaacccactcaagtgagctggagacccaggatgggaagaattggagtacagtcacccctaggcagcatccctccctctccctggactgtattctaggatcctctctgcctcttacctcctgccattccaaggcctccttctgaacctggcctcaacccagtcccaagtttgcaccgcccgaggcagcataggggtccctccattttgatttcctaaagagaataagactggctagttcagaaccctaagtccagggcagcccaatcagcagtggaagaggctccacagcagtgggcctgaccaccttcccctctcctaggtgcaggcggagctgaggcggaagtggcggcgctggcacctgcagggcgtcctgggctggaaccccaaataccggcacccgtcgggaggcagcaacggcgccacgtgcagcacgcaggtttccatgctgacccgcgtcagcccaggtgcccgccgctcctccagcttccaagccgaagtctccctggtctgaccaccaggatcccaggggcccaaggcggcccctcccgccccttcccactcaccccggcagacgccggggacagaggcctgcccgggcgcggccagccccggccctgggctcggaggctgcccccggccccctggtctctggtccggacactcctagagaacgcagccctagagcctgcctggagcgtttctagcaagtga

SEQ ID NO: 281691 - DNA, 1000 bp, Homo Sapiens
actgagaaggcacatggaggctgagactcagcatggcccccactcaccatgctaagagctacatgggtgtgtgttttcccagaggggtgcattatttaatggttctcaaccctgactgggaagctttaaaaaatatgatgtctgggtcttgtgcagaacttttgatataattgttctggggtatggcctgggcatctggaatttttaaagccccccaggtaattctaatgtgtagcccactcttactggtcagccaagagtggggatcctttcctgatccacctgccctgtgggactgcttgttaaagatttcctgaaggacccaatggactattctctgcctggcctgaaaacaacagggagccattagagggccttgctcagaaagtggcaagggaaggggctgttccggtcagctcctcagaggcttccttgcctacagctgctaaaagcccccactggagaccttgagggccgcaggctgcaactggggagtggggagggtgctgagggtggcactgccagcctgggaagggccccaggccaggacagggcctggaggctgcagaggatgtccatctggaagtgaccgcccagtttgctccctgcaggtacaagcggagatcaagcgaaaatggcgaagctggaaggtgaaccgttacttcgctgtggacttcaagcaccgacacccgtctctggccagcagtggggtgaatgggggcacccagctctccatcctgagcaagagcagctcccaaatccgcatgtctggcctccctgctgacaatctggccacctgagccatgctcccctcctcctcctctcctccatccacaggctgggaccgcaggcaggtgccagcccacgcatgtttgcgcctcttccctccccttgggcaggccctgggctggaagcttggctcctgaggggggagaaggaggcagggcacagactggaattgtcccctccttgttttggtactggtcccacccactgtggt

SEQ ID NO: 281692 - DNA, 1000 bp, Homo Sapiens
tcctctgaactcccgttcagtgctgccatggggagagctgtttgttttcaagcaaatgcatcagaacttggtggctccgagtgtgggtttttcaatgtagtccccttgggaaaagcatccttgttctcccaagttgccaaagcctccattgtgttttagcaggttcttctttgactcatcccttagaagccagttaacaagtcagacaagaacatctgctggtttttttgtttgtttgttggttggttggtttttttagtaattatgctggggtcattttttgttcgtaataacagatgacctaaatcagcttagtcacccacttcattcactagacccagctccagaacactctggcagtttccaaaaatcaaactcacccacgaaggcatctctcaagagcccctgagccatgggaggctcttggagagagacagtgactttcctctggaagggagtcagtttcctgggggtgggggcagtcacatcacagctcctgagcccctaactccctggctcaaggtgcccctcgctcccccaggtttcgctctggattccggcttgccttccgctgctgcccatgggtcacacccaccaaggaagataagctcgagctgactcccacgacctccctctccacgagagtcaacaggtgtcacactaaggagactttgttcatggctggggacacagccccctccgaggctaccagtggggaggcggggcgtccccaggatggatcagggctatggtttgggtatggtttgcttgcccccaccaaaactcatgttgaaatttgatcccaatgtggcagtgttgggaggtaggggttagtgggaggtgtttgggtattggggatggatcccttatgaatagattaatgccttccagttgaagtgaatcatcactcttgtgggaatggactagttcccaaaataacaagttgttagaaagagtgtggtgtcctcagtttccctgtcttgcttcctctctcaccatg

SEQ ID NO: 281693 - DNA, 1000 bp, Homo Sapiens
cttggctttccactttgcctctctgcttctccccagagcagggatgtccagacagggaggttcagctaacccagaaagaggataatgtgggtctccaatgcatttgccatgattctcaactccaaaaaactctgaaaaccaaaacatgtttccgaaatgtgccacaaacacgtttagcggcacagcgtgacccggtgtgaggtgatttctggtcccgaagttgtcctgtgattgtgagtcctgccagccccaccagggactgttagtggagtgatcatgtactgctgtccacaccccacggaatcgtgatcgaacgcgcaccactacatgcacacagcaccttcctctgctctgacgtattctgaattccaagacatgtggtgccgagttcagagaaaggactgaagacctgtaagcccaacacttctgctccggggtggtctacactgaccctgagcaggtgttaaggatggaggaccccctcacccgcccacacctccatgtgcacacacagatgtatccccaggcagggttgatgcacctgcgctttattctttgcttaaggaggagggggatgcaaatgcaggtacccggggagggagaaggtccaccggaggaccagataatgtcggccccagcccagcctgagcctgccctacagaagcgggcacgggaagaaagcacaaagttccatggatgaagaactaaatggaacaacctgcagggaccctgcaggagagaacccagtatcagggaagagcatctgtgtctccatggatggcaacagcagctgggtctaggccagaggcaggatgccttcctcagctggctggggggctgtctttcaggaggccagctgcaatattagctcaactgtctctgagcaccagtgaaaccaggaacttccagaaactgttggggaggctctttcaagacacagttttgttttgttttgttttgttttgttgacatggagtctcgctctgttgcccagtcgctc

SEQ ID NO: 281694 - DNA, 1000 bp, Homo Sapiens
acccaacatccctgtcactggaccatttccctgcatctggatgatgtgtctccttctccaggtacgagaagaatacaagaggtggatcactgggaagacgaagcccagctcccagtcccagacctcaaggatcttgctgtcctccatgccatccgcttccaagacggtgagagactgcatgctccctgcgggtgctggtcgagggaggtgccggcctcttggtgacactcagctctgccacgtgttgggtactgaatgggagctgagggtgcccaccctagttagctcatggatgaagtgtggagttgaagactggggatttatatgtatatattagcagacacacacacattatctatctctctatttaaataaaatttcaagaataagacatatataatttataacagatttacatagatacatttgtatatgaattatgtaacatattaaaaataatacatatttatatgttatgtttataaaatacatttatatacacttattatatacatataatgtataatattatatacatataaatgtaagatgtaagtttaaatatagataccggctgggcgcagtggctcacacctgtaatcccaacactttgggaggccaaggtgggcggattacctgaggccaggagttcgagaccaacctggccaacatggcaaaacccctgtctctattaaaaatacaaaattagccgggcatggtggcaggtgtctgtaatcccagctactcatgaggctgaggcaggagaattgcttgaacccaagaggcggaggttgcagtgagcagagattgtgccattgcactctagcctgggcaaaaagagcgaaactccgtctcaaaaaaaaattaattaaataaatatagatatcttcacatgtatatttatatagagaaaatttttatgtattatggataacatttatatatgtagattttcaggaatattgaaatattggaatgaatatgcaaatggggcaaagct

SEQ ID NO: 281695 - DNA, 1000 bp, Homo Sapiens
  misc_feature (831)..(930): n is a, c, g, or t
atgcagtggtgcgatctcagctcactgcaacctctgcctctcacattcaagcaattctcatgcctcagcctccagagtagctgggactaaaagtgcccaccacacccagcttatttttgtatttttagtagaaacagggcttcaccatgttggccaggctggtcttgaactcctgacctcaggtgatccacccgccttggcctcccaatatgctgaaattatagatatgaaccactgtgcccggccatgtcattggtgccttaaccaagcttcttttaatttttcaaacagaagagcccctgtcccagttactgctgctgagccctttcaagatgattcagtgaggagggagaaaagcggaagcggtgtgggaagaggcggggtctgggccagctgctggtcctgctctcctccctcctctggcctctaggctcccaggactggtttggaacccgcgccatgtgctctggaggctgtggcagggcaggtgcggcttggaacccgcgccatgtgctctgggggctgtggcagggcaggggcggcttggaacctgcgccctgtggtttgggggctgtgccagggcagagggagtcctcttgtcccctgtgcacaacacagacagaaggctgggcccacccagtgggtggtcgcgtgccaggccagtgcttaccccgccttgtttgcagcccgaggccagctggttgcaggtgcagggctatgcatcaggggtcagggtgcacatacccctgcaggtcttggggctcctgagttgcttctggaaaggcccagatagggcctgactgcagctgccgaggggtggagcttctggannnnnnnnnnnnnnnnnnnnnnnnnnnnnnnnnnnnnnnnnnnnnnnnnnnnnnnnnnnnnnnnnnnnnnnnnnnnnnnnnnnnnnnnnnnnnnnnnnnntatttagggtatttatcttctcacacaggactcctagttgaagactagaaaaggtaggaattagccaggt

SEQ ID NO: 281696 - DNA, 1000 bp, Homo Sapiens
aggagcggctgcgggagaatggagatgccctgtctcgagaggggtccctaggcccccttccaggctcttctgcccagcctcacaaaggtgagtggggcacccccagctgccgagctcccctagtcagcagcctcatacctcacattctcctgtggccgcacctcacagccccgccccggcccacaggcatccttaagaagaagtgtctgcccaccatcagcgagaagagcagcctcctgcggctccccctggagcaatgcacagggtcttcccggggctcctccgctagtgagggcagccggggaggcccccctccccgcccaccgccccggcagagcctccaggagcagctgaacggggtcatgcccatcgccatgagcatcaaggcaggcacggtggatgaggactcgtcaggctccgagtgagtgtggccgggtgggcgggacggggtgcagcccctcggaggcctcacctgggcccagagctgcctccgggcctccccaggtgactctggatggcatttggaggacaaatgggcagaactggcccagctcccttactatgccgtgcccacaaaccatggtgccttgcggggagggccacccctcctaggctctacgcggcgcagcccagcctagggcagagtgcgggaggatggggagctgggggtgctttcctgtttccttcgtctggtgaaagctttcactctctcctctgtttcaactaaccctctgtctgccttttctgccactttcctttcctgcctctccagatttctcttctttaacttcctgcattaaccctgggccgtggttcctacgcccgaggctcccttcccttccccagccgcactcatgccctgctcctgtcttgtgctttatcctgccccgctccccatcgcctgcccgcagcagcgacgaaacgtccatctgaggagcctgggccttgccgggaggggtactcaccccacctaaggccatctagtgccaactcccccccc

SEQ ID NO: 281697 - DNA, 1000 bp, Homo Sapiens
accagcctgggcaacataaccagatgctgtctttacaaaaaaattcaaagatagccagggtgaggcgcctgtaatcccaacagtttgggaggccgaggtgggcagatcacctgaggtcagtaattcaagaccagcctggccaacatggtgaaaccctgtctctactaaaaatacaaaaattagccaggcatggtggcacacgcctgtagtcccagctacttgggaggctgaggcaggagaatcatttgaaccaggagtgcagtgggccaagatggcaccattgcactccagcctgggtgacagtgagacttgtctccaaaaaaaaaaaaaaaagccgggtgtgctgaatacccatctcagcttctcaggaggctggggcaagaggatcacttgggcccaggagttcaaggttgcagtaagctatgatggtgccactacactccagcctgggtgacagggggacccgatctcaaaaaaaagacaaacacaaaaacaccaagaaggtggggctgagggcagagcatggggaggagcgtgcatggtcccagggcctgctcctgccctgacttggtgtctgggccggcaggttcgggaagaataccggaagtgggcctgcctagttgctggggggagcaagtactcagaattcacctccaccacgtctggcactggccacaatcagacccgggtaaggggctgcgcctggggcgggtgtgggcaggaaggcaccagggctagcggggctcaggcctctgggctctcctctccaggccctcagggcatcagagtccggcatatgaaggcgcatggttctggacggcccagcagctcctgtggccacagcagctttgtacacgaagaccatccatcctcccttcgtccaccactctactccctccaccctccctccctgatcccgtgtgccaccaggagggagtggcagctatagtctggcaccaaagtccaggacacccagtggggtggagtcggagccactggt

SEQ ID NO: 281698 - DNA, 1000 bp, Homo Sapiens
cagcaacttggatggaactggaggccattctaaatgaagtaacttaagaatggagaaccaaataccgtgtgttctcagttataagtgggagctaagctgtaaggatacaaagacattcagagttatatagtggacatcggagaatcaaaagagggagaaagtgggtgaggcatgagggatacaaaactacgtattgggtacaatatacactactcaggtgatgggtgcactaaaatttcatacttcaccactatacaattcatccatgtaacaaaaaaccacttgtatccctaaagctactagaataaaaaacaaaaacaaaaaataaaaattggataaattttattaaaatgatgtgagccatctgtccacttttaatcaatagcaatgttgccatgtgtggtatgatctgttgtcagttttattttatgctgattatttctaccagccgtaacaatttggaaataggcaaaaagttggttgtatttatttcctagataatcaataacaaaatcagagcaatctaatgagacagagatacaggtagacagaaggagaagaaaagctacagttgtgtggagcatggatggttaaactcccagtaactggatggggtcaaaaggacagttgtggcccagagttcagatctttcggcaggctcaaaggatcctgcatcagtccctggctgctctcttctaagttttcagcctctcctcttctccattcctcaccagatccctggcctctttggagctacctggacaagagctttcttgacctctggcaaactcctggccaggttgtggttggaaattcctgatacctttagttgagttcatacaagctgaacgttttcaaaaggaactaattttacttgaaccaactaaacaaaaccaaactacacaaagaaaatacaaaggcacagaaatagatgaggtttccatgctgtgggcattttaatcatgtgtatcaagaacgtttacagagttcatgtctggcc

SEQ ID NO: 281699 - DNA, 1000 bp, Homo Sapiens
cacattcaatatagaaaattaaaaaaatatgacagaaccatgggaaaataattaaaaacacctataaaacccaccacttcataataacctcagtcaacatcttggtaaatatgattaatctttttgcaatgcataaaaaatacatttttaatgagatttacaatgttactttttctaacctattactcttacataagaactaccttttgcttatcctcttactctacctttttaatggcagtaaagtattctaccatatgatatataatccatcaggctcaccctcacttgttggactgttagcttaacagtgacttttattaacggtggataattgcagcccctaaaatttaaagcaccttctcagaaaattttatttcaaagcttctctgagggtaaagtaaaagtcctcatgattcaaaaagatttttccattaaacacttgaccattttaacatttctaaatttttacatgctgcctgtccctcaaaaatctagctttttgaaaaaatttcaaaaaggtatagcatatctagaaaaatgtgcatttgggttgatacagacaggaaaatctagatgcttctttaacataaggtaggcaacttgtctctgcaaagatctggtctcagactctggatttcccatctgtgctctgcagtttgtttattcattcactggctctatccacctttaaagtgctcacgagaacacatgatatgccggtcactacactaaggttgtatcaacatagaagtcagagtttcagaagtcagagtttcagcttactgaaagcttatagtgtaactaaagtacttccagatacatgctatattagataacggtcagaggatagcactaggacacagaggagggcccccaaacccagccttggaggtgggagttgtcaggtaagtgccacaaatgcccaattacagctgaggctgcttcctccctgttttctatagaatcctgtgaagcagctccagctatgtgtgaagaa

SEQ ID NO: 281700 - DNA, 1000 bp, Homo Sapiens
ccccagcttgggcttgtggacctctgggaggcaggggacttggggagcggaggggcctgagtaaaagaggagagtgcagggactggctcagagcccacatcctccactgctcagagcctgctcagatttcctaaggtctgggcctcagttttctgatctaaaatggagggagggaggtctgggtagtgaagcaccaacttgatccaaagagagagctaacctttgccttcacctcctgggaggtggtctctgggctcccagaatatcctgcctgatgtatgtgtctctgtttgcctgggggctttgactgctggacagtctgacagtgtgatttatggtgggagctctgggtcatgccacatcagcttggacctccagaagaaactggagaccagaaggattagccctaacctccaggaggagctggaaactaaagccctgccaccaaggcagtgtgtgacagagccccagcaaagactcgggacaccaaaggtctgggagcatccctggcggcaatgccccatgcgtgttgtcacacgtcatctctgggagggacttatccccactttcccagggaggacggcagacaccccatgtctggaccctcctggactctgccccccacgcctgcctgtccttgcctgatctcagcctggatccctttgctgtaataaaccataactgtgagcataggtgcttttagtgagttctacgagtctttcccacaaatcaccaaacctgagggtggtcttggagacccccagaacttgcagctggtgtctgaattgaggaagggtggtcttgtgggggctgttctctcgaactgtacattggctaaactcctggtgagaacccttgggacaccccccgcaggccaccaggtgagggagccgatagagaccaggctctgggtgggggcatttcgcagagccgccctgccaggtgtggaactgggacagtgttgccccaggacgacaccggggacgtttctagcaggatc

SEQ ID NO: 281701 - DNA, 1000 bp, Homo Sapiens
aatcctggagggaaaatgtctttctgatctcaggttaacctcaagagcttgggttattcattctacaactggggcagcatggaggagtcgggggacgcagattatctctgcctgaacagcggagtctttagatcaaacaccaaaaataggagatgaggaaaaagacaagccttaagtaaaatatacaaaagcaaagcagctggagaataagaaaactattgttttcttggatgtaggagcaaagagagggaccccagaagagaggaaagcaaatatatgcctcttagtatctgattttcagagtcattgaactaggtctctgagaatcaaatttttcttctcaaatgatttttctttgtaataatagcctatgcaaaataaaaccagctgcctcaaaggaaaacacacatctttccttgcattccaaatgctttgattggaaaggaaatctcagacctcttagggcattcctgtctcttggggaagattatcattttacgatttgataagtgtaacacacattgaaattcctgcaagatgtttgactagtataggatttcatattttcagtcattagaatgaataaattatttcagatatattatcatcaaaggtattgtaatgtggggacacaggaaaaattcacttttcacctatgcattcctgagagctaaaaaacaaattagatcatcatagatcagctcatattttcacccacacaattttgttgttgtgaattttatttttattcctgatttattttattcctgatcaatttagcaccagagtcatcctagatacacataatataataaatataatgataagtgtaactttcaaaagaatttataataaataaatattcataattattcaaatgtatttctcaagtacaaatgtgttgagcatatccatagtaaaataagagctaatggctgggcgcagtggctcatgcctgtaatcccagcacttagggattagaggccgaggtgggcggatc

SEQ ID NO: 281702 - DNA, 1000 bp, Homo Sapiens
ataccttcagggggctaccagacagtgttctcaacttggttaaggaggaagaaaacccagtcaatgaaattcaatgaaattcttggaaacttccattaagtgtgtagattgagcaggtagtaattgcatgcagtttgtacattagtgcattaaaagatgaattattgagtgcttaaagattattttgacttaaatagtatactttgaacatactctaattatgaaaggaagaacaattcctgtatgcctgtttcccctgcccccaagccccctttaattgggaggaagaccattatggaaggggacccatcacagcaattctaccaaccatagcacccaccccgagcagcgctggtgctgcagcctgttcgcgctgaccatttctctacaagatacaatatttattatcaggcaagaggacagttccattttaaaataagacttttgtaatcattccaattttgtaatcatttcaaaggccacataacttagttttctctacttacacattcagtataaatatgaagctattttctgttcatatcaaacattaactacaaggcacattcgtatcagttttgtgtttctcaaattgaagtaccataccagttctgaggcagtgtcccagcttccatgtttgttaaataccccttgtttgtttcaccattccagcaagtgctgaagggtgtactttttttgagacagggtcgggctctgttgcccaggctggagtgcagtggtgtgatcatggctcactgcagcctccacacctcctgggctcaagcaatcctcccacctcagcctcctgatagctgggactacaagtgaatttcctaatattccgggaggtcaaaaccaaggctcactgttttcacaatacacacagttctatgtttataaataacaggtttcaaaagaaactcaggacagtatttaaaacaagttcttaaactattaattgaacaatggcatttttaaatatgtaaacacagcggaattc

SEQ ID NO: 281703 - DNA, 1000 bp, Homo Sapiens
tttaataaaagttatgcctgttttgtgttgacatgtgtttaaatatattttataataaaaataacactggtggacttaagagaatttttctcctttaaagaagaaatatttaatattaattaagggtgctgttggccctttaaaaaccatagggttaaacctaactcttcctttttctgtgatatccgttttctggctcttctcttctacttttgcttcccaccaattcacttttcaaaattcccacatgccctttctccctcttacccttttacttcctatacttgccaaccctagcaacttcctcactctatcatcatacactaaaacagaggaagagaagagaagaaaaaacaaaccagagaataaggcaggttttccacagccccccaagaccgtcaaagtgaaggtaagagactcagaagttaccagctaagggttcaaatgctaatttcaccatttatatactgcccatcagaaccgagtagacattaaccaattttgacggcgtactcttcttgtcaataaaaattttaagcgcttagcatattacttgcaatagctctgggctggagcatccgtttcctctgttcacatactttagaaggtctcactccgatctttctctgataagaactcctcctcatcaggtgaggagcttgtaggatcaaggggatgtgcccatctggtgcctaagcaccacctcatcaagagttcgaccctgcatcctgcccaaattgtcctgtttctagaccctagatatgtgcctaattcattttttaatggtggaccatctctgcgggtgtgtgtactcctaagtatcacaatgggtttcaaatggtgtggcttaaaagcatgtgctaaagtgtcaatagctctaaatgtgagtcatgagacagtgcagaagaaatcttcatggggagggaagaaaacgaggtggttcttagcccaggagctcaggtcccttcttcctatgctacctccttatggctaggaattc

SEQ ID NO: 281704 - DNA, 1000 bp, Homo Sapiens
ctttgagtaaatgaagattcagactttgtaatattattgcccttaagtgcaatgctaaaaaaacgttgattttcaagcttagagaatggctagacttttcattaaatactgattttcctacatttgctcttctgcagttagtgggtgatttgctatttttcttagtagttaaaaaatggaactaaatagtgaatatacatacactgcatgtaaacattctgcatatacctctaagattaaaattcgcagttgtcttttcatcctttataaaatgatctaactacttatatttgtgctgcatcgcgttacatctgtttttatttcactatgaagatgtttgattaaacttatggacttagtgcctttaaactgatcatcagggagaatcttgaaaaaatcatttgaagggctgatgtgaaggagcactgtaaatttttataacttagtaatgagtattcttaggcagatgtaaaattttttccaatttatttttatttatgtagcttataaaattaacataccctgttttactttatgataaaggattttttgtttgctgaatttaaaattatatattagtgataccatcagagggcagtgatgttctattgtatattaaattcagctctgtaaggatctttgtagtaattgaatgagttaaactaataatctggatgggttataatgagtagtaatatatttgtccatatttcataagtagtgttaatcttgtgtacttattagagaacgatcataagatttatacagatgtgaaactgcgaaggcaagtatgaatgtatgaaaaaaacatgtaggtactgtacttacaaaaggtctacttcagatataaaaatattaggtaattctatacaatgcatagtcataaaccttaacatttttgttcattagaaacatgaattttatagcattttttgtttctcctatataatacactgaaataaaagaatttgtgttagctattaaaaaaaaaaaaaaaaaa

SEQ ID NO: 281705 - DNA, 1000 bp, Homo Sapiens; identical to SEQ ID NO: 206699

SEQ ID NO: 281706 - DNA, 1000 bp, Homo Sapiens
gagaattgcttaaacccgggaagcggaggttatagtgagccaagatcatgccactgcactccagcctgggcgacagagcaagaccccatcttggggaaaaaaaaaaaaaattagcgccaatggctgcccattactgactgttgaggtagttggtgacaaactgattcaaaagagaggacttgctaggctgggtgcggtggctcacgcctgtaatcccagcactttgggagcgtgacgcaggaggatcgcttgagcttaggagttcgagaccagcctgggcaacattgcaaaaccctgtctccactaaaaatacaaaaattagccaggcatggtggcccacacctgtggtcccacctactcaggaggctgaggtgggaggatcgcttgagcctggcaggtcaaggctgcagtgagctgcctgggcgacaggacactgtctcaaaaaacaaagaaacaaacaacaacaacaacaacaaaaacagaacttgcctcctgtctaccctgtgtggtgacaggtcagagggacctctgcaattcaggcccactagctgttccctgtcctgctgcacccctgccccacaggcttggtaggccaaggccctcagccgcctgccggggcccctggtgtagggcggggtgggtggcagccccgttccccctcatcccagaccctccggccatcccagcttttcccaccaagcaggatcttgagaccagagctcccagcaggggccctggagggactggcccattcgagtggagggtcgcggcaggaacaagtgcgggggcggggcctcaaagccccgcccccaggcccagcggaaccctgaagaggagggggagggtgagccgggcgcggctgtgtcagctgagtgacagtcacgggaccgcgaccaactctgtctggcttcctagaggagcaggagggatgagcaagggtctcccagcgcgacaggccagtggtggggtgcttggggggagtgctgtcttggagggtccc

SEQ ID NO: 281707 - DNA, 1000 bp, Homo Sapiens; identical to SEQ ID NO: 114801

SEQ ID NO: 281708 - DNA, 1000 bp, Homo Sapiens
ctttgcagcccagaatggggatgacggcactgcgcgcctgctcctggaccacggggcctgtgtggatgcccaggaacgtgaagggtggacccctcttcacctggctgcacagaataactttgagaatgtggcacggcttctggtctcccgtcaggctgaccccaacctgcatgaggctgagggcaagacccccctccatgtggccgcctactttggccatgttagcctggtcaagctgctgaccagccagggggctgagttggatgctcagcagagaaacctgagaacaccactgcacctggcagtagagcggggcaaagtgagggccatccaacacctgctgaagagtggagcggtccctgatgcccttgaccagagcggctacggcccactgcacactgcagctgccaggggcaaatacctgatctgcaagatgctgctcaggtacggagccagccttgagctgcccacccaccagggctggacacccctgcatctagcagcctacaagggccacctggagatcatccatctgctggcagagagccacgcaaacatgggtgctcttggagctgtgaactggactcccctgcacctagctgcacgccacggggaggaggcggtggtgtcagcactgctgcagtgtggggctgaccccaatgctgcagagcagtcaggctggacacccctccacctggcggtccagaggagcaccttcctgagtgtcatcaacctcctagaacatcacgcaaatgtccacgcccgcaacaaggtgggctggacacccgcccacctggccgccctcaagggcaacacagccatcctcaaagtgctggtcgaggcaggcgcccagctggacgtccaggatggagtgagctgcacacccctgcaactggccctccgcagccgaaagcagggcatcatgtccttcctagagggcaaggagccgtcagtggccactctgggtggttctaagccaggagccgagatggaaatttag

SEQ ID NO: 281709 - DNA, 1000 bp, Homo Sapiens; identical to SEQ ID NO: 114802

SEQ ID NO: 281710 - DNA, 1000 bp, Homo Sapiens
aagacaagcaggctcgacagagcccagacggccaaataggagcggctgagcaggggtgccatgcgtgagcagcggtccagggcacagaggcagtgccaggagtgggcaggcagcagccccaggcccagggcagccacccacacgcccacaatgagcatgaccacgcggccacggggcaggcggctgtgcagctgcacggccatcacactgcggtgccgctccacggcgatggccagcagtgtggccaccgacgcagtgaggcttgtgtccagcaagccctgccgcaggaaccagccctcaagtgaaagtcgggctgtgcggggaccagtgtggaacatgaggaagaggtaggccacgcccgcgaagaggtcagccgcggccagattgccgagcaggtagtagatgggctggtggaagcggcggttggaggcgatggctgctatgaccagcagattggtcagcagcaccagcacgctgacggtcagccccagtgccaccacgaccacatccttgggccgccagtgggagctgagctctttgccactgttgttatagaagaagccgatggtctcgttgtagtagcactggcccatgatgaccatctggggacacaagagatcagtgcatgtggcacttcttggaaggacacagggaggggcggcagctgcagaggagggtcagcgcaggaaggacaagggtctcaaattcagatacctcgaagcaaagtggcagtggtgaggactacggtggcctggaaaaagcaagctccatggggctggggtggaggtggaggagcagctgtttcttacctactaataagacctgtgtgcaagacatcacccaagtcaataggtttttgaaccagaagtgaaacaaaacccatctatggtcgaatcccagcccacctgccgccaatgtgtgacccggtttgggttgtggggagaggagggttagggaaagacaaaggggtgtgagctgcgggaagagatgagggaggatc

SEQ ID NO: 281711 - DNA, 1000 bp, Homo Sapiens
gggactcttttaaaaacgtggaaggaaagacatctgagggctgtgacaccatccagccactctggccacacgttggctggcttgcatccactgcacgcagcagaggagggcaggccccgtgacacctgtgacacctgccaaagcctcctcctggcaattctgagagggcccatgttagggatgtagctcatccaagcttgtcactgaagatccaagcaagcttctctttgaaattccacctttaccttctgtcccaagtggttgtggacacccatgggagctggtaccaagggccaggagcagccaagggagacagacaagttcagagcacatttccagttacagggaacagagcacaggcctccaagtgtccatggagcagcatgcaaattgcagtgaggagtagaggaaaacctctacatggagcacagcattcctggcaaacacaggggaccgcagtccacatgctgtggaatatacccaagtatgcatcagacacttgtttggtgaacagtaaatgtgtaagatcaattaccttgagagggccatctgtgctccacatgtgtggttcgtgtgaggagatggctaccactcactatcttccgagggaaacagggctcagggcttgcacacgatggacagatacacacgggtcacccagaatgtcactgcatacaaacatcactttgttcaacatggattttgttttcatggagtccaaacgcagaccctagttcaccttacggccttgggtttgtctgcttttggagctatatatccagtagatagatagacagacaagacagatacattttctccctttcttaccataatgtcaatgcctcgtctgaatctcatcatcactcaagagtcaagagaggaaccaaatgcttcatataaacagggctgggcggggagcgttagttttcactgttttctgtctccattcagatcattcctatcaaagcccagctggttatctgaagccaagagacagaca

SEQ ID NO: 281712 - DNA, 1000 bp, Homo Sapiens
gagctgtaaggtctccagtgggtcattctgggcccagagatgggtgctgaagctcccacgcctgcctgtgaaaatggagtcctctctcacctgggagagccaggtgctgccccgagaaggatgcatttatggcttcrtgaagtctttcctgacccccgatgctgctgactatagagacaaagtctcactatgttgctcaggctggtcttgaactcctggcctcaagcgatcctcccacctyagcctcccaaagwgttgggattatagacatgagccactgcacctggccgaccttgggcaagttcttaaacccttcaaagcctcatttttctccaatcayaaaagggaaagatggtaatattttccccwccaaattcttgtcggatgccctcacagaattgagattatgtacgtaaaacaccaggtgcctaacccggcacagagcaggagggctaagcgtgacatccagcacgtggtcagtggaatccagtattcctacccacctctctagtctcccctccacccctctccctttcagaggcaccaagctgcttgtggtcttgtctattcccactccctgcctgactgaacattttctccacctcctgatcatcagcagcagaaactggctgctcttcctcctgggtagacagccagactgtatttcccagctgcccctgcagtgagatgtggccatcggagccagcattggccaatggactctgcatgggagtgacgcatgctgcctccaggcttgtccctaaaacctcccacgtgtcctcsgcctgctcttcccacytccaaggagcacggcaattgtggaagacccagattagtgatggcagaaccatagatgggaggaacctgggtccctgacttaaagtatcatggatttggatgttcccttagtgagaaataaacttccattgtgtttaagcctttatttgtttatagttggttacagcaactgccttcttttaattaaaacactcctgctgct

SEQ ID NO: 281713 - DNA, 1000 bp, Homo Sapiens
attcaggagcaactgtgatcagggaagttgggggcatttggcctgaaaggcagaatgttcccagtatttctggataataagctggggaagtgaggactgtcctgctgggacaactaagaagagagaatgtggactctgaatccctttttcaactttaaaatggaaaacagtcatataaatgcttacagactgaaaaatgtctcatacatattttgcagctatcatgatcctagttcaatgctaggcaaataatggcacttgttaattatttaccagtttttaacttaagcctgattttaacaacttgataatggtgtaatactgacttataccagcaggggttattattaagcattctctggattgaccacccacaatgctttgagcttcttttatagaagggatcatgaaaaggtctggtcagctacagtttaattccacactgttacagaaaagcatttctttatcctgtagtagcatttgaagggacagttcaacaccctgctccctgatctgtcagagcttaccttccaaccacaaggcaacttcctggctttttacaagtggattttatttcatggtttaaattcaatcattattgagaacctacagtagtgtgagcgtatcaaatttgcacttcatgaggatttacacatgaaaattgatattctcatgggctttgctgagagtttagttaaggacaaagatgtaaaaatgccaaatttgggaaaggaaattttgtatgaccactgttctatttttcagtgattctctctgttagtagctgggtcacatttacaactggaaaagaactacattgggagatcagagaaagccaagtggccaagtcctttatcaaaaagctgctttttggagaagatgatgcataaagctgtgatactaaggagaggagagattatgtcatatgcaactgctctaggctgtgcagggggtttaaatggagatcagaacaaaggctcacctggtattgatacatttg

SEQ ID NO: 281714 - DNA, 1000 bp, Homo Sapiens; identical to SEQ ID NO: 201673

SEQ ID NO: 281715 - DNA, 1000 bp, Homo Sapiens
cttctcaccaaaccttcctcttgaccagtctgccggccaggggagacaaggagagatcccgtcatgccactgtgcacctggagctcttgaccttctgcatcccgagccctccatggagccaggcatctgtttaaatgtcatgcaagggagggcttgaagggaagcaagcagcaccctgggatatttgcatgtgggtggtgccctggctgctgggtgactttgggcaggtcacttgacctctctgggctcccatttcctcatctctgaaatgtgttggcacctactgtgaacacgagctgtacttagtaatatggtaccttgcagaacagcagcatgggatgagtgagccctttaaaggtggcctcggtgaagccctctggcagcccctgacaaaacagaccctttctgggtgagaagcagcttgggagttgttagcagcatggccacaggagccgggagtgcagcagtgccccgcaaataccagcacatccaaatgacaagttttgctcagcaaatacaaaacaagtgtctagcctacaaaacgctatgccgtgtttcttacccagatgcgatgtgctcagttaacagttctcgacgtcctgcaaagcagcgtccccagttctgtgatgcctttctggtttcttgtgaaattacaggagcgtctcttcttgtctcccccaggtcatctccgcggtgtcgaggctctccctgcacagcatcgcgcagaacaaagggatcaggtgagctctccggagtgcgctgccaaggccgggtcctttcatctccatcgacaccagcgtgccttgtcacagatactggggttggaagcagatgccctctgcctgtgtctttatcatgcatttgcagcgtgttgtcgcgtaacccgttggcggctgcaggaaggggtgtggggggcgggaggcttcagctcacaccggggaaatcttgcaagcatgttactgacggctgcaaaatctctttcgatttaggtaataagatc

SEQ ID NO: 281716 - DNA, 1000 bp, Homo Sapiens
tgcattcaaattagttatttcaggaaggggccctataaataacttattttaacctccctcttacacctgaagaaataggaagctgtgtcatctcagaggctttctgaggcctgtgccaaagtcagaacccaggtgtttaatgtctggccctggatactttcttttatggccatctgccaaatcagtgctaaccccggcttacccaagaaacttccaagatgaggtacgtttagggtggcacacagcagtctttgtgccagaactaaactgacccttaccattgggtttctgaaagccagaagctaaacattgtcttgtcatgtgtttaggtggttgatttggagaaaatgattgtttagcatctttacagatggagaggacagagtcagtctccttcggataattccaatcgtcttccttttacaggtggataaagtagattaggacaagatcacacattctatctgtgtctgtggctgcatattttgcaaaaccagaaacaaaatcgcagactgccgtggtttagaccatttataatgtcaaaactgtaatgacaaatttctgttcacttttatgctaccagtatgactttataggggagaaggaaagccttttaattagccacctgggaattactcttttaaaaaatgccttttctcaaaagaacatgataccactccaagtaaatcattgccactaggggttttcctccttccttctgttgcccatgcccctgcctgaaagtgtagggtaagaggaaaaacaagtaaaaccttagtgttgatggtaaactgagaactctgtagcttaccttggattccagagcagaagactggtttacattcagtactcatccttattgacgttaacaccaggaatctccatgtttattatttttcgtggaaactccatgtttattatttttggtggtctctattgaccaatgtatttcaaacttttttgactgcaagtcataataaaaataactttttacatcacg

SEQ ID NO: 281717 - DNA, 498 bp, Homo Sapiens
ggtactgccacctaatggtgacagaagagatggatctataatccagtttgtatgattattgaaatgcagtaactttagagaactagttagctgttaaaaggtaaaggggcaaacttaacattctttccctaaagttatctggtaatttacattgctgtttttgtctttgaagaacattttccaaaggttaatatattcctggttgtttttagtaccttttttggctgatctagcacacatatatgtttcctttttagcatatactttagaagaacagaagaacctcacagtctgtcctgatggagcactttttgaacagaagggtccagtttatgttgcatgtcagtttcctatttcattacttcaagcatgcagtggtatgaatgatcctgattttggctattctcaaggaaacccttgtattcttgtgaaaatgaacagagtacgtacatattttacctctgctgctgcttttttctaatattctcttttaaggag

SEQ ID NO: 281718 - DNA, 1000 bp, Homo Sapiens; identical to SEQ ID NO: 206042

SEQ ID NO: 281719 - DNA, 1000 bp, Homo Sapiens
agcccatggatcaaggagtaatttcgactttcaagtcttattatttaagaaatacatttcgtaaggctatagctgccatagatagtgattcctctgatggatctgggcaaagtaaattgaaaaccttctggaaaggattcaccattctagatgccattaagaacattcgtgattcatgggaggaggtcaaaatatcaacattaacaggagtttggaagaagttgattccaaccctcatggatgactttgaggggttcaagacttcagtggaggaagtaactgcagatgtggtggaaatagcaagagaactagaattagaagtggagcctgaagatgtgactgaattgctgcaatctcatgataaaacttgaacggatgaggagttgcttcttatggatgagcaaagaaagtggtttcttgagatggaatctactcctggtgaagatgctgtgaacattgttgaaatgacaacaaaggatttagaatattacataaacttagttgataaagcagcggcagggtttgagaggattgactccaattttgaaagaagttctactgtgggtaaaatgctatcaaacagcatcgcatgctacagagaaatctttcgtgaaaggaagagtcaatcgatgcggcaaacttcattgttgtcttattttaagaaattgccacagccaccccaaccttcagcaaccaccaccctgatcagtcagcagccatcaacatcgaggcaagaccctccaccagcaaaaagattacgactcgctgaaggctcagatgatcgttagcattttttagcaataaagtatttttaaattaaggtatgtacattgttttttagacataatgctattgcacacttaatagactacagtatagtgtaaacataacttttatatgcactgggaaaccaaaaaattcgtgtgactcgctttattgcgatatttgctttattgcggtggtctggaaccgaacccgcaatatctccgaggtatgcctg

SEQ ID NO: 281720 - DNA, 1000 bp, Homo Sapiens
ttctgcctcagcctcctgagtagctgggattacaggtgcgcaccaccacgcctggctaattttgtatttttagtagagatggggtttcaccgtgttggccagtctggtctcgaacccctgacctcaagtgatgcgcccgcctcagcctctcaatgtgctgggattacaggcgtgagcccccgcgccggcccaggcccatgtttttaaagcccacacctgcctcctttgcccagtggtctcacttcagcacggcctcagggctgactcagtctctccggagagtggggcgagcccagcctctcctacagaacctcttcttccccagcagaagaggaggggctgggaggctgagctcccgcctctgaccgcctgtctgtctctcttggtcaccagctgtgtgtccttctccatctacacggcctggggcgagcactgtgagcacctgagcatgaaactcgacgcgttcttcggcatcttctttggggccctgggcggcctcttgctgctgggggtcgggacgttcgtggtcctgcgcttctggggttgctccggggccaggttctcctatttcctgaactcagctgaggccttgccttgaaggggcagctgtggcctaggctacctcaagactcacctcatccttaccgcacatttaaggcgccattgcttttgggagactggaaaagggaaggtgactgaaggctgtcaggattcttcaaggagaatgaatactgggaatcaagacaggactataccttatccataggcgcaggtgcacagggggaggccataaagatcaaacatgcatggatgggtcctcacgcagacacacccacagaaggacactagcctggcgcgcgtgcacacacacacacacacacacgagttcataatgtggtgatggccctaagttaagcaaaatgcttctgcacacaaaactctctggtttacttcaaattaactctatttaaataaagtctctctgactttttgtgtctcc

SEQ ID NO: 281721 - DNA, 1000 bp, Homo Sapiens
ccactaggaactccagttcttcaccagctggtgactgagccccactctgtgcccagcctcaggcagtccatgctaggcctggggagagaaggaaggggcagacggaaggtggaggcactgttcagccctaaagctctgtgcctgtacagcttcagggctttgaggaagcaatagaggccaaggaagtcagggagggctctctagaggaggcggcagaactcccaggcacagagctcggctcctgaccactccccaacttttctttctccccagtacctggagccctggctgccgctaaagcagccaaatatggtgagtgcaccccacaaccacttgtggctcccttgccaccacaccatccctgacagcacaggactggggtggtcacaatagaaaaaggcagtttcggccgggcgtggtggctcacacctgtaatcccagcactttgggaggccgaggcaggcagatcacctgaggtcaggagttccagaccagcctgaacaatatggttaaaccccatctctactaaaaattcaaaaattagccaggcgtggtggcgggcacctgtaatcccagcactttgggaggccgaggtgggcagatcaactgaggtcgggagttccagaccagcctgaccaatatggtgaaaccccatctctactaaaaacacaaaaattagccaggtgtggtggcgggcacctgtaatcccagctactcgggaggctgaggcaggagaatcgcttgaacccaggagatggaggttgcagtgagccgagatcacgccactgcactccggcctggacgacagagcgagactgtatctcaaaaaaagaaaagaaaagaaaaagaaaaaggcagtttctaggacacgtttatgacagtttaaaaacctggcccctgcccactaaatgcttatggtgccttcaacccctgtgaccaccaaaaacacccttgaaatcccagttgccccccaggaggcaattccaccatccctaagctt

SEQ ID NO: 281722 - DNA, 1000 bp, Homo Sapiens
ttgctagttcctttagttcttttagtcaatatatttttgtcttcgcatataagtataaataaacatatttttaaatttcttggctgggcccagtggctcacgcctataatcccagcacttctggaggccaaggtgggcggatcacctgaggttaggagtttcaggccagcctggccaacatggtgaaaccctgtctctactaaaaatagaacaattagctgggcttggtaatgtgcacctataatcccagctactggggaggctgaggcaggagaatcacttgagcctggggagcagggggtgcgggaggttgcagtgagacaagatcgcaccagtgcactccccatcctgggtgacagagtgagactctgtctcaaagaaaataaataaataaatacatttcttgaggcgtttcttgttaaatcattcatggagaggcatcccaaacactacattcaacaaaacactctgaaaaatgttttcaaatgcaatataacacagcagagatttgatgctctgttatccagttttcatataaggcagtgtgagctgtgtcccagagaggacagtggtctgaatccacctgagacagaattgggtctaactaactgtgagtatggccttcaataagtcactctccatttgggaatttgatttctccacttctataatgagagtatttgacaggatgctctcccaaatcccttgcaattttgttagtctgtgatttcatgtttttatttttattccttcatccaacaaatagtcaaggagtaattgctgtctgccaaataccaacagtattcattaaattgtaattcagattttatatatatataaataatgtataatgtgtataaattgctttgtgagtgcctactacactgctagacagtagttgctcaataattgttagctgaatcagaatccatgtttatcccagagtagcaattagtcttgcatcgagtatcgtgaaagaaggccacgcttaaataagaat

SEQ ID NO: 281723 - DNA, 1000 bp, Homo Sapiens; identical to SEQ ID NO: 195000

SEQ ID NO: 281724 - DNA, 1000 bp, Homo Sapiens
cagacaccagagagtccccaccagatgacagctctgtgcgtgccggagtgtgggctctgctcccttaccactccacccctgcacctggccatggcaggagcgccatgtttgctgaatgaatgaatgaacacatgagtgaatgaatggcttcttcttcagaccactgaacgtccacaggccaggtatggtggctcacatctgtcatctcagcacttcaggaggcagagatgggaggactgactggggccaggagaccagcctgggcaacacagcaagaccctatctctatttttcaaaaacagtaataaaaaaagaaagaaagttgtgtctcactcgaagaaacccagcttcccagtgcctctccctgcagcctctccctgtgcctctccctgcaggctggggaaagaaactctaattggggatatagttcataattagtctttgattaaaccatgtccctcataaggggttaatatccacaatatgtaaagaactcctacaataagcccagatacggcccaggccctgctcccctgaccaagtgctctcagcagcctctgcagtgtggaggggctcggccacacacaaggacccctagcctaagcaagtataagaaatcaaccgcggatgaacttgagtttcagcagagccccatccgtcatggaaacgaaccgtcacagtggttctaattgtgctggatgcgagtgtggttctgatcgtgatgggactggaagcgagggtggttctaatcccgttgatgggcagtagtcagcctgcttgcttcccggcaccggcagggcgagtgggccagctaatggcgcacgcacaggtgtgtttggctggtgcagacgccatgcatgcgggcacgggatgggccccgcctgctggaccccaagcccacgctgttagggggacccggacccggctccctctgctttgtttgccaggtggcagcgggaagcttctccagcccagtcttgggaggtggtggggcagcacc

SEQ ID NO: 281725 - DNA, 1000 bp, Homo Sapiens
tgccacccaaaggaccctctggtaatgtccagaggcatatctggttggcattacttgagggggtgggggtgctactggtgtctggtgggtggcaggcaggtacactgctccacatcctgtaacgcacaggggcaggtcccacaaccaagaatgatccagccccagacgtcagcagtgctgaggtggagaagcccaggttagaaccagcagatcctcgggaagtcggctccggtcagcacagaccagggagtttgcttcctggggtggcgcatcccctctccccaggcaggacgaggtgactgactcggtagcccaagcctggcctctgcagggccagactctggggagccccaggaggtggcagccctgcctgatggggtccgaggagcagaggcgactgccggccccaccgagcctgggcccaaaccctgtccattgcccctggaggggagagtcaaggtgagggtgggccaggggtccacgaaccagggggcgtctcctgcccctgggagacacagttctcctcttggacttgaaggggtcttctgtctaggcttgggggagaaggggggctgggcaatgaatacagtccctcccctgtcccctcccctccccgtccccctccccccgagcacaggcagtcttcagtgcacagggcacttgggttggctgtcgtgggcaaggaagcgtggatgctgggggtctgagatcaaactcagaagttgccgggcaccagcctctcaacaggcagccatggtgtggctgcccatggagctcactcaatactggggctgtgaacgtgactttataggtacgtcctcatcgaccttccctagcctgaagagtcagtctcactcaccaaattttctatagaactctgaaattcgctgattttcctcaaggtctccttgtcccgtttaacttcattgatgtacatcgccaagtccttgaaaacaagaggcagaggtgagcgggctgtgctgggtggggtgtgtgtgac

SEQ ID NO: 281726 - DNA, 1000 bp, Homo Sapiens
gatattatgcctatttcatgaatgaggttactgaggcccagagaagtgacttgcccaaggtgactcaaatagtaaatggcagagatgaaactcaaaggcagggctgattattccaaggtccttgctgccacagatacacttctttgactctaggagttcacaaacgaagtgaggagacaggaggctaggggcagaatgtgtgcattctggaggtagagggggtggtctctcctgcaggcagaaggcagaggcagggttagaaaaccacaccccttcggggggactgtggcagactgatacttgggacatccaatggaggcctgtgaggtcaggggcggggctagctccagggggggccccaggagccccaacagtagttcagagcatgcggtgtcctggaagaagctacaagcggtgagtgatagcctctctccagctgaggccttcttcccatcacaactctttctgtctcctccctgccaacctagagccctctccctgaggtgtccaagtgcagccctccctgccccaagggcccttgctcacagggaacctgcacctaggactctgcctgctgggtgctaagacactgaggttctggttctcttcgtatctgggttcccagctctcttcttaaaagccaatgtggtggttttgatgtgtgagaaactcctgcctggttgggtgctgtctttctattcttcactttttgtcttatgaaaaacaaattaaaccatctccttacccaaatcttgagaggaaacagcctccctgtctccagtccccacgtcctttcctcccatctcctcaggagtccattctccaaaaggtctctccatcattgggtcaggagcctcctctcctgtggcttctgcacctgctctcctctttctctggatgggaatgtctggttccttccctgaggatgtgttctagaagcttcagcttcacagtgatgactgccggatgccttagcgcctgcgctcctgcagccaggatc

SEQ ID NO: 281727 - DNA, 1000 bp, Homo Sapiens; identical to SEQ ID NO: 114805

SEQ ID NO: 281728 - DNA, 1000 bp, Homo Sapiens
aaggttacacattttcatttatttatttgtttttctgatttgaaggtataaccttcatgatgaattacttcttcagggtgttaaggcagtgactttagaaacaaatttttttcttgtttttgttttgtttttgagaccgaatctcactctgttgcccaggctggagtgcagtggtgcgatcttggctcactgcaacttctacctccgaggttcaagagattcttgtgcctcagcctcccggatagctgggactacaggcacacaccaccatgcccggctaatttttgtatttttagtagagacggggtttcaccatgttggccagcctggtctcgaacacctgacctcaggtgatccacccgccttggccttccaaagtgctgggattacaggtgcgagccaccacacccagccagaaacgaagtttttctaaggcacttgttatgatgatagtctggcatttccgggaaaatgttttgccaataaattgagaaccaccaacagttgtttaagaatcactgacttgaagtaataaacaggaacattttgtttgggtcaaaaaaccactttattcacagcaagattggagttactcatgattccagtgacataatatcccgtgccctacatgggctcaatttttctgagatgctgctcacagcccaggatgctgggttctctgaaagactgtcttgaaattatcaatgagtgtgatgcttagggaacacccccaacatatttcattatttagaaagaaagaatttcctgagtagttagttaggctccctaacatcttcaataaaatgaccacattctgttctttcttgttcttgatgatagataagcaaattccactgaagaaacaaaagcctatccaatttgacacagcacatactcaagatcactcaaaaagggacatggcttggttagaaatttcataacatacattgtgaaaaagaggaaaacagcttaattcatgtattctgtgattcccagatct

SEQ ID NO: 281729 - DNA, 1000 bp, Homo Sapiens
aaattcctgctcacatggggctacctgggacaaagagcttagtgcattacatgaggaggcagaacaagctacagcagaaggtgcctaaccagatatttccctgccaggattaattatagcattatgtaatttcttggcctcattatctaaggaatttgaattattccactaaggaaaatactggcagatagaaaacaggtctgggtactaatgaggaatctggctgatcacaaggaagggattcattatggactggaatgaggctgaactgcaataatcagaaagcttccacacagcaaatgttaaccactccctactttgccacatccctctgaattgctgagacctaacagccgatactaaaaatcagcactgtgattgacactggggcagaaaccataccaaagactgttggctgcaatccagaaactgttgccctccagtggaccaaattatacttcattacttgaccagtaatgtaccccatagagctaattgttagttaaccaaactatcatgcattctttgttttgttttgtgagacagagtctggctttgtctccaggctggagtgcagtggtgagatctcggctcactgcaacctctgcctcccaggttcaagcgattctcgtgcctcagccttctgagtagctgggattacaggtgtgagccaccatgcctggctaatttttgtatttttagtagagatagggttttgccatgttggcaaactcctgacttcaagtgatccacccacctcggcctcccaaagtgctgagattataggcgtgagccaccatgcccagccctttcatgcgttctaaagatatttttccaatcttaaattattaactgaatttggcttacatataagaaactaatactcatgaaatccaaagacattttagcttaatttcagctgatggcttataatctaaggaactgccccttaaacaattatctctattcatcaaatggtgaataaactcgttcccaaatg

SEQ ID NO: 281730 - DNA, 1000 bp, Homo Sapiens
ttccataaaacgcaccctttaaaaatgtatgtgattgtacagctatcaccattgtttaactccagaagatttctatcaccctgataaaacattatttctcagtgtgtctgtgagagtatttccaaagagattagtatttaattggtagactaagaggattgccttcaccaatgtgggtggccatgatccaacccattgaggccctatgtagagcaaaaagagtgaattcactgtctttttaagctgggacacccatcttctcctgccttccaacactggcactcttggttctagggcctttggactttgaagtattccactggctttcctggttctcagctcgtagacagcaggccatgggacttctcagcttccataattgtgtgagacaatttctataaaaaataccacacccccacaccccaacacacacacgcacacacgcacacacacacacacacaccattggttctgtttctctggagaactccaactaatacatgtcccttcacgagaactggctacttacactaggtctcctctttaatgccctcataatccatatgtctcttccttcctttaattgtaataaataattatagattattacttgcacaattgtttgtttaatgtctgtcttccccactaaactctaagttccttaggggtagggaaaaattaccttgttcattgctgtattcccagaacctagcacattcctgatacagagtggacatccaacaaatatttattgaatgaataaatcaatgcatgggtgaatgaatgcatattttggctcataataagaagtagaatcacttttcacaaatggaatgagtggtctcagaaggctagactttaaaacctagttatgtatcaactgcccccactactgccagtttgcaatttaatatatctatctctcaaaagtccagcaattatttcaatccccatttacagaaatggggcttgtaggaatcattgtgagggctaaaggtca

SEQ ID NO: 281731 - DNA, 1000 bp, Homo Sapiens; identical to SEQ ID NO: 205326

SEQ ID NO: 281732 - DNA, 1000 bp, Homo Sapiens
gagaggaatgtatgcacttcttcattgataactggggaaatggaggcaaagggggctgtgggcgggcctcaggacctttaggaaccccaccagtctggcttggttggtagctgcatgtgtgcagacagcgttagtgcataccacaaatgcacagagggacaggctgagttgcattctctccctcctgtcctggagttgtagccagggctcacatccctcggtccccggactcctttccctctaggttgctttccctcccagttgcccgcctctggtatttgttgctacttacagaatctttaggaccaaagggctgagcgtggggccaagaatctggtgagcaacaagtcactggctctgccccttccacttttgacagggtgtacccggggtggggagacggtgatcctagacccgctgtcacctgtggggctgttcagtgcatgagggtaaagaacgagttggtcccactgctcatagtttatccctgccacttggcacagggcatagcacaaagcaagccctcgagtaatgcttgttggatacatgaatataccacagcctaggtctgcatcttggagagaagattttggaatgtgctagatccaacaattctctgagacaggaaaacccctgaccatcagcaggatattctgacattggttctgacccatcagcaggatattctgacgttggttctgacagcttcctctggccctgctaggcagctgaggggaagagagcaatgaagacatcttttttttttttttttttgagacagagtctcgctctgtcgcccaggctggagtgcagtggcccaatctcggctcactgaaagctccacctcccgggttcaggccattctcctgcctcagcctcccaagtagctgggactacaggcgcccgccaccatgcccggctaatcttttttgtattttttagtagagacggggtttcaccatgttagccaggatggtcgcaatctcctgacctcgtgatc

SEQ ID NO: 281733 - DNA, 1000 bp, Homo Sapiens
agcaaagcctctgtagccagactgtctctctagattcctcctctctgggcagggcatttctgaaaaaaaaggcagcagccctagtcaggggcttatagataaaactcccatctccttgggacagagcacctgggggaaggggcagctgtgggcacagcctcagcagacttaaatgttcctgcctgccggctctgaagagagcagcggatctcccagcacagtgctcgagctctgctaacagacagactgcctcctccagtgggtccctgacccctgtgcctcctgactggaagacaccttccagcaggtgtcaacagacacctcataaaggagagctccagctggcgtctggtgggttcccctctgggatgaagcttccagaggaaggagcaggcagcaatctttgctgttctgcagcctccactggtgatacccaggcaaacagagtctggagtggacccccagcaaactccagcagacttgcagcagaggggcctgactgttagaaggaaaactaacaaacagaaaggaatagcatcaacaccagcaaaaacgatgtgcacacaaaaaccccatccaaatgttaccaacattaaagaccaaaggtagataaatccatgaagatgagaaaaaaaccagtgcgaaaatgctgaaaagtccaaaaaccagaatgcttcttctccaaaggatcacaactcctcaccagcaagggaacaaaactggacagagaatgagtttgacgaattgacagaagtaggcttcagaagatgggtaataacaaattcctccaagctaaaggagcatgttttaatccaatgcaaggaagctaagaaccttgataaaaggttagaagaattgctaactagaataaccagtgtagagaagaacataaatgacctgatggagctgaaaaacacagcatgagaactttgtgaagcatacacaagtatcaatagctgaatagatcaagcagaagaaaggatatcagagattgaagatc

SEQ ID NO: 281734 - DNA, 1000 bp, Homo Sapiens
  misc_feature (68)..(68): n is a, c, g, or t
  misc_feature (74)..(74): n is a, c, g, or t
  misc_feature (92)..(92): n is a, c, g, or t
  misc_feature (123)..(123): n is a, c, g, or t
  misc_feature (139)..(139): n is a, c, g, or t
  misc_feature (146)..(146): n is a, c, g, or t
  misc_feature (239)..(239): n is a, c, g, or t
  misc_feature (246)..(246): n is a, c, g, or t
  misc_feature (259)..(259): n is a, c, g, or t
  misc_feature (291)..(291): n is a, c, g, or t
  misc_feature (313)..(313): n is a, c, g, or t
  misc_feature (339)..(339): n is a, c, g, or t
cctgacacccccacccctgacacacacacacacactcttgttttctgaacttcctgcctctgcaaganaagaanctgttctttttctggaanatcacaccaactcctgttttagccctcaganatagtttgccaggganctaagcnactgaaccaggaattatggtcagggacacagcacaaatactccagcccatttttctgacaaccagactaatatcccttacattaccgaaagtnctgggtncctcactacaganattagctgtccaaaattaaaaaaaacaaaacnaaacagaattatccgcccaganacctagttactggggtgtgggaaaangtttttgtggggagggttgggaggttgtttttcccttggcttcagtggggtttctgccttggtttttaaggaattttttcctttagcaaaaggaggagaatttgggaatgggtttgataacacagactgtggtatctgacccattgaattttagaaaaaattctgatttaaagtttcagaaattgcacagaaaatttcagatttctggcttctctggaaatgatagatttgcagttcagggctcccataccctcatggtaatcataggctgccccctttagcacggtcccaagaggtgaaaacgacttgtacaccccagctgcttgggattattgaggacgaaagtagagagaaggggagaaatattggggagtgaattttgagccaaggcttaaaattaaaagtgggggaggtagagcccagcagtagtaggtggaggagaagggctcctggccgggggtgaggattcctcctgagaaccatagtgtccaagctagagggaaacatggggtccactagttctcgacaagtggaacaggtcacttcccatcatgccgtccaggagcaagagagactcttagggggttgtgcccctccccacccccaatacgcagattctgtgtaccatttacatccagaacattggttaaaacctgaattc

SEQ ID NO: 281735 - DNA, 1000 bp, Homo Sapiens
aaacatctgccacactactctgctctctcatctcccttcatcactggattggtacttgagtaagacgggctgcaatcacaggtgcctacaggggtcagtcaggcaaccacatatacaaatgatggggcatagcctaagataaagagatgagacacaaaacaggaaactaaattcctctacctaaaggcattctatgtatataaataatggacaggcatgggtgtgtacacaatgagttgttaacggtgggtcctaaggactctgcttacatgctgacatcccactagttttccctgaaactcactatactagctgatgagatgtcagaccctctttacccagctcttcggagaacagacttcagagcaaagttgggggctgctctgccacaccccaatcttattaggaattgagaaaaagagccattcctcacaggctaggcgctgctaagcaaagaaagccaaagaaggccaaatatctttattgcctccctcccatccccaattccctgttccccccaccaagtcctgctaggaaccatccttagattccaggcccagggactccctccgagtaccaggccggtatgctccctggccccgaggcaggcgagggtaggaagaaccgggtgtccggcctttagagcgctcccagcgaacacagtcccgagtcctgcggggtgggggcccctgccagctgccaggccccttctcttgtggaggaccttcaactccttggctatggggttctggctttaggtccatgggctccttgaggggcccctcaggaggtggcagttcctgggtgtcacgggtacctttaggggcgtggcactcccctccctttgggtgcctccgttcgggctgtcgccagggacctcgactgggcttggggggatctagcatagctttctgggtttcgcccaacctttgctgatttgacctggtccctggaatcttctcacatatgtgctgggtcgccacaggcagaggaggtggca

SEQ ID NO: 281736 - DNA, 1000 bp, Homo Sapiens
aaaagtgttttaaactatttcaaataaacaataaagaaaaacatgatgaaattcttcgttacataattgtatagaatttagtggggttcttccatgacattggcttgttctttctctcaacagtgggtggtttggatgttttcctatgctttctcaggcacaaacaacagtgaagaaacctttagcaacatttctgctgaatgtgtggagagctcttaggccaaactctctcactttgctgagctagctctgtattagcttatgaaatttttagtcctttccagggtatggacctgatgaattctgtttttatttactttggatttagagaaaattgcttatggatgcctgtttttgccggattgaagagtaccatcccatataaatgttggagttgtgttactttggaatcctcatggctaaatagcatgctcatatcttcccagatcatttactctccaacatgatattaagtgccttcattctgggagtataccaatttcgaatatcatttatatatgtttagtattaaacattgaatctcaccatttccatttaatgttctgttttctaccatgttggaaagtagtcctttcgggttacttatggtttttccccctcctctctatccactcccccaaacccttctctgcagatcacggtcagtctagcacagggatatgagagaacttcttcccctaagcctcgattcaagagctatgcctacacacaggctgcttatgtcaccacctctgaccctacacggagcccatttccttcacaggtctgtcaacatttactctctgttgtacaaaccagagaactgcttccaagataatctaacactgcttttacttgcttgaatttttcagtgccttttatctcctcgtgaagagctggtttgtttttccaagttttattgattccctcatgtgattctgctttgttattgagtcttctctaggtttactatacgttgattcttcataaatatgaattc

SEQ ID NO: 281737 - DNA, 1000 bp, Homo Sapiens
cacttcgtgtcttcagtgcccagccacagtgcctggcacctaacaggctctccagaaatgctttcctaactcaccacgggaagtctcggggtcagagtcttctcgcttttctcggagtgactcctcacccaaaagctctttgcacagctctgctccatgtgaccccttttagcctgggtcagggctagaatgctggtgccgacttttaaatcattcccagccgggcgccacggctcatgtctgcaatcccaacactctgggaacccaggtgggaggatcacttgagcctaggatttgagaccagcctgggcaatattgtaagaccctgtctccacaaaaatacaaaatacaaaataaatcatcattccctagggcctctggcacctctatgggcatagtctccggcaggatttcagaggtgctctccagtgtgcagaattggggcctgctacccttccacttgtcctttcccagcttgccttctgccgttgagggctgcagccagcccctctgaagtgatggcaatgggggcacgctgccaagggcataagatccattctagacccagctctgcgcaaacaatttatgtcaccttgggcaagtcattcaccctcctgggacttttgtttccatgcttataaaatgaggcaccggagacgagccctgagtgtcttcctgtatggatgcgacagccctcagtgcctctgtgctcacaagccttccagccctcttcaagaccacagcaggaagtgggcatcgtctgcatgtcctgaagatcgcttcctgaccttgacttatgtcaagacaacctgcctaaaagtctggctccggaagtaaacctcacctaacatgcctaaacaccaagatggaaaatctcttccacctaaggctgaaaaaattaaaagcaacctaggtagacaactccagaaatcagggtactaagcagtagcacacctcagaaacatgacaaccctgaactcagggtgccctcaagaaggat

SEQ ID NO: 281738 - DNA, 1000 bp, Homo Sapiens
gcttccagagagtcctctggatggcaccagaggctgcagaaggccaagaatcaagctagaaggccacatgtcaccgtggaccttcctgccaccagtcactgtccctcaaatgacccaaagaccaatattcaaatgcgtaattaaaagaattttccccaaatgccgtgttcctctattttatggtttgttcagtaaggtctgtatacatcacattgtttaccatcagtgtaataacacacaattatggttgtcctatttacacctcaaccattcattcagtcagcaaatatgtatcgcacaccctacactgcaagagaaaatcagagaaatggaaaaattcttcatcaccttaatattttacagggaagaacaaatgtgttttacatgttctttaaatcccatgtttaataaataggtcattgaaagttatatagtatttatctggaactgatgttaaaaaaaatagagagccaaaaattatagtagtcatcttgtctctgtaaaatgtaattaaataaatatgtcatgtacactgtatatacataagcaaacatgcaaataaaaaagcagcctactcaaaggttacaataatgttgcaacaattctggtagtaaccttgggatttagggacacagtgctttcaaaacgtttctctgatacactgccagtagcatctctgactgcttatttaaatgtcaatcagtaggctaggtgttctaggactttggtctcaaccctgtttcctgagtcagaatctacattttgtaaaagttcccctgggaattctgatggtctgccaactttgggagacactgataatattgtagataaagaagtgtaagcaactgttcagttagggagacaatagatacctgcatggaataacaaaaggtaattaacatgattatataatttgaatagtgttgtaatagttcataaaatggaaaagccaatttgagcccagaatctgggagataggcagaactctggactgtaaaga

SEQ ID NO: 281739 - DNA, 1000 bp, Homo Sapiens
aggtagaaacaggccgggagtccacgggctcccagctctaaacggcgccagggcaggaaggggtggctccaggtctcactgtggcaccttctacagaaaatagacgtagctgccgggcccggggacagaaaccagacgttccagtccatctccaaaaagcagcacaaatactttgccccacagtatgaaaaatatacacctctaccgctctgcagtcatgcatttagttttaagaaaaaaaaaaaatcagtagtatgtatcttgtttcctcaagtttcaagaaaaaaaaaatgaaaggtcacttttttctctttaaacactgatgtgtagctagtaacttggataaaaaggtgccaccctacaaaatgtgctcagcatgttctgaggccaggatgggcttggccacctgggctggggcgaaaggagacctccatctgtcacagtggaaactgaagccgagtgccagtgccgcgtccggcttcaagatcaagagtcagagcctttgaaatggaaagggggcatctgaaagggcacccccactgggggctttcagagctaaggctccagaaggaagggggtcgccctgctagtgacggagctgggagtcaccctgagctacagcacgcccagatttcccctgtgggaagccccatctgaccttctacagcccacggctctgcaactgccacctgtactcaggtacatggcgtcgctgctgctggcttttaaaatcagctattagtttgagatgtgacagtcgccgacagggttctgtcctagaaagccatcccagtgccgtgttggctcaggggtcaccagctttgtgctgcctccgtaacagcaggagggttctcaaagcaatgttccactgatccctggatgccactgcagcattaaagacagggtcagtccccttgaggggaaaggtggcttcaaggctgttctctgggcctgtttgcaggagatccgcaggtaccaggagcccgtacttattgcttat

SEQ ID NO: 281740 - DNA, 1000 bp, Homo Sapiens; identical to SEQ ID NO: 195002

SEQ ID NO: 281741 - DNA, 1000 bp, Homo Sapiens
ttgttatcatttatttcattttattttctaagttccagggcacatgtgcagggtgtgcaggtttgttatataggtaaaagcatgccatggtgctttgctgcacctatcaacccatcacctaggtattaagcccagcatgctctagttctttttccgaatgctctcctgcttcccaccctccccctatttattattattaaagtgacctaaattctctcctcgtgattattactaggcatctaaattttcttttggaaaaataagttctaaattcagtattgaagcaaacaaacctctggctataaattgcaaagaagcttgctaacatgaatcatgaccataaattcaggtgcataagaaatgtcactttatgctcagaacaaattaatttctatttgaggatgccatcctactggcttagtggaaatttaaccccagtccttcttggagtcccctttccctgccctgctactttccacacaaagttgggccacagttctaggatctcacaccatgccaagctgtccaggtggtaggaagcaggatagtgactatccctcagccagggtgactgttggaccaatgatcatcatcatgagtgatagccatcctgctcagggaaagtcacaaccctgttcacatcactctttcagtctgatttatctgctacttctgtagaaaactgggggtgcaggaatgtctgtacactagccatggacatgactgccaaggtatggcatatggctgctctctccctgggatcttgctgtcttcccagctgcatgcccagaaagcagggcagagatctcctctgcctcagagaccccttacctcactcttctccctataccttctccctcagctaacgactctcttgctagtctcaggtaagttcactttatttatttttagggccagaagactttttccacactatactcctctttctttttcctcctcaaatcaggactcaatcatttgaaacaaactaaaagaattc

SEQ ID NO: 281742 - DNA, 1000 bp, Homo Sapiens; identical to SEQ ID NO: 114807

SEQ ID NO: 281743 - DNA, 1000 bp, Homo Sapiens
ggcatggacaccaggaggtgggaagtcactggggtcaccttaggagctgccctgacagccttggagcactggggcactgacagcctctgctatgggttgtgagacttcagtgctgcgaagaacaaaccccttgagtgtgggacccgtgcttgactctctctgtcccacctccagctcccatacaatgggggcttctatgggttgcaggcattggggggctccctgggacctggggtgggcgcttcaggtctcctttcaccttccaaccactggccccttcccaagctcactgtgtgacctcaggcaagttgcttgaagcttctgagtcttgatgttctcagctgcaaaacaaggttaacagtagcaccagcctcttgggtgatcgtggggacatagcacttacaaagggtttgagttttgacctcaccaggaagtccccaaatgtttgctatgattatcattattattgtctacctctggttcccagggaggcctctttagttctcagggaacgctccctcattctgcaggaatctttgagcatctgggcaccacatgaagccttaagtgttttggcaacagtgtctggtacacgaaggatgagccctgccctatcctgggggcagaggttctgttctgggagagtttcatctctgtccagtcatggcttcactgcactattagggcaatgaattttaatggcatgaattatttttcactcttgcactctgctgaacagtgtgtgatttctgggaacagtcaggcctggtgattcctgcaggtcagctgagccaggcctggcaccttgtaccagcaaaagggcctgtctccccttccaagggcctgaggggcctcactccaccacaagagcctggaaaagtggcgcgtgtctggcagtgcctctgacttggggagtggtggctgggcctgaaggcctgggcacagtggggagggtgggcaagggatgggcaggaaaagacagcagggcccagggcagatc

SEQ ID NO: 281744 - DNA, 1000 bp, Homo Sapiens
atgcccacactggctgcaatggccttggcggtgatggggtggtcacccgttaccatgatcacctgtagggggaaccagtggatcactgaccccttcagatcagcccaatctccctgtcctccctgggagacatctgctgatacacgtgttcatttacttgaccaagcgtgaccacctcctacgtgcctgggatatagcagagacaaaagagacaaaaatccctgtccttgaggagctctagtgagggtgacagaaaataaagaaacgaattatatagtgtgttagaaagtggaaaaaaacatattaagcttggtgaaggaaacggtgactcgattttaagtgtacccagggaagggcttattgagaaggtgatatctgagcagagacctgtaagaggtgagagagtcagccacgtggaaagctgggagaagagtgctcctggcagggagaacagcaggtgcaaaggccctgaggtgaggacaggcccgaactgtcggaggaacagcagggaggacaccataactgcagaggagtgaacaaggaaagagggctaacgaacaagcttagaaaggtaacaaggcccgatgtaacagggccgtagagacacgggaagggcttgggcattgcctgcctggccttggctttcccacccttgttttgtgtttggggaaccactcctctcccctacaccatcagttgcagtgaggtccctggctaagattgggtaagtaagcccagacctggccaatcaaggtcttccatcccccagccccagtgactggctcagggataaatgagtgacccaatccagtgctactgcaaaagaggcactctctttttgtggggtggctaagcaggtgggagttaagtttgagctgctggagcaggggtgtgtgtgtccccaagtgaagggagtgcctgcaaataaagccagcaaagagaacagcagagctgagacatggagaaaggaaaattcctaatgacactgagctcctggatc

SEQ ID NO: 281745 - DNA, 1000 bp, Homo Sapiens
tgatgtatatgttttctttttttgttcctggctcataactcccatagcccttgttacggatgtgagccaccttgcctggctgatttttaagttttttgtagagatggggtctcgctgtgttgccctggctggttttaactcctgggctcaagcgatcctcccaccttggcctcccaaagccctgggattacaggtgagattacaaccctcatttcagagaaggtcctaccccataccctgggggaaggaatggtgacatcataaagcctcgttaaaacccatgaggacagtggagagtgtcaggatagctgaactacgtgtagaggttcctggagggtggtgcgcccagggaggggacagaagctctgcgccccttatcccataccttggtgtacgcatctcttcatctgtatccttcgtaatatcctttatgataaaccaggtaggccgggcgtggtggctcacacatataatcccagcactttgggaggctgaggtaggaggattgcttcagcctgggagttcaagataacatcatagtgagatcctgtctctactagaaaaaaaaagaacaaccaggagtggtggcgcatgcttgcagtcccagctgttcagtttgcactccagcctgggagacagagcaagacctgctgtctcaaaaaaaaaagactggtaaacatttttcactgagttctgttagccactccagcaaattaaacccaaagcgaaggtggtgggaaccccaacttgaagctggttggtcagaagttctggagccctaaacttgctactggtgtgtgggtgggggcagtcttggggactgaggcctcaacctgcaggatctgatattatttccagaaagatggtgttggaagtgaattagaggatacctaattggtgttcactgcagaattgattgcttgctcgctctcgggaagaaatctacacatttggacacgaaagtgttctgggttggtattgtgttagtgtggaatctaga

SEQ ID NO: 281746 - DNA, 1000 bp, Homo Sapiens; identical to SEQ ID NO: 114808

SEQ ID NO: 281747 - DNA, 1000 bp, Homo Sapiens
tgtctaactcacctggcagccactcccagcgcccctggaattctggcccaaggctctctgactgcttcccacatcttcttggcttagcggctgaagactgatgctgcccgatcgcctcggaagccccctacaagaccatcacggatgccgagcttcgcgtaactctcacagtggagggtaagtctgtccccttcttaatcaatacggaggctacccactccacattgccttcttttcaagggcctgtttcccttgcctccataactgttataggtattgacggccaggcttctaagcctcttaaaatcccccaactctagtgcccacttagacgttactcttttaaccactcctttttagttatccccacctgcccagttcccttattaggccgagacactttaactaaattatctgcttccctgactattcctggattacagctacatctcattgccgcccttcttcccaatccaaagcctcctttgtgtcctcctcttgtatcccccaaccttaacccacaaatataagatacctctactccctccttggtgaccgatcatgcaccccttaccatctcattaaaacctaataacccttaccctgctcaatgccaagatcccatcccacagcatgctttgaaaggattaaagcctgttatcactcgcctgctacagcatggccttttaaagcctataaactctccttataattcccccattttacctgtcctaaaaccagacaagccttacaagttagttcaggatctgcgccttatcaaccaaattgttttgcctatccaccccatggtgccaaacccatatactctcctatcctcaatacctctctccacagtccattattctgttctggatctcaaacatgctttctttactattcctttgcacctgtcctcctagcctctcttcgctttcacttggactgaccctgacacccgtcaggctcagcaaattacctgggctgtactgttgcaaagctt

SEQ ID NO: 281748 - DNA, 1000 bp, Homo Sapiens
caagccatgtgaggtgctgcatgcaattcgccagacacctaacaagcacccagaccaggacccggggacctcggtgctgcagagacctgggaggaactccctgcttccaggaaagttccagacaagggcctgagagcgggggctccgcggacaaacacaagttttgcgggacaagagggaggcaggagagcattccagacacagggcaaggggcagcccaaccaggaggcatgaagcagccacagcagctctgggaacaagggacctcagggattgagtgggcaagtctggactccatcccagcagcagtgggagccaccgaaggccatttcaagcaaggagaggagggagatgacccacagaaccttctgtgggtgtgtcctggggacggagccaggcaccaggcagacgcgcatgtttaacgtccaggcctcctgggggtgtgcaggtctctctgggcagcctgcaagggcctcagcacccagcacccatgggcatcacctcagcgttccagggccagggctcagtgtgcaccctgagaccagctcagccagcttctaatcttagcccagcgggagaggagccagcgggagccacggctcccagcccacggcacctgccgtctagagagccacccacagtcactgcccagccaagccgccgccctcagactggcaggggccggagccggctatccacaaacacttggcaggcacccacgtgctgccaagcgccaggcgcgtgccgcacagggcggataggagcggggacagactcgtctggccgtggcaaatgggacatgctccagaaacagcccccactgggggaggcggcttgaccaggggccacccataagtgcaggcagtgaaggccacggggaggggaagcaacggaggtggcattttaccttgggcgagccatttaacccctctgagcgcccgcttcctcatctgtaagatgggggaaatactgtctgccccagagggttgctgtgaggatc

SEQ ID NO: 281749 - DNA, 1000 bp, Homo Sapiens; identical to SEQ ID NO: 114809

SEQ ID NO: 281750 - DNA, 1000 bp, Homo Sapiens; identical to SEQ ID NO: 207068

SEQ ID NO: 281751 - DNA, 1000 bp, Homo Sapiens
tttatgttcgcagtactggcaaatcttaccacagtgtgcttaccgccacacgatgttaaacacatattataaagtggatgtaattgtaaacacacagagggatataattacatgtagcagatttaagagctaattctttgcctttttttactccgcattttatcaacataattattttttgactgcagactaacaccctgaaattgacaagcatccattatagcaagaatttgttcactaaattgaaaaacaatgaaccgcaaggtttatgtgtacccattgtcataaagaatcagtatggctttgttccgcaagaggaaaaagctaatgattttgaaacagcaggtgacaggacacattctttttttccacccctgttatcagttttttgatgaagccattatgaagtggggctgggatagggatggccttatttttagcagatagacttttaatgagctccattgtaaggagagtcatgttgatttgctcacttctttttttctttacttagaaacccccagtattgaaaaactactctcaaaggactggaaagacaagcttcttgcaatgggatcggggaactttggcgaaataaaaggtaatatggtgtgattgtttttatccaaaatgtaccaaaatgaagttgatattcagaaatagtaatggtgataaagtatttctgccctcacctcttctgcttcttgcattctctgtgtttagggtttcttctttctatcttgaaggaggatgtagcagggttcttatattctttctttgtttgtgccttatggaataaatgatatgttgttttcaacagaatcaccccactatacctctaacaggctctgattttcatcattaaaattaaattaaattattttcaaaaattaaattattttataagtaagaatgtacctatagcaaggttaaaaactgtattttataagattttgtacattgtacatataagaaatatgggtgtgtagaacctaaattt

SEQ ID NO: 281752 - DNA, 1000 bp, Homo Sapiens
gagttgtaacatttggaggttgtgatctgcattttgggtatgtgtctgggggtgtccctgtgagtacacaggtgggcataggtgtgtcagggagatatgggtctgtgcatgcatgcggtgaatggagtacatgccccacctgagcagtgtctgtacagtaggggggtgcgtatagataaggtgattggggtgaatgtggatctttctgggtgtcaatcttatatactatgtgtgaataagcatttatatgcaggagtcttttttttttttttttttttttgagacagagtctggctctgttgcccaggctggagtgccatggcgcgatctcggctcactgcaacctccacctctcaggttcaagcaattctactgcctcagcctctcgagtagctgggagtacaggctcaagccatcacgcccagataatttttgtaattttagtagagacggggtttcactatgttggccaggctggtctggaactcctgacctcaagtgatgcccccacctctgcctcccaaattgctgggattacaggcatgagccaccgcacccagccccaggggtctgtatttttgtcatcgaatgttgttagtgccttggaagctccctgtgccaccccaacccccaactatgacccttccttcattgcccctgagttaaccactctcctaacttttgtgtgaatcattcccctcctttgtgttatggctgtgccactttcatgtgtctccttggtgaaaatgggtccacagatgtgaagctgggatgtattggtgtgaatgcgggtctgagttgtgttcacagtggagcctggatgtgctctgctcagcgagtgcctctgtttgggtggatgggtggcagagggttggggaagagcggttgggctcttcagacaggtccccgtgaactttgcatacccagctcctgtggctccttctggctcggttgccacctctggtccctagtggttctgccttgctggtctgcagagaga

SEQ ID NO: 281753 - DNA, 1000 bp, Homo Sapiens; identical to SEQ ID NO: 201465

SEQ ID NO: 281754 - DNA, 1000 bp, Homo Sapiens
ggcctgttagttttcccagacacctagcaaaagcaaaaagcaaatatagatcttctgtgagggaattcacctttgtcctagacttcaaagaatttactcaaattattttataaagaaattaagcaggtcacaacaaagttaatcaaacgaagaaataaattaccacaaatgagaatcaacaagagtaatagggagcagaactataacctgaaataatttagatactagaattattaaacatagtatatgaagaactatgctttctgattattttttgagacaggatctcactctgccgcccaggctagagtgcagtgttgcaatctcggctcactgcaacctcaacctcctgggcccaagtggttctcccacctcagcctcctgagtacccaggactacaggtgtgtgccatcacacccagcttaatttttctatttttttctacagatgggtttttgtcatgttgcccaggctggtctcgaactcctggcctgaagctatctgcctcccttgctctcccaaagtgttgggatgaaccactgtgcctggctgcttgctgaatttaaagaaataaaaacatatgcaggaaaaaaaaactgaagaataatcacatgtgaaaaattactccatcaaagttctggaagtgaaaataaaaaccatggtgggaattaataactcagtaaactaaagaaattagcagaaacttagatacaattaattaattagtgaatgaaagacagttcagaaaaaaattattcagaaatcagcacagagaggcaaaggcaataaatgaaagagggtacaaaattattttctggacaaactttgctagtgtttggtaagtttccattcaagttgtatctaatagatgttaataaagttgtttatggaaaaaaaaagaataaaagaaagcaaacaccaggcacggtggctcacgcctgtaatcccagcactttgggaggccgaggcaggcagataacctgaggtcaggaggttgaga

SEQ ID NO: 281755 - DNA, 1000 bp, Homo Sapiens
  misc_feature (292)..(292): n is a, c, g, or t
tgaaaaaatgctcaacatcactaatgatcacgaaaatgcaaatcaaaaccacaatgcaataccaccttactttcacaagaatgaccacaatcaaaaaatcatagatgttggcatggatgcagtgaacaaggaacacttttacactgctggtgggaatgtaaactagtacaaccaatatggaaaacagtgtggagattccttaaagaactaaaagtagaactatcatttgatccaccagtcacactactgggtatctaccctgaggaaaagaagtcattataagaaaaagatncttgtacatacatgcttatagcagcacaattcgcaattgcaaaaatatggaaccagcccaaatgcccatcaatcaatgagtggataaagaaactattatatatatatatatatatatacacttagccataaaaaggaatactacttagccacaaaaaggaatgaattaatggcacttgcagcaacctggatgggagagcattattctaagtgaagtaacccaggaaggaaaaaccaaatgtcgtatgttctcactcatgagttgggggctaagatatgaggatgcaaaggcataagaatgatacaataaactttgggaacttgggggaaaagagtaggaatggggtgagggataaaaggctacaaatggggttctgtggatactgcttgggtgatgggtgcaccaaaatctcacaaatcaccactaaagaacttactcatataaccaaacaccatctgtttcccaaaaacctattaaaataaaaaattttaaatatacataatatatattttatataatgtatattataaattatgtaatatattttaatagtacataaaatattttgtatgttaaaatatataatattttatattatattaaatatataatataaaacatacatataaaacttacatattagagttggaaatgaaatatttatatacatttatatataaattatatgaatatataaaacacatatgt

SEQ ID NO: 281756 - DNA, 1000 bp, Homo Sapiens; identical to SEQ ID NO: 114810

SEQ ID NO: 281757 - DNA, 1000 bp, Homo Sapiens; identical to SEQ ID NO: 201440
  misc_feature (999)..(999): n is a, c, g, or t

SEQ ID NO: 281758 - DNA, 1000 bp, Homo Sapiens; identical to SEQ ID NO: 114811

SEQ ID NO: 281759 - DNA, 1000 bp, Homo Sapiens; identical to SEQ ID NO: 114812

SEQ ID NO: 281760 - DNA, 1000 bp, Homo Sapiens
aagtggcatattgctaatgaatattttttaaataaataatatttgtttaataaaatatacacaattataatgtcttaaaagagattgtaaaattgtcaccaatagttgatgactcatgaacaaggtgtggaaatttatcaaagtatttatccaaataatgctaaatgacctggatcctgaaaacacactcaacataacatattttgaaaaagagccaatatttaatatgaatctgctatgactttggaggaccactgcacagaattatctcctaggacagagtacaaaattgctccccaaaatgccaagattattcggtcactactcaaaaagaatgtaaaactttattctgagcattttgattgaataaaatacgaaaatgtgaacacttttatgttttttcaataagagagatgcagaaagaaaaaggtatttagtcttgtgtcctatcctttctttttaggatagtagattaaatatttgagacgggtagaagggagagtcattgttttaatacatttgtttcacagtgacaagatttgtcttgagactggaaattagggagaaaatattactagtggatcttgtaaaagactaagcgtcagcactaaggacaaaggggaatcaaaagtaacacaggtaactctaagtgtgtttggtacattacaaggatgttaataccatggatattaatttagcaagattctaattttaatttgggaagagtggatagttgtgaagattctacttttattttgaatatgggtttcaacagattattaaaaagaagatagatatttcttggtcagtcacacatatattcacttttatatttttgacacaaaaatacactgccgacccttcccataatatatacccaaatgtatgcagtatctgtgaaaaatacaccataaatatttaattatgtaggccctgatgcaacccatgtaaggagcgaaaatctaggaaaattccctataacaaattatagaatgttgta

SEQ ID NO: 281761 - DNA, 1000 bp, Homo Sapiens
atcagcgtaatttagtaaactgtactttctgatgtagtgaagtgtgtcagcatttgaaaggtcagtataactcagccagtactttctgaataatctgtgcattacataacaaatcatgcatgggtaaataatcccaagtgcaagataaggtgggtgaggtggcttacgcctgtaataccaattctttggaaggccaaggtgggaagattgcttgagcccaggagtttgagaccagcttgggcaacagaatgagactctgtctctacaaacattaaaaaaaaatcagcctagtgtggtggcgctcttgtggtcccagctacaccggaggctaaggcaggaagatttttttgagcccaggaggatgaggctgcagtgagccataattgctccactccacttcaaccttgacaacagagcaagaccttgtctcaaaaagcaacaaagaaatgcaagatagacgaatgaattcgaatataacagtacaaaaaatagtgataatgttttctgattccacatttcaattgctatttaaaaattactacttgtcaagttttggtatagtattaaagaagaatgtccctggttatttgcaaaagtctattaaaatgccctcttccctttttcagttgcatctgtgtgagattggattttcttcatatacttcaatctaaacaacttatggcaatataatgaatacagaagcagatataagaatcaaagtatttgttttaagacagacattaaagagatttacaaaaatgtaaaacaatgttctcagtaagcttctagtcttggaaaaaatagcatgtttttcctaaaacatgtaatcgttattttaatttttctcagatttaatttttaatatagtaagtatcaatagatacaacccaccacaaaagctcttgggattctcaatgcttcttaagagggtaaatgtatactgagacaaaaaaattgtacactactgttttaaacaatttcataccatttatttataggg

SEQ ID NO: 281762 - DNA, 1000 bp, Homo Sapiens; identical to SEQ ID NO: 201442

SEQ ID NO: 281763 - DNA, 1000 bp, Homo Sapiens
  misc_feature (162)..(162): n is a, c, g, or t
  misc_feature (207)..(207): n is a, c, g, or t
  misc_feature (667)..(667): n is a, c, g, or t
  misc_feature (720)..(720): n is a, c, g, or t
  misc_feature (954)..(998): n is a, c, g, or t
gattgacgtggcagaatataaagtctttgctccagaattatttcccaaagatctcggtaggcaacattattgcattgtcttccagccctgtctgaggccagctcagtttctctgccttttaaatggcttgccagtctcgcttgctgaataaagaattatganaaataaaaagcaaatgtttacactttagttttaaaataacatctngctagctaaaataatcttatttgtggtgtagtttttatctgtagtctgacaatagatcaaaagtcgactttaaaaatcttgtaaggtgtgctttttaaacctcagattaagtcttttatttcaataagtaaactttcttcatttgcatgtttgatatgatttggctttgtccccacccaaatcttatcttgaattatagctcccataattctcacatgttgtgggagggacctggtgggagataattgaatcatgggggcagttttccccatgctgttctcatggtagtgaataagtctcacaagatctgatgattttataaggggaaacccccttaattggctcacattctctctcatctgctgccaagtacgacgtgcctttcaccttctgccatgattgtgaggcttccccagccacatggaaaactttttctttataaattacccagtcttgggtntgtctttatcagcagtgtgaaaagagattaatacaatgttatctttaataacntctcccctctgtttttcttacccttttcaagttactactaatttttctctagcccctatataaatagttttcaaaacgtgggccccatacaagcagcatcagcatcacctggaaacttgttcaaaatgcaaatacattctcagtctgcctcaaacccactaaatcagagacagtgagagtggaactcagtattctgttaacagtagcttcaggcaattctgaagaatgctaaannnnnnnnnnnnnnnnnnnnnnnnnnnnnnnnnnnnnnnnnnnnnat

SEQ ID NO: 281764 - DNA, 1000 bp, Homo Sapiens
tggccagttacagtgacattgagggaaagccctgtttaaacacaccaaagtcacatattgaggtcatagaaccttaaagaaaggtggttttaataaagaattctttttatactggatgcatttgtttagatttatattctgtagactctgatgacaactcaataatgattgctccagacccctgtattaataagatttaatatagtaaagtttccagaaatgtgttttttgaaatattatgcatcaggaaatattcctctgaagctgaatctcatcaacagattttatgagtttgaattcaaagaattatatatagtttccacaggaaaaatgaccccaaagcaagcaaattagttaactagttcttttgcatgacatatacgtatgctagaatgcaatccgtcttctatgaaccttttgaagttcacttttttagagttaagagtagaacagaatccattctgtttgcagatgtattgcattgtaattgccagaggtcctgggccaaaatattagttctttaaaaacacactgcagattttaaaattttaaatgagtctcttagatcactcaaagaagtgaaaaatcatgttgggaatacaaagaattcagtatgtatgcagtaacttaatttaacaatggggataaatgcaccgtatattaaaattgttttaggatgttttcttcagtatggcttgacgttaatctaattatttttgagcaaaaaagaacatttgaagtaggcatttttgaaaaaaaaatcttacttgatttatgtagttatttctcttatcctgaggtggtttattactgctatatattaatctcaatgttcttttctaaatttaaaagaattcatcttatgttatcaatttttaaatttttaaaaatggttaacaggactaaaaacaaatcctttttacatgatgatttaaaaatagaaactctttataaattcctgaaatgattatatataaatctgatatatggaaacatcaat

SEQ ID NO: 281765 - DNA, 1000 bp, Homo Sapiens; identical to SEQ ID NO: 114813

SEQ ID NO: 281766 - DNA, 1000 bp, Homo Sapiens
aaggttttgcttgagatcaaagtccaggggtttacgcatattcctatatagtatcattctggtaaaaatatatcttagagacacaattcattatttttaaaaaactgtctacttatttaaacagtatgttgcctccaacccatcccagtatcccaccgaaatattaggaagccaacaagcctgtctgcctgaagatctatagaaaggtctcttattcttctctcatctttcacctgctggttcagaaattaagggttgcaccatccaaaaactgtgagtaatcatacataaactgcaagtagcttgttgcaatttcttagcaatacttttgtaatcctatgttgctgcccttttttctacaaccaggaaatcattgcctctaccaaaatcatgacaaaaatgtaaggggaactagccatggcacactgcatgcagaaggtgaaggtgcaaatcccacaaataaagcccgagaggctgaggcaaaaaaaaaaaaacaaaagagagagagagagacagagagagagcctgggagctgtgctcactggaaattacaggtgtttgtatactctattgactcaaagtgttggagagctaagaagtatgagtggttaaatacgtgctgctcaattttgcagagcaacagtttacagcctagtaatgactttgtcttaaaccgattcaggcaacagcttggaaagaatgtagtatcaagtaccatctcacaccctgacagctgacaataacattcatagaagaaaagcttgtgaaaatatagatatgaaatatcatcttgaaaattcagctttaaaatcacactgtagaatacaattttggggggcaactaggagaaatcattagaataaagtctgacatcctaaaaatgtatacaggaaaaggtgatttctgtgagtcaggaaaacaagttaacacgaagaaaatggcagggtggtgggggatgaaaatggggatgacgaatatgtctgggaattcaatggcagaa

SEQ ID NO: 281767 - DNA, 1000 bp, Homo Sapiens
gcattgacctaagtggtatcaccatttctactgcctctgcttattctcttagcctataagccttgtcttgatacagcatttatctagtatttggatatcagtatctagatcttagggtcaatcctttcagccactatttcaccactaacaatgccctcattccctgcaatctctgccactatggctatttttattcaacaaagagctatggaacatttaccatgggtctggagctcagcagtgaggttgaaactgcacttatggatcaaggagccatcagcactagatggtactgaaaatcatgaaactagaaaatacctcataagagaatgtaattagaagactgagaggcgtgcctcatgcctgtaaccccagcacttttggaggccgaggtgggtggatcacgaggtcaggagttcgagaccagtctgaccaacgtggtgaaaccccatctctactaaaattacaaaaattagccgggtgtggtggcgctcgcttgtaatcccagctactcaggaggctgaggcaagagaatagcttgaacccgggagatggaggttgcagtgagccaagattgtgccactgcagtccagcctgggagacagagcaagactccatctaaaaaaaaaaaaaaaaccaacgtaattagagaaaagggcctaagaccaaaccccaaattattctacagaaagggctagcagagagagagagtccactgaggtatgaagaaagatataggaccacttaatattactgaaggcaaaaaataggtgtattacttaaaaaactttgattgcaagcaacagaatacagattaagctaacctcaggaaaacaagttgatgggaaaaatatttttaagtgcataaaactgaacaaagataaaagaaatatttcaaaatactgcagatctaagtaacagtagtatactcttatcagtgtgtcactactgtaagttagaagtaagcaagtttaaatatttttggatattgtcttcttcg

SEQ ID NO: 281768 - DNA, 1000 bp, Homo Sapiens; identical to SEQ ID NO: 114814

SEQ ID NO: 281769 - DNA, 1000 bp, Homo Sapiens; identical to SEQ ID NO: 206221

SEQ ID NO: 281770 - DNA, 1000 bp, Homo Sapiens
gtacagccagtttctcagaataaaagtttggtttgtaagttctgatccactgcagtccttcctgcatcagataccacagaaaggctgggcccattgccccctcctggtcttgggactgaggactcttcctgcccagattcagagtccgaaggccaggaggctggaaaagaaacgactgtcctcccgtgggacaaactgccaccttggccgtcgtgtcctcgtttggggagcctcagatccgaatgacataggcgtcgctgtggcttaggtgtcgcacccacttgtgggggttggcattgccgcatggcctgaaggccagcctgaggaatcggacctggaggccagagcacgtgtgccggggaagctcgaaggagagactggcagggcccagccccagaggagaggccgaggtggagagcccatggctgggaggtcctgggggccctgggacgtccatctgtgaggggcagaggcagggagaggaaggagggcaagaagctgaccacgctgggggaaccaggcagcagctgcttcgggagggtggggtgggggctgcaagtgaatgtgggaggagaggggctgggggtccacagcgaatacctggaaaaggcctgagagttgagagcctccttgcacccgaggcaggtcccagcgaagggctccctctgccagctcagccttctgctctgggctgctcagctcctgagacaggctggagtttggaaagggaaggtgctgggcttggcaccttcttgaggcagacccgtcatgctgagctcactctctccccaggaatctccccgtggtgggtgcacacactcacctgaccacccctcgaggcagggggaggtgcagcctgacattgagggcttggctacagaggagacgggaacaaagtcagccccaggaaggcacagtcccttgtcctgttcctcttcaatgtcataacaggatttcagcacaggtgccccccaccttcccaaattctacagcctctacc

SEQ ID NO: 281771 - DNA, 1000 bp, Homo Sapiens
cctgttaaggagatcttcatgtgaaaaatacatgtagaagttttaaaaatttgtggatataattgtcattcagaattaagcaggttgattgctgttatctagatgggtctcttcctttatgtttttcagtcacataatcttgatttccatagttatcacatgtacttaaagaagttaatcaatgcctatatggtccaaggtataatttgcacacagtagtttttggtttttatattgtggatcatatgtatcaaaggtaatattcataaagaacaatgttatagttggctacaaagggacaattccacatttctatacagggaatattttaagggtagagttatatcagctatggtgattgagtttaaatatccctgcagggtcaggaacaaaccagctttcccataagtcgttgtgaacactagggaagtcccaaggtttatgtcttccattccagtggagtaatttagcttcctgcagaaaatgctccgaatatctggcatctggattccagccttcattgtgtatagagaaaaaataataggcttgttagagaataacatttttgtattataaattgaatacaagttcatagtttaaaaaaaggtaaacaaataaaaaggttatacagtgaattttctacccaccccaggtctccaaatcaaccactgttagtctcttgtgaatccttctagtagtgttatagcattgtttgacctgtatgcatgtatatgtatatttaaagacagaagacaaaatagagcatactgctaccttgcctttaaaaaaaaattattttgtttctttatgtggacattgccttttaaaattactgtcttgggaaactttccacagcagtacatgtggatttaccaaattatttttagtgactgtatagaatgatactatttattgaccaagttccttattaaggacatttagattgtttctatcctattattagcataaacacagcaatgagcagccctctatgtatgtc

SEQ ID NO: 281772 - DNA, 1000 bp, Homo Sapiens
tattagtagttttcattagcaagtgctgacctgtataatgtttatattttggataatgataatagactcttctgtgacctgtatattttttattaagttaccaaaacaattctcccttagtattaatttgcaactcatagctgtgaaataaccttggaatatttactgaaaacagaatggaaactttaaatgtttatctgaacatatttaaattatttctatggataaattcttttctatgttttaagtgttaatgacaatctagttcttaagtatgttagtcagctttttgtgtaactttatttatggaaactgaaggtcattatagtagtttaaaaagctgttgtgaagtgaccaaaaaaaatagcatgttatgtgtcatagggaaaattatttgaaatgtcacgtgttgattaatgtttgtaatttcatttggagcagtgttatcaggtatatgttgctgttctgtagtgaacaaagaaattgtattttaaacttaatgaaagaactcatcattacgtacctaaatgttctgtgtattttttaaagaattattcttgaaaatttgtttttcaaaacttttagaaatatatgatgttagagatcagcctgtacaatcattccctttcaaagatcctgacctccgaagaagctggagttgagatcatactgttagtaataacagagtaaggaatagagtctgatgcctggactccattcagcatcaataaataatcagttaatatgtttattttcaaaatattcaccaaatgttttagtttcaattaaagactataagtaaaagctgaaaaatgttactgtctaatgggaaagaaaatatgtatatataagagttacctgaaaggcaaaaatacaagtgctaacattatggaaagtggaattagaactctgaaaattgctgtatgaaaatgtttgatttgaaaagttgattaaaaatatcaagtcagttaagatttcaggttcagttagcaccaagctt

SEQ ID NO: 281773 - DNA, 1000 bp, Homo Sapiens; identical to SEQ ID NO: 195122

SEQ ID NO: 281774 - DNA, 1000 bp, Homo Sapiens
tttctttaatattatcttgtgctcctctattaattgaatttttttctttttctttttcttttttttttttttgttttgttttttgaggcagagtcaatcactctcacccaggctggagtgcagtggcacaatcttggttcactgcaacctccacctcccgggatcaagtgattcacctgcctcagcctcctgagtagctgggactacagacacccgccaccacgactggctaatttttgtattttgagtagagacggagtttcaccatgttggccaggctggtctcgaactcctgacctcaagtgatccgcctgcctcggcctcccaaagtgctgggattacaggcatgagccaccgcgcccagcctattaattgaattttttaaaacattcttaaacaagttaaggagaaaggctaaacaaaagcttaaaacatcgtttgccttagacggtatttgggactcagaacactcagcaaatatttggtgaccacttccggtgtgctctgcaccctgtgaagtagaacttaccttgtccctttgaccatgtgcagaaaccactcggacactgagtaattgttacactgagaaagtgacaaatttgactcctcgtaagggttataaagccaatacattttaattctgaaatctggtaattacctcccatgttctagattgtgtatttctagtaatgccatctaggagcagatttgaattttttgactgccatgtcacactgttaactctgaacttatcattgaaaaacctcaaagtgctatatattgtacacacacaaaatcaatataaaagggtatgaagtttaaaaaaaaagggcagggggggacgttacctgcccctctatgctattcatgccagagataaccactgttcgcatttttcttgtattatccttccagtcattttctaggcacatatctgtgcatgaacatgtgtattttattttattttgtttgtatttatttatttgtatgagacagagcc

SEQ ID NO: 281775 - DNA, 246 bp, Homo Sapiens
aataacttaggccaataaatgtagagaaaatattttttattaataataatatgagttgagtgattttattcaaagctgtgaaaaagctattttaatcgggaaatttaatacacccaacattattttattcctctgttactagattagtttttccttcctttttttcctccttggatgcaggaagagagtacgtatgtgtcattctagccattagtgaaaaaagcatgaagcctatataacctttcc

SEQ ID NO: 281776 - DNA, 1000 bp, Homo Sapiens; identical to SEQ ID NO: 201468

SEQ ID NO: 281777 - DNA, 1000 bp, Homo Sapiens; identical to SEQ ID NO: 206211

SEQ ID NO: 281778 - DNA, 1000 bp, Homo Sapiens
gtataattctttttatacagtgttggatttgatacgctaatattttgttgagaatttttgcatctaggttcatgagcaatgttggtctatgttttcctttcttgcaatgtctttatctcttggtataagggtgacattggcctcataaaacaagttaggaagtgtttcctcagctagccagctttgagggtgaggatttatcaagcagacgtaactcaggctgagagacacatgaagttcatctcctataacagcatctaggacagtatggctcagtaattaacagtgggaattgtagaggcatcaaacctcagttcctatcccaggcctgtcatgccatctgcatgatcttggatcagttaactgttaattcaacaaataattattgaacatgtgccaggcactgggataactgcagtgaataaaaagggcagaattctctgccctcttggagcctgcatccttttttaagcttacattttaaaaccttctgtgcttcatttttctgcatgtataaaataaaaatatcaatagtagctacatcataggattgttgtgactattatataaattaacaaatgtagaacattctatataagtgttttatattattactattaacactactattgtgcactaacagttaatattattatctattgactgagttcagtagttatagtctaggagattcccaggccatcctccctgctgtaactctgtgctcccattatttctgtctctctgcttcttcagttggccttttttatctttgggatcactagcctattatatgaaactccttctctggcctagatttatcttgcctaggagatagttgggtggctatctttctgctgcttttgaaaactaccaaaactttgccaggcgtggtggctcattcccataatcccagcatttgaagaggctgtggcagaaggattgtttgagggcaggagtttgagaccagcctggacaacatagttttttggtagagatc

SEQ ID NO: 281779 - DNA, 1000 bp, Homo Sapiens
ttaccattaatttttcttccttctaaatttagatatacttttcagaagtctatgggcttccaggaacatctattaataattccagctattccctacaacagtcctctcaactatttcctctaatcattaatttcaacatattttatttcaatttcaagactgtactttatattttaatcaaatttttatgttatgaagaaaacattcacattgtcaaaaactaaaaaaatacacaaatttcaagtagaatatttaaacaatttatgcttctttaaccaacataaaaaaatttcaaaatttgacatatttcctctcttttgtatttgttagtgctttatttatactttatatgttatattatagtttgctatttttattttaacactttttctgagtatttctcatgccaaaatttttttatgaacagcatgcataatgtcagcataagcttcttattaaatgaaaagaccattctttgaggatttttttattgtttatttttgttgagaagaaatttcatatctacataatacagtggtctttttatatttatatttgtacacatctcagatcactatttgattcttagggatataattacaggtattaaggatatgcccattttttaaaatctttttttattattatatgaaagttgtactatttcatactgcttgttgcaatgtacaaaagtgtccaattcactatacctttaccggaattgaggatcattgtttttatttttctgggtttttctgacttcatgaatgaaaactagtattttattgttttcaattgattttctttcaactgtttatcatattttggatatttgttagtaatttgttgtttttttttttcttatttcggtctagactctttttctgttgaggtgtttgtgctctgctaagttttattactttttcactatctaaaagtaacatacactatctaaaagtaaatgtggtctacggccgtatcactctgaacacacccgatc

SEQ ID NO: 281780 - DNA, 1000 bp, Homo Sapiens; identical to SEQ ID NO: 195140

SEQ ID NO: 281781 - DNA, 1000 bp, Homo Sapiens
tgggggaaaatggcagatgggaggcaggactaaattgcagctcccactcagacaggcagagcagcatgtggagatacatcatgaacttttcctgaaagaactactggaggaacataccaggaaagccaaaagaatccacagaccctttgaaggaagcagattgctcctgcaggacccaggagacagcccaaatactatgagtgcccaaagtatgaaagtgggaaagggtgaacacacaccctcactggggaactcgaaggtccaggttatgggagaaggatttgaccctacctagaactgagacaatttagagagccaagtgaaatacaggagtagaggaagtgccagaagagccctgtgggctctctcggtccccagggaagccatttctgactttgtctcacagggatccttggggagggttgccagtggaactgggaaaagaccacagataaaaagaaacctcaagctgaactttgtaacaattccaaccaaacatgcaaaatttcttggacagaacttgggggagagagtgaatccagagtgcagacacaggcaggcaaggaggtatgaaacctgaaagtcctgcttgctttctcagctgggaggctggtagcctggggcaagttcttagccctgcttgcccactgcctaaaaacaaactcagtgctattgcggggaggcacagtgagagtgagactggccttttggattgcatgggagccgggtgaggcctgtaactgtcggctgtcccccacttccctggcaacctacatgacacagcagaggcagccataatcctactggtaacgtaactccattgacccgggaaccacaaacccatcccccacagcagctgcagcaagccctgcccaaggagaatcagctcagacatgtctaaccctgccccaacttgatggtatttctctacccaccctggtagctgaagacaaagatcagattctcttgggagttctagggctccagccactgcctgatc

SEQ ID NO: 281782 - DNA, 1000 bp, Homo Sapiens
tttgttacttctttttctttttcttcttcaattagaaatccatgagtattgaaccttgtctttcaaatttatcagtataccccaacatgtatcactgcgtttggtacatagacttcaacaaacatttgttgaatgaataaatgcaagacttgtgacaggtactgctaggatagagaaatacaaatgagacagtgctgctttcaaagacttctccatcaagtaggggaacaaatagctacatgtaaatatatgtttaaaagtagatgtcattaaaagaagtaaaaaaaatatttgggccatgacaattcagaggaagttgtcactgaaatgggatctgcctcccaaaatagtttttattagggtgccatgaattagaatactacctaggccttagtgtattcatctgtagagtggcattagaatttcctcatattgatacaagagcaaatttgtaaacaatgccatttcagaatttttacccctttagaaggctgagacttgtgggtgagtggtcaggtgtcacagatatgagagataaaaggcttgtatgtattgatttgctagtgcatagagatggtggaatgagaaagaaaatagacttgtcagaagacctgagagtggccccacataatcttgaaaagtctctcatctctcagtttcctcatctctgtaatgaggttcataataactatctctcaggtatactgtgagaatccaattataaagggtaaattcctatgccaatgtagcatattattattagtgttaataacagtaataatcatagccagacaagaatcatcaccaacactgagagatacttgacattcagccctaaaacacaggtttttcaacagatcatatttttgaatcttcaccattttatgtgtaatattatcaaacatcctaaattctgaaaagtgatacttgctcacttgcctgtgccaatagatgaaatgactagatttcactcttcatcattgttgattacaatgtgatc

SEQ ID NO: 281783 - DNA, 1000 bp, Homo Sapiens; identical to SEQ ID NO: 195141

SEQ ID NO: 281784 - DNA, 1000 bp, Homo Sapiens
tcccaaacctcgcttctgttcagatattaccatacccaggaggtcgctgctttttgttttttttttttccatttgttttgctggttcacggttcattccagagtttaaaggtgctaaaaccaaagtttaaaggtgatagtaattgtcccatgttgggtttttagctggtttctttttcttcttaagatctgttttccacttagaaatgaggtgaaaactcacagaagcaaagcctagcagctaaaagcagcacgtctgcttaccacgttacaccctccgggctgatctgcagcccagatcccctttccatcctctacctagctcctcaattcccatcggtgagcagttttcacctcctcctgcccacgtttggaggtctgtgggtggcggttaggaagccaaaggaggctgaagctggggtatattgtttgggtcggccatggcaaccgcggcaggaaaaggaacaggactagttttgtgctgctctgtaaatggccaggattcagcagctatctcaggacttctgcttggccccagacaatctgatctcctggtaaggttattaaacttggctctcctcttccaccctcctttgatcatgttgtcaggcagcgagtaggaatggccgtaaggggtcggctggtgggggttgcagagcacagcaagatatgcaccagcagaaacataagaacaggggcagaggcaaatcagggactgtgttcttatcttttctgcaccccagatgcagagaagtacatccccaagtccttgccaatactattcttcaagagttgagcaccttgctccaaagagcctgtccagatcgccagtttgaccagcatggaggagaacaaggaagggccggtcctggaagaccccaggatttttttaattgggaaagcattatttgagttttctctgctgcaaagcacaaactgcctaccacatgtgtttcataaaaatgtcactgaaaaggagagtgagaatacagagtaagctt

SEQ ID NO: 281785 - DNA, 1000 bp, Homo Sapiens
tacagtcttctaaaacctgtgccctcagccacttcgaataatgccagccaccttctggttctaaagcagagggagtggcctgaatggacacagctggcccctttcccgtacactgaaagggcagagcaggcctaaggctccaacggccaaactgcctcaccctctgccctaatcagcagggtgggcctgccttttgctaagcgatctctatgcctgggattccctttattccaggagacattaagcctctaaagaatgtctcatctcctctgcccaaaaatgatgctcttctgtaggctggtgttgttgcttccctcccaggatccctttggtgagtgtggtgttcaggatgcaccagcaccacctctacatgccttcaggcaacacggcccagttttaacctctagtatccatgaccaaactatccctgacacataaggacaggggcctcttctggctgtcaggagcaaagcctgaagacttggagctgcaggactggaagaacagtggagccccgtgggtcccaccctttaaggatgctgaggcctagagatgggaagtgacttgctcaaggtcacacaattggatagtgacatagctagagcccagagttcctgattccaagtcacctgtgctttctgggaccaaagaatgggcacctgctggagtcttggcagagctttcttggctgtattgctactccagacctcatcataggttggggtcccagtaggagggctcagggtctgtgccagccctgtcagtgctgctcagaccttcatagcctctcttgtcattctttgttgccccttttctgtcaccaaccaaccacatagccttgggaccagcccctctgggggaccagaagtagtgagagaaggaaggggataggcagctttgacaggtgctgttttcaattcctctgcaactcctcccccttttatttccccaatttaaacaaagattctgccaactgtggaaacttcagtccctcaggctg

SEQ ID NO: 281786 - DNA, 1000 bp, Homo Sapiens
agctaagactcaattaccaacccgcagttttgtgtcagtgcccaaaggagggaggttgatggtgcttaacaaacatgaagtatggtgtaataggaataatatttatccaaaagatttttaaaaatagggctgtgtttaaagaaggaatcaaaacaagaaaagcagcagtgattatagagaggtcacactctaagtggggtcgcggcgtggccacgcttcacggtcacgctcgtccgtcctgcagtggcgtgtttacatggtcacacgtgtgtgtatcaccagtgggtcaactgcttgtcattcctcccgcggcagtgttgtgtagacaatcttactgagcaaaaggcaatgaaaagtcttgggctcccacactgcgatatattggaattcccacctcagtttatgaagtttatttcgaaatccatagtcatctaagaatgaatacctgtctgccatgtatttcaatcttagtgagccaaaattgtttgtttgttactacagaatagagatgactgttttttggcacagccctatggaatttgcaatctgtgattgccttgtaaaaaggagagtgcatatggcactgcattaaacgtgtggtgtttctagtcaatgatattggtgagcacaatgtattcatttaatggcatagaccataccagacctaatttgcaagtattgggtcttcaaacttcaagtgcaatgtattatgaaaaccaatctgagccttgtatctcttaaatatttattccttctaacgtgtgagatgtcccgagagaagggttctccattcatttcagtgctgcctggaggaaactcggcaatgatttcttcagttgtgaagttcctttcgggttacaacctccactggaaccctcaaccttcgaaatactccagttttgggggttggggccatttacttataaatttaccgccgggtttttggaatctacatgtcttgggggcgggctcaaattcttcgaaagtggttggattaaaa

SEQ ID NO: 281787 - DNA, 831 bp, Homo Sapiens
aggaatcgagtggtcacagaacttttggaggaaatttatcaattttttgtttactttgtaatgcttttctgttcttatttaataaaatatgcctttcgattatattaatttaaatttgtatatattgaattgatttaaactaggatcctttccccctttctctttcaggacttgacccaatgaaagaagcatatggcacttgtgaagataaatgttactcctccctttttaattggaacttctgcttaggacctgtgtatgacgtttcacctgtgatctgttctttcggtagccactgactttgagttacaggaaggtctccgaagatttgtgtcaaatgacgtcaatggccagcttgttttcttttactagtccagcagtaaagcgattgttgggctggaaacaaggtgatgaggaggagaaatgggcagaaaaggcagttgatgctttggtgaagaaactaaaaaagaaaaagggtgccatggaggaactggagaaagccttgagcagtccaggacagccgagtaaatgtgtcactattcccagatctttagatggacgcctgcaggtttctcacagaaaaggcttaccccatgttatatattgtcgtgtttggcgctggccggatttgcagagtcatcatgagctaaagccgttggatatttgtgaatttccttttggatctaagcaaaaagaagtttgtatcaacccataccactataagagagtggagagtccaggtaggtcttattcctgagaagaatttggaaaaacaaaaacaaaaaacctctcttcctgatatgcatgtaactagatttagtaatgaaaagg

SEQ ID NO: 281788 - DNA, 459 bp, Homo Sapiens
  misc_feature (31)..(31): n is a, c, g, or t
  misc_feature (323)..(323): n is a, c, g, or t
tagtaggttttcaattgccattaggtgtgcngtctgttctccttttccctagccctaggatagtatcmwacatttttttgtgtgtgatgttcagtaatgaagcttgctggtaatcttaagaattttctaaagcttttagagtaataattttgagcagaatgaagattttaattattattttttttcctcttagctgatacgcctcctcctgcctatatgccacctgatgatcagatgggtcaagataattcccagcctatggatacaagcaataatatgattcctcagattatgcccagtatatccagcaggggtaagagaantactcacttcatttattttatagtagtagttgtttttaacttattggctacttttttaaaaacagctttattgaggtataatttatatgctataaaatttttttgtttttaagtgtatgattcaaagattttggta

SEQ ID NO: 281789 - DNA, 1000 bp, Homo Sapiens
tttataaaagtctactctaaatatttctgtaatgttgtcaagtagaaagatagtaaatggagaaactacaatcctagaggaaatcactgtgtttctccaggctttaaagttttccacttgcctttcccatctgtccttcagggttgaattgaaaataaagttgttgagatgggaggggtaattggaagggttaaagatcattacacaaatgagacagtgctctcttatccctgaagggtttggttggattataggttgacactgaaggaaaattttcagcctcatatgaaaggaaatacttcttatatcattaatatttttaaacttcaaaatagcctcagttttaatatatatattttgaagtataggctaaagctttcttaacatgtatttaaaactagtcccctaaacactacataagatactaaagctgcaaggtctgtgacacgtacactctgcaaataaatgggcagatacctggaaagagaaccagctgcacaagtgaggatctgaagtgacaggaattaaaggaattataaaagtatttgtgatatagaggataaaggaaagagagccaaagtatttatatttttgagtgagacttggtagaggactctaggaaaatgagatcagaatggaataaaagctaactaaagctattacaaaattaaaacccaaaaaggcccaatctggaaaagacctaatccaaagaacaaaagcagatttgaattctccatgcatgtttcctgttataaaataaattaggaatgtgagtcaaacgttgtcttcaaatatttatcccctcactcactaaaaatgctacttaaatgacagaaaaggaataagacaaatccacaaggttaatagaatggaagaagagacatcaggcaaggaaactgatggatgagtggtaagtgatttcacaaagaaatgataattgtcagtggcagaagactagaagaggtaaaaatctaataagcttgacaaatggagatatcca

SEQ ID NO: 281790 - DNA, 1000 bp, Homo Sapiens
  misc_feature (198)..(198): n is a, c, g, or t
aagaaaaacccaatgaagtgtttttctttgccacatttgacaattgccttggacttggtaaagtaatcattactgtgttgagtacctccagtgccctccttgacgctgccttagaaaaggtagctgcttttgaatgacaggcaggaatttgttcgccttttaggttcagcctgtaggtgccctctgcaggaaatcagnaactagggttttggaagcagtcagggtggggttctcccttgtccctgcagcctcagcaaagactcaggcagtctggcaaaagcagtttcttcagcatacctaacagaacgcaagtttccatatgcctgatgcaaataatggcctccaaacgttaaaccttttttgagataaacttgttctttaattgccagcgcctgcagttaattttgattggctacactctggttaaaagaaaatgctttcgatgtgatatggcaaatttggagaaaagtaactcttttgctcccaaccagtcttccacaacttaaacttaatcgtcctgtcctttttctgctgccctcgtggagtgtaagtttttgagggagaccagcagaaactgactttccatatgcccctgaagaataacttctttgaatgcaaagaggtggggacacggaggatctgtcattacgggttattatgggtgggacccagagacgggagtgaagggagggtgtggcccgcgggtgggatctgtagagcagacaaaatatggggcccctggcgcttaaagttcagtttgtctctcttgagcttggagaaaatcatccgtagtgcctccccgggggacacgtagaggagagaaaagcgaccaagataaaagtggacagaagaataagcgagactttttatccatgaaacagtctcctgccctcgctccggaagagcgctgccgcagagccgggtccccaaagccggtaagatcgatgattcgctgtcctaccgcagccaggtgtgatggcctcttagtcccggtgaattc

SEQ ID NO: 281791 - DNA, 1000 bp, Homo Sapiens
actaatgaaaataatgttttcccatatattattaaaaagcatacagtctaaataataaacagttgtaaaataatgaaggtagaaattataacactagggaaaaatttgtagcggatggcagtgttgaaggcaaatgtaaacataagggtaatggtctgtcatggcttttagaaaaagatgatagagttcatcattattttgccttcatctttgttaaggacagaaaattccctgacaggtgggcaagtatcaggttacctattttttattcctttggtacaaaagggttgaacgtcaggctaaaaaagcagccatgcatttattattaaacattttctaccgacaaggcactgtgctaggtactgtaatcctaccataagtaggtaggtatttcttccactgtaaatcataggggtttgctgttttatgtgagttagcctcttccccttgtctgagcattcctcaggggaggtcacctgtgaggttcccagaactgtagttttttttaccagggtgttgtatttggagggggaggaggactcggctcaaaagagctagctggctctccagtgttcagaggtgagtccacgatactcttaccacaatttggaagtttgtgaatctttttaaagaactaatcaatctctaatagcattgaggttgtacctacatattaagttgaatggactgttctatttaaaaaataaacaactagacaattaactagtttattaacctatcacaattgaatttttttttaattttcagtcttaacacattttttaaaatgtattaaagtaatacattgtagtagtaggattatatactccttggctgagaattccaagtactgtggttctactgttgagtggaaaactctggaagttaaaatatagaatatgagaggaggcttttttataatgggcatcattgtgtggaaaatgacccatgtgaatacaaatatttcctagttcagagattttggttatatctggtgctt

SEQ ID NO: 281792 - DNA, 1000 bp, Homo Sapiens
ctgtcgatagtgccctctgagcagagggtcacggtcatgtcagtttgggggaattctctgttgtgcctcacagactcccccctttctttcctccctccccttctcattttgatgtctaaagcatcaagtccctcttcctcggagtttctctagctgcagtggaagattctgttttcctgtggggaaaatgctcacttgagattttgcagggacccgggtctgtctggtttctgatgacatagtaagagaaaggtcttttttcaggttggctggtgaaaggaattgcatgtgactcacacaaacaggagctagcccaatcatacactgactcgcgtgggtgttaaaatgtttatcatgcctaagggagacatttataattaaaccatttatgctacatataactggggaaaactatgatgctttcggtgctgggaatgcagtgaggtcccacgtgggcagagcttggctgggctgggcaactccgacacacgtctctgggggtgtggcggcgctctcagtcggcactgtggaaggaagggtgacctgtgctttctccctgtcactgtgactgcaaggacaggggggcagccttggggttcagtccaggccaaattcagtgtcctcaactgggcgtggtggctcatacctgtaatcccagcactttgggaggccgaggcaaacagatcacctgaggtcaggagttcgagaccagcctggtcaacatggtgaaaccccatctctactaaaaatacaaagattagctgggcgtggtggcaggcccctataataccagctactggggaggctgaggcaggaaaatcccttgacgggtgcctgtaatcccagctacttcagaggcggaggcaggagaattgcttgaacctaggaggcagaggttgcagtgagccaagatcacatgactgcattccagcctaggccacagtgcgagactgtctcaaacaaaacaaacaaaaacaaattattcaacgtcctccaggcc

SEQ ID NO: 281793 - DNA, 1000 bp, Homo Sapiens
ggacagcctttaaaatttctctgcctccagtgctgaaagccaagaaaaagaaactgaaagtgtctgcctgaggataaaatattttccccatcttttagagctgttaatagaaattatatagcagattctttgttgggaagactgaaaaaaataaagataggtataggataatttttaatatggtgaccttacagaaaatatttcccaaacatccttttcatcctgtgcttctggaggactgatttgtttgagggaatcattctatgcattatatcctaaaatattctatgactggtttctgtccatgtttgtggctttcatttttttaatgggatgactattagtcaaagtcagcttgtcatgactcatcataggctttctaacctactccctgaatccgggtcctcattgtgaaatgcatgccatacgaaatttgaacgtagctttggaaaaagggactatttgtggagtaatggcattaatcaacatagaacatcttatttgaatcaacagttaacttcagtagtcatgtgaataaaattcttattgtctaaattgagacagcctcagatatttgcagatatttactttttgtctgatatcagtacatatttggacaaagtcatctaaataatagtttgtcaccaaataactacaaaatctcattttaaatgagtaaggagaacgtgtacagaagcaaattttcttcaaaatagttgtgggaagagcttatatgtgaaagcttatgactggttttgagggagaacttactggagaaaatggactctatgttaagtatggttttcagatagaattctttccttttttaatgaggaaaaaaaatccacattaatattgaaactgcacctgtaatcccagcactttgggaggctgaggacagaggattgcttgagcccaggagttcgagagcagcctgggcagcaaagtgagaccccatctctactaaaaatttaaatgtatttattaaaactgttctcta

SEQ ID NO: 281794 - DNA, 1000 bp, Homo Sapiens
atttgaggtagaagtcagaggttacttaccaagagcatgaggaatgaggtgcaggaaagcatctcccaggagcccaccggaagcaaaactgagcaagatctgaagtagagagcgatgccggggagagttcgactccacggggataaggaagaggacaaaaaatggagctgctgagatcagcactgtggcccccagtgcctggtgagggagagtcaaggtcaagtactgtggagtttcccaacaatccagaaccagcccttctctctcccatcccctggagactcacataagcccagagagtgacagcatccaggtcctgcttgatgcctggagccccagactccccatagcctccatggctatgctcatggtcatgtccatgtcctctgtggtagaggctctcatgggagtagccatggctatggccatggtgtaaatcctcatgtgaatgtccatggtcgtgatcgtgggtatgtccatgccagatgctctcgtgagtgtggccatggccatgggcatggctgtggccatggtggaaatcttcatgtgagtgcctgtggctgtggccatggaagtcctcttgcagatcgtcgtgcaggtcgtcatgacccccgagtccagccaccagaagccccaaggtcgcccaggtcagcagtcccacggccacccagtggggggcccccaggcctctggccatcacgctgaccagagggacagaggcagtgactccacttgactcaactctatacctacacagggtccgctttactccaatcgcgccctccgtccacctctatgggccgctctcccattcccttaagttcccacctacattgttcccaagactagttctctttatcccgaaccacctcccggatgtagggccctgggacactaatctttcaccagccactttacagactctctgggccctcgtctctacgactcattaggtgaggaaaaggcctggaaaggatggtagagaaaaaacagagaattc

SEQ ID NO: 281795 - DNA, 1000 bp, Homo Sapiens
ctcatggcgtaatgggcctgcccaatgctttgggaggccaaggcaggtagatcgcttgagcccaggagtttgagacaagccctggcaacatagtgagatcccatttctacaaaaaaaaaaaaaaaattagccgggtgtggtggcacacgcctgtagtctcagctactcaggtggctgaggtgggaggatcgtttgagccctggaggttgaggctgcagtgagctgtgatcgcaccactgcactctggcctgggcgacagagtgagacactgtctgagaacaaaaaacgactgaaaaaaaaaatcaccttagctttttctcttagaatcttctctaaaatgtattctttgtggcattctgaaataggattcatgatgatgcctgttgatcttagggacactacctcacctgccagtatctttggggctgtgtccttcaaggacatgtccccagactgctgtgcagtgtcattttttgtgtttggtttggtggtggcttcttcccccttgctaggctatcaacctcttatcaccacttgttggtgtcagaactaactgcttctggtctggagagggactgaccgatgcctttgggtagagagaattatgaaagaaattttggtatttttctactttatattttctgaggtttctgtaataagcatatttcacttttccaataagaaaaaaaaaaaacttggcctggcgcggtggctcacacctgtaatcccagcactttgggaagtcgaggtgggaggatcacttgagttcaggagttcgagaccagcttgggcaatatggtgaaaccccgtctctactaaaaatacaaaaattagccaggcgtggtggcgtgcacttgtagtcccagctactcaggaagctgaggcgggagaatcacttgaacccgggaggcagaggttgcagtgagctgagatcactcctctgcttcagcctgggcaattgagccagactctgtctcaaaaataaacaaaaaaacttgac

SEQ ID NO: 281796 - DNA, 1000 bp, Homo Sapiens
atctctttgatatactgatttaatttcccttggatatatacccagtaatgaatgggattgctggatcatatggtaattatagtttcaattttttgaggaaccttcatactgtttttcacagtggctgtactaatttacatttccaccaacagtgttggttttcttttgtccctatcctcccaacacttgttatctttcatttttttttttgataatagtcattttgactggggtaaaatgaaatcattgtggttcccatttgcatttctgtgatgattagtggcgttgaacattttttcatatatctgttggccatttgtatgtcttcttttgaaaaatgtcagacttctgcttctgagtcaaagccatggtggtggcaaattcaagccctgagcccccgtggtgttctttgatgtcagcattgtcagtcaggaagttggccacatgaagatccagctctttgtagacattgtgcctaacacagctgagaactttgggcagttctgcactggagaattcagagaagatcgggttccaataggatacaaagggagcacctttcacagggtcataaaggatttcatgattcagggtggagattttgttaatggagatgttactggagtcaccagcatttaccagggaccatttgcagatgaaaattttaaaatcagatacccagctccggtcctgctttccatggtgaacagcagtcccagtacaaatggctgtcagttctttatcacccgctctaagtgcaatggcctggatgggaagcatgtagtgtttggaaaaatcactgatggacttctactgataagaaagattgaaaatgttcccacaggcaccaataataaggccaaggtacatatggtgatctcacggtgtggggagatgtagttcagaccaagactgaatcagactttcacttcctcttggcaatgttcttgagtaagataatctggactggcccctgtgtttgcttccctgcctgctgcta

SEQ ID NO: 281797 - DNA, 1000 bp, Homo Sapiens
tgaaaaaaaaaaatctcagtctgcaaaacaagaacttatagattttaagacaagaagcattgctgcattcagaaaaaaaaaaaaactagtggaactggcagagttagaactgaagcatgcaaagggtaacctacagttgctgccaaactgcctggcagtgctaaacggagacacataagccacattctgccttcctgttgaaaagggctgccttccttcaaattttatttttgttttcttaatgatgttacgcatttatgctcactggaaacaaataaaaaacagctgacaaaatggatctactctttttctgagaagcatggagcagcaccatgtacaggcgatgccagtctgtgtggtgtaatgccgcactgtgttccccaagatagtggcccattattgtgcactcatcatactcagaagtccaagttttattcttctttaaagtagcctctataactgcatttattttataaatagtattccttatggatgccaatcttatttacctttaaataatttctgaagtttaaccttttcagaatgcattgttcaaacaagataaagattgcctttattgcctttaaaacagaattttttaaaattttgttttaaaaaagcattatataccaccttagttcattcatgtatcctggtaaagcatcttaatcagacttatttttaactactgaatatttcttagaagttttggtacagattttatgtaatctttatgatttctgaagaaaagcaaatgcattagtatgtttgccttaaacttgtagactaaaccaattattgtaaaataaacagcaataacagtgagagtttttaactctgtggtcactgtatcactcttcaacatttggagtagctataataaatctactcctgcattatgctttaaaaaacccaactaacaaaaaaactatcatcctgtatttgggtgtgttgtatttatttttatcctgtatcatcaagcatttccaagaatagtaat

SEQ ID NO: 281798 - DNA, 1000 bp, Homo Sapiens
cctccaacacaataataatgggagactttaacaccccactgtcaacattagacagatcaacaagacagaaagttaacaaagatacccaggaattgaactcagctctgcaccaagtggacctaatagacatctacagaactctccaccccaaatcaacagaatatacatttttttcagcaccacaccacacctattccaaaattgaccacatagttggaagtaaagctctcttcagcaaatgtaaaagaacagacattataacaaactatctctcagaccacagtgcaatcaaactagacctcagggttaagaaactcactcaaaatggctcaactacatggaaactgaacaacctgctcctgaatgactactgggtacataacgaaatgaaggcagaaataaagatgttctttgaaaccaacgagaacaaagacacaacataccagaatatctgggacacattcaaagcagtgtgtagagggaaatttatagcactaaatgcccacaagacaaagcaggaaagatgcaaaattgacaccccaacatcacaattaaaagaactagaaaagcaagagcaaacacattcaaaagctagcagaaggcaagaaataacgaaaatcagagcagaactgaaggaaatagaaacacaaaaaacccttcaaaaaatcaatgaatccaggagctggttttttgaaaggatcaaaaaaattgatagaccactagcaagactaataaagaagaaaagagagaagaatcaaatagacacattttcttaattcagtctatcattgttggacatttgggttggttccaagtctttgttattgcgaatagtgctgcaataaacatacatgtgcatgtgtctttatagcaacatgatttataatcctttgagtatatacccagtaatgggatggctgggtcaaatggtatctctagttctagatccctgaggaatcgccacactgacttccacagtggttgaactagtttgcagtcc

SEQ ID NO: 281799 - DNA, 1000 bp, Homo Sapiens; identical to SEQ ID NO: 201647

SEQ ID NO: 281800 - DNA, 1000 bp, Homo Sapiens; identical to SEQ ID NO: 201646

SEQ ID NO: 281801 - DNA, 1000 bp, Homo Sapiens
attattgagacaagatattgctctgtcacccaggctggagtgcagtggctcgatcatagctcactgcagccttgaactcctgggctccagtgatcttccagcctcagcctcctgagtagctgggactacaggtgcacaccaccatgcctcgctaatttctgtatttttaaaatttttcatagagatggggtattactatgttgctcagcctggtctcaaattcctgagctcaagcgatcctcccacctcagcttcccaaagtgctgggattataggtgtgagccactgtgcccagcctaatttgaggatttttttttctttttttcctttttcttttcttttttttttttttgagatgaagtcttgctctgtcacccaggctggagtgcagtggctcaatctcggctcactgcaaccttgaggatgttttaagagcaggtgtaggaaccccagggggttgtgcattctatctaaaaactagtaataggccattccagctcaggcctgatgtggggaggggagggagtcctagaacctagggagtgactttgtctggggatgggatggccagcctgctgtaaccctgcaggaggaagctgaaggaataaattccctccattcatcctctgatttccatgccccttggactaaagcccagccagcagcaggtggagagggtagagagtggcctggagaagcaggaaggtgtctggcccagagtctcatgcattgcaggaccagctagcaccttggctttcacaggtttcttttttgtgaacatcactgaagctctgaagctttgagcagcaggattaggtgttgctttgttctggtttgttgctaatagttgtgtatgttgaagctgttgtttcaaaagacgacgcccaggttccattgctctatctgggggggctgtggcccctcacattggcgatctcctgacatgaagagtaatttatatttttttcaggtgtctagaaggctcccaaaagcctattcc

SEQ ID NO: 281802 - DNA, 1000 bp, Homo Sapiens; identical to SEQ ID NO: 114817

SEQ ID NO: 281803 - DNA, 1000 bp, Homo Sapiens; identical to SEQ ID NO: 207074

SEQ ID NO: 281804 - DNA, 1000 bp, Homo Sapiens; identical to SEQ ID NO: 114818

SEQ ID NO: 281805 - DNA, 1000 bp, Homo Sapiens
aatacaaaaattagccgggcgtgtgggcgtgtgccactgtagtcccagctattcagaaggctgaggcaggagaatcacttgaacccgggaggtggaggttgcagtgagctgagatcacgctactgcattcctgcttgggcgacagagtgagactctgcctcaaaacaaaaaccccacaaaacagtataaggatgtgctttctaatttggaattatgaattattggtaaaatattgcaaaggtgtatgctttaagttgtaaattcacctttaaccctagactatatatgtgtgtttatatgcagaaaaaaataattcccatgtcgtaagtgaacaatttggttctttagctcagtgttttcctgttttcttcatttccaaaatttccctctagcacaggggtttacacatgatcaaaaaggagtatacaatgaagacaccttcctcagtcccctacctaccagtttccctccccagaagcaacctctggaagaccagtttctttctttcaatctaaggctatttaatatacattaaagagggcccggggggcagtggctcacgcctgtaatcccaacaacactttgggaggcccaggcaggcgggtcatgaggtcaggagattgagaccatcctggctaacaacggtgaaaccctgtctctactaaaaatacaaaaaattagctgggcgtgatggtgggcccctgtagtcccagctactcgggaggctgaggcaggagaatggcgtgaacctgggaagcgtgagctcgcagtgagccgagatcactccactgcactccagcctgggcaacagtgagactctgcataaagagcatacccatgtgtgtacctatctatctatctatctatctatctatctatctatctatctatctatctgtatatagatatattaaaatgtaaatggtggcatacctgctgttctgtagttgattagtgttttctttcctgcctcttgaatattccctgtcaccttggatcc

SEQ ID NO: 281806 - DNA, 1000 bp, Homo Sapiens
aggatgtctacaaaattggtggtattggtactgttcctgttggccgagtggagactggtgttctcaaacccggtatggtggtcacctttgctccagtcaacgttacaacggaagtaaaatctgtcgaaatgcaccatgaagctttgagtgaagctcttcctggggacaatgtgggcttcaatgtcaagaatgtgtctgtcaaggatgttcgtcgtggcaacgttgctggtgacagcaaaaatgacccaccaatggaagcagctggcttcactgctcaggtgattatcctgaaccatccaggccaaataagcgccggctatgcccctgtattggattgccacacggctcacattgcatgcaagtttgctgagctgaaggaaaagattgatcgccgttctggtaaaaagctggaagatggccctaaattcttgaagtctggtgatgctgccattgttgatatggttcctggcaagcccatgtgtgttgagagcttctcagactatccacctttgggtcgctttgctgttcgtgatatgagacagacagttgcggtgggtgtcatcaaagcagtggacaagaaggctgctggagctggcaaggtcaccaagtctgcccagaaagctcagaaggctaaatgaatattatccctaatacctgccaccccactcttaatcagtggtggaagaacggtctcagaactgtttgtttcaattggccatttaagtttagtagtaaaagactggttaatgataacaatgcatcgtaaaaccttcagaaggaaaggggaatgttttgtggaccactttggttttcttttttgcgtgtggcagttttaagttattagtttttaaaatcagtactttttaatggaaacaacttgaccaaaaatttgtcacagaattttgagacccattaaaaaagttaaatgagaaaaaaaaaaaaaaaaaaaaaaaaaaaaaaaaaaaaaaaaaaaaaaaaaaaaaaaaaaaaaaaaaaaaaa

SEQ ID NO: 281807 - DNA, 1000 bp, Homo Sapiens
cagagtgtgtgtgaggagccctagggaaggagctttgattggccagagaagacaggggagggtgctgcatgtggtggggacagcatgagaagtggggaggctggaaggggcatgtactcctgacatggagccctggggaggtcagtgtggctggagcagcagttgccaaactccaggctgcatcaggaccacccggagagctgtgacaaacagatcactgggccctgcccctggagttctgactcagtagaaatggaagggggcctgaaaatttcccaactgctgctgctgctcttagggtgggtaaccagactttgagggtgcgggactggaggagagtaggctgggaggctgtaccatcgggtgaagctgcagtgtagggtcttggagtctgatggggactttgagtcgattccgcaggctgtgaggaactagtatagggtcttgtgcagcagggaagtggtgagaggaaactggttctttgccaagatggtcctgaaaaggagagaggtaggaggcggaatggccttggccgtggtaaccagggaggtagtgaaaaggccagaggcgccccagggcatgacaaataagaaagtcatcctcaacactgaccgtgagggtcccaacttgcttcagaggctgcagctggggaggagctggaagagcagctggagagaacccctgaacccctgcccctgggaagctgaaggctcatgccctccctaccttggtgaccccagattttatttaaagtggattttcccattttataaatcacggcagagctgatacagaccactacctgtgatggctctggggttgtcagtgggaatggagggttagaagtgaccggaagaggccgggtgcacgggtgcaatggctcatgcttgcagtcccagcactttgggaggccgaggggggcggatcacctgaggttgggagatcgagaccagcctggccaacatggtgaaaccccgtcactactaaaaatacaaaaatt

SEQ ID NO: 281808 - DNA, 1000 bp, Homo Sapiens; identical to SEQ ID NO: 206224

SEQ ID NO: 281809 - DNA, 1000 bp, Homo Sapiens
caattataccttacatcagcaagttaaaaaaagtactttaaaataaagcaaagggagactgttgctcaaccatcaggaaacagttgtcagaagacatcattggttctgtgtttcctacggaaataagaaacgataaatattgcactgaatgtttgtggtttggagtccctgaataataaagagggaatatatttgcagaaagtcgcatagggttttttaatgcagaattttgtcagaagacaatggcgctgcatgtttttctttgagtgcaaatgtacattgctaagatttttttaagatggcatgtgctttgaaaagaagatattgcatttttaagagtttaaaaatcttatgagtgagaaatattaaaaaaatcttattttcacctctttagaagaaataaaagatgtttctcctatctccttttctctagtatttgactgttactgtccttggcgaatcgataatcattgcatagtgactgaaaagcctaagtgcaaaaaaaaaaaaaaaagatgttcttgtttctgaacttcgtgccatattttgttcctgatgggatcaacttaatgtttaagactttagatgtcttgtattaaaaattacacaaaaaaagtaaaactttttatacttacccttttaactctaacacatctctggtttctcattatgtgtgaatttccttgggtgggctgcctgagaactgttcattttattttaggccatgttacaaactggttatccttcatataatgactgctaaggtcagaatctaagccaggcatggtagcacatgcctgtagttccagctacttgggaggctgaggtaggaggatcacttgagcccagaagttcaaaagtccagactgagcaacatagtgagactccatctctttttttacagaaaaaaaaagaaaaatttatgaagaccttgaactggtaaagggaaagaagccacatcattttctgccttcagtcttcccatttctctttcagatca

SEQ ID NO: 281810 - DNA, 1000 bp, Homo Sapiens
tgccagtgcctagaagtcagtgaacatttgacagagtcaaaatggttcccaagaaaagcagagaaaagggacaaccccaaaaatagaatcacttctcacagaccactgcttgagcaacttgtgagctgtaggaggggcgctggttcctaagcctgaagtggagggcatgttttaatccagcctgcatgaggttgtagtgtggtgcttccctacctcggggcagcggtgggcgggcagtccacacattgctaaaggacctgaggaaagtggctggagcgtccagaaaattgatgaaaactacaaagtctgcttggttctgctttggcttgctagattacatcccttttttgtaaaagacaataaacttgagaagtctttttaaaattacataatcaaagttgagatcactgagggctgtgtccagcacacacgcctagctgggaagcagcagagcaggaaggcacaagcacagattgtgggatccccctgctctccaggtctggcccctccctcctcagtggtgtggccttggggccagcttcttcatctctccctgcctcagttttctcatctctagagcagggataatagtaagacctacttcacaggggcattacagcattaaaagggcatcaggtacttcaaatggtgcctttataataatcactcagtaaatgcttacagttcattataaacctaaaggaacccaaaggcgaagattgagcaaagttgatttggtctgcccagtgaagaatactttctgtattttgtagtaaggctgactttaaaaatagaggtagtggatgttgttgtttctctttctctgcccttccccatgtatgtgaggcccttcaggagcccaggcacacatgcagtgccaatttgctcccagatccaagggtgttcagaagtggacttcgaatttcaaatagctgtgattttatttaactttattgaattctagttttattatattaccaccagagagtttggcctttaa

SEQ ID NO: 281811 - DNA, 198 bp, Homo Sapiens
ctttttatgcttacaatgattcagctgacgtcctgagcccagttacccatgcctcattctggaaaactgttctctctctctctctcatttttatttgtccatatttttttttacagttttgccaatctgcatttatttcctagtgctttgatctttcgggggacaccgggaataaatgtcttctatgttcccccacag

SEQ ID NO: 281812 - DNA, 1000 bp, Homo Sapiens; identical to SEQ ID NO: 114819

SEQ ID NO: 281813 - DNA, 1000 bp, Homo Sapiens; identical to SEQ ID NO: 206225

SEQ ID NO: 281814 - DNA, 1000 bp, Homo Sapiens
gagagggctagggaccagagaagctgaggtatgtcaaaccacaggtataaccgaagctattttacttctggatttgcctttaataggactttgaggcaggctagtgtcctatcattttaaaagaaatgcatctgaaacaatagacgtaatcatggtggcacaagtttgttcatggagtttctctccttctctatgttttcatctagaactcaaagatattcttggggaacaaatgatgcctgcccttattctgtattgttcctgtatggttaagatcagatacaagttacacctgtgagaatccgtcctaaaggagagatgctgagaggctgcccacaggagagacaccatgctccttttgggagagggtctacatcactgtggttgaggatgtaggccttggcatcagattgcatattcaaatcctgcctctactgcttactggccaagtgacttgggcaagtttcttaacctctcttttcatgcttccatttctttatctgtaaagtggattactctaggattgaaagttatctaaatatgaagtacctggcacatattaagcacttagtttaattaaattattggtgttattattattgtaagtggtagaacccaactcaagcaaagttaaagaaaatggaaatttattagaaaaacaatgtgtcattttatagagtcaaggaattagcctttctcattgtggctttgacttgcatttccctgatgtttagcagtgttgattattttttcatacgactgttggccatttgcatgtcttctttggagaaatgtctattcaaatcctttgcatgattccacttatatgggatatctgaaatagtcaaactcatggcaacagagagtagaagagtagttatcaagggctggggggagggggaatggagagttgactttcgatgggtataaagtgttagctgtgcgagatgaataagttctagagatccctttagtgagggttaattgcggccgcgaattc

SEQ ID NO: 281815 - DNA, 1000 bp, Homo Sapiens
ctgcagcaacacaagagagaggacaatgtcctcctcttgacccgctgtcacctaaccagactcgggccctgcacctctcaggcacttctggaaaatgactgaggcagattcttcctgaagcccattctccatggggcaacaaggacacctattctgtccttgtccttccatcgctgccccagaaagcctcacatatctccgtttagaatcaggtcccttctccccagatgaagaggagggtctctgctttgttttctctatctcctcctcagacttgaccaggcccagcaggcccagaagaccattaccctatatcccttctcctccccagtcacatggccataggctgctgatggctcaggaaggccattgcaaggactcctcagctatgggagaggaagcacatcacccattgacccccgcaacccctccctttcctcccctgagtcccgactggggccacatgcagcctgacttctttgtgcctgttgctgtccctgcagtcttagagggccaccgcagctccagtgccacggcaggaggctgttcctgaatagcccctgtggtaagggccaggagagtccttccatcctccaaggccctgctaaaggacacagcagccaggaagtcccctgggccccatgctgaaggacagcctgctccctccgtctctaccaggaatggccttgtcctatggaaggcactgcccatcccaaactaatctaggaatcactgtctaaccactcactgtcatgaatgtgtacttaaaggatgaggttgagtcataccaaatagtgatttcgatagttcaaaatggtgaaattagcaattctacatgattcagtctaatcaatggataccgactgtttcccacacaagtctcctgttctcttaagcttactactgacagcctttcactctccacaaatacattaaagatatggccatcaccaagccccctaggatgacaccagacctgagagtctgaagacctggatcc

SEQ ID NO: 281816 - DNA, 1000 bp, Homo Sapiens
gggtacctccttgcaggtgcagccctttgcctccctcatcagcaaggcacccctctccacccctcgcctgctcatcaacaaggagaaagctggccagtcggaccctttcctggggatgattatgggcctcggaggaggcatggactttgactccaagaaggcctacagggacgtggcctggctgggtgaatgcgaccagggctgcctggcccttgctgagctccttggatggaagaaggagctggaggaccttgtccggagggagcacgccagcatagatgcccagtcgggggcgggggtccccaaccccagcacttcagcttcccccaagaagtccccgccacctgccaaggacgaggccaggacaacagagagggagaaaccccagtgacagctgcatctcccaggcgggatgccgagctcctcagggacagctgagccccaaccgggcctggccccctcttaaccagcagttcttgtctggggagctcagaacatcccccaatctcttacagctccctccccaaaactggggtcccagcaaccctgggcccccaaccccagcaaatctctaacacctcctagaggccaaggcttaaacaggcatctctaccagccccactgtctctaaccactcctgggctaaggagtaacctccctcatctctaactgcccccacggggccagggctaccccagaacttttaactcttccaggacagggagcttcgggcccccactctgtctcctgcccccgggggcctgtggctaagtaaaccatacctaacctaccccagtgtgggtgtgggcctctgaatataacccacacccagcgtagggggagtctgagccgggagggctcccgagtctctgccttcagctcccaaagtgggtggtgggcccccttcacgtgggacccacttcccatgctggatgggcagaagacattgcttattggagacaaattaaaaacaaaaacaactaaaaaaaaaaaaaaaaaa

SEQ ID NO: 281817 - DNA, 1000 bp, Homo Sapiens; identical to SEQ ID NO: 206996

SEQ ID NO: 281818 - DNA, 1000 bp, Homo Sapiens; identical to SEQ ID NO: 114820

SEQ ID NO: 281819 - DNA, 1000 bp, Homo Sapiens
ctacactccagcctgggtgacagagcaagattccatctcaaaaaaaaaaaaaaatctgaaaggacatactctgagatgttaagagagatcaatcctggatgatggagttatatatatttacatatcacttgtgtaacaaatacgttaaaaggaagctaccccttaaaactgagccccagagatgttgagtaatttgcccaaggacacacagctattaatagtggcagagctgagatctgaacccaggcagtctggttcctctatgcaatactcccgtatcccaaaggcccaacctctttcgggccgttcctaagatacctgtgctggggccatgttttccaaaagcagccctatcagataggagaaacatgactagttccaattcttcctagagacacgtaaacagctgtcagcgaaaccagagggcaaaatgaggtgccagagcaagtgaggtccagacagggggtgtggtcagacatgcagagatgacactgctcatgctctgcttgtgccctccaagatgcttcctggggagctcagggaaggagagtccactcccctgagctctggagagccgtgtgaggacagccttaccaggggatactgtggccaaatgctgcgggacagcaggttctggggggagcacaaagggacggaagaggaccttgcttccagactggctcacaactagaaacaatagctgttttggcctacatttgtggtaccatcctgtcccctaccacctcccctaccaagtatagcagtgttagattatggggtgggaggcatgaagggggaagtcccagaagaggggcctggtggagttcagggcagcagctcttcatctacaggatgttctagcggcgagaatgatgatagtgatgcctccagctgaaaagcgcccctctaggcatatgttccttctctctgcaactcagatgagcaggctgatgtgccccggactaacacagctctgacttgtccatcaagaccctgagga

SEQ ID NO: 281820 - DNA, 1000 bp, Homo Sapiens
ctgggattacaggcacgaaccaccacgcacaagccaccgcgcccagctaattttttttttttgtatttttactagagatggggtttcaccatgttggccagcatagtctctatctcctgaccttgtgatccacccgcctctgcctcccaaagtgctgggattacaggtgtgagccaccgcgcccggcctaaagatcagttcttgtccaggctttgaaaatagggtgggtgcagattgccaatcactgagcattctgaaccattgatcccaggtgggacttccctgtctaccccctccagaaccccaaggctctccaggtgtgcagcaaggctgcacacctgcctctggtgcccttgccatctggggcaggtgtgtggggtgggagtggctggggctgggacacggtgagaggctcacctggcgtgggtgggggataagctgtggctcaggctgaggcttccttcaggggatccctctgggtctaggatgcaaccaaccagagctctcacagttgaaatgggatccacagggccctcagcatttgatccagccccgtgtttctgacaaaggtggcactagtttgttgttgttgtgtgtttgtttgagacagagtctccctcttgcccaggctggagtgcagtggcgcgacctcggctcactgcaaccttatctcccgggttcgagcaattctcctgcctcaacctcccgtgtagctgggaccagaggcgcgcgccgccacgcccagctaatttttgtgtttttagtagagatggggtttcaccgtgttgggcaggctggtctcaaactcctgacctcaggttatccacctgccttggcctcgcaaaatgctaggattacaggcatgaaccaccatgcccggcccaaggtggcactattttaaggttatttctagggaagcaggtacggcaagaggctgtgttcttcctcatattccttgggggagaattttggaaaagatgcgaaagccaggcagtggatc

SEQ ID NO: 281821 - DNA, 1000 bp, Homo Sapiens
aaaccctaggccagtgaaagaagccacacacaaaagactctacatatatagtatgattccacttacatgaaatgtcaggataggtaaattcatagagacagaaagtagattcatggtcacttaggcatgggaggtggctagggacgtggagggtagtggggagtaaccactaatgggtacaagatttcttttagaggagatgaaagtgttctaaattagactgtggtgatggttgcacaaccctctgaatatactaaaatatactttaaatgagtgaattatgtggtatgtaaattatgtctcagtgaaggtgttttaaaaaaataaaatattaacaaattaggtaccttcactcctcagttttgtgatatataggctaaaaacaaagtgaatcaaacagttaagtttctttcaagctagttggcttgtatgccagaatttaattgggaattggaattgttttcactgagataacctatgttgtatttccttaatatagagagatcatgagtagacatttttgttttttttgagatagggtgttgctctgtcacccaggctggagtgcagtggcatgatcacggctcactgcagccttgacctttcttggcccaggtgatccttccatttaggcctctgagtagctgggactacagttgcaacgccaccacaccctgttaatttttgtatgtttgtagagagagggtttcaccatgttgcccagcctggtctacaactcctgggctcaagccatccgtccgcctctgcctcccaaagcgctgggattataagcgtgagccaccatgcctggccaagtataaacacttttaacattggatataccagttgaactttatactttcctctttcctttgcagacaagtatctgtatttaaaatatgtacacctaattttttctataatgtatattttcttttaaaatatatctttttcttttcctccttagccacaacaagttgttcagaagaagcctgctcag

SEQ ID NO: 281822 - DNA, 1000 bp, Homo Sapiens; identical to SEQ ID NO: 114821

SEQ ID NO: 281823 - DNA, 1000 bp, Homo Sapiens
gtgtggcctgctggctgttggcctctgctcactgcagcgtggtctacgtcatagaattctcaggggacatctcccacagccagggcaccaatgggacctgctacctggagttccggaaggaccagctagccatcctcctgcccgtgcggctggagatggctgtggtcctctttgtggtcccgctgatcatcaccagctactgctacagccgcctggtgtggatcctcggcagagggggcagccaccgccggcagaggagggtggcggggctgttggcggccacgctgctcaacttccttgtctgctttgggccctacaacgtgtcccatgtcgtgggctatatctgcggtgaaagcccggcgtggaggatctacgtgacgcttctcagcaccctgaactcctgtgtcgacccctttgtctactacttctcctcctccgggttccaagccgactttcatgagctgctgaggaggttgtgtgggctctggggccagtggcagcaggagagcagcatggagctgaaggagcagaagggaggggaggagcagagagcggaccgaccagctgaaagaaagaccagtgaacactcacagggctgtggaactggtggccaggtggcctgtgctgaaagctaggtcctccgggggaggagggtgtagctggcatgtcatcctcagggcgcttcctcgctcacgccaggagggacttggagtggcgagctggggcccgatggggcttgggggcagagtagacatctagcctccctaagggtatgcgcgctaaagcccagctctcgatctcacctccatccccatccacccacacactatggattgggctctgggaaggggtcagggtgagaggctgctctggagaacaatgaggtcctcatagcagcaggcagctcctgtgttttcttgagggtggcagaggagctaagagcagtgcccagggtctgagggggctgcccagtgagtggcaggggcaggagaggggagaa

SEQ ID NO: 281824 - DNA, 1000 bp, Homo Sapiens
aaatttatttctgaaatgattatttcactgtatttatgtcaagattctcagacatagcaaaccatatatcgtacagaatgcttaatcatatagcttttttgtggataaaagatatttggaaatcataaaactattatttattagtagtagacatttttaagtagtatttcttggaaataagagattttacaatgtaaggaatgctgttgattgaccatagatataaaatgaatactgggatcacaaatgtcctgttcggtggatgcacttaagttgaagaccatttcttccctagcaacagtgtgatggtattcctaaatgacctttggaacctactgggcatctcacaaagtaaacaaaattccccttgcaagttctgacaactgccaggcattttggatggtgaagtaggcctcctggcagaacatatggcccacatgtcttgttccctgtgtcttacatttggctaggttttatacaaagcattttgccagtggaaaccctgaccctatatactggtcaagagtcttagataataagaaatttctgtccgggagaaaatagatacagccactacatagatatagtgacagcaatacagtacccttcccacccaccacatgctacacaattgctttttttgtcaaacttttaagtatgtgaccatcaactggcctgctttttaaaataaatatttttgttcaggctctgtctccataaactttgactcattagacctgggatgtggtccagaaatctgcatttttagcaagcatatctcttgataatagagatatcttatacagcctttttgtagagaaaaaaactgtatctctacattccaactcacagagaagcctagccatactatgtgtagaattctacatgtggaattctattctgttttttttttatttgaatttttgttcatttaatttaaagatcatttgtgacatctgtctcacacttttaaaatataattaaaataaacatctgagtg

SEQ ID NO: 281825 - DNA, 1000 bp, Homo Sapiens; identical to SEQ ID NO: 195157

SEQ ID NO: 281826 - DNA, 1000 bp, Homo Sapiens; identical to SEQ ID NO: 114823

SEQ ID NO: 281827 - DNA, 1000 bp, Homo Sapiens
atacagattgtgacttaacactaagaatctgagataagctttaaatatttctcagcctcttcttaagcctattagattcatgggaactggtatatgactgcttaagaatatttcaaagagagctagaaattgctgataataatgacaatactattaatagcaattctaatggtaacgctaatgctaagaataatttgttttttgagactgaacctctctctattgcccaggctggagtgcagtggcgcaatctcagctcactgaaacctctgcctcccgggttcaagcaattctcctgcctcagcctcccaagtagctgggactacaggcacctgccactatgcctggctaattttttgtatttttagtagagatggggtttcaccatgttggccaggctagtctcgaactcctgacctcgtgattcgcccacctcggccttccagagtgctgggattacaggcgtgagccactgcgcctggccatttttttttttttaaagagacagggtctcactctgtcgctcaggctggagtgcagtggtatgatcatagctcactgcagcctcgacctcctgggttcaagctatcctcccgcctcagactcctgattagctgggactacaggcatgcatcaccatgcctggcccaaaaattaactgttgatgagcactttcggtgtgcaaggtccttttcacccgaattatcaatttgttgagttaaccaaaaaagactttgggctctcgatcccttaataaaggtacaagttctaaagcaaaggaggcaagtgtcatactttatgttttagtgttcaaagggaagactggagtggggtggggggaagagcagagaagattgtaggggtgaaaaagtgtccttacttccattgagaaaaagcctgctctgtcaggaagaggaaaacagaaaggagaagcttgcggccaggagtggtggcacacgtctgtaatcccagcactttgagagactgaggcaggtggatc

SEQ ID NO: 281828 - DNA, 1000 bp, Homo Sapiens; identical to SEQ ID NO: 195159

SEQ ID NO: 281829 - DNA, 1000 bp, Homo Sapiens
acccagtagccactttagccaatgctatttaaattatgttttctggatttgctttatcaggaaatcctagtatttcacccaagagagcttatgttcttctacaattttgcttcagaaagtagatttttcttttttcttttttttttttttaagacagaatctcactttgttgcccaggctggagtgcagtggctctatctcagctcactgcaacctccacctcccaggctcaagcaactctcctgcccctgcctcagcttcccaagtagctgggactacaggcacacacaccaccatacctgactaatttttgtattttgtagggacaggcttttgccatggtggccaggctggttttgaactcctaactgcaagtggtctgcccacctcggccttccaaagtgctgggattacaggtgtgagccacggcccccagctggaaagtagaaaatttaaactacactttaaagtacagacagcgtagatatttcacataagatctttttttttttttttttttttttttttgagacagagtcttgttctgtcaccaggctgggagtgcagtggcacgatctcagctcactgcaacctctgcctcccgggttcaggcgattctcctgtctcagcctcccaagtagctgggactacaggtgtgcaccaccacacccagctaatttttgtatttttagtagagatggggttttaccatgttggccaggatggtctcgatttcttgaccttgtgatctgcccacctcagcctcccaaagtgctgggattacaggcgtgagccaccgtgcctggccaaaatcatttttatattaaatgtaagttaaaaaccataaaatgtattaaaaaaaaaggcaataaatctgttataacatggagcactgccaaagatcaagcttgtacataacctggtaaataaatccataattaagtgcttaggagcataaaaaatgaccaagtataagacatttccattctgggtaactcac

SEQ ID NO: 281830 - DNA, 1000 bp, Homo Sapiens
tgtgtagagatggggtcttgctgttgcccagactggtctcaaagtctgggcctcaagtgttccccctgccttggcctcccaaagtgccaggattacaggtatgagtcactgcgcctggcctgttctgtccttagcttccccaaggaatggggctggtccaggttttgatgtgggtcccgtaaaggagggcacgagggccacctatgctctggcaggcatcctccctggggcccaggtgggcggccacttgggccaagactgcgccaggtgacaccagagtgtttcccagagcccatgccgggcccttcccttgcccgaggccggctggctgccctccatgggttaccctctttgcaaagccccgaatgtcctctgcaggccacccacactaaccaggtcagtcactgggcagccagacccccacctatagcttccctaggccccagtgcagagatgccgtccacccccatctaggtgagggcttggggccactcttagcattagtatcattttcttctagtatcattttgtggtaggcatggctggaaatgtgcagctttgctttttttttttttttttttggaggagtttcgcttttgttgcccaggctggagtgcaatggctcgatttcagctcactgcaacctctgcctgccgggttcaagcgattctcctgcctcagcctcccgagtagctgggattacaggcatgtgccaccatgcccggctaattttgtgcttttagtagagacgaggtttctccatgttggtcaggctggtcttgaactcccgacctcaggtgatccacctgcctcagcctcccaaagtgctgggattacaggcatgagccaccatgcctggcactggttttttgagatggaatctcgttatgtcaccccagctggagggcagtggcacgatctcagctcactgtaacctttgccgtgggttcaagcgattctcctgcctcagcctcccaagtagctgggattacaggcacgc

SEQ ID NO: 281831 - DNA, 1000 bp, Homo Sapiens; identical to SEQ ID NO: 114824

SEQ ID NO: 281832 - DNA, 1000 bp, Homo Sapiens
tgttaagtgaggtagggtctcactattttgtccaggctggtctcaaactcctgggttcaaaggatcctcctttctcagccacccaaagtgctggttttacaggcgtcagccaccatgcccggctggaactatcttttcaaataactcctgctaaggattgtagcttagtgtgggtgctttagtactgaacctccttggaacttttgcattatttatctaaagcattatagcagtgagtctagagccagaaagagtgcctcttttatgatatgcataacaaaaaaaaattttttttttttttgagatggagtctcactcttttgccaggctggagtgcagtggcacgatctcagctcactgcaacctctgcctcctgggttcaagcgattctcttgcctcagcctcccgagtagctgggattaccggcgtgcgccatgaaacctggctaattctttttgtatttttagtagagacagggtttcaccatgttggccaggctggtcttgaacccctgaccttaagtgatctgcccatctcagcctcccaaaatgtaatcctaattagaggcctgagccaccactcctggccaaccttttatagttttgattttattaaataatttgattgaggtaatgaaatatagatgtgttccatttttagaaaactccagtctgataatttagaaagtatttgttgtatacttaaagttttccttattaggaacatctttattagactcaacactgacatatatatatatatttttttttttttttgagactgagttttgctcttattgcccaggctggagtgcagtggagcgatctcggctcactgcaacctccgcctcctgggttcaagcgattctcctgcctcagcctcctgagtagctgggattacaggcatgcgccaccatgcccagctaattctgtatttttggtagagacgaggtttctccatgttggttaggctggtctcaaactcctgacctcaggtgatc

SEQ ID NO: 281833 - DNA, 1000 bp, Homo Sapiens
caagctggagtgcagtgatatcggctcactgcgacctccacctccagggttcaagcgattttcctgcctcagcctcccagtagctggattacaggcgcgtgctaccaagctcagctaatttttgtgtttttagtagagacagggtttcatcgtgttggccaggctggtctcgaactcctgacctcaggtgatctgcccgccttggcctcccaaagtactgggaatacaggcatgagccactgtgcccaggccatagtatattctaaattccttctatgatttagccttaattctctattgctattcagcaggaatttattcttacagtcatccctccattcctactgccagaccttcacctcacctggctgactgccaggggtctgattgtatggagagcaggctccagagactcccaggcagaagcgaagggaaggacaaggagtacctttaaatcctttatttggtacctgttcttctgattagcgatggggatgggcatcaggacaccaaggacaactgcccacagctgccaaatagctcccagctggactctgataacgatggacttggagatgagtgtgatggggatgatgacaatgatggcatcccagattatgtgcctcctggtcccgataactgccgcctggtacccaatcccaatcagaaggactcagatggtaagcctgcggacccagagcacgttagactggtgttgcctttgcccaggtggaggcagcaagccctgttgggaagtgaggaagggcaaggtgggaaagatgtcaggaatgcaggcccaacagatggtattgttgcctaatggcagtggccagggccttcctgagcacccagcctcactctgcccaggcaatggcgttggtgatgtgtgtgaggatgactttgacaatgatgctgtggtcgaccccctggatgtgtgtcctgaaagtgcagaggtaacgcttacggattttcgggcctatcagaccgtcgtcctggatcc

SEQ ID NO: 281834 - DNA, 1000 bp, Homo Sapiens
atgtagctgggaaagcaatacccctgcttgtacctctggcatatcttctctgtgctggtgcacctagagaggttgcctggtggccctgagagagccatctcatcactaaacactgatggtgaaaagctggccatgctcaaataagatgtagcaatctacctcttctttgtctagttacccccaagggggcatccactttcttgctcacctcaccagttgcatgttctagtccttgccagaagcacataataatgactttgtaagcttaagttacaggcacacaaaagggcctgatggtgatatgactccaccctccccgtttttgctgacattccgccaaatatccttctgtctcctccccaccttgcaaaacaaacttcctgttttgaatttggtccaggctggaacagccccaccacacctgttaacacacgcagacgcacacttcccccttcataattgcttagcttcttgttgcctagccagatttcccctcagcttacagttcctgaatcataagatattgaaccagcaaatttaagagttgacattttacttagaggtattcaagtgaaaacatggcttctggtttattttgctgtattgtgccatgaccacttggctaattcttctcctccttcacagcagaatggaagtgaggaaaggcaaccagctgacacaggagccagagtgagaccagcagactctcacactcaacctacaccatgaatttgtgtctatcttctacgcgttaagagccaagggacaggtgaagttgccagagagcaatggctctcttcactccgtggaagttgtcctctcagaagctgggctttttcctggtgacttttggcttcatttggggtatgatgcttctgcactttaccatccagcagcgaactcagcctgaaagcagctccatgctgcgcgagcagatcctggacctcagcaaaaggtacatcaaggcactggcagaagaaaacaggaatgtggtggatgg

SEQ ID NO: 281835 - DNA, 1000 bp, Homo Sapiens
tggtgactgggtgggctaaatgtggtatgagatgcaaggctcatatatattggctactcctatagcgtcagtgacttgtgcacacacttcctgatctccagtattttggttctagccttttgcctgcgcttgccaatctttttggtcgacctgaagtgttttgctttgcttctcccacttttgttctgtcttgcgtgtgagcacttcttggcctgatgtcccatagcttgggcttatcttggtatcgttcgcagcgaagaatttaggcacaaagttcggccgctgactcaaaagtctgtctttccgtgcctgagatatttcacttaacataatgttcttcagttccctttatgctgttgcaaattacaaaacttcgaggcggaatctgggttccactctaaagaaaactcactgcaagtggcaaggaaagcaaagcaagcgggtttgggaggttgtcatgaaggtgagcaaggctagtgtgaagtttcagtcacctgtgatagagtggcaaattgctaaggctttgggaattgcaaccgcagggatggatgcaaacgaccgcgccctaggcttctctagcgaagccccagaggcaaggcgctggctcctacccagggaggcaggatgtgggttgggacaagttagaggtggggaattaggagagccttcgcagcagagcagaatgcaagcaaggttcgaaatccatttaggcactgaagggcttgcagagttgctgatgtgctgtcagagagactcgcggctgagctaagtagggaccggaaactactcgtccgcgagttaaaataggactcctgagatttcacggctcagaggttttcaggtgcgtgtctctctcgcttcttgttgaacatctttaaataaatcttgtggccttccctccctcctctatcctgtgcacctacagctaatttcccgacttgtcccgcgtgtgcattgagcagcttctcaccctttcaggagccagcctggtaaaagatgg

SEQ ID NO: 281836 - DNA, 1000 bp, Homo Sapiens; identical to SEQ ID NO: 198568

SEQ ID NO: 281837 - DNA, 247 bp, Homo Sapiens
  misc_feature (7)..(7): n is a, c, g, or t
  misc_feature (14)..(14): n is a, c, g, or t
  misc_feature (56)..(56): n is a, c, g, or t
  misc_feature (58)..(58): n is a, c, g, or t
  misc_feature (60)..(60): n is a, c, g, or t
  misc_feature (86)..(86): n is a, c, g, or t
tgtggtntcctcantgaagtggccggtttttgttgcccttggttttagcatttgcntnanataaccccacttgccccctttgtctnttttttgccaggggtcacgggcgtcagcggtccagggaaggaagcaaagcaaatggagaatggcatgctggtgacggacagtgcagggaagcaactgcagaggtagagggcggggaggaaggccccaacctaaggaccctgccctgccagtgggaggacaa

SEQ ID NO: 281838 - DNA, 1000 bp, Homo Sapiens
caggcctgggcctcacagagccgtcagcaccaccagccgccctgccttggtggtcatctagtgggcagccgggaagctggagagctgggtctggcctggagggagggtgtgggtgtcagatggccccaaggcgggtgcaggcacaagagccaccaggaccacagcaccctccttcctccagacccagtgaagggcctgggacaaagacgttcagggtcaggaagccaaaccccatgggttctgcccctccctgagacaccttcgcagaaacaacagaaaagacatgtgaagtgggaagaaacgcctcggagccttggctgatgccactgcactccacatcggacccactcgttcgactgtatgcttttctagcaaggcctgaaagcaatgagtttctgggtccctgccccccaaaacaagataggccacgggtctttcccctggccacaagtcagcccatcccacactgcaccctcagctctgttctaccatgagtgtgaatccatgtccatcctggggcgtgttataagttggctctcaggtgtcttatttgtgtgctttaaaattatttaaaaaaccaaagttcctaacaactcaatttttaaaaaataggcaaagggcttggacagtcatttctgtgaagaagatacacagatggccaagaggcacacggagaggtgcccagtgtcactaatcatcagggaaatgcaaatcaagaccacaacgagatgccacctctcatccattagggtggctgccaccccaaacagagtgacaagtgctcccaaggatccggagaagttgggaccttgtgtgctgctgggggatgtagaatgccacagctcctttaaagcgtgaaatgaccagccgctcgattttgctgtgaacctaaaactgctctaacaaatagtctgtttaaataacatgccagaaaaaaaacagaattactgtatgacccagcaattccactttggagtctgtccccggtctctttaaagga

SEQ ID NO: 281839 - DNA, 477 bp, Homo Sapiens
aatgtatcatggtgtgtcatatactactattgtgctaaatattttattttgtactattaggatctgcaactggaatatggacaaggacaccaaggtggttactttttaggtgcaaacaagtaagtaaagttcttttaaaacttaatttaaattcaagaatgattaagttgcctttaatattatattttaatatttaaggtagaaaattgtattaggctggtagatatattttacaatatgcatttcacctttttccattgcttccttgctcattatttagttaatagttgtcctaatgggaagcatcaacataatttttttatatcaagctacattgctgatcttgtatgttagagaaaaccacatgtattgccactgaaggcagatacatgttttagcactttatttctaaaactgatctgtttatttcttataaaacttgctttggtacatctctaagatgggttggtcactaaa

SEQ ID NO: 281840 - DNA, 1000 bp, Homo Sapiens
cccattgctcagatcaaagtatttgaagttacccttgatttttctctatcttaaatcccacatctggtccttcgactgatgtggtatgtagaatggcctccaaagatgtgcatgtaggaatccctggaacctatgaatatgtactttgcatggcaaaagggactctacagatgtgattaaattaataaccttgagattggaagattatcctggacgatcctggtgagcccaatctaattacatgagtcttaacaatcagaggaccctcctagccacagtcagaggaaaatatgactatggaagaaggtcggagagatgcaatgttgtgggctttgaaggtggaggaaggggccacggccgaagaatgatgtgagtgacctctaggagctagaagaggcaaggaaacagatcatcttctagaatttccagaaacgaacacagtcctgctggcaccttgattgtagtccagtgagaccgacaaccgacttctgatctacgaagctgttaagacaataaattaccactcaatttatggtaatttcttatagaagcaatagaaaactaatatattcaatcatgtcagttctgtcttcaaaaaatatcaagtgccccataacctctactgtgaacacttggtctgagccactacccctctcacctggattactgcaatagcctcctaaccggccttcctctacccttagccccttacagtcaggtctcaagcctgcagtcagagtcatcctattaaagtcagctcatgtctcctctgctcaatagtctccaatacttcccatctcatctcactctgaggaaaaaccaaaatccttaagaggaccaacaatcactgtatgatctggacccatcgcctctctgccctcatttgcaacagctcctacttcagtcttccctagccagacggctcccctgctattcctcaaacaccatggcagatgcctgcctctggaacttggtgttcacccttctgtatgtctgaaat

SEQ ID NO: 281841 - DNA, 1000 bp, Homo Sapiens
gaaagctcctcccccgtcctccgttagctaattaaaacatttttcagggacgtagccatccagagacattccattattgttccattgacctttccctcatcactgagtcctttggagctgagttatgtcaacagctgccttaattactttggtcagaagtggtgggaaccaggtgagaaggagagtgctgctaagctcccgcctgctgcaggacgacaggcgggtgacacccacgtgccacagctccacttcagagcctaggtgttctcggtttgacccagatggtagtgggagtccagctacctgggacaattttgggatctgggataaccgcattgatgagccaattctgctgccacccagcattaagtatggcaagccaattcccaaaatcagcttggaaaatgtggggtgcgcctcacagattggcaaacggaaagagaatgaagatcggtttgacttcgctcagctgacagatgaggtcctgtactttgcagtgtatgatggacacggtggacctgcagcagctgatttctgtcatacccacatggagaaatgtattatggatttgcttcctaaggagaagaacttggaaactctgttgaccttggcttttctagaaatagataaagccttttcgagtcatgcccgcctgtctgctgatgagaactgtgcctggtcagcagctctagacctagagcccgtggacactatatgcggggcttcagtggaaagagagatctgcttaattctgtcccaggtgaaggagtccagcggttcctatcctggactacgggaaggttcccacatctctttgtcccattagttgagatgacttgcagtagaaattgtccacaactcttctgacctctgggactactgcaacagtagccctattgcgagatggtattgaactggttgtagccagtgttggggacagccgggctattttgtgtagaaaaggaaaacccatgaagctgaccattgaccatactccaga

SEQ ID NO: 281842 - DNA, 1000 bp, Homo Sapiens
cacagggagaaacagagtggagactcattaactttctgcctatcatatttattttttatgcagaatcagttttaatccctatgggaggagaaataagcgtattcacagtgacatctgagatataaaagaaagtccccatggtgaggtctgagacatgggagaaagtctccattacataaaaaacttttatgccttttatcccatacccctttgaaaactggggacagacacttgtgacttttgtcttcattcattaaaaattcacttttatctcatggagggtgctgattcctaccattatattttcaggtgaccaaactttttgctgaagctgtgcagaaatctcgcaaggtggactccaagagtcttttccactacaggcagtacagtgctggaaaagcagcatagagatgcagacaccccagccccattattaaatcaacctgagccacatgttatctaaaggaactgattcacaactttctcagagatgaatattgataactaaacttcatttcagtttactttgttatgccttaatattctgtgtcttttgcaattaaattgtcagtcacttcttcaaaaccttacagtccttcctaagttactcttcatgagatttcatccatttactaatactgtatttttggtggactaggcttgcctatgtgcttatgtgtagctttttactttttatggtgctgattaatggtgatcaaggtaggaaaagttgctgttctattttctgaactctttctatactttaagatactctatttttaaaacactatctgcaaactcaggacactttaacagggcagaatactctaaaaacttgataaaattaaatatagatttaatttatgaaccttccatcatgatgtttgtgtattgcttctttttggatcctcattctcacccatttggctaatccaggaatattgttatcccttcccattatattgaagttgagaaatgtgacagaggcatttagagtatg

SEQ ID NO: 281843 - DNA, 1000 bp, Homo Sapiens
tggggggctgggggtagaatgacattgtttagatgtttgtctccttcaaatttcatgtttaaatgtaatccccagtgttgggggtggaggtggggcctgatgggaagtgtttgggtcatggtggatgatccctcatgaatggcttagagccactggtgatgagtgagttctcactcagttcgtgtgagatctggtggcttaaaagagtctgctccccctttgccttccattgtgattgtaaccttcctggggccttcatcaaaggccaggcaaatattggtgccgtgctagtatggcctgcagaaccgtaagccaaaacaaaccttttttctttataaattacccagcctcagttattcctttatagtgatgcaaaacgggctaactatataaatttgtaatttttaagttatagattgtttttattaaacacttatgaatactgtttgaagtgctttaatttttataacaatcctatgaatttggtaataatcacattttacagatgaggaaattacccaagattatatagctaataagttgcgtggcagaaattagcatctggtatcagtttgcgatctttaccactaacacgatgtctgtgcatcatattaatcataatcattttctctgtcatatgttgaaagttattgtgccaaacattgtgctgagttttagaagcatgatctgatttgataaatctacaatgtaggttctattcttttacttcttgaggaaattttgagacccccaatgattaaataacttctttcccttgttcattgtattagactgcaattctccactcattatatttgatgccttttgcaatatggctttgtaatttttcccatcaggaagtaaagtctatttcctcaaccattaaatctgggctggccttgtaacttgcttacagaaaaagtgatggtcagttccaagcccaggtctcaaaagcactaatgcactacttctctcatttggaaccctgccactgacatga

SEQ ID NO: 281844 - DNA, 1000 bp, Homo Sapiens
aaagacccatgaagcccaagctgctgtttgtttctaacagtgggtcattaaaatcctgtgattgctcaggtggtgggatgccctagtgccctttcattaaagtctgggaaaatctgaacagtgttgtgatgaaggctgctcccctaccctcgcctccccaggtctcctgagtttcaatttaatgagatttttactgcgtaaaaaaaaaacaaaaaccaaaacaaaaacatgaaaaggctgcttttgagactgcattggtaaatgactcttcaacccattcaaacgctccttcactctccctcagctcagcagggctgctcgtccagctttgatattaagcccttggcatattccaagttgcccacagaatcctgatttctaggaagcttaggaaaagtggagaggttcgcccagcaagctggattattataattaagtagttctcttttcaaaggccttgcattttcttagcctctccttctccacaggggaactctttcttcgtgatgacaaactttctcaaaacagaaggccaagagcagcggttgtgtcccgaggtaaggaggggacctggagtggtgggtcaggtcttaagagttcctgggggaggtgcaagtcggaagaagcagaaatgcggaccctggggtgtatttgagcccacaaatatctactgagcacctgcctcttttgtggggtagggctgggctgagtggaggaagggagagaacacatggcagtgtctctccatggccaccagatctttgtctgcctgcctcggtctctggttctagcactagggacccgtgcagacggcaaccctgctctttctatctctggctctcttcgcagcttatgacaatggtgattcttggcatttgcacaacatttcacattttacttgaggctcacaatgactttaggagaaaaatggcattttacaaaccagaacacagattcagagatgttgtgacttcccccagggtcacacagcttgctgcag

SEQ ID NO: 281845 - DNA, 1000 bp, Homo Sapiens
ggtccatctcccagggctctgatctccattccaggactctatgccccaggtcctgacctcctccctcctggtcatggttattgtggcctcttagcaaagacctggtggtcgctgagtggcagctgatctctcagaccctgtaggccccctggacaaggtgaggaaggccaagatccgagtcaagaccagcagcaaggccaaggtggagtctgaagagccacaggacaatgacttcctcagttgcatgtcccggtgggtggcaggaccttgggggtgggaggggggtgggactggaggtacgggtctccctggtcccggcctgggcagctgagtggtgcctgccgggcggggcaggcgctcgggtctgcctcgctggatcctggcctgctgcctcttcctctccgtgctggtgatgctgtggctgagctgctccaccctggtgaccgcgcctggccagcacctcaagttccaggtgggtgggatctgtgaatggcgctgggccgagggagggggtgaaggcagagagagctgtttgctggtcctggatttggccacctgctcccatggaggccaggacctcagacatttttttcttttttcatgtatatacatatatatacatatacgtgtgtgtgtgtgtgtgtgtgtgtgtgtatatatatatatataatatatatatatatattttttttgagatggagtcttgctctgtcacctgggctggagtgcaatggcaccatctcggctcactgcaacctccacctcctgggttcaagcaattctcctgcctcagcctccgaagtagctgggactatgggcgcgggccaccacacccagctaatttttgtatttttagtagagacggtgtttcaccatgttggccaggctggtcttgaactcctgacctcaggtgatccatccgcctctgcctcccaaagtgctgggattacaggcgtgacccaccgcgcccggcctatatatatatttttgagacaggatc

SEQ ID NO: 281846 - DNA, 1000 bp, Homo Sapiens; identical to SEQ ID NO: 195184

SEQ ID NO: 281847 - DNA, 1000 bp, Homo Sapiens; identical to SEQ ID NO: 114825

SEQ ID NO: 281848 - DNA, 1000 bp, Homo Sapiens
tataatcccagctacttgggaggctgaggcaggagaatcatttcaacccagaaggcggaggctgcagtgagctgagaccgtgccactgcactccagcctgggcaacagagcaagactctgtctcaaaaaaaaaaagaagtaatagaggaacaggttctaatatactgatattcagaaagaggtaacagacctgatagaaacagataatgcgttcagataatcagtacttaattttctcaactcataactgtctttaggaaaggtccttggggataaaagaaaaacagctgtaaatgatattacaagtatatatgggctagacattgaccatgaataaaagttctaaaacttagttattaataggcagaataaatttattctctgtataaattttactaattcatggaaaatatgctgtggagatagctcaagtccttgttgaacatctagagataagatactaatatctgaaccagcttctccatcagttgtaaaatgctctctctccaaggacagcaaaaccaaataagtcaaggcatttaaaaaataatttctagcctatcttgtggatggaaaaacaagtcaattatgactggaattaaaaacagtgagaacaaatcaagggcagcatggggattcttatgcggggaaatctagcaatagttgtaggtttttaatgtcattgcggttgtttccagccctagtaccgaccaacaaaacgttgaattgatactcgctgacaaacaacataaacactctgtaggtaactaataagaaaaatgtataaatctgccttttttatttttcacaggtaatagaaaagttgtcaatgtgattttcaggtaggagaaaaaaaaaacaaacatgcagttgtcatgacattttcaaatactttaagttatgtaacaaagcttttcccagacccattaagtcccacagtgcccgcaagtcttgtataaggaaacgccgagtgctgagggttccatgcaacagctgatcc

SEQ ID NO: 281849 - DNA, 102 bp, Homo Sapiens
atgaacagcctgagagctgaggacacggctgtgtattactgtgctaaaattctattatttgtagtagtaccagctgctagactggttcgacccctggggcca

SEQ ID NO: 281850 - DNA, 1000 bp, Homo Sapiens
aaaaaggcaggaaaaggccctgatgccttgtaaagaaaatcttgaaagaaaaaagatcaaaaagaaaaatttcaagaaaaagaaccactaagaaaggctgaagacactaacatgtaacctgttacgatacatttaacgtttcgttttttcctggatctctaaaagggaactcaagggtgggggttactgaagaatactacagatttggaagtttttgttgctgttgttgtttggtttggttttgtttttcaagaggggccaggagaaatgaccccttccccgccacgggtcccgaagtgagggcggggggggggctctggggcgcgggcgcgcgcggcgcggcgcgggccggcgggggagggcggcgcggcgcggaaggggttaaggcgctgagcgcggagccatctggccgggttggctggttataaccgcgcagattctgttcacgggactcagagttgaagctcctctcccttccgaacacgtccgcgcaccgccccgcgacgcagcccggcgcaactactttcttctctctcctttctttcttcctctcctttttcccctgctgggtagtggctgcggcggggtgggggagactttgaatgaccgagctcgcgtccacctttctcttcatgtcgacgtccctggaaacggccacacggatgccatggttacttttgccacggtaaggggaggcggcgggcaccttgggtgggcaggtttggggatgggggtccacgtggggagggattttccagtggactggtgcggggggccccagatccgcatcccgccccacccccatcgcgccgcgctcactcactttcccgggcttgtgtcttccccaaagtttgcgctgggatctgctcaggccgaagcgcaaccgcagccaccccgctacacacacacacacacacacacacacacacacacacacacacagacacggacacccttctccacctcctcccctcttgtccctcggctgcccaagaagctt

SEQ ID NO: 281851 - DNA, 1000 bp, Homo Sapiens
aggtggggaaaaaagaaacagaaaatcggatttcaaaactaccctttaatgaaaagctgttaaagtgatttatcttaacaaaataatcatcaaattagaagctatatgtattcttaagacattttgaactccacattgtatcaaaattaggtagaatatatatattattatatatatattatctctctatatattctctatatgtaacctctatatatatatatactatatatattccatatatatactatatatactctctctctctctatatatatatataaaatcatagatacaccatgataatttactgagaatactaaaggagatgcgaataaaaaatatgtatctagtctatttgttagaaatcaggtatacctatctgcaacagacaaaaataacaatggcttaagcagacatggtctaatttgctcatgtaagtctgaggaccagcagaccagaacttgtctggccactggcaccgtggtcatctaaaacccaggctgctttcagattctcttctaccacctctgtgatggttcttattctcctagcccaagatggcattccagccatgccattcactgcctgggcagcaggatggaggcagggcaggcttccaatctttaatgacatgttccagaagttgcgcccatcacttctcattgtcacttgtcagaatttgattatacaaccccacctagaaacaaggaaggttagaaatgtaatccttcctctaggcagttgtgcaggctcccagaagaaacagagctggattattcaagaaaggtaagcgtcagaggtagtaggaaagtagcctgagtctggagagagtgagtagagcctccgtgagatcttgtcctctcttctagcccctcatctagcaagatttacagtgggttcctgtgcctgggatatagcactgtcttgatggttatagcaaaggtcccagtggctgtgcctggcttgaaagaagtcaacagcagcaatagcaaagctt

SEQ ID NO: 281852 - DNA, 1000 bp, Homo Sapiens
ggtcttgccttttaattctctttttgaggactgagagggagggtagcatggtagttaagagtgcaggcttcccgcattcaaaatcggttgcttactagctgtgtggctttgagcaagttactcaccctctctgtgcttcaaggtccttgtctgcaaaatgtgaaaaatatttcctgcctcataaggttgccctaaggattaaatgaatgaatgggtatgatgcttagaacagtgattggcatccagtatgtgccctcgaggcctcttaattattactggcttgctcatagtgcatgttctttgtgggctaactctagcgtcaataaaaatgttaagactgagttgcagctgggcatggtggctcatgcctgtaatcccagcattctaggaggctgaggcaggaggatcgcttgagcccaggagttcgagaccagcctgggcaacatagtgtgatcttgtatctataaaaataaacaaaattagcttggtgtggtggcgcctgtagtccccagccacttggaggggtgaggtgagaggattgcttgagcccgggatgatccaggctgcagtgagccatgatcgtgccactgcactccagcctgggcgacagagtgagaccctgtctcacaacaacaacagcaacaaaaaggctgagctgcaccatgcttgacccagtttcttaaaattgttgtcaaagcttcattcactccatggtgctatagagcacaagattttatttggtgagatggtgctttcatgaattcccccaacagagccaagctctccatctagtggacagggaagctagcagcaaaccttcccttcactacaaaacttcattgcttggccaaaaagagagttaattcaatgtagacatctatgtaggcaattaaaaacctattgatgtataaaacagtttgcattcatggagggcaactaaatacattctaggactttataaaagatcactttttatttatgcacagggtggaacaagatg

SEQ ID NO: 281853 - DNA, 1000 bp, Homo Sapiens
aaaggaaggagctttctttgctcactcgatgccactgaggctgctttttagttggtgctaacctaaatttcttcttgggtccacagaagttgatgttttaaaaactcaccaggaagctccattttgtgtcatccactgtcacaataatttttttaaatacctcaaaaacaggacatcatgacaacttcagtaaagtagattccatgagggtctgatacctgcaggttgtccgtctgatgacatacttgaccttgaaaaatctggggtcattttgtttttcattcttcagcagttaagatagcggaacgccgaaaggaaggagcgtagttggctgtatttcatgtttaagttttgcttttgaataaaatgtgaatttcctatgcccatctcattgagctttctcagtcattgttgctgtcatttgaaatgactccctcaaaacctagttttattagccagctgcctctgctgtagtacatggccaacttcaacataccctggaccaaaacatttttgaggtgcatacccccaacataagttacacagtcccacatccaggtgcacagagtgcgagtgcactccgcgagtgcggggggaggggcggccccctctggtgctcccagcccttcctcctgcagagctgcaggcaagagcagagcaataggcttctcccctgagcagagaccgcagcacagaaatgcaaggtctaaagttgctttttgcctaagaatcagcgagcgatttggcctacttcctcattggcttctattctgatatcagggatgctttttgtagtggtattgtttgctccctcttcgcgttttgactacccgtcattcaggggtaactcatcactcttcacacggggatttaaattaagaaactaattggctcatgtgaacattccaaattttcttggtttcaataccctttttttttcttttgaggggaaaagaggggagaaaaacaggagtgatgtcatttctttttcatgtattcc

SEQ ID NO: 281854 - DNA, 1000 bp, Homo Sapiens; identical to SEQ ID NO: 114826

SEQ ID NO: 281855 - DNA, 1000 bp, Homo Sapiens
gggccttatactgatgcgtgtgtgaatagatgcaacctgggttgaatgagtgaattatgataatgacagttaacaggtatggagcatgtactatgtgccagtcactgtcatgggctttacaagtatttcttcatgtaatcttcacaatatcactatgagatgcatataataataattacacttaatttacaaatgaagaaatggagtctcagagcagtcacacatctaagaaacagagctagcatgtatgcgcaagcccatctcaattcaaagcccctgctctcttcaccccctcctttctgccaccacacaacagtcccacaaacatgaatgttatgtctacccagcaaaactctgaagttttcaaggtgacagacacgacagcttttctaacttgccaagggggagttccctggataggtgagcctatgtccatggtgagtggtgtctgtccattggaagctctatgttcctggttggcggtgcctgtccatcaataaccttccaatccagtgtggggcccttggcagctctgacctcctagagcccatgaggttgggtggaatcaccatgtcccacaactccagggacatacagtgggaatggcaatgcccaaggatttaggcaagcaatcccatagccctgcccataaaatcttgtctccaaacacagcaagtgacaggggctgcatgagagtggagcagggtaagggagaggggggttcatagaattaaggcaggtgggttctgggttcaccagcctgcctaaagatggagggctccacctgcctccaccagggactgtttggaaatgaggcctgagacagtgtcctaggcctagcctcagatccaagcaggcctagcctcagatcgatgaggctgaggcctgcttccctggactaggagttgagagaccaaggttctgattccatcttaactgaacttccagcaccctttccctcactgcacctcagtttctttatctgtgaaatatgcatcat

SEQ ID NO: 281856 - DNA, 1000 bp, Homo Sapiens
ggagcataaacaagataaaaggcaagctgtcgaacctcccctgccctagcgtttggccagcagaaccctcagattttttctaaggactgccctttgaggagccttgccggcagtggaagaggaggaagagaattaaagcatgccacgaatgacagggagaacagctggttctgcattttgaagctccaatcgtattttcagtagtcagcggcttgggctcaggtaaggcccgttgcttgtatgctgaaaagtgtggcttaaggagcagaagctgaggctgtggagctcagtggaaccagcttcattccactaacaattcatccaaggagtggatggatgagagaaggtccgtggatcaagacaggtgctgcttcattcaccaatggagagctccattcttccttccccttgtggaatcaaaaccgctacaccttcctgggcagactccagcccagcctcaggtctctggtggactcatcacgatgaatgaagtcacccttcagagggcaaagtcagtggcagttatagaacaatggtgctggccccatctcgggacatttgcccctgtgaagttgggggcacaacatacattcatgaagcagtggggttttaccaaaataatgttccagccaaggagcagaattgttaagatattgagaccaatggaaatacagaacaaaatattaaatcacacgggcaagtaagatctgcattggaaaatctctgaacaatgctccggagacgatttcaaacagcatcatttttcaggatcttgatttcaaagaacaaggtttctcaacactatgtcctttatgttgataaaattgcacaaactgctgtagtgcaatgtccttgctgctctctgtcacggcttatcacggggctcattggcaggaccctgggagggtgcccagccgggataagcacagtcagtattggattcaacccaggaagatttccctggaggggcgttctgggaattcatggctctctaggatcc

SEQ ID NO: 281857 - DNA, 1000 bp, Homo Sapiens; identical to SEQ ID NO: 201477

SEQ ID NO: 281858 - DNA, 1000 bp, Homo Sapiens
cccacaccaaattttgggttctattaatgaggaagaagagggtctggctgttaggcaatagtgcagtgtttgccatgtcttcccgatatcaaatccacaaacactcatgattctgtacccatgtcctctttctttccttctgtaacttcaaaggcagtccctgtactctgaattccattcccctcacttctcaaggacttcactcctttatttggctattgcctttccttcctatatgatgaatcttcccctggctacagaatcacattctaggctacaaacatgctataggactgtcttccatcttttaaaaatccccttccttatggataaagaaatgtgataatgcaagccgagtaaaatgtcaagtagaaaatttagtgattttactgcaaaattctttcaacttttctatatgtaattacatactttatacaatgtaatgttggaaataaaatctcttccttgaccccaaatccccctccaaagtatttccctgcttattgttcaaattcattgaaaaagttccttcccctagttgctcacctctcttttcttattatttatactagtctggcttccattttctccaacagtacactgaagttgcttttttttttttctgagatggtgtctcgctctgtcgcccaggctggagtgcagtggcacaatctcggctcactgcaacctccacctcccgggttcaagcaattctccacctcagcctcccaagtagctgggattacagccgcccgccaccactcctggctaatttttgtatttttagtagagacggtgtttcaccatcttggccaggctgatcttgaactcctgactttgtgatacacctgcctcagcctcccaaagtgctgggattacaggtgtgagccactgagcccggcctattatttttatgtattaaattttttgtttattttgttttgtttgagacatagcttgctctgtcaccagtgtggagtgcagtggcacatctcggctc

SEQ ID NO: 281859 - DNA, 1000 bp, Homo Sapiens
ccaggaggcagagcttgcagtgagccgagatcgcgccactgcactccagcctgggagacagagcgagactccatctcaaaaaaaaaaaaaaacaaaaagaaagaaagaaagaaaaaagagaaactaacccacacggtaaaatagacttctgcagctcaccagccagctaataccaaacctgataacaacacactggtgtggccacaactttactcccgttttaaatggcaatccctcctcacctgaatattggtgaaaccttggctaggaacagcttggaggcgtcagtcctagtccaggcccctttgtcattatcctgtggtttgttcactgacaggtttctgtgtcctaagatagccacccattggacttgtcaccgtgtctacgctaacatattaatgacctaagcttttggtctcggtctctgcaattgcttgtatttgtatctctaaagtacagttctcatctctcttttgttgctttcatgatttctctatttgttactgcaatgttgcagtgcagcctgttcacccacctgcaatgcactgcaccacggaacgccctcctctctgggccagcatggtgggaggcgtgggaaggaaagatcccagactcaagggagcagggagcaggtacttaagggcagggagaagggatgcagtcagagatgaatgctcttagtaatgttttctttaaactagatgatagggacatgggtgttttgcattatttatgcctttttgtatattatatttaataatcactttttttttttgagacggagtttcgctcttgtttgcccaggctggagtgcaatggcgcgatcttggctcaccacaacctctgcctcccaggttcaagtgattctcctgcctcagcctcccgagtagctgagattataggcatgcaccactacgcccggctaattttgtatttttggtagagacggggtttctccatgttggtcaggctggtctcaaactcccgacttcaggtgatc

SEQ ID NO: 281860 - DNA, 1000 bp, Homo Sapiens
gacctcttcttcaggaaagctttcacactggtatttgtgatctcaccattatgacatccatccccctagctcaccacatagcacatagaatgatatttttgatttgtaagaggccatccaggtactaaggacccaaggcatacagattcacaaaattaactaatctttttgcctcagaataccaaaacaacaaaattataaagctgttatttggacaactaaaaaacaccaaactatctcattgcaatttgtattttagcagatttcagcaactatcctaaacaatgttattgtgttccattttaactgggataaatgtttttgtaaaaatacaaccatagaaaggcctctttgttacaaaatgatttgcaaagaaataactgctttgtttgcaagattaaattagtgttggcaaaataaagttctaaagataatactaaacactttatgcttatcagccaatatctacataagctaaaattgaatacagttcctttataatttgaatgacaggttttaacatcttctttaaaaccttaaaaatcactttttcgttaatgtattatttttaagtattgtaagtgtgccttacaatgatgattatctaactgctgtgatgaactctcttgatataccatgctaatgtttcatagaatttctcagataagggacaaataccaatctagggctgcctatacaaatgataacaattctgacaatatgcaacagacagacaagtcaaactatacttcagaaatagttttcaagcttgcaagtctttttttctggaaataccagtttaaagtgaagtctttaatgctctttacatctttgaggaattattagcattatcagaaccagaacgcccacctgttcccagggacaacctcaagaatccaggatgaatatgaagaaaactccattcattcgtctaatcaacattcatcaagtcctttcttatatagggcttggcaataagggatcgagtcgacgccctata

SEQ ID NO: 281861 - DNA, 1000 bp, Homo Sapiens
caaccccagagctctgcaatgagctccactcccaaggaattcatccactggtgggtggggctagagaaggggggccaccttgggcttgaaggcgatgattttgagcaccatcacaatagtgaagaggccagtgaagaccatgttgaggatgtccatggcatagttgaagggagcagtctgctcatagtgctgcaggagaaaatcaggttgagatggagcctgaggcagagatgccgccacacccaaccaaatattccctggcctgggctgaggcgagtctggggacttgattgcactgtgtattggtcaaacctcttgcactgtctgcctcccattatggatactggaaagtttagttcttgattactagcttttcttgtagttaggcaaggccaggttgactagtgagacataaacataaatctgctgttggttagcagcttgtgtaaaaaaaattttgctttccgatgaaaggatcaaataaggagaggccccaggtgcagctctccctgccttgagtgtggttttgatgcctggagctgtgatcatgaaacaacaatcatgaaaatgaatgccaacttgctaagaatggtgaagcagaaagatagagcatgggtcccggatgaacaatgaacaaacagcctacctctgcacttctcaatacatgaggtaattaccacagttcattgactccaggaggcacatctttttacattttagaatctctgaaattggggcgcattttataacaaatggcaacttacaatggccactggctacttttttttttttttccacattcttacatctccgaaatcagaatgcaacttacaagtactggccatagacttaaagaaatgtggcaaatgtctttatagcttaagttgctgttagttggcagggggtttgttatttgcagccttaaatgttcccaatggttcccaagggattatgtggagataatagggtcaggagtctggcgggggtcaggcagggatcc

SEQ ID NO: 281862 - DNA, 1000 bp, Homo Sapiens
atggactcagcaggaagcatattgtctggggattgttgggacaggttttggtgactctgtgcccttgctctctaacttctgagcccacctcccagggtaggcacctgggggcatgcaggtgcccacctcccagggtaggcacctgggggcatgcaggtacccacctctttctcttgggtgaggctctggcaaggagatctctctgctcaagcacagcagaatcatggcccctctccatgaattggaacttggtacaggttaagtatccctaatcctgaaatctgaaacacttgtggttccaagcattttggataaggcaaattcaactttcagtctcttttctgggggaaaaaaataataaacctagcctagccaggcgtggtggctcatgcttgtaatcccagcacttcaggaggctgagatgggtggatcacctgaggtcaggagttcaagaccagcctggccaacatgtggaaacctcgcctcaactaaaaatagaaaaaaattagttgggcatggtggtgggcacctgtaatcccagctacttcaggaggctgaggcaggagaattacttgaacccaggaggcggaggttgcagtgagccgagcttgtgccattgcactccagcctgggcgacaagagcaaaactcttcaaaaaacaaaacaaaacaaaaaaaccctggcccttgtttcttccagtttctagaggtatcagctcctagcagcttatgaacacatatgcttgcttggccaggcaaggtggtgtgtgcctgtaatcccagcactttgggaggccaaggcaggtggatcacttgcagtcaggagttcaagaccagcctgtccaacgtggtgaaaccccatctctactaaaaatacaaaaattagccaggggtggtggtgcacgtctgtaatcccagctactcaggaggctgaggcaggagaatcacttgaacccgggaggtggaggttgcaatgagccaatatgacaccgctgcagccc

SEQ ID NO: 281863 - DNA, 1000 bp, Homo Sapiens; identical to SEQ ID NO: 114827

SEQ ID NO: 281864 - DNA, 1000 bp, Homo Sapiens; identical to SEQ ID NO: 114828

SEQ ID NO: 281865 - DNA, 1000 bp, Homo Sapiens
ttctcttgggccaatgattcaagtgcaaggaatttattcgcaagatcattccagaaagctctagtaggagtgaggaagagtaggttgctgctgtgggcaactggggcttaatcccaaagagcatcctttgggagactctgtggatcatatccatgaattcccacagagagtggcgaggaagctggggtatttatccaccatctctcattcatccctcatatgttgagggttgctcctgccccacacaagagaaagttcccaggtggagagtctcaggtgttcagtcagatgctgtcagcaagcactagaatggtaagttccaagggtatacaggggtgcaccccccatacatccctcaactagcctgaaattccataaaagcagagactgggcctatataattcaccattctattctcaacaacttgtccgggagttggcacacggtaggtgcccaatacaggttagagggtaagggaataaacataaaataaagttgagacaaacctaaaagagactgtttcatcttcaaagacttagcctaaagggggtgggagaggagtaaacatttattagaagcttccacagaattcatgcttctgcaaacctgattgcccctaaatttagcacatcagtagttccaaagaagagactttaagacatgctttaagacaacaacaggtgtgaatctgcctcccagatgacaattggcaatgtctggagacatgttatattggttgtcacaactggaaaaggggtgctgctggtagctaatgggtagggaccagagatgctattaaatatcctacaatgcacaggacagctccccacagcaaagaatgatttggccccaaatgtcaataatgccgaaattaagaaaccttaggttagagggtggatacgtgaaccaattggagtcaatagaaaaatcaaccacaaggtcgagtgcgatgactcatgcctgtaatcccagcactttgggaggccaaggtggatggatc

SEQ ID NO: 281866 - DNA, 1000 bp, Homo Sapiens
gattccacagctgtctgaccgtaaagtcccttctacaaaccactccacactcaccgctctgaatgtccccttcccgggcctgtcaagtgcctcctggcagcctagaacaccaggctgtctctctgtcatttgtgtagcctctggaatctcacctcctactcgagaaagccttctcagatggttcgaggggagttaaggatggtcccgtctgaaggtgggattcttgcggtcacagtagtcagcaactctcaccctcacccgctctgtgaatgttcagctccaatgtgtgcgggtgggacccatgcttgtccctgccaggcttaagccctgtctgtcagcatcacgggtctgtctgcagctgcctcatttctgtggaaaaatgagcagcagcccactgggtatttccagtgagcaacggtgggttttatgtaaagagtcagaataagcacgtgtaaacacggctgtggccggcacttcaagagggctgtggcccgtgggccttgttttggagaaattcgctgagggaggggttggaaccacctcacagcaggagcaagcgaaggaacaggtgggaaaagtgcagacgcagaggatcaccgagctgtcgccctcgagtgtgaaaagggctgtcttggggaagtgggatttgacttctgctgtgggtccccacagaggggaacaaggagctacagacacacggttggggtgaattacaaggaaaagcagctatgtcaaatccttctttggaaacaggtggtgcctagtcagtcagaactatccccagatggagcgatctgggcacgggccgggcagccaccaggcaggggtgttgcagagggtccacctgagagggctcggctgctcttgcctgggaggtcctggagggcaggggcagcctcctccactgcccactgcccattcttcaagggggtaggggccaacttgactgagactaccagggtcctgccagaggcttcttacctactttatcccatctaat

SEQ ID NO: 281867 - DNA, 1000 bp, Homo Sapiens
ccagggacactgtagacctgggatcaccttagctggggttgcagcttaacttagtgcccttagcccaaggcttactctccttactacagcattgatagcggtgtttgccctcaccctgcttttctgttctgggtgctacttgtacacctctccctgcctccatttcccagctctggttttagctcaagggtggtattttagctgctgttgatattatggctgttgttatttagggttagagagaggttccttggaagtttcccttacttcttttttttttaacattttattgtggaaatttgcaagcacattcaaaagtagagagaataatttaatgaactaccatgtacccaccagctaactcgaacaattatcaactcattccaatctcatatcatctatacccctacccagttctccaacctccttcccttcacaccaccattggatgattgtgaagcacagcccaacatcatatgattttagccatacgcacatcagtaacaatttttaaagaataggactctattttgaaataatcagtatgccattatcacacctaaaaagtgataattttgtaacatcattaaatatacaatcagtgttcacatttccctaatcgtctcgtaatttcactggtttaattgttgaaacagaatccatagacgttctataccttgtattaataattggttgatatcactttctttaataatttatgtttcccaagctatctcttttttattcattgtgccttatttgtggatgaaaccagatagtttgtcctatacagtcatctctcagtaaccgtgagggattggttctaggactccctgcaggtaacaaaacccatggatgcttaagacccttatataaaagacatagtatttacatatcatgtatgcaggtcttcctgtatactttaaatcatctttagattacttacaatacccaatacaatgtaaatgctatataaatatttgctatactatattgtttt

SEQ ID NO: 281868 - DNA, 1000 bp, Homo Sapiens
ttttttttcaaatgatgaactaaccgttcattctagaataatcggataatctccatttggtcatgatgaattttctagttgttgtttgtttgcttaactgtatgcatcacaaatttaaaaatatttattcacttatatgtgtttatatgtcttaccatgagcatactagttttcaaaagcaaaaattatatatatatatatatattaattattttaaatactatagttagcccaattttaggcacagatttggcagtccatacatacttcaaaagaaaggaaagaaaagaagaaaaaaataacaatacaattttgttcatgacaatatatctctaatcagctatatgactaatattctgtgccttaaatgcacatacatgattcttgccagaagaagagttaatatttagccaattcattaaacatttaaataaagttgtcatatatagtaattaagcaatagctgcatattccgtataatcatattctaagacatccaaaatattgtctaaaaaacattccacacacagactccagagcactatatactcaacataataatagggtgaaatagataaataatatgagaattatattttcttgtatttcccaattagaatgcaaaagaataaaatgattcgttaataaaacatatgcattactaattcctcagtgaagcatcatttaacattttaaaatattctatgtcacatagatttattcatacattcattacacatgtatcatatgtgaatgtaacaatgaagtttaaactctttatataaatgtcagttgttagtcattagctgttaattattatgaatacattgttaaattactataaatctatcttactaatcttaggctgacccttttccctctttatttcataattatataaaactttgaaataaagtgcagaaatattctgacacggaaaaaaaatcaccccagcttgtataacaaacatatctatcttgcatccaatttttataagatc

SEQ ID NO: 281869 - DNA, 1000 bp, Homo Sapiens
caaggaatcagctgtgaaaagaaaaaaaaaacacaccaatattctgtcatttcttgctctttatcaagtcaacaggaggctgtgtgcaagtattgctggtgaaaagaatggaaatcataatcacaattttagtcctaataccaaatcccaaatctaattataattacaccctagcttttatccaaatcttgttacttgccagtcactatgctaagtcctctgatattgcttctgccagggttactggtcttaaagtttcaggacaggcaattctgttgtttcttccaacatctgtgaggtacttctcattgtcattgcttctttagataagagatgctttgaggatgaggatgtcttcactgaaggggaaatcgagggcagctgaggtaagccttccccttttagtctcagccctggagagtccgtgtccttgccggttatgcagagacaaataccatagctcagtactcaggatctgtgggcaaagaggatcaataaagcgtacttcattcattcatttcttcattcggtaaatttggagtgttctgctaaaactgaaggtcagtggaatatacccttcaagggaatgtttcacattggatgtatttcagcttgacatttgaacccatcaagatgggaccacatgaactcaggatcacagattggtaaaatgtgagagcgctgaaatgagaaatgagttagaaatgagattctagtccaacccattcattttacaggtatggaaatcaaagcccagaatacttatgggatgggcacatggccacccagctaatcagtagcagaatcacaacagggagcaattggcattaaaatctctttccattctccttatttgagactcttttgagtaaaccatactctcttggattggagtatctatgtatttagagatcttgaagactttgggcctggctatcagtctcttaaggcaccaagtaaaattgctgatactactttattaattagaagttatttgttt

SEQ ID NO: 281870 - DNA, 1000 bp, Homo Sapiens
atttatttcttcaagaacgtttatgaactatcaagtacacagtcgctccccatttcctattgactttaatacattcctcaaccagtacctcctaagggcatcagcgaggggaacaggtaaaccttacatggagtggtaaattgcggacatctgatcttttcctaaaaatgtaacttagtaagaggagggagaccagccaagggaactgttcactggaaaggaggagggaataggaagaggttatacagacaccgagagaaacggctctgggtaaagagagacccgctccctgagacaaagccagtttcccaggactctgctgataagatgatgcagtgcctgcgtggacaagtgcagactctggagctggctgggtttgaatcctgctctgcctttaaagtctgtgtgatcctgggcaagttactggacctctctctgcctgtgctttcttattagtgaaatgtggataataacagcatctacccttgtcttggcacagggtgttaaatacatcttaggaagtattatgtttgtcattgtgatgatgtgagataactagaaaatagtggtagacaaccctgacggcagaatgagctctgccccaggtggcggtcatggatgcgtggagttcagggtaaagcacagatctctgtgggcaggggttatctgggagacttcagagagatggggcttttctattgagtgtgaaaggagtttggagtggaaaatacatcacaggaaaacctgtaggcaggcagggatcagctaggaaatccttgtcaggtcaaggtatggggtaggctctgttaccagctgcagagctggtggtgatcccatgagtgaaactgatcaatgcctattctttaacaaaaaagctacaggatgaaggagatgaacttcacagaaatgcaccaggtggcaggtgcagcatgatgcccccagagcatcttgatgccccctccctgaatagcatttaccatgtaaccaaaattactttcac

SEQ ID NO: 281871 - DNA, 1000 bp, Homo Sapiens
ccagtctgtttcaaataaatgaactcaatctaaattaaaaaagaaagaaatttgaaaaaactttctctttgccatttcttcttcttcttttttaactgaaagctgaatccttccatttcttctgcacatctacttgcttaaattgtgggcaaaagagaaaaagaaggattgatcagagcattgtgcaatacagtttcattaactccttcccccgctcccccaaaaatttgaatttttttttcaacactcttacacctgttatggaaaatgtcaacctttgtaagaaaaccaaaataaaaattgaaaaataaaaaccataaacatttgcaccacttgtggcttttgaatatcttccacagagggaagtttaaaacccaaacttccaaaggtttaaactacctcaaaacactttcccatgagtgtgatccacattgttaggtgctgacctagacagagatgaactgaggtccttgttttgttttgttcataatacaaaggtgctaattaatagtatttcagatacttgaagaatgttgatggtgctagaagaatttgagaagaaatactcctgtattgagttgtatcgtgtggtgtattttttaaaaaatttgatttagcattcatattttccatcttattcccaattaaaagtatgcagattatttgcccaaagttgtcctcttcttcagattcagcatttgttctttgccagtctcattttcatcttcttccatggttccacagaagctttgtttcttgggcaagcagaaaaattaaattgtacctattttgtatatgtgagatgtttaaataaattgtgaaaaaaatgaaataaagcatgtttggttttccaaaagaacatattgagtaaaattccttgcttcaatgctctttgcaatataaatatgcatctctaccagccattagaccaagtgcctctgattagatagaaattatgcaaaaagggcagtttggtgtggtagaagagcagagaacgagg

SEQ ID NO: 281872 - DNA, 1000 bp, Homo Sapiens; identical to SEQ ID NO: 206227

SEQ ID NO: 281873 - DNA, 1000 bp, Homo Sapiens; identical to SEQ ID NO: 201470

SEQ ID NO: 281874 - DNA, 1000 bp, Homo Sapiens
atccgcaggatctgtagaagacattttgggaaacactgtcttaaataaaaactcaatgtttagttgtttttttttttttttactagttcagcataagggattctaccagtatgtgctactactaacattcttcatgtccatgcagaattacttacagacactctttcttggtatcttgaataaattgtgtaaattattttgaaaagtggatatttctatatgccttgcttataatacatcagggattattattcttattaataacatgttggcctattatctggatgtcccttgcctagagcaggaaaaaagtctcagaattacctaaaaacatactttataactttaagagatttcttaggatacatcttcaggggcagatttcataacaacatctcaaaaatttggggaaacacaacgttgaaaacttcctaagaaaaggaatcttgcccttgaatcttctgaagtacctagcacagtgtcttcaacatagaaggtacccaataaatatatatcaattcattttttaatgactttcaacactcccatgaaaacaccgtagtctgcttttcctgaaaggtgactgtctaggatgctgaatgagccaccactccgtagctttatatattcagcaacatttccatcatagaatttcagcgttagaagggatcttagaggtagattatccaggccatcccctactgcttacattcccctccccctggccagttttatattttaatcacacattgaaaaattcattaacttattctgtataaaactgtcttttaagaattatcctttcaaaataaaaatgttattgtttcactagtttatttttccaaatgattttttttgaaatctcaatatgagtactttcattacaagatactcacttcacatttcaccaaaatgcatgggttcacataattgttttggcagatatgttgacatatctgaatttataagacactgctacttaaactaccatctgagatcg

SEQ ID NO: 281875 - DNA, 1000 bp, Homo Sapiens; identical to SEQ ID NO: 206229

SEQ ID NO: 281876 - DNA, 1000 bp, Homo Sapiens
aggagcacctgggggattttagggtccagacaacattctatttcttggcatggatgcagttaggcggttttctgtatgtatattttatttcacaatacctagaaaataaaaagacttgccccccaacaaccagggtgtaaagaaaggagcatctgggaaattatgagattagtgaatggagtattgaatttgtccccataggtgggagtgcaagaccatgagtgaccacttatcaaacacacctcagtaaacagtcaggagagtgaggagtgtggtcctttcacctgcccaggttgtttctgttagattctgggcttggtctctggagtccaagaggcaggccccagtgaggtcatgcacttgctgtctgattttggccaagtcacctccctttgtggggactgttcctcatttgtttgaggggaatgttgatttggatggggattttccaaacagagctccttggacccttccctctaaggtctctggaaatgggaaaccctgcagaggggaggataaatgggccaggattcatcccttgaaccctgttcccaacagagccctctgtttttctcttctttacaacttggacctcccatgggactttgtttgaaagggagacttcattgctaaaagcaaactaaactaagtaggctaaaaggcaacaaactggagaaaatgtttaaggtcttctctagatctaagatcctatgacgttgaggaggtcatccaacatctctgagttttctctttcttgtatataaaatggaagtagctggcagggcagggcatgtgtcgttgatatatttttaatcctggtaaaaggaggaggttcaaggcagaaaactcatcaaagcttaatgacaacaatagcagctaacatttgtgaggctctaaggtaaaacccaaggctaagactcttcatgcaaactaggtcaagcagcaagctacaggttagaaacaggcaaggcagcaaaacagtcacatgggtgaactctgg

SEQ ID NO: 281877 - DNA, 1000 bp, Homo Sapiens
aggtgtctgcgcatatgactcatggagtcttcgtgggtctctccgaaaccctagaacagtttctcgaaagagcagccacacagacaccagaggcagaggcatttgggattgatctgcgctcgaagttcagagtctagggctgtcgtgggctccttcgtggactcctgcgtggacactctgggcctcttctaatgccagcctccaagggcctggctgcaagattgagatttgtctgtgctgtgcgagttgctgaagcgccgtgggctttacgtcagtaggtgtggcctggatgctggcttggaggcgtggttccgggggacgtccagggccagggttggggtaccacgggcctggatgctggcttggaggcgtggttcccgggaatgtccagggccagggttggggtaccacgggcctggatgctggcttggaggcatggttccgggggacgtccagggccagggttggggtaccacgggcctggatgctggcttggaggcgtggttctgggggacgtccagggccagagttgaggtaccacgggcctggatgctggcttggaggcgtggttccagggaatgtccagggccagggttggggtaccacgggcctgactcctgatgatcatcttggggctctaagcagaggtggcgactgtctttgtagcggtggacaggcaagggggtgccagctgtggtgatggaattggtctgttgatgaaaagtattaaatctgttaagtggcgaggaagaacttaagttcagaaggaatggcacttctgtatgagggttttttagtgtctggtcacacgttccactgtgttacattttctccttctccttccaggtactctctgaagatggcagaagctcaccaagctgtggcctttcagttcacggtcactccggacgggattgacctgcggctgagccatgaagctcttagacaaatctatctctctggacttcattcctggaaaaagaagttcatcagattcaag

SEQ ID NO: 281878 - DNA, 1000 bp, Homo Sapiens; identical to SEQ ID NO: 198445

SEQ ID NO: 281879 - DNA, 1000 bp, Homo Sapiens; identical to SEQ ID NO: 195263

SEQ ID NO: 281880 - DNA, 1000 bp, Homo Sapiens
ggtgcaccaaaagagcccaaatctgggacacctcaggccagagtgcagagctgctcagcggggccccttcccctcccttgcagtaagctttaagacctcatgaggatgtttaagatttctccctttgggccaggagcactggctcacgcctgtaatcccagcactttgggaggccgaggcaggcagatcacaaggtcaggagatcaagaccatcctggctaacacagtgaaaccccatctctactaaaaatacaaaaacaaaattagccgggtgtagtggcaggcacctgtagtcccagctacttgggaggctgaggcaggagaatggtgtgaacctgggaggcggagcttgcagtgagccgagatggcaccactgcactccagcctgggtgacagagcacgattctgtctcaaaaaaaaaaaaaaaaatttctccctttgctcggcaggttacacagtccagcaagctatgtgcccgagcttcccaaaagcccccaatcatttctcattcattaggtcctcctcttgcacttcagggccccatctcctgactcccacccacaccccaccatccagacccatgtcttctcccacaccaacagatggagcaaccaaacccatccccaggatcatagacagaggctaacaaatcctgcctcaggtttatttgtacaaatagcacaggaggaccccagccccatgcagatggtagcccaggggcgggggtggggggtcgcaccagtccttctgtcctcatgttggcagagatatctactctgaagcctttgtaggggcctgggtacgtttgggagcctgagctggaactgaagctggggctgcagcctgggccttggtttgatccttggccttggccttggccttggcctttggccggcacagcctgagccccttggcaatacgggcacgagcacgcttcccaagcttggggtgggcaatgtaggcaagtcgatcgagcttgcggctgacaccctttgggatc

SEQ ID NO: 281881 - DNA, 821 bp, Homo Sapiens
atgggactcttggtatttgtgcgcaatctgctgctagccctctgcctctttctggtactgggatttttgtattattctgcgtggaagctacacttactccagtgggaggaggactccaattcagtggttctttcctttgactccgctggacaaacactaggctcagagtatgatcggttgggcttcctcctgaatctggactctaaactgcctgctgaattagccaccaagtacgcaaacttttcagagggagcttgcaagcctggctatgcttcagccttgatgacggccatcttcccccgagctaagagaaatggtgcatggagacaaaaacatatccaggcatatgtgctccgccagaggtgaagacagaggattgtggggacacagagaaggcccttcagctggaggagtgatgagagattgactggggagacgtcctggtgaagtctgatgcctgaactatgctgggaaaggttctccaagccagcacccatgttcctggatgactcctttcgcaagtgggctagaatccgggagttcgtgccgccttttgggatcaaaggtcaagacaatctgatcaaagccatcttgtcagtcaccaaagagtaccgcctgacccctgccttggacagcctccgctgccgccgctgcatcatcgtgggcaatggaggcgttcttgccaacaagtctctggggtcacgaattgacgactatgacattgtggtgagtcctggacgcacaatatccagcgagagaaagagtttctgcggaagctggtgaaagctcgcgtcatcactgatctaagcagtggcatctga

SEQ ID NO: 281882 - DNA, 1000 bp, Homo Sapiens; identical to SEQ ID NO: 201622

SEQ ID NO: 281883 - DNA, 978 bp, Homo Sapiens
ggacagaccctcttcctgcaatgccagtactcacccaagagagggtcctatcagcccaaatcctggtgtcagcagacatctccaagtcggtgtaccttacttgtcaccagctccaagccccagacagcagttcagaagtctcattacacaatctgggacaagccaaatgctagcatcttcaaaatcaccatgattcagctgaaggaggacttgggatcctactggtgtgaaatctacaacacttccaaaaacatcgtcactgttctcagagatgtcagcctggtggtgtttgcagccccaaccacgtctcctacgtggaccctcacctggctcccaacaaacacagatggggccatccagttgcaggaaaacaagctcagggattccacagaatctgcattatggaaatcaagtgcccccatctgccttggctcagctggccccaaactcctggtctctgtgttgtgtggactcctcctggccaagggcctgatgctgtgagtcctgtttgtgttcctgacctgcaggtgccacaggacagcagtgatggaggtttctgattgtatcagcccagccttgccccaggacccttgggtgcatgagtcacagcatggatccaggatgaatcccagttcttcccctgcccagctattgggagctgccctaagcgttgccccccatttgtctgtgaggaaaggccagcactaagcctattggagagaactttcagcccctgatctccctggtggtgacccctcacccctgcactgacccctcttagatctacttcccctgccctgactttcgccattggaaagacctggggtgggggtttctgcatccgggtcaacgctcagctcagcatcttcagctgtgcccgggctcctctccagcactccgtggttctctcagccccacctcagcaggtctccaggatgcctcacattttccctgtttgttagtggtctacccgagagt

SEQ ID NO: 281884 - DNA, 1000 bp, Homo Sapiens
taaaatgaaggaaaggccaccagccaccaagttagaatgagaggggctggaattctagatattaccagccattattccggaggtcataagatttgcaacttccccagttactcttaaaggtaacatcagccttttgagatgtcttttcaggtttctgtatttctaccaactggacggccccacctggacctgccaaccagttctgtggtctccacccaggaactgactcagcataagagaagagctttgactccctgttatttcatccctgagccaaccaatcagcactcctgattcactggccccctacccaccaaattatccttgaaaactctgatccccgagtttttggggagactgatttgagtaataataaaactccagtctcctgcacagctggctctggctgaattactctttctctattgcaattcccctgtcttaataaatcagctctgtctaagcagtgggcaaggtgaatccattgggtggttacaaatttcgaggctcatccaggattgcccttgtggctacctgcccgtggttcagtagccccctccagcaatggatccaggggccagcccaagcagccacctagttcacttggactgggagttgactctggtactctctctactgacagggcactcccgacccaatgggcatggatttaatagagaaatagtcctggggagacgtcccataactgtagccctatcacagggtgtctgtctatagccccattgtagggtgtctgggttggtgagtatcctaggtgctgccaatgtctccttccttttcgcaactagttctgtagctccattgtgaggtgtctgtagctacaacatggggtgtctgtcttggtttggctcctggggggtctcggttggctctgcctaactagtaaaaagagtcttggttcgggagacttctcctcaatcaagaagatttcagggagatttctcaaacagagaataggaggatagtttggaagagatac

SEQ ID NO: 281885 - DNA, 1000 bp, Homo Sapiens
gcagcggtggctcacaactctaatccctgtactttgggaggctgaggtgggcagatcacatgaggccaggagtttgagactggcctgggcagcatggcaagacccggtctctactgaaaaataccatggtagccccagctatttgggaggctgaagtgggaggattgcttgagcccaggaggcagaggttgcagtgaacccagatctcaccactgcactccagcctggtcaacagagtgagacctgatctctaaatacataaataaatagagatagatagatagatagatagatagatagatagatagatagatagatagatgatagatagatagatagatgatagatagatagacgataaacagatagatgataatacttatatttgaaggtgggaaaataaaatgagttcattttgtaagtctctggaactcccctgaattccttatttccacttctggttttatctagtaagtctgagccctgtggttaggtaagttccattcacgtaatgaaaagtgcagttaacatgctagttaagttgtgatttttagtcctaggtgttgagtcaatgctgttgcgagtcctattgtgtcttttaaagaaaaggcatgattactgtcttccctgaggcatctagggccttactttcagagaagtgaaggatcttagtcattgcacttttatagttagaatgactcaacctgagtgtgtgtaatgtagggaagctgcatgtttcatcttttaaaatgcaccccccaaccagtaattgcaattaacatacagagatactctacattcagtttaattataagcagaacactatcttccactagtgaatcaaatatggcaatggaaacatttttttcatgcttaattttggtcacagagaaatcatgcatttgctaccacaaaacctttctatcacctgctaatgagattggaaatttgttctagggagtccacggcctttgcggggaaacatgttgtattccggaag

SEQ ID NO: 281886 - DNA, 1000 bp, Homo Sapiens
aggagagacctcactagccagaggttggataaccactactccctagttccttaacccaataaattagattttttccttcttttgagacagggtgtagctcttgtgttgcccaggctgcagtgcagtggcaccatctcggcttggtgcagccttgacttcctgggctcaagcgatcctcccaactcggtctcctgagtagctgggactacaggtgcgtgccaccatgcccagttcatttattttttgttttttagacggggtctcactatgttgctcagtctcgaactcctgggctcaagcaatcctcctgctttggcctcccaacggacagggattacaggcgtgagtcactgtgcctgactacactttctttagtacaggatataaccaacatcttgcctcctaagagtcaggggcaggagtataggtgattgtacttcaggtagaggaaagatctcattcacagaggaggggagagtagattttgttggcatatagtggcaaattttattaaggctctgggaaaagtgctgatgacattgggaaaagattcagtttttacccagtaaaatattaaaaacttattttgcttaaggccatgtcctctaattactgaaggggctgatttttttttttttttaaatcatcagtcataatagcacctattgaagggcttactgtatgccaattactgattaggacactttacaagcacttatagtattaatttttatagcaaccatatgaggcaggtacactattggcctcattttgcaaataagacaaacgcatagaggttaaatgcccaaagccacatggctactaagtggctgagcctagatttcacccgagtgcccacatgtccagctactctgctctgttgcctgcaggatcacagtgcagtgttgctcactgcagctgtgcatgagcaaggcagctgagtgtgaacaaaggggaaatgtaacctaattcttctaattctatgatttgatgcacaaag

SEQ ID NO: 281887 - DNA, 687 bp, Homo Sapiens
gtgagccccacaaattctggacaagcctgaaaaggccaactgttccagaggacacaccacttgttttaccaaaagtcagtacctgacttgactcattaagccctctgaggcttttgtttcatcacctcctcattggcagataagatccttcaaggatgtttttcatcctttcatgtttttgaaatcatccttttacttcacccagaaatcgaatggtattgctcacatatagcttaaaaagtagcaaagctattggataatgtctcaaaagggagcatattaatctaaatatgttctttagagaataagactacccttgataccatgagctatattacagggcttaagttggcttttgacactgtggacatattgtctgagggaccgaaaaatactatttagactagttctcaaatgaggaactgtggaacattaaagtctaagccctttacaccatgccctacaactctgatttgatagctcatcatgtgattctaacatgcagctagagatgagcaatggatttagagcaatggtcttcaaacttcagtatggctttagcaccagccctgggacagagaaggctgccagaaattttcctctattgcaactgattttctgtggctgactgacttctttatctagtaaatgactgtccctgaattcactcttcctttctgttaccag

SEQ ID NO: 281888 - DNA, 1000 bp, Homo Sapiens
atggggagttagggctggaaatacttatttagctcaagtttaccaggtgattttgatatagttatttagtatcacttgacaacgatttatttaggggagtgttttagatgctgggaatatgaagttccaaggaaaagaaaggatttacaagccagggttaagatggcaacatatgtatgttatttgctgtttattagagaactatttattctactcttaactatgggtaaggcactggatcagattctagatatgttgctgaccaagtaaacagaaagcatagtcgataagtgcaccagtaacaagttcaaggtgcttagagggctgatttgaaggacactaaatttagtcacatgggagtagggaaaggcgaatgtggagggaagactaggagttcactaagtacagaggctgagaaaatagtgttcactaagtacagaggcaagaagatagtgttcccagaaggaaatgacatgaacaaatcaggagctaagacagtggggagcaggatctgcacttgaggagaattgtatgtagttctttgtgactgaagggaagagttcaagggtggtcacgcaaaagaaaagattggagaggtaaacaagctctgtgacaaggtccttgcatttcactttttacctccctccaaacagggagtcattaaaagatggtaaatgggtgtggcatgatctgatttgagtggcatcggatgatgattatgactgccttgtgggaaggctggactggagacagccaggtaagggattatattggcctttgaggctcagatagtgactagagggaaggagataactagatttgaaaaatcaagagggaaatttgacaggatttagtttgatgtcagaaatagcggagaaggaagagtctggtttctggcctgcgtgattgggtagatatgttgttcattagggaaggaacagctttgcaggcaagatgggaattaattctgttttgaatgtgttgagttcagagtgctcat

SEQ ID NO: 281889 - DNA, 1000 bp, Homo Sapiens
cacactgatggccaggccagcaccagggagatactgcaggagtttgaatccaagttatctgcatcacagtcttgtgtcttccgagaactattgagaaatctgtgcactttccatagaacttctggtggtgaaggaatttggaaactcaagccagaatactgctaaacaacattgcttcctaaactttcaagtccctttttctaacgggcatttctgattattaatttattattaataatcatgtttgtcaatggaagttggctgcacttgatgtttgtttgcatgatgtctacctcagaattaaaactttaaggaagaagaaactcttctctgaaagttaaaagttttaataatgctagctaaaggagaaaatacttggattgatttttttttttttggcaatctaattatattgtaaatcaggtacctaacagttactccttggagcacatttgttcctttacccaaaagatgctgtcagggagcacagttagaagtttgcagaacagaaatctcaatatttttttttattggtgctaaaaacaggtcttacattcagtcagacctgttcaataagttcatcaatatctgataacagcattattttgatgcttaaactttaaacatttatatttaccatttgccacccacaaaggtcaggtttgttatttgttgtttgataattatattaattttcttggaaagatcctcttttcaaggtactggtaaattggtgagtatttttattagtaaagcatgaaatagtatggtaataaatgataagacatgtatttgtggaaagctgtagggtattcagtttaccctggctttcctttaagcagagggcatctttttctctcctacagtcacaaaatgtgttatcattaaaaaaaatcaaattaaagccaaaagtaggtacataaaaaccacacacatgcatgcacacaaacatcactgcagcccacagcagacccagccgttgttaccatgaagtgacacc

SEQ ID NO: 281890 - DNA, 1000 bp, Homo Sapiens
gaggccgaggcgggtggatcacaaggtcagcagatcgagaccatcctggccaacatggtgaaaccctgtctctactaaaaatacaaaaattagccgggtgtggtggcacatgcctgtaatcccagctactcgggaagctgaggcaggagaattgcttgaaccagggagttggaggttgcagtgagctaagactgcaccactgcactccagcctggtgacagaacgagactctgtcttaaaaacaaacaaacaaaaaaaaaatctgttagataagctatcaaaatgcagctgttgttttgtttttggctcactgttttcgtggttgtaactaatatgtggaaaggcccatttccaggtttgcgtagaagagcccagaaaacagagtctcaagacccccgctctggactgtcataagctagcacccgtggtaagcgggacgagacaagctcccgaagcccgccagcttcctgctccactcagctccgtccagtcaacctgaacccacccagtccagctgtctgtgggaatggtggtgttcttagggacagactgacaccttacttgtcagtgttcctccgggccccatttggcagctcccgtatcttttgttatgttgcttttaaagatatgatgttttattgttttaactcttggtgacagtagatgctctctggagcgcagacgaggcacatgtgtcttcatagcctgggctgggtgggagccagtcaccctgcggatcgagagagggggtagagtcttcttcaaatggcagttttacttcaaatggcagatttcacaagagttggttattttttacaatggtttaggttgttaagtctcctttgtatgtaaggtagttttttcaacatctaaaatttttgttttagccttcaaaaccaacttaccaacctcagtccagctgggaaggcagcgttgattatggtagtttgtcaagaatatatggacctggaaacactttctctctctgtccacctggtag

SEQ ID NO: 281891 - DNA, 1000 bp, Homo Sapiens
accgcgcccggcctaaaaaccctttttgacctgctcttctggaactcctggagaaagctgtgtttgtccctgtccctgagaaaggatgggagtaggcccctgtcctcaggataggcatgtctgtgcaggtgcccatctcttcttagttgctgttatctttgatcctggtgttttcaccatcatgcagaagaaaccaggcgccttccagacctctgggtcatgtccttcagtggcacctagcatcatcctgtcctgggcccagcatggcccttgtggattgtgagagttctgtgggctctagggaggatggctgtcctacccaagggtcactagcacaggcacagccaccttgatttgctttggtcctctgcgtcctgaagcttggcccaggatgagaccctgcatttcaaaattccctcccaccctgagttagatcccatgtcccccccacttcacagtctcacagatacactgagtgagctcctcagaggctgtgctaatgttactgttgctcttggctgaagtttcaatgccccaaagaggcagccagcttctttccctgtggtgtcacccagtgctcaccaacaggtcactcttgtggccaaccatcaggacgaggatgctgaagggtttcactttccccagaacctcctgatgccagtggtgacactcataaaggatattctgttggtgataccaaacaccaaggggcctccagctgggtttcagtagtacgatgagtcactgaccttggcagccaaggaatctagaattagttttgagatctccactaagacagaagggaacacaggaatcggggaagtttaatggaaagagctgaggtagaatcaaaagaccccagttcttgatttgcagtgtgacaagtaagtggcgtcatctatctcagtcttgtcctatctgcatattgagggacttgttcattcactcagcaagtatttataatcccatgcctgtcctaagcagagggatacaatgatga

SEQ ID NO: 281892 - DNA, 1000 bp, Homo Sapiens; identical to SEQ ID NO: 206231

SEQ ID NO: 281893 - DNA, 1000 bp, Homo Sapiens
attcatggaaggacgggccatcttgtcacttgttttcactgtgccagaagactaaagaaggctggggcttcatgccctatttgcaagaaagagattcagctggttattaaggtttttatagcataatggtagtacgaacataaaaatgcatttattcagttcacttaccacattatttgaaaatcaatcctttatttaattttatttccaacctgtcagagaatgttcttaggcatcaaaatccaaggtagctgtaagaaaaatactggagctaacaatgaagaacagaagtaatctgattagtcaaattattaagtgccatggattactttatgcagcagtcaggtacatagttaggtgaacccaaaagaaaaactcttgaaaacaagagatttcttccatgcacatttacaatattgaggtataattaacatgataaagtgtttccttctaacgagttgtagaaatctgagtaaccacccaaaaaagcaatagaatgtttctgtcaccccaaaacactcccttctgcccctcttcagacagtccttcagctatttcatggctctcaccctagttttttttttttttgcacttttttttttccgggggtataggggaggtgtggggcgacagggtctgtcttgttctgtctcccaggctgaagtgcagtgcagtggtatgatcatggctcactgcagccttggtttcctgggcataagtggtcttcccacttcagcctcctgagtagctgagactatagactagcataaccacactggctaattttttgtggagatgaagtctcactatgttgcccaggctggtctcgaactcctgggctcaaacaatcctcccgcctcagccttccaaattgctgggattatagtcatgaggcacctagtctggcccttttgcaagactttaatctgaaatctaaatttttaaaatttaagtacttacaaaggatatactatccaacatattgcatattatatatgtg

SEQ ID NO: 281894 - DNA, 1000 bp, Homo Sapiens
aagctgggatagcagacccctcagcaccacccattctcctcatccctctgctctctggcctccagcctcccagcagcatggctttcaccggcaagttcgagatggagagtgagaagaattatgatgagttcatgaagctccttggtgagtgagctcctgggtatcccttcctcggggttggtttgtcacagccagctctgggccaggaaccctaaagtagaatgggacaggatttcatccattcattcactcactcactcattcattcattcacacatttgttgagcaactgctttctcccaggctctgaggataataagaactaagacactctttaacttttttattttattttattttattttattttattttattttattttattttattttattttatttttgagacagagtctcactctgtctcccaggctggagtgcagtggcaccatctcggctcactgcaaccttcggctcccacgttcaagtaattctcctgcctcagcctcccgagtagctgggattacaggtgtgcaccaccacgcccggctaattttttttttttttgtatttttttagtaaagatggggttttaccatgttggccaggctggtcttgaactcctgacctcaggtgatccacccagctcgacctcccaaagtgctggaattacaggcgtgagctgccgcacccagcatagacactctttgactttaaaacacacatagaatatattagtatttccactttactgatggaaaacttgaggcccagggaattaactagtccaaagtcacacagctagtaattggtaaagtggagacttggttggtgaagtagagatttgatgtttatttagtcaaacatgtatttatttttattcatttatttttgagacggagtcttgctctatctcccaggctgaagtgtagtggcatgatctcagctcactgcaacctccgtctcctgggttccagcaattctcctacctcagcctc

SEQ ID NO: 281895 - DNA, 1000 bp, Homo Sapiens
cactcacattctctttgggcctcagttttatcatttatacaaggagggcttttctagctgtaacaatctgtgaggattgagaggataggctggtgctttgaagaaaggccttgtaagtgacaagacagtcccctgggaagaaagagaaaggaaatgggctattgccaaaggacaggtggcgttagatggctgtgagggtgacctggtgagggaagggttggaatgagctgctgcaggaggccaagggatgcctgggcctgggctgggctgggctggcttaggctcaggattgcctggggacagtaggagcatggcaggagctggggcaggtgcatagcagtgcagtgggaagggacagaggagatcttagaattttgaggaaaatctgggacttgagacctggattctaacagaccaactgcatgtgtgtctgtaggtctcagtttccacattcatacagtgaggktgttaagtcaggtagctggagacttcccatcgcctctgacacttttggaggtgatatgatacagcccccgaccaaaccaggctttgtggggggtgagagaatacagacacaagtggcaggattcagatggaagcttcgcaaggctgggggccgaggaccacccacttctctttcccagccctagttctgggttccccagtggggcaaggggtggtggaggcagtgcccatgctgggctgagcctgcagtttttgtgagctctgggcttgtctccatgggaacaggggtgccttcttagtgagctcatttcacacagatcgagggggtatgcgtgggggagttgtgagtgagctcagctccttcaggcctggcctctcccagaacagagtgaagcccctgccctggacccctgctcccttctacccttgagggccaccaatggaagagcccgcccttcattctgcagctcctgcggccaggctgagctctgcccccaactttgttttctctcatgttctcaatacactctgcctc

SEQ ID NO: 281896 - DNA, 1000 bp, Homo Sapiens
tgggtgaagatgaggatgaatttgagaatttcatgctgcctcttacagttgcttttgaaacagtattacaaatattcaacaacaactttaaacaagaagatgtaaagcgtatgttgatcgggctggcaagagatcttcgagggattgcctttgcactgaacacaaagaccagctacaccatgctgtttgactggatgtacccaacgtaccttccccttcttcagaatgctgttgaacggtggtatggagagccaacatgtacaactcccatcttgaaacttatggcagaacttatgcaaaacagatcccagcgtttgaattttgatgtatcatctcctaatggaattcttctcttcagagaagctagtaaaatggtttgcacttatggtaatcagatcctgtcccttgggagcctctcaaaagatcagatttatccaatgaaactcaagggcatctccatctgctattcagctctcaagtctgccttgtgtggaaattatgtcagctttggcgtcttcaagttgtatggggacaaccattttgacaatgtactccaggcttttgtcaaaatgctgctgtcagtgtcccacagtgacttgctacaataccggaaactgagccagtcttattatccactcctggaatgtctcactcaggaccatatgagcttcatcatcaacttagagcctcctgtactcatgtatgttctcacatctatctcagagggactcactactcttggtaaggatcatagaggacattgtttccataggaaaaacttgattatgggcttttaatgtatgtgattattgagactatcatcctacaaagggggaaaagatattgtgaacccaaactgaaagattataattattacttgcaagtgggaaaaatgtatttcttcatattttgatacatagtcagttatgttttaatcagctttactgaggtataatttacatacaataaaattcagtgactttaaaaaaaaaaaaaaaaa

SEQ ID NO: 281897 - DNA, 1000 bp, Homo Sapiens
tttttgttgtttcaggcattatgtataaagcaacgattattttatggaccaagttttcatgtaactgttgcagtgaaagtgcaatatctgacccccctgctcccagcaggaagttgcttggcccgacaatcacagcccctgtcaggggccctgtggccagtgcctcctcctctcttggccccaccttatcctgtcttgcctgctgcctgggagaccagccatccagagaagcacctggaagagtctcgggccctcctgcaataaaggccgggaggccctgtgggcagtgggctcagcctctccccaggggggcagctcccccacggctcctcactccccgcctgcctgcccagccgccagccatgccaaggacaacagcaatagtcccctggggctctcccagcggccctcagccatagatggcaaggtgggcagcctgcccccccatgggaagtctcttctgtatccaggtctgctttccacctcccttcagattccttttggcacattctcctcttgaggaagtaccagtctttctgaaactaagagagggagggcagcgtcctttaaaaataccaaaaatgtttacagagttgggtgctgagctgcagggctcaggcctgaccagtcataaccaaagggtgaggcaggccttgctgactgccaccccccaggcctgttagaatagaagccttagtcccactcccaccacacccccacgccccaccacctgccttctctttgatttctaaagagggattcagcagagaccccccacccctccctggctcggtctgagtcccactgcccaccccatcacagccttcacgtctcagcccctcccgtctggtctgtccgtgtgccgtctgtttctctgggccatgtgtgagcagtgtccccatctccccatccgtccctgctgtccccgcatcattgggcctgagtgtgctctgtatacaacgtcatgtctgttacaccaattaaagaagcgggaaggctt

SEQ ID NO: 281898 - DNA, 1000 bp, Homo Sapiens
taaactaaaatatgagctgtgtcgtgacctcctgtgtgtcctgatgccagagcctgatgccgctgcctgcgctaatcatcccttgctccagcaagatctggttcagctttctcttgattggaaaacagaaatccctgatttagttttgccaaatggagttcaggtgtcatccaaattccagactaccttggttgacatgatttactttcttcatggaaatatggaagtcaatgtcccttccctggcagaagttcagttactgctctacacaacagtgaaagtcatgggtgactctggccatgaccagtgccagtcgctagtccttctgaacacccacattgcactggtgaaggaagactgtgttttttatccacgcattcgatctcgaaacatacctcctccgggtgcacaatttgatgtgatcaaatgccatgctttaagtgaattcaggtgtgttgttgttccagaaaagaaaaatgtgtcaacagtagaactagtcttcttacagaaactcaaaccttcagtgggttccagaaatagtccacctgagcaccttcaggaagccccaaatgtccagttgttcaccaccccattgtatcttcaaggcagtcagaatgtcgcacctgaggtctggaaacttactttcaattctcaagatgaggctctttggctaatctcacatttgacaagactctaaggaggagacttttaaagatgcactacatgttttttgagatcattaataaaataagcattgtgaaaacagtcaaggcaatatgaatatctccgtgtagctaattgaattggaactggaaaaatgcagacctctaaaattgaaaatgtaactattttaaatatctacaataaaataaaaacagctaatagcagagccccaatgaaatatctttatcatcaccttgcttcattttcttgaaactcaggcttgtaaatttgtgcctgcttcattatttgtgaggtgattaaagcatttctgattgtt

SEQ ID NO: 281899 - DNA, 1000 bp, Homo Sapiens
tttaagataactagtcagtatatactgttctgtaacttaaaagatgacctgaaaattaacaggccctctcccatttctcttctcactctatcccccaccgaagagggctcagaaaaaagtttttattaatatatttggggtcggagaaatacaaacatcccaaagaatacgatatccccagcttaaatgtactggaacgtttgtcagtgagtttcatttccaaagtttaccctacatagggaattgtagaagtgagttagtagaagtgagttcgtgtgaaaccctggaaagaaaacaaaagccccatgcaacacgttccgggctgttgtgtagatgtttattctagtcactaggggaagcacataaaaacacctgaggtgtgtgtgctgaagggcgaattttgtccttttggggagttcatgatataaacatctagaaccaaaaagtcaaatcagaaggtcagtttaggctttagttctctttgaggaaagatttaaagcaatagactataatagttacccggtagactaaaaaatttgcctttaattcttttgattggaatttttttttacaaagtttggagcatggaaacaaatgaaaattgaacctgcttattttttaggatggtgtattgatggccccaacagaactttctaaaatcatgcgataaacatatatgatagtagttgtaaaatgcttcttgttttgaaaatgttgagtaattatcgatagaaattttgctgtccattcatacattccttcaattaactttcattgttaaaaaattgggggattgatgtttggtttggtttgtggggagtgaagaggactactggagggaccttgtttgcttgctttttttctttttttaatttatcatcaagtctaggaaaggagtaagttgccgacaattgtcacttttccctcctaagaaagtaacatgttaagattcccacctaccagcctgggtgacagtgagactcccgtctcaaaaaaaaaa

SEQ ID NO: 281900 - DNA, 1000 bp, Homo Sapiens
aataatggactcccttttgcactgtgtttcttaaaccacagagtctaacaagaacatcattcaactttttaaagcctgtatgtatgggcaagagagcctgttcatatgaccttctaaataggactcttgggcacgatcagaatgtctggctaagcctgccttcgtggttaggcaccactaacagaccattgaaaatatgcacgtcgtagatcatagagtggacagaacctaggctgaggatcaggaaatctgttttttcatcttggttctggtgttagagggatacccagtgcatagaacatcacagaaacacagacctcaaggggtaagtccagaatgggggctggtagttagaatgaagactatagagggaatctgaatatcattttgaagggagagatccatccattcattcagtcactctgtgaatatgtatttattatgcacacactacatgtcggacacagtttaggcaatgagaattcagaattgaaccagacagacaaaaatccctgccatcatggaacttacatttcagtaaggagagatagacaagtgaaaaaaccaagtaagtaaatatctttggtcaactggtaataagactgtgggaaaaatcaagcagggtaactgatggttatgaaactttgaggctgggagaggggggtatttaaagaaggtaatcaaggcctcttcacagggaaagtgaaatttcaattcaggcctgaaggaagtaagaaagcaagccatggggattttttgaagaaaagcattccaggtgaagggaagaacaagtgcatagaccccgaggtggactgtgcccggcatgttttagggcgagcagaggccaggatggctggagcagagtatgcaaaagagacagccattagacatggagtctgacaggtgacaagcgcccatactgtggagggacttgcaggacatcgtgttgaatactgatttttgctcttattatcctgggaggcagggaagtgacatgatc

SEQ ID NO: 281901 - DNA, 1000 bp, Homo Sapiens; identical to SEQ ID NO: 114830

SEQ ID NO: 281902 - DNA, 1000 bp, Homo Sapiens
gatatccctgatgacagacagtgggacaatcaccaggccccattgtttaataaaacgaggcttttgctcaggtctaactaacctctcaaatatttgttattactgcagttattatttggacacagaaacagaccacaggttaaaataactttaaaaagcaaagtattaatccctatacaggtgatgtttccttccacccctaccctttctcctctcaagttgaacactcacattctcacccttccaccccaacctctgaaaaaaatctgccttcaactccaatccaggttccctgtagtgtaagacaataccctgtgtacaagaacactttagggtcggcacggtggcttgcgccagtaatcccaacactttgggaggctgaggcaggtagatcacttaaggtcaggagtttaagaccagcctggacagcatggtgaaaccctgtctctattaaaaatataaaaattagctgggcgagatggcaggcgcctgtaatcccagctgctcaggaggctgaggcaggagaatcacttaaaccagggaggcggaggttgcagtgagctaagatcaagccactgcattccagcccgagtgacggagtgagactccatctcaaaaaaacaaaaaacaaaaaacaggctaggcgcggtggctcacggtggtaggccgaggcaggtgggtcacctgaggtcaggagtttgagcctggccaacatggtgaaaccccatctccactaaatatacaaaaattagctgggtgtggtggcagaccagctacttgggaggctgaagcaggggaatcacttgaacccaggaggcagaggttgcagtgagctgagattgtaccactgcactccagcctgggtgacagagtgagactctgtctccaagaaacaaacaaacaaataaaacaaagaacatcttcattattgcgtaagccctgctcctaaagcatgggtcagatgttttaaaagcactcaaagagtttggaccatatgtga

SEQ ID NO: 281903 - DNA, 1000 bp, Homo Sapiens
ccctgttcatccaagttttaagtcctccaccctgttctaagagactgttccaacggctctgggcctcagtggtcacttgaccaccattgtctcagagctgcccactttgtgtgtgtcacatgctgcctgagtcacatgtacatcttatttctgcctctagttttgtaagctcctggagggcggataacatcttatactactcttgtattctcatggcacctagtgcagtgctgggcacagagtaggtgctcaataaagacttgttgaatgaacagcctggagatctgtatttgtaggtctatatctatattatatctcaaatgccaccagacctcagtctggctacagagaaattccactgatagcagtagccgaaggttttccttctgtgccttctgtaacagtgtaactttgctttctgttctctgcacacatgctgtcatttctggaagtccctcaaaaagagcctagtgcggaacacagacgagttgttgcgtggctccacctttttattcctcctgcagtggtgcccttgagctgaggtccagcgttttggagcaagtgatgactctccctgagaagggagacctccagtatagcacacccaaaaattcttccttggaaaataagcactgcctcagaggaaatagaatgtgcagagattcagccttgcatcctaacacagtcaactgtttttcttgtcctttctgatttttttttttttttttttttttttttttgagatggagtctcactctgtctcccagtttggagtgcagtggcgccatctcggctcactgcaagctctgcctcccgggttcacgccattctcctgcctcagcctcccgagtagctggaactacaggcgcccgccatcacgcccggctaatttttttgtatttttagtagagacggggtttcaccatgttagccaggttggtcttgatctcctgacctcatgatccacccacctcggcctcccaaagtgctgggattacag

SEQ ID NO: 281904 - DNA, 1000 bp, Homo Sapiens
atctgggccaggtgtagtggctcatgcctgtaatcctagcactttggaaggccgaggcaggcagattgcctgaactcaggagttcgagaccagcccaggcaacatggcaaaaccccatacaaatacaaatacaaaacgttagctgggcatgttggtgcatgcctatagtcctagctacttgggaggctgaggcattagaattacttgaacgcgggaggcggcagagattgcagtgagctgagaattcgccactgcaccactgcattcgagtctgggcaacagaacaaggctctgtctcaaaaaaaaaaaaaaaaaaaaaaaagaacagaaaatcaaactctaacaccatcacctgggtagttccctccattctcctatgacttccaataagtcattagcagatcacctatcatctctttaatttcttcaaaaacaaataaaatctcaaacttgcatttgggaaactgagaaactttcaggaaacacagaaacacatcttcaggaccttggacagcagaaaaaggaccaccccgcacacacccccaccccaccccggcctccccacaacacatgacacccacgccagcaagactgctgaggaaatgtgacacctcaacatgctgatgagggaaaggataaataaagggctatatagtcatcaatggagagtgttcagggaaggtatgaagactcaggctacaatagtcaagaggagccctgggccctacagaatgcctagtccaacttcctaatactctgagccagagaaggacattctctacacctacattacaacttccctcttcagacattgatttttaaaagaatatatagaatagaatattgatattgagactttttccaattccttggggaaaaatgcataaaaatataacttgcagttcacggatctagaaatagccttacaaatgataaagaaaatttcacaaaggtaaaatatctcatcaaggtagagtaacacaagagctgttgacccagt

SEQ ID NO: 281905 - DNA, 1000 bp, Homo Sapiens
tagctgggattacaggcacacaccaccaggcccagctaattttagtgtttttaatagagacagggttttaccatgttggtcaggctggtctcgaactcttgacctcaagtaattcacctaccttgacttcctaaagtgctgggattatagggatgagccactgtgcccaacttctttttttttctcttttctgagacagggtcttgctgtgttgcccaggctagagtgcactgtaccctcaacctcctgggctcaagcaatccttccacctcagcctcctgagtagctgggactacaggcatgtgccgccacactcaactaatttttttttttttaatttttagtagagacagtgtcttgctatgttgcttaaggctggtcctgaactcctgacctcaggcagtcttcctacctcgacctcccaaagtgctggggtgctgggattatagacgtgagccacgacgcctagccagaatttgggtctcattgtccaagttaatctcatgaatgaggaggtgctctgccctgtggccagggaccagggtattgattctctcaaaaattattaaatcatctagccaaaatgtacggtactgtggggtatataagaagggaagagacaagatctgccttcattaatagtctggttagagaagacttaaaagtaagcatgaatagataattaatttgatcaattgtctaatatgtcgtactctagattctaagttgccacatactcaaaaaagggaaagattatccagggcctgattatttgacagggtcacttgagggtagatcttgaaaaatgatgatttgactaatcagggaccagggagccatttttcagaagtaggaaaagagcagatctcaggcttggggggaagaacaagctacttgggagttaatggatgatagctgctgtggccatttttcttaagagttagactggggagatgggtttggaaagtaaaatgcaaatggtgggtagtggtattaggtg

SEQ ID NO: 281906 - DNA, 1000 bp, Homo Sapiens
cggcgtgctgggcctgaaagtcacactacatgcactgcctttgggagtcagctcactccctgctcccacctggaaccttgccagcgtgaaggaggcttccaggtacttcaccctgtcaaccacctctgaatccccaccaggcgccttcctgggtggattcaacaagatgattttgccctttcccagttctctccttcactttggcatcagttgttttctatgaaaacagtggattggttgggttttgtgcagggtcttgggttagagccaaaatggatttgaggatgagtatttttttttttggttttgtatattttgtacattaataataaacagtggaaagagaagcagcttatttaacccctagtgtgtttggacttttttgagacggagtctcgctccgttgcctgggctagaatgcagtggtgcagtcttggcttactgcaatctctgcctcctgggttcaagggattcttctgcctcagtcttctgagtagctgggattccaggcacctgccaccatgcctggctaatttttttgtatttttagtagagacttggtttcaccatgttggccaggctggtctggaactcctgacctcgtgatctgcccgccacggcctcccaaagcgctgggattacaggcgtgagccaccgcgcccggcctggactgtttttcattttttttttttaaaagccattaccacctgtgttagatacattagtacaaatctgtggaatctgatttttactcctctggagctaatgcttgatctaacagttgctattaagtactggtgaaaaaatgcttcaaaaagtacataaaatactctaggatacagagtagatctcggccacagggctctttcctggttttcatctttctgagtcttctttaacacgcctcgtgtgtgttcctagaacagtcctatcctggctatcgtgccctctaggatgtgttcttggtcatcttatccacattctacagataagggaggaa

SEQ ID NO: 281907 - DNA, 1000 bp, Homo Sapiens
ggcatgttgttctagacttttcttgggaatagcttatttggtatcttgaataacatacagaggtgtatctgccctttgggtatataataatagagccaggcacctttacacctagccctgcagtcaaagaggaaagataacttttgaccatacacataaggatctaggttggggctgggcatagtggctcatttttgtaaaccatcccagcactttgggaggccaaggcaggatcctagcactttgggaggccaagatcagcccaggcaacatagtgagaccccaactatacaaaaaattaatggtgcactgtgatgtgtgcctgtagtctcagctacttgggaggctgaggcagtaggactgctttgagccatgatacgccactgcagtccagcctgggcaatagagcaagactctgtttcaatttaagaaaaaaaaataacaacaacaaaagatctatgttggaaagaagggaactccattgatcttttctctctcctaggtactggagattgagagcagttggcttctggaggtggctccccattattataaggccaaggagctagaagatccccatgctaagaaaatgcccaaaaaaataggcaaaacacgagaagagctagggtaagagaaggacgtaaacagaacctgacaccagctccttttccttctatacattatttaatacctattaaataaaattatttttggaataaagcttgtgggaacatttgggatctagagaaagtgatatgtgaaattctatctcatatagtcagttaaactttattatttacaagttaaattacacagcagctttacacagcatgagatggaaaggaaggaaggagagaaacgaggagaggaagctggctcctgagattcttggctgcctccacctccttctcttgggcgtagcagtcttcagtgctgcctccactccaaggtcaaggatcagggcttggaacacaggtttaagtcaggttctggctctgac

SEQ ID NO: 281908 - DNA, 1000 bp, Homo Sapiens
cactccaccccacctcaacttatttaacttcctaattaaatcagactgtttgagcctgttgtctagaatattttcctgaccaagactgagggatgggctggaggttttcaactttgctacccaaataaattgctgtaagtaagtactaataaaacagaagcaactggaaattaatgcttggcccggcacagtggctcatgcctgtaatcccagcactttgggaggccaaggcaggcagatcatctgaggtcaggagttcaagaccagcctggccaacatgacgaaaccttgtctctaccaaaaatacaaaaattagccaggcagggtgaaacatgccaagtagtagtcccagctacttgggaggctgaggcaggagaattacttgaacctgggaagcagaggttgcagtgagccaagatcgcaccactgcactctagcctaggtgacagagtgagactgtttcaaaaaaaaagagaaaaaaaatgaatgctagactcaggtatggtgactcttgcctatagtcctagctacttgggaggctaaggtgggaggatcacttgagctcaggagtctaaggctgtagtgagccatgatcacaccactgcattccagcctgggtgacaaagcaagatcctggctctattagaaagaaaatgaatgctagaatgtagcttcttcccttgcatacaataggctttcttgcatacaataggctttctagaatgggagaaaagcaagttacttatatactgtcaagagttttagagttaatttttccccccaacagtgtattatagtcagaaaagcatgctaaaatagaaggaatgttgggaataatactagttcctagaattcctgaaaacatggcaaaaggaattattgttttcagggtagctttgagacttgcattgtgaacttaaaagtatgaggtagtagatggtacagattgttttagaatgggaccataaggtagcaatcccgcctagttatccttttttta

SEQ ID NO: 281909 - DNA, 1000 bp, Homo Sapiens
gacaagtcacaggtactgctaatactactggtggttttacccatattcataattggaggaaatgctaaacttctattagaggttagtaaaaggtgtaatttctttttcttgcccaaattctagaacccatctggctccccagggtctggaaatcccaggggagaatccctgggttatgctgatcaagtgtgcaaatgccccactgggggtaggggataggttgttggaatggaaaccagaaccagaaaccagaatcaagagcctcagttatctcagaggcttggaaggatgagctgcaaccaccaagagaacaattaaagggttcaaatttggttggaaagaaaaaatcggccagtggggtggctcatgccctgtaatctcaacactatggaaagctgaggtaggaggatttcttgagcctaggagtttggaaccagcctaggcaacatagcacactctggcccccatttatacatatatatataaaactagctgggcttagtggtgtgcaccagcaactcaggaggccaaggtgggaggataacttgagcccaggaggttgaggctgcagcgagccatgattgcatcacttcactccagcctgggtgacagagcaagaccctgtctcaaaaagaaaattaaaagtcagttgcagggatgggacaaggcagacccatcttgatggccattcatgtgaaataaaaaccctggggttttggttgatgatattcacaaaatgagccaattggataatgaggatcacaataaagataaatcaatgtgaagttgaattaataggcccttggggcctaggtcccgaatctaatagtcctgctaaaacttacacaggtcaaaccactgtgcactatgatttaagttgtgtactgataggttagagtttagaggccagatcccagaataatgagcgatggaagccacggcagtgagcctgataacccaaatctctgagctgtctttcaagcagaaacacctggagtta

SEQ ID NO: 281910 - DNA, 1000 bp, Homo Sapiens
tgacagttcttccttccctactggataagaagaaatctgtggtgtccagccccaggcctccagagtgttcagcatctgcacctgtagcagcagcagtgcccaccagggagtccataaaaggtcttgggccaagcacaaagggacaagggacaaatgcgcgcacttcaggaatctcctcttcagactctggcatgatgagtgttgttctctgcggtccttcgaggcccttagcctcttttagcgatgcccagcttggaccaaagagcctcctctctcccattcctcatttcctgtgccagccctgtttcctctgtaaccacgagcaccttcccttgtctggtgctcatctgctgtcttccttcccagggtccctctctgtcctgctcgatgacctgcaggacctgagtgaagccatttccaaagaggaagctgtttgtcaaggagacaaccttgacagatgctccagctccaatccccagatgagcagctaagcagctgacagttggagggaaagccagcctgggggctgggaggatcctggagaagtgggtggggacagaccagcccttccccatcctggggttgccctgggggataccagctgagtctgaattctgctctaaataaagacgactacagaaggagccattgtttggaaatgttatttctgggaatctgtgggaattctccctgcagccatctctcttggagattgtgagaagtggtcccacccatagctctctctatgggtggcaccttttcaaatcctttttctaggcagctttggaaatgtttgggaagctcctgcttttctttattctcaacttttgttttaaaactcttttcttctggaagatgataaatgctaggagtggggaagatgaaacattcactcgttcaacaggaatgtcagagccaggcactgtattagcctgggggccacttggaccctgagagcctacatcctagtgggagagcgagcgagcagatgggacctaaa

SEQ ID NO: 281911 - DNA, 1000 bp, Homo Sapiens
tccagcaacctcagccccttcctcctccctcaggaatccacctatccgcctctaggaccttggctccaactctattgtactcgtctcctccctcccattctccttttggtctcagctccttgatctaagcctcccagagagacccctagaatgtttccctcaaggacctttctgcctggaagtctgttagcctttcagaagtaacatgtccaaaataaaatttgattcctcccaggttgttccctgcctggtccgctaccccacagtaaggaacaccttattatgcaatggcgtgatctcatctgttccctccagggctcacgcagaaaccttcgttacactcctccaccatccacctgcaagcccctccacaccctgtccaaacccagcccatcatcctgagccaccatctcccctgagcctccccaacacccttctaattggcccccttgctcccactgtttatccctccccctcacacaaagcctgtcctccaccagcaaaagaggtcttaaaatatacatcacgcgggcctggtgtggtggctcgcgcctgtaatcccagcactttgggaggccgaagcgggcagatcacctgaggtcgggagttcaagaccagcctgaccaacatggagaaaccccgtctctactaaaaatacaaaaatattagccggacatggtggcacatgcctgtaatcccagctactcaagaggctgaggcaggagaatcgcttgaacccaggaggcagaggttgtggtgagctgagatcacaccattgcactccagcctgggcaacgagtgaaattccgtctcaaaaaaaaaaaacatatatatatatatcaggccaggcgtagtggctcatgccagcactttgggaagctgacacaggaggaccacttgagctcaggagttgtgtgcgctgcttcacctgcagcaagactgtgggcaacacgtgggaggcctacctggggctgctgcagtccaagtacgctgatgggga

SEQ ID NO: 281912 - DNA, 1000 bp, Homo Sapiens
  misc_feature (821)..(821): n is a, c, g, or t
  misc_feature (894)..(894): n is a, c, g, or t
  misc_feature (898)..(898): n is a, c, g, or t
  misc_feature (924)..(924): n is a, c, g, or t
  misc_feature (932)..(932): n is a, c, g, or t
  misc_feature (935)..(936): n is a, c, g, or t
  misc_feature (941)..(941): n is a, c, g, or t
  misc_feature (944)..(944): n is a, c, g, or t
  misc_feature (970)..(970): n is a, c, g, or t
  misc_feature (974)..(974): n is a, c, g, or t
  misc_feature (996)..(996): n is a, c, g, or t
aaatgagaaggcttaatcaggaggtgctttgtttttgtttgtttttgagacagaatttcactctgttgcctaagctagagtgcagtggcaagacctcggctcactgcaacctctgcctcctggattcaggcaattcttgtgcctcagccacaggagtagctgggactacaggcgcaggccatcatgcccggccaatcaagaagtagtttgaatagttaatcaaactattgattgtccctgacatgaacaaaacaaatgactggctattaaaagtctgtttatgaaataagagggttgatgagcagaaaagtatatgggttttttttttttgtaggaaacttacctattcagagaattatagtagtggagaaacttgacccttctcactgtgccttatttgaaagatggcaagtcttggaatctccatttaattttccttgtttcttatgtaaaggccttataataagcataattattaagctgtctttagaatgaaaattaattaaaaaaataaagattctttctccacgcagtgttagatgcacacatacagtctgttaactttgatcatcattctctgaatagctccataattcttctttgcaaacttctgctctgattttctacttggtgttttttccagactcttccaggtatcaacacaggtttctggttatggttacataaaatcttctgtgttaaatgttatcgtttctgtagccactcaaactgttgggcatttgggattctttctagatagttctggcagtcagacagcctgggttttccagaagaagtcctgatttgaaaagactcaaatnctaatatacccataaaaccaccttgctcctgaatttttattttgaaaagttgtgggtttctataagcctttgnatgnttgctaaactaaatgggttttccttnggttggtnttnntcctnccnttccatgggggttccccttaaccttntttncctaatccttggcccccttaancccc

SEQ ID NO: 281913 - DNA, 1000 bp, Homo Sapiens; identical to SEQ ID NO: 195485

SEQ ID NO: 281914 - DNA, 1000 bp, Homo Sapiens
agtatttagcacagtgtctggcacttacaagggccttaagaaatacagtacctcagtgattgtgtatttagtaaattctggggaaagctgctgaagtagccttgaagcctacagataccagtgttgtctggttgtatttgttaggattcttggttgcaggtgacagaagccattagaccaaaaagggggtttcactgaaaggattctgggggaaatgactagccaagacttcagaaaggcaggatgtatgtgggcttcaggagcctgtgggagttggggtcataacattgcaggcctccacctgtgtcctggtatttcttccattattgctcagagcaagaccagatgcatctgctcctttgacttcttagcaggaaacaaggctgtagacagtgccagagcttttttttttttttttagacagagtcttgctctattgcccagattggagtgcagtggcacgatctcagctcactgcaacctccgtctcctgggttcaagcaattctgcctcagcctttcgagtagctgggattacaggcacgcgccaccacacctggttgatttttgtattgttagtagagacggggtttcaccatgttggccaggctggtctcaaattcctgacctcaggtgatcctccagtcttggcctcccgaagtgctgggattgcaggcatgagccactgcgcctgtgagttttacgtcacagctttgctacccagagagactactagatcgaaaatccctaggaaggactctggttgatgtagcttaaccagtcagggtccttcagaagaggtattcctggcaagggggtagcctcccatttgaggctgtcaaaataatgtgcacacttcagtaggttgttagaagtggcctcctggtcagtgaatcatcagtgggatcagatgaaagttattcctaccagttatctaagaaataggaaacttgaagtttctgctaagaactaagtccacacggaatgctagagatcatgct

SEQ ID NO: 281915 - DNA, 1000 bp, Homo Sapiens
  misc_feature (46)..(46): n is a, c, g, or t
ctgagctgtgactcatcctgtttacgcctaatcccaaaactctgcntctttttaatacccaagatgtggggctttgagtgaatgaaacttccagtcagatgtggcttccacctcatttcggagctctcttgggtccttcctcttagcctcatttttctccccctgctgcctgcagacatcttcacccctttaggccttggtggaggggagggacccagcaggaaggggaaggacagcaggcggggcagtgggcactcaataaatatttgtggttgaaaatatgtcagtgagagatggaaagggagggcaggggtgaatcgggtgaggcctgcacagttcttattattctgctggatgcggggccctagacagtccaggaaaaagccggggaaaggaagccataagccctgcctctggggcctgcaggctgggaggcagccatctgcccagaaagaatccctccttcttgaagggctgctgtgggagtcgggagggagagaacacctaggagaggagaggagtcggggaagggctccccagcacagcgggaggagatgcaacacccaccaatcactacacacttgaccttgtagtcacattatgtgctacaccctaaagctgggtgctttatagacactctctcatttaatactgacaagtccagggaggtgggcagtattattcccatttttttagatgaggaaattaaggcttggcaagaggaaataatttgagcaagggaacatacattatttatttattaaattaaaaaataaccaggctgggcatggtgcctcacgcctgttaatcccagcactttggggccaaggcaggcattgagggatctgggatggagctcatacaaggttgtttaaaagagcccctcacttgaggccaggagttcgagaccagcctggccatcatggtgaaacccccgtctctactaaaaatacaaaaatcagccaggtgtggtggcgcacgcctgtagtcccagctactg

SEQ ID NO: 281916 - DNA, 1000 bp, Homo Sapiens
tgctgcagaatgccatccccctcttgaaatcctgactctttgagaatagcaaatggtggtattactcatgcatgacctttgccaaaaagtggctggcagatgggtttgcccagcaaagtggagatgtgatgagattattctgagtccctatgcaagtagcccagttgagcctggacaagaatttcactggatcagaggctttttactttcacagaacgtagacaaatgtgccatgtcacaatggcttccactcacgtcctggtttatcatcattcctccctccactcctcaacagaaaccaaaaaaaaggcaattatctttcttccagctacagatgttaatcctcaactaacatcccataccggcagtgtctgcaatgtagtagaaaggctttgaagcctgcaaatcatttaggaccaaaaggaggaaatccaagtccaattatgggaaaatgaaaaaaagaaaaagagcagaaaagcccttcaaatcagaccacacagaaggccaaaaccacagatgaaaggaactgagaagctatgggtttttttttgctgccttttaaatgcagacccctaggcaaaggcagcacttatttaacatatccacaggtattaaagtctataacatataaggtgctagaaaaataatttcagtgattgttacttatgggtctagataattcttaatattgacaaacattggtatccatgtaaaagacaaaagtagaaaatatcactaaacttggaggtagaaaccagacttgaattctgcctctatgtatagcctttggaaaattactttttgtttcaaagcccaagtttctccatctataaaaatatggattaaaaataccttcattcaaagagttgtactataacttttcaatgaaattcatgtatatgtctgaaaaacagtatctaataaatataaactgtgtatgattctgatctttaatacagattaagactcccaagtaaaaaaaagaaaaaaaaaaaaaaaa

SEQ ID NO: 281917 - DNA, 1000 bp, Homo Sapiens; identical to SEQ ID NO: 114831

SEQ ID NO: 281918 - DNA, 1000 bp, Homo Sapiens
taggtgttctttaatttctttcaaaaatgttttgtagtttttggcattccagtcttgcacttattttgtcaaatttattcctaaatattttattcttgttgatgctatcgtaaatggaattgttttcttaatttcattttcaggtttttcattgctaatgtatgggaatacaattgatatttgtgtattgctcttgtatcctgcaaccttgcagaaatcattagttctaatagattttttaatggattccttaaaatttttatgtatgcaaacatgtcatacacatagttttacttcttcctttctggattcctttcatttcattctcttggctgattgcctggctagaacctccaggactgataactcttctaatttgtaggagtattttttttttaaacccatttatttactgaagcaactggatcatttgtggtatagaaatttccacattttagatttggctggttgcttcattagcccctctctactctcttgattggattgatattataataaaatattacacctgaaggccagaatctccctgagccaggttttgcctgggattgtcattttgcaacctctgtgttcacaaggactttgcccgggagcaaggtggacgtcctgcctatccctggaacagggtgtggtcccatccatggggactctaaagtgggagtggaaagccagaggcctgagagagctcctcctcaaggctgtgttagggacccagccggactgagaatcttttgtttttctggcagctggagcagttcaagaaggacaacgaggaaacaggcttcggctcaggcacccgggccctggagcaagccctggagaagacgaaagccaacatcaagtgggtgaaggagaacaaggaggtggtgctccagtggttcacagaaaacagcaaatagtccccagcccttgaagtcacccggcccccatgcaaggtgcccacatgtgtccatcccagcggctggtgcagggcctccat

SEQ ID NO: 281919 - DNA, 1000 bp, Homo Sapiens
catggagaggtcagggagggcttcccggaggaggtgagctgagtcttagaggaagagtaggaatcagacaggctaatgtggcagagaaaagaattccaggcaaagggaatagcaagtgccagggatagaggtaggagagagtgtggggactgagtgtagctagggcagaggtgtgcccaagagataaagctggtccccaagggccccaggggctgcaggagacagtggatggggcaggtgggaaatgagcaacctattggccctgacctctggctgctgaaacaaagtatgagaggagtgagggaggagggggacccacagggaggaaggggcactaagccccagaaagagacagcagcactgggggtctgggtgaatgggaggggaagggagaggaggagctgcctgtggttcccacttgggtgacaggtgtgatggagtgtggaggagggcaaggaggaggaacagcctggattgctgagtgtgagcggcctggcagctggcctggccgtgcagagcctagggaggcagggcaggttctgaggtttggggtggcatgtcatcttcatgggttgatggtctgtgaagccactggcagcccagttcctcatcccttccttccccacccttagcgtctccccagcagcttgagggtgaggtggtgccaggctgcgggggcagctgctcttgcaagaggtccaggggtcagcccatggcctctgagcagccctgcccaggtctcgtccctctccacagcccagaacgatctcttcagcacatcaggcaatgagtgggtcctgctgaacctcaatgtgacgggctattaccgggtgaactacgacgaagagaactggaggaagattcagactcagctgcagagagaccactcggtgagtgtctgccacccctcgccctgccccctgccccaggacaggcaccagactgcaaggcctgccacccacagccaacccatggtcacatgctgtgcttcgcattctag

SEQ ID NO: 281920 - DNA, 1000 bp, Homo Sapiens
ctagttaattcagaagactccatggtcccatttttatctgctgactgcaatctttccaagataattgatctaggtttctgttttattgcatttgctgtcactcattgcattgtttgccagattagaagtgtttgatacgagtttacgtactaggtataatttcaatatgtcatccagtctttgttcatctttcactgccagttgaaggcttacagttggctctccaggaaatcttaattcactattatctaactgctccatttaaaaaaatgagggagggatttcatcaattgccgtttccaagataattccataaaccctacatacttagagtgacagcaagataagtttggttgaagtttaaattattgagtctggttcataacaattttacaaaaataatattgcaagtcccatgagtcagttccatttcctggaatcaggaaaacaggaagtatttctaaaactattctaaggatgtcagtggtattcacaggataaaatgggtacggagtacaatattatcaaatccaataacatatagaaaagttttcttatttggtgaccttggtaacttttgtgtatgggacatagtagaacagacaataaataagagtctaaatacctgttacagagctaacggaagggatgtttagccatgggcactgcagagtacatatgcctcaactgaaaagcaggaggagatactagagtaggtacacagaaggaaattggttcccagctttctcagtgatgttgtttttcatgcattcgggggcagggggtccccaagaggggaatgacaggtggaattcaagaacagagcaaagatatctcaaaaagtaataatttgcatcagaagatatttctaagaagctctggtgagtaatgtattactcaaaagtcgttagcctacaattccctctgagggcaaggctgctgggagccccccatcaagttacagaacagggaatttttgtgtttaaattcaaacaagctt

SEQ ID NO: 281921 - DNA, 1000 bp, Homo Sapiens; identical to SEQ ID NO: 114832

SEQ ID NO: 281922 - DNA, 1000 bp, Homo Sapiens
cctggactcaagcgatcagcctgccttagcctcccaaagtgcaggggttacaggcttgagccattgcgcctgacctatttctggttcttagggccctggatgttaggatggatttctgaattaataataataataaaaccctcatcaagatgtgatttgcatagttgtcactttatataatattattttccttctgtgacctttccaagtctgaaacagtcccagggacttcttttggttagttatttgcaatcacctgcaggacacacacacaagaaaattgtcaggttcacgtaaccacagagctgtgcgtggcagtttcctgtctctgtcctcctgggctaagctactcaagtgagtcacaggcagcccacactacagtagctcctgcctgaggagttcagatgatgtttcggagaaaaagatgcaatcacagcttttcattgacctgttagggtcttcctgtaaagggggtcttagccaggagtcctgtgtgggcttcaggtcagggggccttcgaaccccctaaaaattatatgccaaatgtgcggatggcatatttttagatttcatttgtttctcatcaaaactgctgtttgcaaggcagttatgcactgtggttggggctataactgtttccagaggctgttgatcagtatctgttaaactttttttttttttttttgagacagtcttgctctgttgcccagacgagtacagtggcatattctaggctcactgcaacctctgcctcccaggttcaagcgattctcctgccttagcctcccgagtagctgatattacaggtgtgcaccaccatgcctggctgatttttttgcatttttagtagagacagggtttcaccatgttggccaggctggtctcgaactgctgacctcaagtgatctacccgtctcggcttcccaaagtgctcggattacaggcgtgagccaccgcgcccagcctgttaaacattttgatatgccaacttcatgatcca

SEQ ID NO: 281923 - DNA, 1000 bp, Homo Sapiens
ataaatagatgtgtcttaacataatttcttatttaattttattatgtatatattgtgtcagttcagatgccaaaaagaggtcttgaacatgtcacaggctctgatggcactgaccatggagaaagcttgatttgatcatctggtgtctacaataaccaaagctaattattaaggaaaaaaacttgaagaaagaaaatagtccttacttcatctataatgaggtttttgtttttttgttttgagacggagtcttgctttgttgcccaggccggagtgcagtggcgcgatattggctcactgcaacctccgcttaccgggttcaagcaattctcctgcctcagcttcctgagtagctgggattacaggcacctgccaccacgcccggctaatttttgtatttttagtagagatgtggtttcacgatgctggccaagctggtctcaaactcctgacctcaggtgatcctcccacctcagcctcccaaagttaagtgctgggattacaggcatgagccactgcggccggcattaagtatgagtttttaagttagcccactttgttaatgactatgagtactaatagcttaagataaagaagtttctaggtaatcttgtttgaaggatgatgtaaaaatataaatttaaactgtgagtgacaaaataaacttccttaatatttgcctacatttagagaaatggagcattcagctcagaaaggaagaatgtctgtggttttaaggtaaaatccatattccaagactcagtgaagaaagttcagtgataaagaacagactactctcatcttatgaagaaatggagcaatttcacttggaaagactaggaagacaaaatgttacagacgtatttgttgtgccacaaaataggcaaggtcagttttgaacaataagaactccataaagtagaccagggcatctcagaagtgaggttccatgagcccaggtggggcacaggctgggtgatcttgagtggagaggaagagg

SEQ ID NO: 281924 - DNA, 1000 bp, Homo Sapiens
tttcctatttgtctgcttttgggcattttgaggatttttaaccaggttttctaaagcagttcttcccaggggagtgcaaaagaatcaactggctgtaggagcttctccagcagactgcatcagagctgctggggcagagctcagccttgcctgtatctgaaggagttcgctatgctggggggtggaggcacatcctccttagcttcaagtttcaagtaagcatcaatcatctcctttcttttttactgagcagtgtgttgtggaatccttgtatattgctacacaaagattagtctcatgccccccaccttttttttttttgagacagagtcccactctcttgcccaggctggagtgcaatggcatgatcttggctcactgcaacctctgcctcctgggttcaagttaagtaaagattggtctcatgaacttgaactttacattcaagcgattcttcttcctcagcctcccgtagctgggattacaggcacatgccaccatgcccggctaatttttgtatttttttttttttgtagagatagggtttcaccatgttggccaggctggtctcgaactcctgacctcaaatgatccacccgcctcagcatcccaaagtgctagaattacagacgtgagctaccacaccagctggtctcatgcccattaactgctgagttgtatttcacatgattcacatgttcgatgtcctattgatggacatttaggtttcaacttttttacttttttcttttttttcttgccttcacagtgctacaatgaacatctttacacatgtatttgtagtacttatcccattgtttctttcttttttagagacagggttttgctgtgtcacccagagtgaaatgcagtggcacgatcgtagctcactgcagcctcaaactgggctcaagcaatcctcccgcctcagcctcccaaggagctgggactacaagcgtgcaccaccacacccagctaatttttttgttgagacaagatc

SEQ ID NO: 281925 - DNA, 1000 bp, Homo Sapiens; identical to SEQ ID NO: 114833

SEQ ID NO: 281926 - DNA, 1000 bp, Homo Sapiens
gggcaataaaccttggatttccctgcccaggggaaagggcattcgacttactgttgctgaagagagagataagaggctggccaccaaacagagcagtggctaaattgcagtagcagcatatctttttttctttgcacaaataaacagtgaattctcgtttcttaatgtgttttttcccccttgtggataatagtagggtttgaatttgctcatgattttggcactgtcttaagatctctaggaataccacctatacttcctctgaccctccagtaaataaacctttgcttccctcatacatgttacccacaccatctctgtgggcagagtgatggagtagcattccaaaacgaagtacaaaaaacgtatgacatttcagaaaggacggcattcttttgtggaagctatgggagatggtcttagttttcttgcttgttcacattattggtagaaattaaatcctgtggctgtaggaaagaggtccctttttccttgctgactgacaatctgagcgcttttctcagcttctggaggctatgtgcattctttgcctaaatgtcccatttctccatcttgttcaaagccagcagtggcaggtcaggtccttcacatacagagtctttggtctttctttgacccattcagcaatggttctccacttaaggggggcccattagagtaacctcttattctcatggattgtcactttaatgtcgtatttataggatctttggatattggttttcttacagaaacttctatggctggtggcgcctttgcctgagttttgcttggcctgctgggctcgttctgcccacttggcatcgcaggctgtgcttggcgtataatactggcctggatcccatgcctgccaagggcaaaccaggcgtggagcagtgaggaggggtatgtgaacaagcatgaggtctggccactgcagtcacacatgttggctgctgccgctgggcaggcagctccaggtgccaggatgggtgctggc

SEQ ID NO: 281927 - DNA, 1000 bp, Homo Sapiens
ggcctccgtgaactcccagagcatgcctgatagaaactcatttctactgttctctaactgtggagtgaatggaaattccaactgtatgttcaccctctgaagtgggtacccagtctcttaaatcttttgtatttgctcacagtgtttgagcagtgctgagcacaaagcagacactcaataaatgctagatttacacactccttgtgcttacttatgtgctggggcttctttacgttttgtctgcttttcagttctatgaacaaagttatcatctgagtgtctggggctcctggccttccaaatgtctcgtgatgtattgcaaattctcagattgctttattgtacaaagtaattgtaaaactagtcccaaaaaagttgtgtacagagtgtatacaccatcaggttaggaaccaaacctgatgctgcttttatatttctcacagtcactaccccagtgtgagcacagcatttcttagatacctgaagactggttaaaactagattaaatagattaacatatctaaactctatgcattaactcattctatgtggtgaccagcataatgttacaatgactttgtacttcataaattctctatggtaattgtggatcagttagccaagtgaagggaagatgactttcataatctgtaaaataacctcaaaataagggtcatttgaggctctttgatgtcttaattatctgatacccaggtagcagagatagagttctttgttattttacgagatacaatcaacatttcgcatcaccatctgcaccatcctgccattcactgggcccacagcttggggcaacatacaatataatttactccttggctaagcaaccatttcatagacagttttttcttttatcttgcatatgtcccatcttctctaatatatcatgaaaatcttctgtcaagctactgctatctaaacatcctttgtagttgccacaagatctttatgaagttcataaacttggttcagcacagtg

SEQ ID NO: 281928 - DNA, 1000 bp, Homo Sapiens
tccacccacctcagcctcccaaagtgttgggattacaggcgtgagccactgcgcccgggcaagacctttttttaaaaaaaaaaaaaaaaaaacttccattctttcttcctccagtctgttctcacataacagagtagttttggtttttaattttttttggttgtttgctgttttttgttttttaaggtgagttctcactatgtttctcagactggtctcgaactcctggcctcaagccatcttcccgcctcagcctctcaaatagctgggcttacaggcatgagccaccacacctggccaggatttggttgtttaaatataaatctgatcacccccctgcttagaacccttctgctttctattacccctcatttaaaatgtaaactcttcaccttggtttatgagaactggttcttgccttccccttgaacctcattaaatggtgatttcttgctaagctccagcccgagtggtctcctctcagcttctaattttgtgctctttcctgcccttttcctgggccttctcagctctccacccccaccactcttgactcaggtggtgtccttcttcctcaagtcttgacaattcccgggcccttcagtccctgagcagtctacttctgtgtctgtcaccacatcttgtcttttcccctcattgcatttattgcagtttatatatatgctacttttacttgttcatttctgtctcccctaccaggctgtaaatgagggcagaaaccttgtttgttttattcaccatcatgtaccaagtgcttggcacatagtgggccttcattaaatgtttgttgaataaaagagggaagaaggcaagccaaccttagctacaatcctaccttttgataaaatgttccttttgacaatatacacggattattatttgtactttgtttttccatgtgttttgcttttatccactggcatttttagctccttgaagacatatcatgtgtgagataacttccttcacatctcccatg

SEQ ID NO: 281929 - DNA, 1000 bp, Homo Sapiens
ccacaatgccaggaagatactttgtttgcatagatctcaggccttaaatatgaccatatgtgtgaatttgaaactttttccacaagataagtgtctaatgggaagaacaacctaagaggatatacaacaagccgttgatgtttactgatggcctcctctgggcgctgggattttgacagaggaatttgctgtctttttacttcatatgcttagaaaaggaatataggaaagtggggttgtgggtggttttaaatttcttccaatatttctgtaatgaaaatatattacttttaaatcagaaacaaaataaattgtcctaactaggaaaaggagacttctgtttctgaggagtagagagtagcataaatgagttctttaaggccatatgaaagcggtggttctatagtgttgaggaaaatctggcttattctagtctccctgttaagtaaagaggtttcagatacaaaggaaaagaccagcaacccaataggaaaatgagccaaggacatgaacaaacagttcacagaaaaaagaaaacccaaatgtcccttaaattcaataaacagcttgatctgcatcataataagagaaatgcacattaaagtatctgtcgtctatcagaccggcaaaaaccccagtttggtgacatattctgttggcaagatgtgggaaatgtatactctcccgttggtgggagtatgatacggtaaaatactctgtggaggggaatctgacaatacctatcaaattattctttgaagtagcagtcccatttcttggaatccagcctacccatacacctgtgtgtgtacaaaattatatatgagcttttcatcacaacgttgttttggtgttaaaaaatggcagcaactcagctgtgaagtgttccgggaagtcagggaccccgaacggagggacctgctgaggctctgacagaggaacataaattgtgaagatttcatgaacctttatcacttccccagtcaatactcttgtggtt

SEQ ID NO: 281930 - DNA, 1000 bp, Homo Sapiens
agccctattctgggccacagtctagaactttcttttccagctcacaacctgcatgtagctcaggtccctggagaccccagcccagctgagggagagcagtttcctgattcgtgtgacaagcaactcccttcccaccactccccactccctcccaagtacagacaaccttccgtcctgctccagttgaaggggtgacaacgattcctgaagcattctgtctgagtctaatggtggctctagccagacacagggaaatgtggctggctggctgttgggtgatccagttccttgggagccaatgtttgtacccctggtattagctgtttttcccactaaaataagcactgagaggcaagaccgtgtccctctgagctatttgccgaagacttcaggctggaggaaaaagaacagggcttgatagaagtgcaaggtggatccagcaccaactctgccattttctaatcctaggtcctgagtgaacactgactgccagtttacatctcaggtgtgtagggagcgtggaggaggcaaatcctgtttggagaaagccagtgtccaacacagcacttggtaaacatcaggcatgggaatgctgagtgacaggcaccatgggccacgctgagccccactcgctcatctggctggggtcatcagagggaggcccaacccaggatctcctgtccatgggctggggagcagcaacagtcaggagcgagggcccagcccacctcccctaggaggtggagggaagggggctgagtggttgtcaggcgtggtcctccccatctgcgacgtggcggtagccaggaggctgggcctgcatccggaagaggacggtgaggagcagcactatgaggaggaagaggatggagccacatacagccaaggccacaatcacctctgggcatgggggaggcaagagaaaggtcatgtcagcgttccatcatatgccagctactgttctgacatataggagatacacagaggtggccaagacaga

SEQ ID NO: 281931 - DNA, 1000 bp, Homo Sapiens
ggataaagaaaatgtggtatatacatgcaatggaatactattcagtctttagaaagaaggaaatcctttcatatgccacaacatagatgaacttggaggatgttaagctaagtgaaatgagccagtcacagaaggataactactgcatgaatccacttacaggaggtatctaaaatcgtcaaattcatagaagcaaaaagcagaatggtggttgcgggggctaggggaaggggaaaatgggaagttgctgttcagtgggcatagtttcagtcacacaaaacaaaaacttctagagatctgctgtacaacaacttgcaaatagctaacaatatggtattgtacactggaaaatttattaatagggtagatctcatgtgtttcttatcacaacttttctaatgggaaaatggggaaaggcatgagcagaaaattcacaaaattagaccaaaaaatggcaattaaacatatgataaaatgtttaacctcactcatcattagagaaatgaatttcaagtacactgagatactatttctttcctgaaaagtaagaaatttgcaaaaaaaataaataaaaactgtaacaacacactcagcaaggccgtggagatgcatgcactctcatacctcgctgatcgaaaaccaaactgatggacattccagttttgcacaaccacatctcacctgttagaggagaatctgggaatgtctaaggggaacttcatatgcacttatcttttgacccaagaatctcacttctaggaatctaccctgaagacacacctccaaccatatgaaaattcgttcgtatgttcaggtttactcattgcagcattgcttgtcattacaaaacactggaaacagcctaaacgcacatccatagaagaacagttgggtaacctatggtacacagtgaagtattaggaagctctctttgaaatgacatcgagtaatttccaggatatgcttttaatcacaaaaggcaaagctctttgtacagagg

SEQ ID NO: 281932 - DNA, 1000 bp, Homo Sapiens; identical to SEQ ID NO: 114834

SEQ ID NO: 281933 - DNA, 1000 bp, Homo Sapiens; identical to SEQ ID NO: 195209

SEQ ID NO: 281934 - DNA, 1000 bp, Homo Sapiens
tccctcgtggtttgggtgtgaagcttctgtgagttaatgttagtgaacagccagcctcagcccctacccaaggtagctgctccgcagatgtgatgacaaccaccgtgtgtttctcagaatcctaggaaataagggcttctttctagaaggcagggccaggatgctgcgtgggtgttccctggcagagaggctctgtggccctcaggacttcatccttctgcaggcttgtgtgtttgttttatttttttggcacgcctgcagccaagttggggagggtttcctggacagaggtcctttggctgctgccttaagacgtgcagcctgggccgtggctgtcactgcgttcggacccagacccgctgcaggcagcagcagcccccgcccgcgcagcagcatggagctctggggggcctacctcctcctctgcctcttctccctcctgacccaggtcaccaccgagccaccaacccagaagcccaagaagattgtaaatgccaagaaaggtaaggagggggacagagccctgtgccatcttccagggagcaggtccccctctccttagtgtgtcctcatgctcctttccttcattttcctccttttgagtcatctaggggacttgagtaaagtgggctttggggcttgggggagttctctcatagcagagttggttgtcagaatcataagaatccctgacccttagagttgggaagaaccttccagatcatccaaactgatctttgctcttctctcctcccctcatccccaatattttaaagaaaccaaacctttggcctgggagtctggcagcgctcagcccttaccagggagagctgcacaggctgggctttggagtcttccaacctgttttctcaactgtaaaatggggacagtggtatttgttcaaagacttctcatgaagattttatgatacaaaatatataaaggcacctcacttgttgcttgatgcacagggaaaagaaaaagaagaagaaatgaattc

SEQ ID NO: 281935 - DNA, 1000 bp, Homo Sapiens; identical to SEQ ID NO: 201649

SEQ ID NO: 281936 - DNA, 1000 bp, Homo Sapiens; identical to SEQ ID NO: 195111

SEQ ID NO: 281937 - DNA, 1000 bp, Homo Sapiens; identical to SEQ ID NO: 114835

SEQ ID NO: 281938 - DNA, 1000 bp, Homo Sapiens
tgctgtcctattgagcaaataactttttttcaattgccagctactgcttttattcatcaaaataaaataacttgttctgaagttgtctattggatttctttctactgtaccctgattattacttccatctacttctgaatgtgagactttccctttttgcttaacctggagtgaagaggtagaactgtggtattatggatgaggtttctatgagaaggagtcattagagaactcatatgaaagctagaggccttagagatgactttccaaggttaattccagttgtttttttttttttttaagtttataaaagtttattatacttttttaaaattactctttagtaatttattttacttctgtgtcctaagggtaatttctcaggattgttttcaaattgcttttttaggggaaataggtcatttgctatattacaagcaatccccaaattttatggtcttccaggaaaagttattaccgtttatgatactaacagttcctgagacttagctatgatcagtatgttcatgaggtggagcagttcctgtgttgcagcttttaacaacagatggcattcattaaatcacaaagtatgttaaaggtcacaaaagcaaaataactgtctgaggctaaggcccacgtgggacagtctaatacccatgagtactcaacttgccttgatgtctgagctttccagtgcaatgtgaatttgagcagccagaaatctattagtagaaagcaagacagattaatataggttaaaacaatgatttaaatatgtttctcccaataattatctctttccctggaatcaacttgtatgaaaccttgtcaaaatgtactccacaagtatgtacaattaagtattttaaaaataaatggcaaacattaaaaacaagagtgaatactcaagtagatttgtcatgggatttttataagaagactggtatcaggtaatgtatctttaaagactaggctgctctgctgacgtagtaaccat

SEQ ID NO: 281939 - DNA, 1000 bp, Homo Sapiens; identical to SEQ ID NO: 206233

SEQ ID NO: 281940 - DNA, 1000 bp, Homo Sapiens; identical to SEQ ID NO: 206234

SEQ ID NO: 281941 - DNA, 1000 bp, Homo Sapiens; identical to SEQ ID NO: 114836

SEQ ID NO: 281942 - DNA, 1000 bp, Homo Sapiens; identical to SEQ ID NO: 195683

SEQ ID NO: 281943 - DNA, 1000 bp, Homo Sapiens; identical to SEQ ID NO: 195665

SEQ ID NO: 281944 - DNA, 1000 bp, Homo Sapiens
tggctcgtgatgaccgccccatgatgactggcccgtgataactggctcgtgatgaccacccgtgatgaccgcccatgatgaccggcccgtgataactggctggtgataactggctcgtgatgaccacccgtgatgaccgcccgtgatgaccgcccgtgatgaccggccgtgataactggctggtgataactggctcgtgatgaccagcccgtgaaggacaaggaagaggtaaggatgcagacaggcacagggggccaccaggtgaacgcacagaggagacaccgactgccggccaaggagggaggcacaggatgaacctgccctgccggccccagggtggagacttccagcctccggggtgggcgacgggtgccccagcctccggggtgggcgacgggtgcgtgtggtttgagccgctggcctgtgtcgtttgttgtggtggcctgaagagacctgcacggtagctgagtgtggtggacacgccaaagccgcaggcaggagacctgcagtgaggctggcaggaccatgtggcggcaatggccaccccaagcctcaggggcttcctgcagggatggctgctcagatgccggggcctgcagtgctgatgagggtgtgcctgggccacatcgccatggaggacgggaggggcctgttcgtttctagagggacacgccggccacccggatgcagataccacgtcctcacggatgcgcacacgttgcttagacaccatcacgtgagccttttgagctttgaaggttgagaacatattcctaagaacacacatcagcgccatttagagcttctaaggggttaccgcggaggaaggggcggggtcaccgcggaggaggggggcggggtcaccgcggagggagggggaggggcaccgcggagggagggggaggggcaccgcggaggaaggggtggggtcaccgcggaggagggggcggggtcaccgcggaggagggggcggggtcaccgcggagggaggggaagggcg

SEQ ID NO: 281945 - DNA, 1000 bp, Homo Sapiens
tgggcaggaaggacctctagaaggcaaaatttagcctgctgacaatttcccacaccgtgtaaaccaaagccctaaaattccactgcgttgtccacaagacagaagctgaagtgcatccaaaggtgctcagagagccggcccgcctgaatcattctcgatttaactcgagaccttttcaacttggcttcctttcttggttcataaatgaattttagtttggttcacttacagatagtatctagcaatcacaacactggctgagcggatgcatctggggatgaggttgcttactaagctttgccagctgctgctggatcacagctgctttctgttgtcattgctgttgtccctctgctacgttcctattgtcattaaaggtatcacggtcgccacctggcattccttctgaccacagcatcattttgcattcaaattaagggttaagaaaagagatattttaaaatgagagtcacttgatgtgccattttaaaaaaaaaggcatattgctttttctaatgtggttatttctctgatttgcaaaaaaaaaaaaaaaaaaaatacttgtcaatatttaaacatggttacaatcattgctgaaaatggtattttcccccttttctgcattttgctattgtaaatatgttttttagatcaaatactttaaaggaaaaaatgttggatttataaatgctattttttattttacttttataataaaaggaaaagcaaattgatgacctcaccttgtttgatctgtgcaaatacttttctaagatgcttccttataatcatgggatcattccgtatagcctggttatcacattcacattgcctattagagtcaattttttaatctagaaatgaacaaataattatcaaaaggaaagtgttttaacctaagatgaaagctttggatttgcctaatccttacccagctcatcttatttagattgtgccacctcactttcctccatctcatgcaatgctacacctcttcaat

SEQ ID NO: 281946 - DNA, 1000 bp, Homo Sapiens
actacctcacattcaatttctaaagagaattatgtcccttatactaaaattatttttatccctttaattcatggctgtgcaaatcagtaagactacttcttttagtgaatggcaacattttatagactttggggtagatactgtgtagcaatgctagttccttcaaaagattcccctcatcatcatggttactctcctctggaaatgacacagtttgcgtttatgttacataaggacacccatagctcctgcacaaatctccttcttattaaagataacaacagcctcaacattcctaactccggtttattactctcaatcatcatttctaatttctcagcacgaagtagtgcaagtttgatcatttcagaatagaataaaaatagtgtctcgtttactttggaaaaatatatttctgttaatgtggaaagttgaagatttcttggagaggttgggtagaagtccctggatttgagaacaaactgtgttcctacactacagtgataattcagtactattgacaattgtgcaattgcaaccaggagaatatcacatttcatttgataataggaaatcgtaatttactaattaactaattgtggtgtggtaatctaggaaaggaagctaaggttcaccttattattacaggataaatgcagaggcaaaaataagtaattctacatcaagaatgtactaaaatatagttaaagagaaattttcaaaatttgtttatataaatttgacacgctattcataaatcatacaaatttatatttaaaaaatggccaatggcaatgaactaaattctgtatgttttatacatttatgagtaacaaagatgttgtcttagtttatttgtgctgtgataaaatacggtagactgggtaatttataaagaatacatggaggctgagaagtccaagattaaggcaccagcaggttcaatgtctggcaaagggcatgctctccacttccaagatggcaccttgcatcctacaga

SEQ ID NO: 281947 - DNA, 1000 bp, Homo Sapiens; identical to SEQ ID NO: 195124

SEQ ID NO: 281948 - DNA, 1000 bp, Homo Sapiens
ttttggtaccagtaccatgctgttttggttactgtagccctgtagtatagtttgaagtcaggtagcgtgatgcctccagctttgctcttttggcttaggattgacttggcaatgtgggctcttttttggttccatatgaactttaaagtagttttttccaattctgtgaagaaagtcattggtagcttgatggggatggcattgaatctataaattaccttgggcagtatggccattttcacaatattgattcttcctacccatgagcatggaatgttcttccatttgtttgtatcctctttcatttcatcaagcagtggtttgtagttctccttgaagaggtccttcacatcccttgtaagttggattcctaggtattttattctctttgaagcaattgtgaatgggagttcactcctgatttggctttctgtctgttattggtgtataagaatgcttgtgatttttgtacattgattttgtatcctgagactttgctgaagttgcttatgagcttaaggagattttggtctgagacaatgggattttctagatacacaatcatgtcatctgcaaacagggacagtttgacttcctcttttcctaactgaataccctttatttttttctcctgcctgatagccctggccagaacttccaacactatgttgaatagcagtggtgagagagggcatccctgtcttgtgccagttttcaaagggaatgcttccagtttttgtccattcagtatgatattggctgtgggtttgtcataaatagctcttattattttgagatacatcccatcaatacctaatttcttgagagtttttagcatgaagggctgttgaattttgtcaaaggccttttctgcatctaatgagataatcatgtggtttttgtcattggttctgtttatatgctggattacgtttattgatttttgtatgttgaaccagccttgcatcccagggatgaagcccacttgatcatgatggat

SEQ ID NO: 281949 - DNA, 1000 bp, Homo Sapiens
aaaagaagtgagaataaaagcgtccttttagtctccttcctttcagtatgtgatccagggtggagatgaaaacaatagagggcatccccccaactattttctctctgttgctccaggattcccggcacctgcttaaatgtgccacccatgactgcaggtgtgaccctccaagctgtggcaccagaggaactgagttccttggtcacgctgtccccaagcaatcagtactctgccttttatttccctttgaccttctagacttgcgtggcctgtgtgccttccaaaacacggatttcaagaaaaaccatgtaattgggcaaggcccctttaagggagggggagtgctagattgaactgtgtattctgctattatagcccatgctaaagcatttactcatggaagaatggttctggttaacttccggactcaaaaatccccttactaattcagtactgtcttaataggagacaaaatcaatgccttaaaggaacgtaggagcctaatggccgttttcctgccagtggggacaatatcgagactaaaattcggctagggaagacatcttactcctaactgttaaaagcaaaaacttcccgttcccaaaagaggcctagagcctgatttctactaggcggcttagaaataccatgtgcttgccagggaaaacagagagagaaacatttattgagttactgcctgccgtgattcacgatcttttctgacagacctgttttccctgaactgtaaagattcctgcacattgaacacccagagagagggtaagagaccaccaatagaaagtttggtgacagggtagctggaagaaagtcttgagattaaaggacagatttgaagttgagatccgctccatactcaccagtctgatgattgaattttccttttcccgcccatgcaccaaaatgatatggctctgatgagtggaggaacaccagggttcttgttcctcaggctggtttagataaaacaacatggacacat

SEQ ID NO: 281950 - DNA, 1000 bp, Homo Sapiens
cataatgatgagtaaataaattataagcgagtatctcagaatcttacactatgtaacatgcatgagcttaagtgcatggatcttgtgacacacactttatctgcacaaagccttttttcatctgagttcttaggtgatgtactagatcattgaattccagctgtatattgctatatttgataaaccttcccctttaggatcatatatgcaggacaatttcataatctggtataaggtccttaggtagttaaaacaagatttaagacaaatctattttttctgcaactgcagataaaaaagcatagtctttctaagcttgaacacttaggatacctaagaaataaattgcacagagatttaataccttggaagtatgacttagaaatctgaaaatttgtatacaactaagtatataaatagtaaaacagattcagttcaatcagcaaatgtctattgagcatctaccatgttcaaggcattatactagcatcacaagggatataaaatgagtaagacacagtctgccgtttaagaacttaatatctagtaagcgagattagataaaaatgactaagatgaaaggcaaataaatgtaatagatgtaagaaaaccataagtaagttattatgggaattcaaagaaatgagagattaaacttagcttggggagaaagatcagaaaatcatgaagtattccatggaatacatggcattcataataagccttgtagtttggacaggttcttgagagaagagagtagggggaagagacagcagtagtagtcatcttgggctaaggaaactgcaattgttcatttcacaaatatttactgagcatttattattattatatgccaggcactgttgtaggcaatagggatagaacagtaaacaaagcagataaaaatccctgccctcacagacctgatattacagtggggagagaaagagacaataagaatagtaacgataataacaacaatgacagccaagacattaga

SEQ ID NO: 281951 - DNA, 1000 bp, Homo Sapiens
caaaaaccagaaaaacatagatgaaaatattagcaggggttgtgcccaggtgaatttttctctattttttggtttcctatatatttttgtaaagcttaatgttatactggggaaagcatacacttgaaagaagagctctgtgtcatccagtacttgtccagatgggaaaagtgtcatgaaatcaaataaataacaaaaattctaatggctgagctagtcctcctaatccctgcactgtcagaggcttcatgtctgatgaacaagagaacctggagttccctgcgtgtggttattaacattgataataattggaacactaatctctgcccaccacattctgttctctggtcgctttctgctgctttttaatgacgcgcttttgctttttcccatgtattccgcattatacacatgctgtactgctctaccttccctcgatttatgcatgtctctagcagatggttgggccagtccacctcgggtgcttgtttagcataacagagagctcaacaactggggccccactcacaatgttcagcttgcatttctggatactggtggggtaaacacagggttaaggccagcacttgccatttccgacctacctttactgcagctaggggtgggttttcctatttgcttttcaagagttgtttttcctctctcattttttccacccgctacccccatttttttcccttggacttctcaggttttctatgagacttctcatggtagtggtgagtacagggaattttcgaggaaaaattccattttggaaatccagcatttggagtccctgcttaattttttagtggctgaatcttgttgaaggcgagggaggcatccttcattcacctgctccttttccctctttgaagaaggatgtgctgtatcaaccatccactctcctcagaatggtggaaattttgagcacatgtggatatgagcaattaaagaaatcagaattgacctccaataacacacttccagtctcttg

SEQ ID NO: 281952 - DNA, 1000 bp, Homo Sapiens
tctaaataattattgtcgtaaaataggcaaacggtctgaggtgcctgacgtccaggaattcttttacacatcagtcccttcctagtctctgtgcccagtgcaattcatcccaaatcttccttctttccctcccgcctgtcccctcagtaccaacccaaagcatcgctgagtctttctaatcttccttttctacagacccatctgacctctcccttcctccccaggctgctcctcgccaggccgagctaggtcccaattcttcctcagcctctgctcctccaccctataatctttttatcacctcctctcctcacacctggtccggcttacagttttgttccgtgactagccctccccctcctgcccagcaatttactcttaaacaggtggctggagctaaaggcatagtcaaagttaattctcctttttctttatcccaaatcagatagcctttaggctctttttcatcaaatataaaaatccagcccagttcattacttgtttggaagcaaccctgagacactttacagccctagaccctaaaatgtcaaaaggccgtcttattctcaagatacattttattacccaatctgctcccgacattaaataaaactccaaaaattaaattccggccctcaaaccccacaacaggatttaattaaactcgacttcaaggtgtacaataatagaaaaaagttgcaattccttgcctccactgtgagacaaaccccagccacatctccagcacacaagaacttccaaacgcctgaaccgcagcggccaggcattcctccagaacctcctcccacaggaacttgctacatgtgccggaaatctgaccactgggccaaggaatgcccgcggcccaggattcctcctaagccgtgtcccatctgtgtgggaccccactgaaaatcagactgttcaactcacctggcagccactcccagagcccttgaaactctggcccaaggctctctgactgactccttcccagatc

SEQ ID NO: 281953 - DNA, 1000 bp, Homo Sapiens
tgctaaaatttggtcaaggagagagtctttgtcaccccgtaccgctcttgtaaatgctatgtggtgacattaagaactttacagacacagataccccctgtgaaaagatatcctgatgtcctttccacagctctaaagttgctgttaagaaattggctccatcgctaacacaacgtgttgataagacaaagctgatttgattgttacccacaggaagggagactaccgcctctgcaaagctgcagcagtgtctcagatgagaggaagaaaggatcagaatttattgagaattaaaggtgtggtttaagatgtgtctttcaatataggaacttgattaggaatggcaaacatcataatacaacagcccaagataggtgaaaatagcaaggtgaggatttggggatcagggattgaaagaatcttatagtgaaattttctgttaatgttttccattgaagagttgatgtatctttcaggaaggtcctataatgaacaatcaaactatttgtttgggtaagacattctcaaaagaataaaaaagtgctaatgaatacagtggaaatacagtggaatatcaaacccatttcattttagacagtgttctagtcttagcagaatgtaagtgtggctggttttggttctcgttgccgttagaaaacaggaagatcaaagtggggctttttcccctttatcctcaaggactagaccagtccaaataaagtcccatgctgctttttgttatctgctattaataaaacccagagcctatggtgacaatatagcagtaggatatattttaaaagcactgaattttagggagtgagaaatactgagttctaatattagctctgatcctaacatgctgtatgactttgagcaacatggaataccttactgagcattgctttcaatacatgaaaaattctctgagttggatttcaaaattgctaagacccatcctaataccgatattctgtgcctctgtcccttctttttaagc

SEQ ID NO: 281954 - DNA, 1000 bp, Homo Sapiens
actagaagctgtgttgatatgtctcagttgctaagggggaaaccatgtggagaaaatctgcctgaaaatgaaacccaatacaaagaaaagcagagtgaaaagagactaatgatgacagcctttgaatttttgaagttctagagggtgataaaggcagctcagctataggaaataatgtattccttgtttctacttaaaccaattttggttgaggttttttttgtcctaattttaaaaagtgtttgtggaattagcatgggatgataaaaaattctggaagcataaggctgaagttctgccttgattccaaaattttcaggatggtaaacttgtaatgggatttatgaatattgcattccatctatccttagactatttttattcaaagtctaggcagtggaacagcagtaccctttcccctcacctgagagcttgtcagaatgcagaatatcaaccctccctttcctatacttaataaatcagaatctgcatttttaaaagattccctgtgaatgtgtatgtatatttgagaagaaatgttatagatctttgctagatcttgacccgcatgattcaactttgtggttctcacactggctactctgtttacacttagaaaaaccattctccagattcctgcatttctaagttcctaacattttagtctttttcaaattttatcttttcaatgaaagctattttttctccctccctccataggaatatgaattccttaaagcagagagtttttcactattctgttttatgatgtatcccaaacatcgaatgcaggtacctggtactgacaaatactttccccttgaccaaacttcaatcaggctcctctcagccctcttttgatttggccttgacctcagactgccatgtccatgcttgcagagtccagttttaggaggagtcatactaagtcagtttagagagaatcctcttaaacttgatatgattaccttcgatgtctgatcaccctcaatatctgatc

SEQ ID NO: 281955 - DNA, 1000 bp, Homo Sapiens
gcccagtttcatgcccaggatccctgggggtgatgcaggggggcctaatctggacacagtctgggatgttcctgggacagtggtgcccagaaggctgctgctggtctgaacaccatcgcagtgcctatgtgccgggctatgcagtggtagaggttgtttggagagaggagggggacatggccgccatgcttactactccactctattctggtcgatctttaggagggagtggccaggagccactgtgccatggacactgacagactagggcatggtgctctgttgctttttctctgttctcttgttgtggctgctgtcagggcactctgaaggagcaggtatgcagtagcatacccacatgtcactaccttttttgataagtttaattaagactatcccctttgttgtgtaaactaacaaacggagtctctcagggtctcttcaggacacaggctacatgaaatcctatacatctctacactcttttccacttacgtttcaacaatccactgcaccatgtggcatttactggtaccaataatctgcttagagttaaaaacagttgttgaggccgggtgcagtgactcatgcctgcaatcccagcactttgggaggccaaggcgggcggatcacagggtcaggagatcgagaccatcctggctaacacggtgaaacctcgtctctactaaaaatacaaaaaattagtcaggcgtggtggcaggcgcctgtagtcccagctactcgggaggctgaggcaggagaatggcgtgaacccaggaggtggcggagcttgcagtgagccaagatcgcgccactgcactctggcctgggcgaaagagagagactccgtctcaaaaaaaaaaaaaaaaaaaaaaaaaaatagttgttgagcacagctcagctggtggggtctccctcattttttggtcccatcaccagaggattttttttgtaatggctagaagactgcttccctacctctctaagaacctgttagatc

SEQ ID NO: 281956 - DNA, 1000 bp, Homo Sapiens
ggaaaagctttgtgggccaggtgcggcggctcacgcctgtgatcccagcaccgtgggaggccaaggcaggaggattgcttgagcccaggacttgacgaccagcctgagcaacatagaccccatctccacagaaaaagattttttttttttttttttttttttgagacagtttcattcttgttgcccaggctggagtgcaatggcgcgatctcgctacctccgcctcccggattcaacctcagccccctgagtagctgagactacaggcgcacactgccacgcccagctaattttctgtattttagtagagatggggtttcaccatgttgcccaggttggtctcaaactcctgagctcaggcattccacccaccttggcctcccaaagtgctgggattacatgcgtgagccgccgcacgcagcctaattttgtatttttagtagagactgggttttaccacgtttctgatcttgaactcctgacctcaggtgatccatccgcctcggcttcccaaagtgctgggattacaggtgtgagccactgcacccagcccagaaattttttttaattagctgggtgtagtggtgtgtgcctgtgatcccagctacttgggaggtcaaggttgaatgagctgtgatcacgacattgcattccagcctggacaacagagatcctgtctcaaaacaaaaaaaaaggatttttgctatttagttgttttaaaagaaagtattaaatcagtccttagattccttgcatagaactctttcatttccaggcagcaggtcgtttatatatttgtcacagttctttgtttcttttgtttgttttgtttctggagagacatggtcttgctgtgttgcccaggctggtctcaaactcctgggctcaagtgatcctcccaccgtggtctcccaaactcgtgggattataggcatgagccaccacgcctggcctaaatgtttcttaataagtctgaaatgttttaaagacctgacttttg

SEQ ID NO: 281957 - DNA, 1000 bp, Homo Sapiens
ctgggttcaagcgattctcctgcctcagcctcccgagtagctgggattacaggcacccaccatcacacccagctaatttttgtatttttagtagaaatggggttttgctatgttggccaggctggtctggaactcccgacctcaggtgatctgcctgccttggcctcccaaggtgctgggattacaggcatgagccaccgtgcctggcctgaacttttatacaacaatgaaataattctctattttcaccaatcaagacaaagccaccttataagtgaagaagttctcactctgtccccaaaataaagagagccctagtcattatatagctcaatacagagctgtattatttactcttcaaattcagtcacagtatccttgaccatatatactcttaccaaaaggactatattacgacataacttccaacaatttgtatataaaatcataagtgtcaggagaagaaacagttgccgagagcagcatgtgtactgcccaggtaggtgacccagtcagtggtggggacgaatttactgaccctctcaatcccgtgtaggtcaggcccaaccatggttaaggctgaaacaggcaagtcctagtgggaggaatttgaaaaccaagttaggtgaaaaggcctaggggtctccaaccttggcctccgtccctgatagaatcagaggagagaggcctggggtgctggaggcagaagaggccctgccctgtccaaccctgagaggcagattctcagtccccaggatgtcggacacttttttctctcttgtcactgagtctcctctccacaggcagaactgtgggctgaaccctgaggccagcgcctctgctctctaatgaccaccaccaaatactcaggcccactgttcactaggtggcatcttactctgagcattacatatttatttccgtgaatgttttagcttaataccatgagatggtccttactgtcctcactttacagctgagagacagagcctcgatgatc

SEQ ID NO: 281958 - DNA, 1000 bp, Homo Sapiens
tctccacatcctctatgcagtcacccaccatctactcatcttagtaatcttcctttctgttcagtgtctctttccttctttctctctctctctctcctctctgtcaccctcaccattcttctccccttctcctcaaaagcattatctcgtctctttctataacatcttgcacaataacaggagtagttcaagctttaggaagaaaaagccaagagatttaacttgtaggttcatccttcttggggttctataacaaagttctccctgaaggcaatggggtattgcagctttttgccaaatttctgaaattaaagagaaaaaaaactgcatggaaaaaaaaacactaaaattatcatatctcaattaaggaagaagattgtggatatgtcttttggcaatatggaaaacactttttaaatttaatatacaagctttaaacagtcagtgacacaagctaattttttcttgggcttatacatgttccattggaaataaagatattccagaagtacatgtgcttgcgtaagcattgtgagtaacagggatagattttccttacactgacttaatcaggctctctgacagcattgccctagttttcatatttggaaaggtggtctgagtgttattttttccccaagtatttagttccccctctgtgtgcaggggtcatattccctgtctcaccgacataattcttggctgtgtgacttcccttggtcaatcgaaaggacagacataacaaataagacttttgaagggaagctttaataaccatttcatgatttcattattactcttttcctcctaccatagcccagtaatacactggtaatgcaaaaatgtgactcagaaaaataacattattttaatattaaacaaatgtatcattctcaaagatctatgaataagtttctttactggtgcttggaaaataaaataatagaccttcattatctccttttcatttttgctcactcttattgaggcttgatggatc

SEQ ID NO: 281959 - DNA, 1000 bp, Homo Sapiens
gtagataactttttcttttagtcgtatataacttttctataacttgtgatggacaagagatatgcttatccaataaaataagcttaaatattagatgctcttgggtcaaaatgtccttttaccaaattgacctttttatgagttctttgggtaaatactttaaagctttttatattttaaagaatacttgtaaaagcatatcacatcttaaaccagtggtgcacatgtggatttacagctcatggactctactgttcagctttaatttataaaacatatcacacatttaatgttatacagtatttacatatagtggaacatagggataactcagttttatgtaaatttttgttaagtgttgtagcctgcccagagtgacttctattttttcttctttgtctccaggtggtgaagcagtattttccaatttgaagattcatttgaaggtggctcctgccacctgctaatagcagttcaaactaaattttttgtatcaagtccctgaatggaagtatgacgttgggtccctctgaagtttaattctgagttctcattaaaagaaatttgctttcattgttttatttcttaattgctatgcttcagaatcaatttgtgttttatgccctttcccccagtattgtagagcaagtcttgtgttaaaagcccagtgtgacagtgtcatgatgtagtagtgtcttactggttttttaataaatccttttgtataaaaatgtattggctcttttatcatcagaataggaaaaaattgtcatggattcaagttattaaaagcataagtttggaagacaggcttgccgaaattgaggacatgattaaaattgcagtgaagtttgaaatgtttttagcaaaatctaatttttgccataatgtgtcctccctgtccaaattgggaatgacttaatgtcaatttgtttgttggttgttttaataatacttccttatgtagccattaagatttatatgaatattttccccaatg

SEQ ID NO: 281960 - DNA, 1000 bp, Homo Sapiens
gataacaattagtgaggaaacaaatagggcaagttattttttcctccaataaggacttccaaaaagggcaggagaagggataaaatgagagagaaaggaagaaaaagagaagaaaggaaagcatgtcgggggaaatcctgatcatttttatttattgttaaacataatatttactacttaaagtaagtacctgtcatatataaactagaaatggaaagtaattttttaaaaaagtaatgagttgggcacagtggctcacacctgtaatcccgccactttgggaggtcaaggcagaaggatcacttgaagcctggagttcgagaccagcctgggcaagacagtgaggccctctctccacaaaaaatttaaaaattagctaggggtagtggctaatttaaatttttttttttaaacagagtctcgctccgtcaccgaggctggagtgcagtggcgccatctcggctgactgcaacctccgcctcctgggttcaagtgattctcctgcctcagcctcctaagtagctggtattacaggtgcacatcatcatgcctggctaatttttgtatttttagtagagacggggtttcaccatgttggccaagctgatcttgaactcctgacctcaggtgatcctcccacctcggcctcccaaagtgctgagattgcaggtgtgagccaccatgccagcctaattctccatagagacagggtctttacagcacctgtagtctcagctactcaggaggctgaggtgggaagatcgattgagcccaggagttcgaggctatagtgagctatgatgatgacactgcactccagcctgggtgacagagtgagaccctgcctctgaaaaacaaaacaaaacaaacaaacagaaagcaatgctcagctacttaatgtctatttggccttgtaacatcaaagaatgattagctatcacacaaaaacaagaaagaggtggtatgaaaataatattgaagaatcctgaaaccaagcctt

SEQ ID NO: 281961 - DNA, 1000 bp, Homo Sapiens
tcccaagtagctgagattacaggcgcctgccaccacgcccggctaatgtttgtatttttagtagaaacagggttttgccatgttggccaggctggtcttgactcccgacctcaggtgatccgccctcctcggcctcccaaagtgctgggattacaggtgtgagccactgcgcccagcccagtgaatatttttatgtatttatctcaagactcttttatgtttctatggggtagattcttagaagtggaatttctgggccgggcacggtggctcacgcctgtaatcccagcactttgggaggctgaggtgggcggatcacgaggtcagcagatggagaccatcctggctaacacggtgaaaccctgtctctactaaaaatacaaaaaattagccggtcgtggtggtgggcgcctatagtcccagctatttgagaggttgaggcaggagaattgcttgaacctgagaggcggagcttgcagtgagccgagatcacgccactgcactccagcctgggcgacagagtgagactccctcaaaaaaaaaaaaaaaaaaaaagaagtggaatttctgggtaaaagaaaggtacaagtatttaaatttaaatatactgccaaattgctatctaaaatggttgtcccaatttatattattgccgagtatgaaaatgaacctttgcccataccctccctatgctattatctgtctttaaaaattttatctaatagttaagaaaatggaatctgattggtttaatttgtatttctctaatcagtagttaacatctttttctatgttttttagccatctgtattcttttgtgactcgtaaattattttctttagttagctttttattgatttgtaggagctctttgtatgtcagggctatgaatcctttgttttacatacattgtaaatattttttgccaggatgtttgtcttttatttttgtcagcgattctgtggaatcatttgtcatataaaagctttcagtttggatc

SEQ ID NO: 281962 - DNA, 1000 bp, Homo Sapiens
catctaagggaccaaggtcagcagaaactagctggggtaatctagaattagttttaacttcctgtgatggtttttttgcgctttaagctctagagttgttttaaaaaattaaaaatcttagagacggttccgtttgcatttgttcacaaactactcttaacaccagccgtgaaaaatggcatgatcaaaatgtcataccttaagcatttttttgggcttaacaatgtaaagttgaaatttccttctttttacaatatttgcttgttaattactaaggatccctacagactgtttaaaattttttttccatcattcacacagatactaacaaaaccagagtaatcaagacaattattgaagaggtggcgcccgacggtagagttctttcatctatggttgaatcagaaaccaagaaacactactattaaactgcatcaagaggaaagagtctcccttcacacagaccattatttacagatgcatggaaaacaaagtctccaagaaaacacttctgtcttgatggtctatggaaatagaccttgaaaataaggtgtctacaaggtgttttgtggtttctgtatttcttcttttcactttaccacaaagtgttctttaatggaaagaaaaacaactttgtgttctcatttactaatgaatttcaataaactttcttactgatgcaaactatcccaatttgtcagaatttatctttacttaagtacataatactctttaaaattaaagattagtaacccatagcagttgaaggttgatgtatccagaaattcggaagacagaactattgtcatgccttttctaagttttttaatcatgtatgttcagaccaccgtcagtaaattcactgagtaaagtctgtaaatccccaatattactctttaagatacacaatatgtggaaggctcccagctctctggctttaaattatttcaatcctggaaattctggaatatctcaaatataacccccaaaataataataa

SEQ ID NO: 281963 - DNA, 1000 bp, Homo Sapiens
cctgactccatgagttgacaatcttgcccactggtttcctgctctcagtttacagaggcacttttatcttgctggggaagtgtgctgaaaagacacattcccagcccacacccagggatgctgattcagtcagcctgggtcagagggatagataaatatgtttaaagctccttgggtaattctgatgtgtaagtagcagttagctgcagtagagtccaattgcctcatttgattgaagtggaatcccagcatcaagtggacatgacttttggcccaagactgatgcttacaaactaagtggagtaggttatttgacctcactgaacatgcatccttttttttttttttttttttttttttttttggagacggagtttcgctcttgtaacccaggctggagtgcaatggtgtgatcttggctgactgcaacctccactgaatcaagcgattctcctgcctcagcctcccaagtagctaggattacaggcgtgtgccaccacgcccggctattttttgtatttttagtagagatggggtttcgtcatgttggctaggctggtctcgaactcctgacctcaggtagtctgcctgcctcggccccccaaagtgctgggattacaggcgtgaaccaccacacctggcctatgcatccttatttctaaaaccatgataaaaggtgaaagtctgaatgcatgtgtgtgtgacactttgatgctcctttgctcatgtagaaccggcacctctctttcacctgagcacgtggaatcttcagagccagatgatggtggctgcctggcctgccatagtcaatgctgcccaggcacctctgcctggagggtctgggttgtgggctgcagttatgacatgtgaccacttggaggcaggcttgcatctttctagcttctggctgctcaggtgtcctgctgtggagctgagctgtgctccctgaaaggcaggaagttattatgtgtgcccctgtgccatcaccgaaccaggacct

SEQ ID NO: 281964 - DNA, 1000 bp, Homo Sapiens
taccattgatgaagaccaagattcttttggattggtgctcacactgtgccagttaaatattccgaacattacccttgcctgtgggcttccagtgcctgaccttgatgtcctttcacccatcaacccgtagggatgaccaacccggaggtgattcagaacctggagcgaggctaccgcatggtgcgccctgacaactgtccagaggagctgtaccaactcatgaggctgtgctggaaggagcgcccagaggaccggcccacctttgactacctgcgcagtgtgctggaggacttcttcacggccacagagggccagtaccagcctcagccttgagaggccttgagaggccctggggttctccccctttctctccagcctgacttggggagatggagttcttgtgccatagtcacatggcctatgcacatatggactctgcacatgaatcccacccacatgtgacacatatgcaccttgtgtctgtacacgtgtcctgtagttgcgtggactctgcacatgtcttgtacatgtgtagcctgtgcatgtatgtcttggacactgtacaaggtacccctttctggctctcccatttcctgagaccacagagagaggggagaagcctgggattgacagaagcttctgcccacctacttttctttcctcagatcatccagaagttcctcaagggccaggactttatctaatacctctgtgtgctcctccttggtgcctggcctggcacacatcaggagttcaataaatgtctgttgatgactgttgtacatctctttgctgtccactctttgtgggtgggcagtgggggttaagaaaatggtaattaggtcaccctgagttggggtgaaagatgggatgagtggatgtctggaggctctgcagaccccttcaaatgggacagtgctcctcacccctccccaaaggattcagggtgactcctacctggaatcccttagggaatgggtgcgtcaaaggaccttcctcc

SEQ ID NO: 281965 - DNA, 1000 bp, Homo Sapiens
cagcattttgggagtccgaggtgggcagatcacttgagctcaggaggtcaagatcagcctgggcaacatggtgaaaccttgtctctacataaaatacaaaaacttagatgggcatggtggtgtgtgcctatagtccactacttgtggggctaaggcaggaggatcacttgagccccggaggtcgaggctacagtgagccaagagtgcactactgtactccagccagggcaagagagcgagaccctgtctcaataaataaataaataaataaataaataaataaataaataaataaataaaacaacttgattagaaggagtataggctaggcacgtggctcacacctgtaatccttgcattttggaaggctgaggcaggaggatcactttaggcctggtgtgttcaagaccagcctggtcaacatagtgagacactgtctctaccaaaaaaaggaaggaagggacacatatcaaactgaaacaaaattagaaatgtaattatgttatgttctaagtgcctccaagttcaaaacttattggaatgttgagagtgtggttacgaaatacgttaggaggacaaaaggaatgtgtaagtctttaatgccgatatcttcagaaaacctaagcaaacttacaggtcctgctgaaactgcccactctccaagaagaaatcatgatatagctttccatgtggcagatctacatgtctagagaacactgtgctctattaccattatggataaagatgagatggtttctagagatggtttctactggctgccagaatctagagcaaagccatccccgctcctggttggtcacagaatgactgacaaagacatcgattgatatgcttctttgtgttatttccctcccaagtaaatgtttgtccttgggtccattttctatgcttgtaactgtcttctagcatgagccaaatgtaaaatagtgaataaagtcattattaggaagttcaaaagcattgcttttataatgaactt

SEQ ID NO: 281966 - DNA, 1000 bp, Homo Sapiens
ggtgatactatttttttctactaactcaagagtctttattaaaaaaaaaagttgttttgcctaatttcagcttttagcaagcttcccatctgtaaaatgatttggaccagatatttctagagtcccctccagccataacattctgtctcaaattaagttccaaccagcagaacactgacaatacttaggaaagtattttgccagtataaaatgtctttaacttactctttgctgacactgatactttcctctaatttagtgtctatcagctgggtcacatcttaagtaaaatgagcaattttaacccccaacatttggcattttgtcataaaccagccagttattttatgctggtcattcatcttgactacaaagtagaatagtcaagctgtcattccaaatagaaaactttttacttcaatcagaattaagccttaacctggaaagttggtttcttccttacattttcccaatctcctactctattcttaaacatgctagtttcactcagttgggtatacaagcctttgggctttatgttgtatgttactaaccaccttttaccatatttatcttttggcatcattctgggacattgctaaattaaaaaagaaattgtttccacttttttctggagatgttcaactaaaggttgttttgttttgttttttgttttgagacagtctcaccctgacgctcaggctggagtgcagtggtgcaacctcggctcactgcaacctccacctcccgggctcaagccattctcctgcctcagcctcccaagcagctgggattacaggcacccgccaccacgcccagctaatttttttgtattttgagtagagaccgggtttcaccatattggccagtctcgtctggaactcctgacctcagatgatccgcccgcctcagcctcccaaagtgctgggattacaggcatgagccaccacgcccagcgtccaacccactgttggatgaaacttgctgcacgtcatacatt

SEQ ID NO: 281967 - DNA, 1000 bp, Homo Sapiens
tggtgatcagaggcagagagccatgcctgcatctcctttgggagttgtgacctggagcccaggagggagggagggtcagtgagtgagcatgaagcagagttggatatttgggaatgtccgcctcaatggccctcctgagaaaaccatgacactggccagactaaagcagaagctgaggtggaaagagtgcttgtgaacagctgccgtcttggacgactggtcttcttcctgctgggccatgtccaccacctgccacatctcacccactgaggaggccacaaagtgctcttcgaactgttcttgattctggtctggaacaggggaaaaggacaaggactgagccctgaccctggcctgaaccagaaaggagaagttagaataggaaaaacacgttgaagcctagggctgcagtcccaattgcccatatccttagccttcaccagagaggggatgctctttctagaggttttttctggtctgtgttcaatcacagccccaactcaaacacacacacacacacacacacacacacacacacacacacaccattcctaaggttagctgcctcctctagggtttcaacactgggggagtcaggggccaccttgaagcatgacaaaagccagccaaatgcaccatgcttacacacacagaagttgcatgcaagctcagctggcccatggtgagccgacactattatttcacatgataaccatcagtggctggagttaccccccataaaccagacctatgtcaggtctcaccctagcctcatcagtgacctggggcctggcctcacacagacctcaccctgagcctccagactctcccgtctttttttctacctacctgaagagggtgttttctctgtatggctcctgtctttttttccacctacctgcagagggcgttttctctgtctggctcccatctttggggcctgggctcccgttcagaggcttcacctgcagcagcagcaagataggaaccaggaacactg

SEQ ID NO: 281968 - DNA, 1000 bp, Homo Sapiens
cagcccagtgggccttccaactatatgccagggtgttagatgagtagagaggagaccacccaggaagtctggacaaggggtctggcatgagctctggagaagatatatttgaggaacatggggtatgctagtttgttgtcctgaattgctgtagagaagataatttaaattgcatcttagaagacgaccctgagggtgaatttcaacttagggcaattgttttagtttgtttcttattggtttaaatggatacttgaagctggataatttataaggaaaagagatttatatgacttacagttctgcaggctgtacaagaaacatggcaccagcatctgcttcttccccggctgcttccactcatggtggaaggtgaaggggagccggatgtgcagagatcatatggcaagagaggaagcaagagagcgagggagaaggtgccaggctctttttaaataaccggctcttgagggaactaatagattgagaactccttgcttctcctccccagcacaccccacccccagggacggcattaatgtattcatgaggggtcttcccccatgacccaaacacctcccatcaggccccacctccaacactgggatcaaatttcaacatgagattttgggggacaaacatgcaaactatagcagcaaccagctaccattctaaaactgccatatgattttaggatttttaaaaagggccaaatttaggttaagcaaaaagtgaaaatacagtaagagaaaatagttttataaaggctttaaaaagtgttcataaagagcagttcatagatttttcacgtaacgttcatcaatagatgctaaaactattggatgaaaagctattgtggaataggatcttctacaaggatttaaatataatcctacagaagaggtatcaattatacaggggaaaatgtacctttacaatggtcaccacaataaccaagtgattcaatttagcatcacccaaggtggaacaccctaacatt

SEQ ID NO: 281969 - DNA, 1000 bp, Homo Sapiens
ggctaatatccagaatctacaatgaactcaaacaaatttacaagaaaaaacaaacaaccccatcaaaaagtgggcaaaggatatgaacagacacttcgcaaaagaagacatttatgtaatcaaaaaacacatgaaaaaatgctcatcatcactagccatcagagaaatgcaaatcaaaaccacaatgagataccatctcacaccagttagaatggcgatcattaaaaagtcaggaaacaacaggtgctggagaggatgtggagaaacaggaacaacttttacactgttggtgggactgtaaactagttcaaccattgcggaagtcagtgtggcaattcctcaggaatctagaactagaaataccatttgacccagccatcccattactgggtacatacccaaaggattataaatcatgctgctataaagacacatgcacacgtatgtttattgcagcactattcacaatagcaaagacttggaaccaacccaaatgtccaacaacgatagactggattaagaaaatgtggcacatatacaccatggaatactatgcagccataaaaaatgatgagttcatgtcctttgtagggacatggatgaagctggaaactatcattctcagcaaactatcacaaggagaataaaccaaacaccgcatgttctcactcataggtgggaattgaacaatgagaacacatggacacatgaagaggaacatcacactctggggactgttatggggtggggggcaggggcagggatagcactaggagatatacctaatgctaaatgacgagttaatgggtgcagcacaccaacatggcacatgtatacatatataacaaacctgcatgttgtgcacatgtaccctaaaacttgaagtataataataaaaaaaagttatcctattaaaactgatctcacacatccgtagagccattatcaagtctttctctttgaaatagacagaaatttagtgttttctcagtcagttaac

SEQ ID NO: 281970 - DNA, 1000 bp, Homo Sapiens; identical to SEQ ID NO: 114838

SEQ ID NO: 281971 - DNA, 1000 bp, Homo Sapiens
aagagagagcagactgtgattggttcatggttagtttatgattgattagatgatgagcctgaagatggcaggatcctggtcctgcttggtttgatcagggcagggacagattgcatagttggatgtgggggaggcctgattggctggaaaactgaaggatccccattctgattggttgctctgagtgggacacagaggagagaaagcaagagagatgaagggttggtgcctatttatccttaggactgagggttgtgggttctaattggatgggaggtctgggatgggtctggattctgattgattgctccatctgggggcccactggtggttaggcgtttgattggctttttagaactggcatatggagattgagggtcttcatgccaattggtcagtaggactgagaggcctgggttctaactagttcttctgacttgaggtcgggagaagagagaatgaccgccgctattaggactgaggagttctgagcactgaagagctggggagggggtggttgcagtgtatagcgtgtgatctgcttgtaacagtttcgttgcattatactaagggttactctacctagaaaagggcggaggtgaaaggatgcaacgcaacgctaatttcaccagcggaagaagcgggtacagaccttaatgagtccccgttttgatcgactgataagggaatggggaaattgaagccaggactcgatgcagattggctacggatccaaaacgcccactaaccttggcgcgtcccagtctccaccccaaacctaactcaggtgaaaatggcgccacgcgcgggggcggggctagaggtacaaagagagtgtctattggttgggagcggcacgggccgccttcttcgcttcaccattggctcgctccgtaaggcaagagaacccactaggggatgagcccgaactagggatgtgacagagcgcgagacccagcctaaagagagcccggagccagcgtgggaggccgctgccgtc

SEQ ID NO: 281972 - DNA, 1000 bp, Homo Sapiens; identical to SEQ ID NO: 195188

SEQ ID NO: 281973 - DNA, 1000 bp, Homo Sapiens
aaaagatgaaattgagtatttctcccccacatcgaaggttagaggaatctaaagttcgacattaactttctctctggttggttaggtactgatgaaattccaagaggttaggctaaggtaaaatggtttttcttgaggacgggtcttgttaagaagaacagatgctatggagtatttcaaaatggttattttttcctccacctactgaaatcctaagggaatttttcttatgtatttactgtgaacactgaagatatccaagaggtaaatctcagaggtgtctgccactccccagagtttttaactctcagactcaactatactgagctttaagccatttgtcaattacagttcaggttttcctcctgttactaattcgtagggaagtgtttgcttgtgggtttctgtttcagtatgtagtgattctctgtacccatctttctgtctctttaattctgagggcagtagtttgccatgtgactttatttctctaatggatgtaagaagaattgctaatttttcagtttattcagcttatttcttgttcttagggtggagtggtgacttccaagtttcttacatgtcagccccaaaaccagaaatcttaagccagttttaatacatttaattttatgagagatttatccatttcctttaagttttcaaattggttgtcataaagttgactatatacttcaataataaatcttaatattgcttgtattctgattacattcattttctttatttattttctgtttttttttcttctggtaagtgttatcaaaagtttgttcattttattaaaatgagaagcataatattaggagatagggtcatagttatgtgtttcagtgtgtgaagggaggaagattgagtaattttgaggccattaaaatgactttggttttcattttgtatgagacaggaagacagtggagtgttcagaggaggtattatcagtttaaatcaagctgctgtgttgtgtattggggaggtg

SEQ ID NO: 281974 - DNA, 1000 bp, Homo Sapiens; identical to SEQ ID NO: 207005

SEQ ID NO: 281975 - DNA, 1000 bp, Homo Sapiens; identical to SEQ ID NO: 114840

SEQ ID NO: 281976 - DNA, 1000 bp, Homo Sapiens; identical to SEQ ID NO: 114841

SEQ ID NO: 281977 - DNA, 1000 bp, Homo Sapiens
ggacacacacttgactcgataagcttattctaccaagttgttcctggtttatgtgacacagctgaacagatgccagtttcatgggggactgtcagatattctgaagggacctaatcaagtcagtacagtgggaaggagagagaaacagaagcctcgtttgtgaaatactacttgagtttgtgcatgaagaatggataggatttagactgagaagcttggaaaggggacaaccacaaacaactgtagagaggctggaacctgagctgtcctgtaggcagcagggatgcctggaggcacgtggaagccaggaggtggggggcacaggacacttgacaatgcagtgcataagctcaagttcagatggttagaagaacttccggaagatgtcaaggaaaactgcttttattaaatatcttaacttttggcagaatcattttgtgtgatataatgtgatgggtttagtaccacattacatttcacatgttatattctgaaatctgaaacatttatttttttttaacctaagaatattccctgggcttttgaagcaataaagaaagcaagtgaatgggtaagaagaactgaaggacagtacccatctatctgcccatggcttgaactggggaatgactgggactctgccaccaagcagttactaggactccagctcataaacactgtgtcccctcttcgtagagtccttcattacagtcaagactaagtcaaatgaaactgaattttaaactttttgcatgcttctatgtagaaaataatcaaatgataatagatacttataatgaaactccattaaggttttattcagtgtagcaattagtgtctttgaaaataaagtggaagcagaattactttaatcaactaacaagcaataatgaaacaaaatatttgttttctgtctcattttttgttattttttaattttttatttttttgagacgaagttttgctcttgttgctcagactggagtgcaatggcgtgatc

SEQ ID NO: 281978 - DNA, 1000 bp, Homo Sapiens
tggagcattccgatattgtctcaaaaattcagattggcaacagctttgaaaaccagtccattcttgtcctgaagttcagcactggaggttctcggcacccagccatctggatcgacactggaattcactcccgggagtggatcacccatgccaccggcatctggactgccaataagattgtcagtgattatggcaaagaccgtgtcctgacagacatactgaatgccatggacatcttcatagagctcgtcacaaaccctgatgggtttgcttttacccacagcatgaaccgcttatggcggaagaacaagtccatcagacctggaatcttctgcatcggcgtggatctcaacaggaactggaagtcgggttttggaggaaatggttctaacagcaacccctgctcagaaacttatcacgggccctcccctcagtcggagccggaggtggctgccatagtgaacttcatcacagcccatggcaacttcaaggctctgatctccatccacagctactctcagatgcttatgtacccttacggccgattgctggagcccgtttcaaatcagagggagttgtacgatcttgccaaggatgcggtggaggccttgtataaggtccatgggatcgagtacatttttggcagcatcagcaccaccctctatgtggccagtgggatcaccgtcgactgggcctatgacagtggcatcaagtacgccttcagctttgagctccgggacactgggcagtatggcttcctgctgccggccacacagatcatccccacggcccaggagacgtggatggcgcttcggaccatcatggagcacaccctgaatcacccctactagcagcacgactgagggcaggaggctccatccttctccccaaggtctgtggctcctcccgaaacccaagttatgcatccccatccccatgccctcatcccgacctcttagaaaataaatacaagtttgaacaggcaaaaaaaaaaaaaaaa

SEQ ID NO: 281979 - DNA, 1000 bp, Homo Sapiens
ttctggcacagcaaaacctctagaacacatagtgtgatttaagtaacagaataaaaatggaaacggagaaattatggagggaaatattttgcaaaaatatttaaaaagatgaggtaattgtgtttttataattaaatattttataattaaaatatttataattaaaatatttataattaaatattttataattaaaatatttataattaaatattttataattaaaatatttataattaaatattttataattaaaatatttataattaaatattttataattaaaatatttataattaaatattttataattaaaatatttataattaaatattttataattaaaatatttataattaaatattttataattaaaatgtttataattaaatattttataattaaaatgtttataattacatattttataattaaaatgtttataattacatattttataattaaaatgtttataattacatattttataattaaaatgtttataattacatattttataattaaaatgtttataattacatattttataattacatattttataaagtatttataattacatattttataattaaagtatttataattacatattttataattaaagtatttataattacatattttataattcaatattttataaatagttaaaaagacgaggaaaaaattaaaaagacgaggttattgatctcaggaattgtatttgccaagtgagaaggaaaaaatattcacaaaggcttgtacatactttgatcctgaggaacacctctggtgtcttcatgtgccacatagtcttcctcactgactgtctgcctttgcaaggcaaggctctccggtaggcctcgagatgaaataacaagtcctttatttcactcagcctgccaggagtggagaaggaatggctagggagtcctagccccaggggcttcatggcaatacggaccccagatgtctccctggagctctgccaggatcc

SEQ ID NO: 281980 - DNA, 1000 bp, Homo Sapiens
acgctgcttgaggctctggactgcatcctaccaccaactcgtccaactgacaagcccttgggcctgcctctccaggatgtctacaaaattggtggtattggtactgttcctgttggccgagtggagactggtgttctcaaacccggtatggtggtcacctttggtccagtcaacgttacaacggaagtaaaatctgtcgaaatgcaccatgaagctttgggtgaagctcttcctggggacaatgtgggcttcaatgtcaagaatgtgtctgtcaaggatgttcgtcgtggcaacgttgctggtgacagcaaaaatgacccaccaatggaagcagctggcttccctgctcaggtgattatcctgaaccatccaggccaaataagcgccggctatgcccctgtattggattgccacacggctcacattgcatgcaagtttgctgagctgaaggaaaagattgatcgccgttctggtaaaaagctggaagatggccctaaattcttgaagtctggtgatgctgccattgttgatatggttcctggcaagcccatgtgtgttgagagcttctcagactatccacctttgggctgctttgctgttcgtgatatgagacagacagttgcggtgggtgtcatcaaagcagtggacaagaaggctgctggagctggcaaggtcaccaagtctgcccagaaagctcagaaggctaaatgaatattatccctaatcctcccaccccactcttaatcagtggtggaagaccggtctcagaactgtttgtttcaattgccatttaagtttagtagtaaaagactggttaatgataacaatgcatcgtaaaacctttcagaaggaaaggagaatgttttgtggacacgttggttttcttttttgcgtgtggcagttttagttattagtttttaaaatcagtactttttaatggaaacaacttgacccccaaatttgtcacagaattttgggacccattaaaaggttaactggg

SEQ ID NO: 281981 - DNA, 1000 bp, Homo Sapiens
cttatcctgagattagaagccaggaagtctttcacttgtgttccaataggaactcagccctcagattttcactgcacagggtcagctctgccccctgcacttctgcttgcgggaggaggaagggcctgggacagggagtcagaggcatcagtgggaaccctgcctctgtctccgtgatgtgaccctggccagttgttactctctctgaacttcagatttatttatgaaatggggatcccattatcttcgtcacatgattgtgctccacattttatgaaataactcctcctatgctttactcagagtaccaagttcatgaaattgtcagagtcccaggaacacagaattattcattccttctgatttgttcacccaagatcaatgtgcctgggctgtattattgtagtttcctacagaaatagttcaccaaattaaaatctaatttttaaaaaattagctgggcatagtagcacatacctgtagtcctagctagtcgggaagctgaggcagaaggattgcttgagctctaatgatttaatgagaatagaaagaagcaagaaagaggcttcttgtccaaattgcactgtggaaaatgaataaatgtattctttagacatctatatttttccccttaaacttcctcctatctgccagttgacttctctgtacagttctttctccaaagttctttgcattgccctctttcaacttcagcaatttgatttttcccttctgttcaaatgtcctattatggacattttatggaaagaaaatctgccatcaccataacagcctacccaccatttatgacaaaggacagggaaattattaggagaaataatgagatctttacttccctttggcctttgtggccttgtctgatccagtgggccccaacattttatgagatatatacagccttccctgcgagactctgaaagggttttagttaaaagtaatataataattatcacgcgtgtcggtgtgaagagaccaccaa

SEQ ID NO: 281982 - DNA, 1000 bp, Homo Sapiens
ggaggtaaggggcaggagagacgcagtgtcaccatctggcttttctcctcagactgcagcagcctgggggggccaccggcacaacagtcgtccagtgtcagggatccgtggacagcggtgagtgtgtaactggctagcaaagccagctgtttcgctcctgcctgctctcagccttaatgaagctgacagccccttgctcccccgacccatctgcacacgccctccagcctcgggacctgtccgcccctacttctctgtgttgggaatgcctctcctttcctagtagtgagctctctactgttaggtctcaccccaggcaccagggccggcagccacagggatctcttccagcggggcacaagattcatccccacatgtggatgatccgctttatgtcagaacatgggacaaggcaacaggagtgcgatgggagataagggctttttcagctgtgcatgcattggaggaaggaaagcgccagccggaatgtaatatattcatgaaagcaaggcactgttctaggcatgggctgttatattcagcgggaataagacaaaaatccacaattttatggagcttatattctggttggggctgcatgtatagacaataaaattagtcagcctgtaattccagcactttgggaggccgaggcgggtgaatcacttgaggtcatgagttcgagaccaggctggccaacatgttgaaaccttgtctctactaaaattacaaacattagccagacatggtggcacgtgcctgtaatcccagctcctcaggaggctgaggcaggagaatcagttgaacctaggaggcagggcagaggatgcagtgagccgagtctgcgccactgcactccagcctgggaaacagatctagactccatcccccctcaaaaaaaacaataaaattagaaaaatagaccgggcatagtggctcatgcctgtaatcccagcactttgtgaggccaaggtgggtggattgcttgaggtcaggaatt

SEQ ID NO: 281983 - DNA, 1000 bp, Homo Sapiens
gtcccagctactagagaggctgcggtgggaggatcacccaagcctgggaggtcaaggccgcagtgagctgtgatctcactgctgcacaccagcctgggtgtcaaagtgagaccctgtctcaagaaaaaaaaaaaaagtgactctgggaagcccagtgtgtcacctagagcattgatacctcacctcttcacgagcacacacgcaaagcatatgggtaaaacccagatggaaaggaagtactcttgcttgttttggtagttgggagaaaatcaaaaagtacaaagaatgatataatactcatacctgccactgcatgtgaacaggcattcacattttgctacatttgctcccagatattttgttttttttcttttttgtagagatggggtctccctctgttgcccaagttggtctcaaactcctgggctcaagcgatcctcctgccttggcctcccaaagtgctgggattaaaggtgtgagccgctgcactcagcccactcccagacattttttgtcaaagaaataaaatgttaggggtaacgctgagggcccaagtctctctcctgaggcctcttattagaagtgagggttgcacccctcaagactgctttgaaaatacttctgtatgtatttatctgtggcatgaacaaaaccatgtcacctttcacaggtataaaaaatgctccaagtggagtcagctcacccgggagtgcagctcccagctcagctggtttggggtgcatccaccagcatctgtgctctgttccgcctttttagtggctgcacagtgggccttaccttcttggggtgccctttggctgttgccaggttttctgtgatcagccgacatccaggagctcgtctccttgtgtgactgtaaaaccccattttcggtgtttctctctggagtgctttccagccccttgaccccacgttctcaccccacgtgatgccatcagaccccttgtttttgcccacctggtgagcagatcacagtgtc

SEQ ID NO: 281984 - DNA, 1000 bp, Homo Sapiens
tcagctgtattgtgttcaaatctcaaggccactgagcctcttttaaacaggtaagagaagacgccaccgacatcgacggctactagtgagcctatccaggtcctgaccacaatttatttctctctgtcaaacttcaggagggacttatatgtcctagaagcaacagagaatatcttcaccttgtgttacagagtgattgtgctcatgctgtggttgaatggggtttgtggatgatgtggtgattatgttttaaggttttaaggtttattttaagcagattgtcattgcatcccatcatcccagatcagcaaaagaaaatagagagatgttaatgacaactagtccttttgaaaagttcagatacatcactgggagggcataggctgaacacctagtacaattgaatttacagctgtacttgctataaatcagctcagcagattgaaaactgctcagcctttccagggcaactgagtgtgaaagcaaagatctatattatctataaactataaactctctttctgttctggtgtatggtttttgaattgtaaataaggagattaatttggtgcagcccctctcagctccattatcttggggcttgcatgcattccgggttttatttcttcatttaaaatgcgtctcaaacagatggaagcctagctatggagactgttttacattgaagtgcagctcaaagtttgggcagcctaaaagtcaggtccagaggcccctcttattttgcatctggctcttgcatcactgttaattatagcgagtgtggtgactcatttatatcagccgtttttatcttttcctgccagaagacagcatttctctggagaagctcaggacaagcatggcaaacgtcagcgagtcggaaagagccaggtcttacaacaaaagtacagccacattgattgtttcaactgcacagggaagaacagagattctcagacgaccctgtaagtttagcttgcagttaagatcatgggctatg

SEQ ID NO: 281985 - DNA, 1000 bp, Homo Sapiens; identical to SEQ ID NO: 206240

SEQ ID NO: 281986 - DNA, 1000 bp, Homo Sapiens; identical to SEQ ID NO: 114842

SEQ ID NO: 281987 - DNA, 1000 bp, Homo Sapiens
ccaaaaatatttttaaaatcatctctgttaatagaatgtctaccaacttctcactatcagaaaatactcaacctccaaacaatttgaaattatctttctgatccaggtaaagaagcaaattgaaaatcaataaagtaaaaagtgacggagattttaaattttctgtaataaaaacacttattgggttgggcatggtggctcacgcctgtaatcccagcactttgggaggccgaggtgggtggatgacctggcgtcaggagttcgagaccagcctggccacatgtcgaaactccatgtctaataaaaatacaaaattagccgggcgtggtggcacgcacctgtaatcccagctactccagaggctgaggcaggagaatcacttgagcctgagaggtggaggttgcagtgagctgagattgcaccactgcattccaggctgggtgacaaaatgaaattcagtctcaaaagaaaaaaaacatttatcgaacacctattacagccatttgctatgctagataatttacttttggcatataacttaatcctcacaaccactctaaggcccccatgaacatcattcttttacaaggaaactgtagttcacagtgccctgcccagggtcatatagttaataagtggcagggctggcattcagacttagaccttttgaactccattacaccatgtcatctgaaggctttattattaatgttgtcattacaaaagacacaccaagtcactgactacagtcacagagacccaataaattaaaaaaaaaaaaaggcatgccaagataatgtctgactctgagaggatccttgtctcaatccaaaatatccttattaaatacctaattgtggctggtgctgttctgtgtattggtcaggataaactgagttaagcagcagtcactaactatttaccatatgcttcgcatgaggtcctgagaggaaaagaaagaaattttaaaagacataaatcctttccctcaaagatcttg

SEQ ID NO: 281988 - DNA, 1000 bp, Homo Sapiens
gatgaaagggggtgatgcctgtgctcagtggcagagtgttcctcaaagtctaggggaacccatagcaggggagaaagggctggggatgttgggggtttggggggctggggaaggcaggggtccttgtctggggccagcaagttggggtgcccaggcccaaggaaggggctgtgttgaagagtaggggcggtgggtaggtgtggaaaggggcctgtctggggtctagggagctttgcaggggtcagaaccaccccgggcaggaattcaagagtggggagatgtgccctctgtcctcagcagtctgcgggggagagagaccacgggagggagggctgtttggagtggactgacagcctcccagaaagtcatctgctcttctgggcaccccccagcaaggaaaacgacattggtctgaatttataactggaatctgtactcattagctggtccttgccatccagcaaactcagccacagccctaccactctctacctgctttcaattccctgggaaaccaggcgaaatttagagtcccagaggttcctctgagggtgtgaagatgggaatttgcacttcctagtactacttttacatttatactgagcaggaaaatgtccaaagtatttactttttcttttctcattgtgaaacataacatatgtatattaaatatatatgtacagattaataaataattataaatcaaacacctaggtttccactgcctaggtcaagacatagaatactgctagtactctagaagccctgtgttcttccctgatcacaacccctgccccaccctgagggaactgggatcctgatgtttgtgtcatcatttcctcgtttgtcttccaaagactgtagagtttcttagatattatcatctttgagtttcacaatcaccttattattcccattttactgatgaggaaactgaggctcaggaaggttaaataactagtccaacactagagaagaaataagtggcagaaccaggatc

SEQ ID NO: 281989 - DNA, 1000 bp, Homo Sapiens
ctggttgccacggagacgcaggacgcgcaggcgcggcaggttggcgaaggcgccgggctccacgtgcgcgatggcgttctcgctcaggtccagctcctccagcgcgggcagcgcggccaggtcgcccgggttcaggcagcggatgcggttgcggctgagctccagcaggcgggtctcggccgggatgccgtcgggcacggcggtcaggcggcggcgcgtgcaggccaccgcgcgggtctgcacggtgcactcgcagcgggccgggcagcctccagccgggggcggcgccgcgggcagcaggagcaggggcaggctcaggacgcacagccagcaggtcatggtgcggagcgtgggcctagggccgcgccaccatcctcctgcgcacctgcgggcgggcggggagcgggcagcgttagcaccgttagcacccctccgcggcgcctctgccgccagcccgcccctaacccgtcccagcacggcggctcgctcctgtaaacccagcattttgggaggctgagatggaagaattgcttgagttcaagagttcgagaccagcctgcacaacatagcaagactcccatctctacaaaaaaataaaagatgagccgcatgtggtggtgtaggcctgtggtcccagctactcaggaggctgaggcaggaggatggcttgggcccaggaggtggaggctgcagtgagatatgcttgtgccactgcactccagcctgggcaacacggtgagacccctgtctcttaaaaaaaaaaaaattaaaaattagctggttttcaagtaattgtgaaatattgaaaagtttacccaggcatggtggcctgcacctgtggtcccagctactcaggaggctgagccaggaggattgcttgagcccagggggttgaggccacagtgagctgtgatcgtgccactgcactccagcctgggagatagagcaaaaaaccctgtctcaaaaaaaaaaaaaaaaaaaaaaaaaagcagcattgatc

SEQ ID NO: 281990 - DNA, 1000 bp, Homo Sapiens
aagtataaataatctattagtttataattcattgaaatatagttaaatcctctttaaatatttattttatttatttgtttaaacatgtggactttatttagaaaaattatatgatttttgttactcttaatagagtttaagtacactttgtgatctgagtataattgtgcatattgaatctctggacttaaatactatggatattccagtatctcaaaattaagttgaaagttttattacagaataatgtagtattcagttctcttaagaattaaaaatcacttcgacagtcagttaagaagaaacacgacaaaatattttaggtaattaaaataagatttgtctactaaccatcaagaataaattttaacacagttagtaaacattttattaagtataaagttggagcctgttgatcataaatgtatcagagttcactataataaaatattcaactttgccttaaattaaggaatgtttcaaaattcataaatgggctaatttgtgtccacttgaagagtttctttctttgcttttgatgctattctgtaaacaatggttccctacataattgtaatagtgttttacgttgtcacaacaccaggcaaaacccaagtgctattgcaagctttgtaaatctatcactgtcctcatccaccttatcagattcttctcttctttgtgtatgcactggtctttttaaaatctgtgatgtgtactgattgtagatttattccatactttcaagtgaatgctaataatatctaagagtaatgatttccctgagaaaactttatccatttgaatataatgaatgttcatatttcttggtgtaccaaagttacaaaaaaagacagaaacaattttatatttaaaatcaatgaagtaaaacagaagatttagttaacacaattgtatttaattatttgcttaatatgtatttttaaaataacttatttgcatatgttgactaagtcatgctgttgaccctcaataaatg

SEQ ID NO: 281991 - DNA, 1000 bp, Homo Sapiens
tattatttttttttggggggggtgtatatttcttaagagatgggtgtctcactatgttacccagacaggagtgcagtagctcttcagaagcgtgggcatagcacactgcagcctccaactcctaggctcaggtgatcccgccatagcctcctgaggagcttttttgtattgtattatcatttttcttgctttcttactaattttgtcaactatgaggaaaggaattttttctttcctaatagagattttattgatactttggaagatcaatacaaagctgtttcaatgtgtatcctgttgttaatgtccttacagaaaatctaaagagctgtgtcattggattcttttccaggtactccagcgaccttctagctgaaaacttggaggcaaattttccttaaaaggccaggaattaggattttttgaagtctcagcacctttgggtggtggtttccatctttaggagcacgagtctgtctccgggcgaaacttcagtgtagatgcatgttctcaggatatttcacaacttgctgccttgctggatgggtcacatttccttccccaagcgccggtaccttcagatgttgacgagctgtcacatcagaagtcacagtcactcaccgttatcagcaacactgcatactcaagttttcagcctttcatagcacattaacagagagattaggaaaaccgactgccacgaccagaagactttcagggtgcatgcctctctgatagggagagccaggatcaaggagtccttttccttccgaaacagttctactaaaaaacaacccatgggctcacacctataataccaacactttgggagaccaaagcaggaggtcaaggtagtaggattgcttgaggcctggagattgagaccagcctgagcaacatgctgagacctcgtctctacaaaaaataaaaataaataggccgggcgcggtggctcacgcctgtaatcccagcactttgggaggccgaggcgggcagatcc

SEQ ID NO: 281992 - DNA, 1000 bp, Homo Sapiens; identical to SEQ ID NO: 114843

SEQ ID NO: 281993 - DNA, 1000 bp, Homo Sapiens
ggtatctgatgatatgacagaatgacagctgttgactggagagtgtaatctttacctatttacaggtagagatgtctctaataagttaaaggaaattgaaagttagttaataatttaatcttagtaaaaagagttttttcaagtgtatctcctgatgcttcccccaagtttagtggcacctccagaacacacacaggcaaggggtttgcaggggccacctatatgcaatggagggtctgaatgtgcctttgtatagcacttaccctaacaatgcgataaggtcaactgtgcaatccaagtattcatgggtctgagagatcgatcaaggactcaaagtcagctgttgacagaacaattttgttttaaaataatattttatgtgaagagtgttcaatccctcattcctggttcccattaggatttcctcatttgattgagactatggccctttactattccacttctcttgttttatcgtaagggaatatataagaagactttgctggcaggacgtggtgggtcatgcctataatcccagcactttgggaggctgaggtgggcagatcacttgaggtcaggagttcaagaccagcctggccaagatggtgaaaccccgtctctactaaaaaaaaaaaatagaaaaatcagctggtcttggtggtgcatgcctgtaatcccagcttctcgggaggctgaggcacaagaattgcttgattctgggaggtagaggttgcagtgagttgggagcacgccactgcactccggtctggttgatgcggcgagactcagttttaaaaaaaaaagactttgctaactaatacgttacagaatgttcaggaaacagaaccctagggaaaatctgtgatttacatcagttgatgtaatcatataattttaaacatacaattctacatttagatagctattatgctttgtatttatataaatgtagcatctaagattcagaacggacttcaaagtataactatgcagataaagt

SEQ ID NO: 281994 - DNA, 1000 bp, Homo Sapiens; identical to SEQ ID NO: 206244

SEQ ID NO: 281995 - DNA, 1000 bp, Homo Sapiens; identical to SEQ ID NO: 114845

SEQ ID NO: 281996 - DNA, 1000 bp, Homo Sapiens; identical to SEQ ID NO: 200993

SEQ ID NO: 281997 - DNA, 1000 bp, Homo Sapiens
cagctctatctccagactggagctgagcttcgagacctggacactcaactgcccactagacatgcaaaggatgttagccaaataaggggaaagtggggataggataaagggggaaagagtattccaggaagaagagatcaagccctgccaactccatttccagagttgttaagctcatttctttcttccatctccactgacacagaccttccctcttacctggcccacagtcatggtctccctgactcatcttgctcccctccactcgacagtcctgtgccactcggtggcaaaatctaatccccttcctcccttgctgataaccctcagctggtttacaaggcctcctctcacattttgtgccgcagaacagagaaggaattgtaggcccctgaagacccaagctgtctctcctcggaggcctttgctctaggggctggtccctgtgggctggcatgccccttctgcgagctcttaaagacactgctcaggtgtcaccgcctctggaatgcccaccctggggctcccagcttgaactgcctcctctccgcttcagtcctggtaaaggcgggccttaacaatcgttgagtcccagaaggcttcacttccgggctcgtctgcttcaccagccagtgagctcgggcgagcccgtccattctgggtctcactatccccacacctatccgtatgtagagtggcgctagctaggtcagacctcgcctgaagaccctgacatctgccgctgggcgacttggccccgcccccttgcctcccttgcgcggcaccgccccactcctccgtgctccccccgaggaaatggttcaaccgaagggcggtgccaaggtgcccgggccgctccgattggtcagggcgagccgtaccacggcggtggcgggggagcgcttcgtgggcaagccggcgggctccgaggccgtgagcgcaaagcctcaggccccggctccctcctgagctgcgccgtgccaggccgcccgccgggatg

SEQ ID NO: 281998 - DNA, 1000 bp, Homo Sapiens; identical to SEQ ID NO: 114846

SEQ ID NO: 281999 - DNA, 1000 bp, Homo Sapiens; identical to SEQ ID NO: 114847

SEQ ID NO: 282000 - DNA, 1000 bp, Homo Sapiens; identical to SEQ ID NO: 204996

SEQ ID NO: 282001 - DNA, 1000 bp, Homo Sapiens
attactaggtgttgaaagctcatagtaaggctcaatacatttttgttcaatggacaaacggattcatactgtccaagagtccaagaacctgcatgtagggaggagtcatattccttatgaaattggtcactgactctcctgcaatgtcatataaactaagaattctcttccacatccttgcttaatgactggaaatggccatttcactgtggccctccaatcaaccctttcccatgagctatgtaatattttaccaccttctaagattgaaactgcccactaataacttcagcctgaagctatttcataattagaaactgttaagtatttggtattggtgacagtgcctttatctttttccctcttccatattcctagtgcttttacacacctaagtgccaccaagatagaaatgatttgctcaacagtgctctggacataaaagaattcttcgatcacaaaaatggaacccccttttcatgcttctacagtccagccagccaatctgaagatgtcattcttataaaaaagtatgaccaaatggctatcttccactgtttattttggccttcactgactctgctaggtggtgccctgattgttggcatggtgagattaacacaacacctgtccttactgtgtgaaaaatatagcactgtagtcagagatgaggtaggtggaaaagtaccttatatagaacagcatcagttcaaactgtgcagtaggaggaggagcaaaggaaggagcagagaaatcttaagacggtggccaaattaaagggctggccttcagatgtctgtgatttctgcaactgaggacctaattatgcctgtctgcaaactaacaatgtaaaacgtaatgattaaagtatcatattttcatgtgggaaaaaatttaaaagcctcattttgtattctatttatttctataaatacatacaaattaaccatcttttctaatctcaatctctttccaaatgagctaaggaagcacttttttc

SEQ ID NO: 282002 - DNA, 1000 bp, Homo Sapiens
aacatccgaaaatttctcaaagatcaggttttaccaccgttgagggatgtgacaaatcgacctgaagttggctcaactgtgagaaataagctggtgcgcctcatgacacatgttgaccttggagtcaagcaaattgctgctgaattcctttttgtcctttgcaaagagagagtggatagtctgctgaaatacactggctatgggaatgctgcaggactgttggcggccaggggcctcttggctggaggaagaggagataattggtactcagaggatgaggacacagacactgaagaatacaaaaatgcaaaaccaaacattaatcttatcactggtcatttagaggaaccaatgccaaaccccatagatgaaatgacagaagaacaaaaagaatatgaagccatgaaacttgtcaacatgcttgataaactttccaggtattgtattcccatccattttttgcttggtttctaaaaatggtctatttctttgtctctctcactgagagttaccatagaacagcaactctggaaatccatgttgattggaatagggtggcccaggcagcagtagttcagatagctcttggctaccatggtttttctacatgtgccgcttctggatgtgcattcctaaatatttaaactgtcaaagctaagatagtaactaccagagcactgtaataattaaccaactaacctccctgtgttcaaaaagatgctgtgatgtagattcagtgattttgctgctgcttgtatttttgttttagcctgttttagtttttgtttcaaatcatgatgcttttattttttcatttttgatgtgtaagtttgcaattacgcctttttgggttgctgctgaaaccaagaattgtaaaatgtcatgcacccaataagaaaaagtgaaaagaaatagctcacatgaaggattttctgaaaacagggacttgtattaattaggagttctaaaaaaaaaaaaaaaaaaaaaaaaaaaaaaaaaa

SEQ ID NO: 282003 - DNA, 1000 bp, Homo Sapiens
gtttagactaacctctaatgcttagttgtcccatgaggtaataatgtctttatctaatttcacctttccatttattagcttatcagaaagttgagtcctagaggattgccagagtgtcagaactcaatgacgccttcccatgtgaaggtcaagaactatctgcagccctcggtgggacccttgattgctgacatcagtccttctacttaaagcagttcttgtgcaatctttgatgcaaagtaatttcaaaagaattgcttcaaggatgttcaatggtgattattattgattgtggcctgggtaggtggaaaagctactcagagaccgaatacagcaacccaagctcccatagttattcattattggaacttggttttcaaactaggtcaaatgaaactgaacaacgtttggaataatccgtcactggttgtggacagggaagggttctagaagggactgggctggagaaccctgcaggcttacagtatgttatgggttggtgctcccctacctacagattcttttaaaaaactgtccctacaacttactgaactggaatgtcagctcagtggagtccttcttctctggccactcttaggggactgagggatggttggattcagaaaagggcttctaaaaattcaggtaatgtttgaactctgctgagccagtggcatgggtctctgagagaatcattaacttaatttgactatctggtttgtggatgcgtttactctcatgtaagtcaacaacatcctgggattgggacacactttctgggcactgctggccagtcccaaaatggaacataaggaagtggttcttctacttctgttatttctgaaatcaggtaagacatagttttttttgtgtaataattattttttctcccacaatgtagtaaaaatacatatgccatatctttatgtgcaattcatttaatttaatttttgattcataaaatcgccagttcaaaatcttgtataagattgaggaattc

SEQ ID NO: 282004 - DNA, 1000 bp, Homo Sapiens
attaaaaagcaccccttcctcagcaggctgtttttttcaatgtccttgattatggtcttaataaaaaaggaggaggaaccctgattttagagttggaagaactgacgcaaagtaatcatttctcatagctttgtgaccttggtgtccccattgtcttctctgactcttcattttagaccttcctgcctttctggttttataaagtagtaagggactttagaaatcataaagcactaagaacattttttttctgatttgccagaagaaaaattgacctccagtagtttactgtttccattgtgattgcactaattttcaccttagccagagtttctggcaccaacagacacaagctctattagagagactgccttgtctactgtatcacagcagccagaataatacataataggtgctccataaatattgattgaataaatgaatccaaagagtcattgaaagcaaatatttctttggagaataaatgtgtcaggtctagcataatccttaatttggaaagattttgaccaacagaggaactcaggagtcatgccatatatcatcctatttgtcaccaagtcatttattttacttcaaacctctctacagcctactctctgttaccactctgatcaaagacaccacgatctgatgcctagattactgcaatagtctcatctcctctcacccactcttccccctctcccacaccaatgtgttcctgccttttaactctagggatcccttcaagacaaatctgatcttgtctccagttgcttataaacacttgacaggttttgcaaacaattaggataaagacagtatctctaatatggcctaacacctgcatggcttgacccctccttttgttccaaccttgactctaccacatttctcccagctctttctgctaagccacactgtcctactttcctagcaggtgccatcgccactggcctcacaggaccttagcacctaatagttcctctgcatggaattc

SEQ ID NO: 282005 - DNA, 1000 bp, Homo Sapiens; identical to SEQ ID NO: 201476

SEQ ID NO: 282006 - DNA, 1000 bp, Homo Sapiens
attttttttctctctctccccacccccaaaagatagcctattgtatcagtgttccagcaggaaagcgatgacactctcaactttggtaatttgaaggcagtttaattaaggcaggtgtagaaaaacaatacggtaaagtgtactactttggggctagtaacagcgggatgctgtacccatccctaggccatgggaggaagaagccacggtaggaagcagttataagaattgtgtggcagaaagaggtgagtggagaggacagtgtataggagggcagcctgctgttaggtgttgcagccactctcctccctccctctgacctttgctcatgcaaccaccggctgactccaactggaaccagagggcaggggcctgttgaggcaggcaaacctcccttgtcccagagcagtctaagaggaggttgaagaatggctgtggagggaccaatggcagatgttcagcacacacactttatctactcttcagcacttttcattatttcaaacctaacctatgaagattgccccatatctctatatagagaacatccatattctctgtcatggcagcatattatttcttgcatgtgttacactttttaaacagtcctttattgtatactttatattattacaagtcctggcttaaagattcttcgtgtgcaccttactaggtgcacctcattacacggcaaacagatcaattaagagtgtgtgtgaaaactacaataccataaacaaataataaaatactgaggtacaagggacctaatacaaccccgtcattttacaaactagcttgcttacagttgcactttctactacaatgacaaggactagaatacaggccaccaaatttctagtccaggggtccttctactacaataatctattttcatgattggtagaaatttcatttttgagaaactctttgacaaagaagcttagttttgtggtcatctataagagactccattgagatggtcggtattttggaattc

SEQ ID NO: 282007 - DNA, 1000 bp, Homo Sapiens
acaggttacagtgagcccagatcgcacccttgtactccagcctgggcaacaaagagtgaaacttcatctcaaaaaaaaagaaaaaaaaagaaagagagaaagaaatacaagaaaaagaaaaagcaatttggagaaaattttaaaaagcaaatcattttaaaagacaaactacaaagtactgtgtgagctaagccattcataatgttctcatggagctaatgggaaacaaatctgttctttcaaaataattgtaaaatttctgtgtaagaatgaatggaaaaggtcatccaaaaactacttgactacatatacctatggatctctatctaagtgctgaaaaatgaatttttttattcatttggttatgtagcatttgttcattctaattttgttttgttccctgtcatatctctggtacctagaataatccctaccacagagtaggtcttccattactcttatgcttttaaatctcccctcacctcattgtaaatgacttttgatttctcttttatgccctttttatacacctttcccttatatctccatttattcctgaagcttcatgggattcagccattgaggtcacttgggtttagatataccaaaagtctgtgatttctctgtttgcatatatgcacatttgttgttatccttacccttttctatcagttccttaccataacatacacttaattcttggaaatttactcatgtcttacaaagatggcaaattcaaacttctgctgtgtatgacacaccattaactgcacaaggacactgtgtatttgctacgttaatatttactgatgagttaatgtaataatgacccatccgcttctgctgcctgtgaggtactttctatctatagggatggaaattaatgacagaggctctctgagctgcctgatgtcagagctgagaaaggtgtgaggggtatataagagctggattactagttagcaaatgagggggtaaatattccagtggatacaagctt

SEQ ID NO: 282008 - DNA, 1000 bp, Homo Sapiens
cgcgtggaagacctggaggccaaggcagtcattgacatcctggtgattgagaaacctggaccccccagcagcatcaggctcctggacgtctggggctgcaatgctgctcttcagtggacgccaccccaggacacaggcaacacagagctcctgggctacatggtgcagaaggcagacaaaaagacagggcaatggttcacagtgctggagcgctaccacccaaccacctgcaccatctctgacctcatcatcggcaactcgtactccttccgggtcttctcagaaaacctgtgtggactcagcacctcggccaccgtcaccaaggagctcgcccacatccagaaggcagatattgctgccaaacctaaagggtttattgagcgagacttctcagaagccccctcattcacccagcccctggctgaccacacctccacccctggctacagcacccagttgttctgcagtgtcgagcttcaccaagccaagatcatctggatgaaaaacaagatggagatccagggcaaccccaaataccgcgccctctctgagcaaggcgtctgcaccctagagatccggaaacccagcccctttgattctggggtctacacctgcaaggccataaatgtgctgggggaggcatctgtggactgccggctggaggtcaaagcctcagccgcacactgaagagtcacgggaggaggctgtgatgagagccaggtgctgcagcctgaggggccaggtccaccaggcctacagtcaaactccagagatgcccaagacccccgcttccatagcgacggctgatggaaccgcccctggtacctgctggcctcccttccccagaggctggtgtccagaactcaggaatgggcctggtaggccccaggccagactaactgggctcaaggggtgctggaaggcgcagagattggagtgccctgcggagttgcactctgggtgggaagcactcaaataaagatgcgtggtgttaacagtg

SEQ ID NO: 282009 - DNA, 1000 bp, Homo Sapiens
gcccctactgacttcccatcctcatcttgtagaattttctccttgtcactgtgctttagcacactgaacctttttctttaaaatgccaagcctattcttaccttaggcttttatatttcttcttccttctgcctggaatactcttttcccacagttttgcatagccagtgcctttctgtctttcagaactcagctcagagggcttccttgaccaccaagctaaaatcatcactgtgtattgtatcattctccttcaaaagtgtaacagcatccatctatgactatttcccaccatctgaaattgcctttcttgttacctgtctccccatccctagccactccccaccccagattgtaaccatcagcctatctattcttatttaccactttaggtctagcacctagaaagtccatctgtagagtaagaaacagaatatatgttttccatatttttccaagtatgtgacaacaaacaacactctcttcctcttttaaaatgccatgtactagtatctaccatattccaggcacagttctaaatgctagagctataacaatgaataaataaaaccaaaatccccatccttgcagaactgactttctagtttcaggcaaagagagcaaatgaatgaataaatgaggaatacatagtatgtgagattgtattaaagactgcagagaaaaacaaagcaaagaggagggcaaggaaggctggtagggaaaggagttttaaaatttaaaagagagtgatcagggaaagacttgagtgatatttgggcaaagatctgaaggagacaagagagtgagccagacacaaacaggagtcaaacattccacagagagaggtaggagtatgtctggtgtgtttgaagaacgattaggaggtcatagcaaaatgggcagcaagtatctctcttcgtctaatgcaaagtataaaaggcctttatgtatattacaagtctataatcctttatctgtagttccaaaattgagaaagctt

SEQ ID NO: 282010 - DNA, 1000 bp, Homo Sapiens
aggagttttgattttgatgaagtcctatttactttttcccctgttatggtttgagtttttgtgttttaagaaatctttacttaacctaagttcacaaaaattttcccctgtgttccttccagaacttttttagtcctgctcttatgtttagatctgttttggcagacagatctttccaacccctggtgtttatacctgtgtgatccccttcccttgagtgtgagcaggacctgtgacttgcttctagaatatagactagaatatggaaaaagtgtagggattctacagatataattaaggtcacaaccagtagattttgaattaatcaaaagagaagttatcctgggtaggcctgaattaatcagcacaaaacccttaaaagaaggtctgggtcctccccgaggtgagattctctttgctgacttgttgatgtgagcagccacattgaggaaggccacatagaaaggaactgcaggtggtctctaggaactaaaagctgcttagcaaaaagccagggccttcaaccatgcagcctaaaggaaatgagttctgccaacactctgaatgagcttggaagcagattttccccagttgagcctccagatgagaatgcagcctggccattaccttgattgcaactttgtgagaccctgagcagaggacccagctaagctgtgcctggacacctgacccacagaaactgtgagatgataaatgtgtgctgtttatggctgctaagtttgttattcagcaatataaaactagtatgtctatgttccatttcaagttaattttgtatattttgtgaagtaagggtaaagattcatttatttttccatatggacatcaaactgttccagcatcatttgtgggaaaaggcccacacattttggtaattttgttgaaaatcaattgaccattgctaggacctcaaaaagaagggcctaattatagtctctgttctgttccattgatctgtatgtctatccttataccagta

SEQ ID NO: 282011 - DNA, 1000 bp, Homo Sapiens; identical to SEQ ID NO: 114849

SEQ ID NO: 282012 - DNA, 1000 bp, Homo Sapiens
gacctgataatgtttctaagaaaaagaaaaaaaggacaaaagggagggaaccactaccaaaaaaaaaaaaagaaactcctccccgaagacactttaatgaaggaaacaacacatttatacggatttcatatttctacccgcctttcctgactctgtgttttatatatattatatataaatatatattgtgtacggccgccggccggcggctcgaggcacgcccggtggtggggggtgggcagagggcttttgtagggggtcggcggggcgggccgcgttgccaggcctggagctggcgaccgggcctccctcttcccgtcacaatcaactttggattctgtatttttttataataaaatgagcataaacctcaaacgcgtgtgtctgtatgtgggggccttgccctacttgaaggagacttttgcattcctaatttggcggtggatgctgggcgtggtggtttactcctgtgattgcagcactttgggaggccgaggcgggcagatcgcttgaggtcaggagtttgaaaccagtctggccaacatggtgaaaccccatctctactaaaaatatgaaaaaaaaaaaaaaaaaagccaggtgaggtggtgcacgcctgtcatcccagctactcgggaggctgaggcaggagaacctcttgaacccgggagttggaggttgcagtgagctgagatcgtgcctttgccctccagcctcggcaacagagcgaaactctgtctcaaaaaggaaaaaaaaaattagctcggcgtggtggtgcacaactgtagacccagctactcgggaggctgaggtgagaggatggcttgagcccggcaggtggaggctacagggagctatgatcacaccactgcactccagcttgggcaacaaagcaagaccctgcctcaaataatagtaatagtaataataataataataatttagaggtgggtctggaatctactggggagaggggtgcggcttcgaggaacctctggggatc

SEQ ID NO: 282013 - DNA, 1000 bp, Homo Sapiens
ttttgtggcatagttagcacaaattccaggtaactaaatttttataacccttgaatagtgcagggggagtgacctctgcataaaaacttcctgtaaaatcagcccattactggaagaaatatctgttaagaataggtttagctttgaagatttagaatttaaattagattttttttaaactcaactccacttaaacacataatctcatgaagaaataatgaggtatttagaatttaaatgagttcaaattttaaaactgtgtctgttgtagtctatagtgttcattctacttccccaagttttgatgagtttcagaatattatgaacctttgttaattttagcttgttagaaggaagctgctcagaatcccataaacatctgtcttactctagggccaataagagatcacatagagcatgttgggggtgtaaaagggaaaaatgtgtgaacataggggcaaatttctagaggccctttgacaagacccatttgcccacaatcatttgaggcctattgataataccttagatatattcttgttgaaataattggactgtgaaaaattaataataaatgtttggcaagtaactacttttgtctgttttaactctgcgtcaatcataacaagatctcattgtctggaaactaacacaagttcccaatcacataagggcattttgttacttatctatgtccaaatacgaaaaaagaggggagagaattctttgtttttccccaaccttttttttttttttttttttttttttttgcagttaggctgaactctatttccatccccacactgagattgccttccagagtgtttttgttcttgacccacagctttctatgccattcttgcagcgactcactggtcatgacaaatactggtgctcccaatatttgttaatatttcctttagagaatgcagcagcttcttcgtctctgatgtctgatgagccaatgatagaaaatggcctgaaacttcagatcctcgag

SEQ ID NO: 282014 - DNA, 1000 bp, Homo Sapiens
acacatatctgtttaaactgaactctagaaagatttgtgtccaaaataacaatattttatattttgatgctgcaaacgtgacacttctgggttttttttttttccttgccaagtttcttctgcacccagctcattctccaggggcacatggcagtggctgggcataactctgggtgtgccggctcccatggtctgcatttctaagcagtagggtgcagtcagcaaggagcctgtgatgggagcctgtgccagggcaaggctggggcatgctgctgcctgctggcaggagtgggggtcccagccttgacagcccctgaactgaacgggcctttctggcatccagctcattccagggtcctgaggccacctcttcctctcgcctcattctgcctcttgcacttctcttgcagaaatgtccaatcagggaagtaagtacgtcaataaggaaattcaaaatgctgtcaacggggtgaaacagataaagactctcatagaaaaaacaaacgaagagcgcaagacactgctcagcaacctagaagaagccaagaagaagaaagaggtcaggaggagccgctaccgcctccctgccttgaccatcccactggaggggagggagggggtcactgcgcggtgccctgctggttgccatggtgacccgcagtcctcccaggctgtgtcagctgatgctgaggctgcagttaagaagcagggaaggttcatttgcttctgaaagcatcagggagtgagatcttggatctggttttgttatgagcctggcccagggctaatgccagattcatttcaatagatgtttctaagccctgatcacgtgctagttccaagcaggctctgggtggggtggcggcaggggccagacaggcgtggcgtccaaccttcaggaagcttctaggagttagggaacagttggatcttgaaggatgagtgggttctttaagccaggtgggaaggggattccaggtgggcgaatgaggggaagctt

SEQ ID NO: 282015 - DNA, 1000 bp, Homo Sapiens
aggctctattggttgttgcagttggattgtggatgacttagatgaaagctgcatggaaactttagatccaaaatttaggactcttgctgagatctgcttaaacacagaaattgaaccatttccttcacaccaggcttgtataccaatcagtactgacctccctttgctcggacctaattactttgttaatgaatcttcaggattgactccctcagaagttgaattccaagaagaaatggcagcatctgaacccgtggtccatggggatattattgtgactgagacttacggtaatgctgatccatgtgtgcaacccactacaattatttttgatcctcagcttgcacccaatgttgtagtaaccgaagcagtaatggcacctgtctatgatattcaagggaatatttgtgtacctgctgagttagcagattacaacaatgtaatctatgctgagagagtactggctagtcctggtgtgcctgacatgagcaatagtagcacgactgagggttgtatgggacctgtgatgagcggcaatattttagtagggccagaaattcaagtgatgcaaatgatgagtccagaccttcccataggccaaaccgttggctccacatcccccatgacatctcgacacagagtaacacgatacagtaacatacattacacccaacagtaagtgctttatggtcagtattctatgtggagaccttgcaccttgtaatcatcaatacatccaccaaaaatatataatgtaccatatatattaatagtcaacaaatactcagatattctaaggtcaatgccattatttgattataccattttgagggtgaatatggctaggcactttagataagcctttttaaaattctttctgattttaaataatgcgtcaaaaaatgtgcagaaaatgtattgcatcccttgatactgtctaacgaatagcacataactcatattgtgaatcctatgggtcttgaggcctgtagaaccaatc

SEQ ID NO: 282016 - DNA, 1000 bp, Homo Sapiens
cgggcgtggtggtgagcacctgtagtcccagctactcgggaggctgaggctggagaatggcatgaacccgggagacggaggttgcagtgagctgagattgcaccactgcactccagcctgggcaagagagcaagactccatctcaaaaaaaaaaaaaaaagaagacattaatatttgtttaatgatccatagctacagcttgaatttagtaagattaccataaattctaatcctgtggctttagacagtctagtccacaggcagtaaggaggtttgttttgggaaagggctcttatcatttttgtttcaaaactaaactataaactaagttcgttcctcccaaagttagttcagcctccaaccaggaatgaacaaggatggcctggaggttagaagcaacaaggagtcagttagggcagatgttttttactgtctcagttataattttgcaagagcagtttcataacgttaaatgatgaatatcacagttttcataaataagtaaatgattaaaataaaataattaggtaaatgtattagaataaatacttgcagacaaacgtcataatttagaatctaaagttatattaaattagataatagatatttcatatttggatattttccaataaaaatatattgaaggaaaacattcttgctaaaaaaaatggtatccttttaaaaaggtgaataatttttgtctaattcaaagcttaaagtttatgtacgaaacaagatagaaagttataacaatacagaggattttttggtaagaaagcttaaagggaaataatttcatattagaaagaatcttgtatggtaaatttagtcctagagtaaaatgactggttgtttaagatgcagggaagttcaggacaaacgagaaaatccaaacatgtaatgaatggtttatgtaagtcacaataagaggaattatatttaaaaaaacaaacacaaaaacttttatatgatccctttagtgagggttaattgcggccgc

SEQ ID NO: 282017 - DNA, 1000 bp, Homo Sapiens; identical to SEQ ID NO: 195166

SEQ ID NO: 282018 - DNA, 1000 bp, Homo Sapiens
cctcctcagctggactctcctcttacagccccactccaaacatcccacacttccctttaatctttaaatctcttatttttcacattcttgggcatcttttcccaccatgaagcttcactgaccacctccccatctcagccattacctgggtcaccagatttctgtgcctgattccagtcgagctgcatcactgcctgattctgtctcaaggtgacactcctgtctacttgcttctgcacctccagggacaattctatgagttgtgggaattacataaggggagttaggttaggaatcgtgcctgcagtggttgatatactatgacttaatatatatactatatacatatatagtctgaagttacaaaatatcggaagagaatagtgtgagcaactgtatatctacaaagtaggtaacctagatgaaatggacacattcctagtgacacacaaaccactgaaaccaactcaagaagaaatagaagatctgaacagacctataacagattaaatcagtaatcaaaacctctcaaaactaacagcccagaccagatgacttcactggtgagttctaccaatagcttaagaaagaatgaacatgaatcttttacctttttaaaaatatggaagaggaggaaacactatttaagtaattttatgaggctaatattgctctgataacaaaaccagatgaagacatcacaagaaaataaaattatagaccaatatttcttatggacatagatgcaaaaattttcagcaaaaatgttaggaatacattttacgaaggagactcaagacttataggaaagttttttgagtatttttttttttttgagacaaattctcacctgttggtcaggctagagtgcagtggcatgatcatagctcactgcagtctcctgggctcaaccaatccttccacctcagcctcccaagtagctggcactacaggtgctcactaccacagccagctaatttttaaattttttgtggagatc

SEQ ID NO: 282019 - DNA, 1000 bp, Homo Sapiens
cctctgcctagatttcagagaatgtatggaaatgcatgtatgtccaggcagaagtttgctacaggagtgaggccctcatggagaacctctgttaaggcaatgtggaaggggaagcccccacacagagaccccactgggacactgcctagtagagctgtcagaagaaggccaccgtcctccagacatcagaatggtatatccactgacagcttgcaccatgcacctggaaaagccacagacactcaacgccagcctgtaaaagcaaccgagaagtaggctgtaccctgcaatgccataggggtggagctgcccaagaccatgggaacccacctcctgcatcagtgtgacctggatgtgagacatggagtcaaaggagaccattttggagctttaagatttaactgccctgctggatttcagacttgcatggggcctttagccacttcgttttggccaacttctcccacttgaaatgggtgtattcagccaatgcctgtacctccgttgtatctaggaagtaactaactagcctttgattttacaggctcataggtggaagggacttgccttgtttcagatgagactttggagtatggacttttgagttaatgctgaaatgagttaagactttgggggactgttgggaaggcatgattgatttttaaatgagaggacatgagatttgggaggggccagggagagaatgatatggtttggctgtgtccccatccaaatatcaccttaaattgtagctcccataattgtgggagggacctggtgggagataattgaatcataggggcagtttctcccatactgttctggtggtagtgaataagtctcacgagatctgatggtttaataaggggtttccccttttgcttggctctcattctctcttgtctgctgccatgtaagatgtgccttttgccttccaccatgattgtgaggcctcccagccacatggaactgtgagttcattaaacctctttttcttcat

SEQ ID NO: 282020 - DNA, 1000 bp, Homo Sapiens
gctaatttaggtagaacagggaagcacacccaaagaattttcaaaggaaagggtgttatagtgcaatagcaattaaaatatatcaaatcgcactgaatactcaacaccagagctctaatgtgggaaatggttctcctttccctctcaataaatatctatttttcatttttttactttgtagtttattttttagtgaatgtatttaattttatgaattatttatgattaaaccacatccagaatcttcgttttctgtgaaaaggaagaactagaaaattgctttaaatcttgaaaatacaaggaatgttttaaaatataaaacaaagccaagttaaactgtttacactgatgtgctataaaagcaccaaaaagaaactttactgtagagttacaagtacatttatatatatatgttgctgcatcacttgtgtagttaaattgtatttcaaaacagtgaaaaaattgacatgtatatactgttcattcttgtttatattaagtcttgttttaaatatgtattatgtgtatatattgtttgcagacattattgttcatgccttagaggattgtagcattttattttcgtctgaaggtaatgatagctatacagtctgtacagtaattatcctctaccaacactgtggcgtctccttaatcttggtagtgcctgcctttgaaacagggtgtaggggatattagttttccatttttctattttgttatataattttaagccaccagggcctaaattaaagtataatcatttgtatccatgtggaataaaattgtgacaatttcctacgcacacagtattttttcatagaaacatttccctcccatttgccttgcctcagaaataaatttaaaagacgtttgtaaccactgtgttttatctactgtgtgttgtggtggcctgttggaggcaaatagatcagattttttttgtacctacgtaagagtacttgaagttttatttaaaataaaatgttgtggaaaaggt

SEQ ID NO: 282021 - DNA, 1000 bp, Homo Sapiens
ttatatatagtgcttatattctgaaaaagtattttcattgttttttagtaggcatattttcatctataagaaatcagaggatacaaaataatttttaaaatctaatactaaataacaaaatctttatattcgagatgctacaggaagaatgctttcttttcccttcatatattatttgctagtaccttaaaaaagtattctatgtagggtgtccaatcatcaaatgtataaaaacaatcaaatatttaggatctatgaaactaaaattctactgcattcccaaagacggcctgtagtgatcactacttgagtcaaaacataaacatagaaacattataattaaaattatgaatgaaacataaagatcccacgagtaaagaaatattagaaagaacatagagatcatccagtcctatgaactcatttccagatgggaaacctgtagttcagtgtctgcagtccagagtccactcccaaaggccacaccaaaagctaacacccagcaagttccaaagaagcagcgttcatctaaagactgccaacgcgttcctcatcacagcccatgtgcttacaggactgaagaggaacatatattcttccatgctcccgggcatggctcatctcaccaatggtcccagccagcccttgcagggttctgctgaggttcctagacacaagcccctctgaggccaggcaaggattctgaaagggagcggcagccccaggcctaccccccagcaccaacagcctgggcacgtgaggctgtgagaaatgcacacacaagcaaaaggctttgaggtcctgagccaaacgctttattaacaccctcccagccccaaatcctgaaccctggctctatctcactgccttcctcctccttaaatccccattactaagtccaagagacccaagaacacagtggaaaaagcacaggttttagtcagacatgtccagcttgtcactatgtgactgcagggaagtcgctttctctttctgatcc

SEQ ID NO: 282022 - DNA, 1000 bp, Homo Sapiens
tgttttgtatgataaaagacctcctgcatctgggcctgcctctcccaaggcgactgcagcccacatgagccacagtgtcctggttttacggggaggaatatcactgactcaggaatgggccgtgctgtcctaacatccccttggtcgtgtgagtgttaagagtctctgcctgtatgagttcctgtggctgccataacgaaggaccacaaactagaaaatgacagaagttgactctctcacagttctggagggtagaaatccaaaatccagatgttggaaggaccaggccccctctgaaacctgtagaggagagtcttcatttcctcttccgtctcctggtgtctcctggccattcttggccttattggctccccctcagcactttgatcctcacctccgccatcacacagcattctcccctgtgtatctgtgtctgtctcctctttattttaaggacacaggtcatattggattggggaccctcctccagtcttcatcttaactaatatgtgtacaaccaccccattcccaaataaggtcacactcggaggtaccaggggttgggactgccgcatatcttctgggggatacagcccaacccctgccaccactccagcctgggccactccttgcatggacttggggccaggtgtgacacagtggttggtttgtggggctggagatatccacgtgtggctaagggacctcagggttgctgattccccatttccgcctctgcttgcagtacccttcagctttgaccccaacaccgcagctggctggctctccgtgtctgacgacctcaccagcgtcaccaaccatggctaccgcgtgcaggtggagaacccggaacgcttctcctcggcgccctgcctgctgggctcccgtgtcttctcacagggctcgcacgcctgggaggtggcccttggggggctgcagagctggagggtgggcgtggtacgtgtgcgccaggactcgggcgctgagggccactcacaca

SEQ ID NO: 282023 - DNA, 1000 bp, Homo Sapiens; identical to SEQ ID NO: 114850

SEQ ID NO: 282024 - DNA, 1000 bp, Homo Sapiens; identical to SEQ ID NO: 195270

SEQ ID NO: 282025 - DNA, 1000 bp, Homo Sapiens; identical to SEQ ID NO: 114852

SEQ ID NO: 282026 - DNA, 1000 bp, Homo Sapiens
acattgacatctataatagataaatgggtgatcatatcatattttttatttgcaggcaaacaacaccaatttcgctttgaaaaatataaagttcctatgttgaagctcaaaagataaataagaagattttgaaagtattactaacacaaaaagctgggccaaataaaacttgtagtgtaacctgaggagtagaagaaagaagtctaacatactctccttttatttagttagcattttttcttactaatcatgtttaactactgtaaatgataatcctaagaagttcctaacctgagatatgattaagatatcagtttgaggatactttagggaaaaagaaaacctatagttaaaggaagaaaaatgtaaatatgggaaaattaaacctagtaaataatgtttatgaaagccaaaataaaatggtgcaccctcccaaaatttggacaactgctcttttggatgaaagaataaaatttacatatacttcagttaaaaatatcctgaaacttaataaatatattcaacattctttctgaaaattttctgtgggaaattatgaaatgtcattattagactatgatactaccttttctttccttggatgagacagtaatactcaaaagaacagtcattaaaatcacgtaatctttgattaaatcttgatctatctgatttctgtgtatatggtcattggcaagttttttatattttctcttgtcaatttaaattttcttattctgtaatggggatagatggtaataacaactataagtaaggtgatgtatataagtaagtatcatgcttcctggcacagagatttaataaatggtcatggaaaactattttagatattctgaataaatattgtaagatagttccacatgtgtatatgcatatgtacttattcacatatataaacacatatactgttactaagaaatgtaaaagcagactgctaaacataaccattaaataaagagagctgcatgattattagatc

SEQ ID NO: 282027 - DNA, 1000 bp, Homo Sapiens
tcttgaaagcttcctctgaaagagtgttttcaaatgactttcaggtttgaattattttcttttactataacaaaatgttttattgtatattatctgtttacactccatttaataagcagacaagaattcattgggttcttactgcatgacatacattagaggagagcttggtatgttttgttaacactgcattcttcacacaaatattttaggaaatggttttcattctcattttgtaaatgaggatacttaagcctggcatattaactcattctgggtttcactacttccactttaatttcattattctttagagtacgctatacctgccagtgacttaaggcaaacaacttagtggtacacaagtgattactatttttttaggcattaagattttcaaagctctatagaaatgtttattagaataacagactatattctcaaccaccaactctctacctggataataacatgatgatgatagaaataacttattgattgatctcttccagactatcagtgtcccttacaacaatatgaattccataaattcaacactattttggtgtagtaacagaagtgccaagtgaagcatgtacatatagttgattgtaacaaaacgtttttaatctaaagttcccagggtgtttccatttttagtttaattttgctcatatatttgcatccttttaaatgattagttggcaaaatcaattctgtaaattgtgacaaaagaatgaatagatcaaccataaccggagatacctccctctcttatttttttttctgtatccaaatataggcaatgaataatcacgatataaattagagggccaggttatgcataactgtaaccctagtatggtgtcaggatagccattaatttctgcagttactaatggaatgccagtcagtgtggaatgcatctgaataaacccaaagaagtaaaaaatattacctatatatattgcattgtgatatggcatcaatgaagaggatc

SEQ ID NO: 282028 - DNA, 1000 bp, Homo Sapiens; identical to SEQ ID NO: 114853

SEQ ID NO: 282029 - DNA, 1000 bp, Homo Sapiens
tttaatgtttgcactctgaggtgcaacttaacagggagggcctgagaaaagaatgggagggggctattaattatttttagcaaaatgttgcctttgtcttgtgcaaacatgtagaatatgctctttaatttagtaaaatatttttttaaaaggtagagatgctttgttattgtaatcataaacttcctgaaattcttgtaatttttttcccatacttatcagaagtgtgtttaccaacttattcttgtttgaaagtgtgattttttttttccttcccaacctctcttgcaaaaaaagaaatgggtttctgctaatgaattgagcagacatctaatattttatatgccttttggagctgggtaacttaatatttggatacttgacaatttgttttattatgtaattgataaaatggtgatgtgtattaatgttagttcaaccatatatttatactgtctggggatgtgtggttatagttctgtgggagaaataattttgtcagtgttcaccagcttgtaaaaacttagtgcgagagctgaaacatctaaataaataatgacatgcatttatcatcattgagattggtttgcttaaaattaacttattttgtagaagacaaaatgaattgcacttcacttaatgtgtgtcctcatctttttacaaataaatgaaggattataaatgatgtcagcattttagtaaacttatagacaaaatttgttagggtcattcatgaaaactttaatactaaaagcactttccattatatactttttaaaggtctagataattttgaaccaatttattattgtgtactgaggagaaataatgtatagtagaggacagccttggtttgtaaagctcagctccactagttcatggtttggtgcaacttctgagcctcagttctctcctttgcaaattaataattacatacctgcctagatttcggaaattaatctaaatattagtatctggctacatgatggccatgtcaagt

SEQ ID NO: 282030 - DNA, 1000 bp, Homo Sapiens
cctcccatctcagcctcccacagtgctgggattacagccatgagccaccatgcctggataatttctacatcatcattttaagcttttttatgagcacaaatttattttttcatcaggaatcttcatttggttgtgggaggggtgggggtctgtttcttcctgggaccctgactcatacacataccacacccacctgagatgtctataaaagaagagctgactgaacagcgagattccctgttcatgggctggaagaattaacaggatgatgtcatttctcctcaaattaattcatacatttaaggcaattccaatgaaaacctcaataagagttttcatgaaacgtgacaagcccatctcaaaaattcttacaaagatgcaagggtcaagaacagccgaggcaagtttgaggagtaacaagataggagaatcattcctataagagaagaagacttcttataaagctgtaataacagagagcaagtaagacacattgacccaggggacaaaatcaaaagcccagaaacagactcatacaaatttagaaccaatacatgagtagatggcagagctggcataataaactagtggggaaaggatagatttcattttcagtatgatgctggaccagctggctacccatatgggaaaaatacaattagatctctacctcacaccatacaccaagatcaaccccaggtggagatgtcggcacaccatgaatttgaagaaattcaactagttccttttttccaacagcacagaacattggaatggaaggatcatattgtgattaatctgacttcactatactatgtttgtctgcctgtctgtctgtctgttttaaagcatcctaatagctctggtcatgtaatagcccaggattctttcccgaactggattgtggccagaacaaggactgaattttctttgagtacccccggaatgaaatgccacttgacagctggcagcttccaggaggtttagagacacttgctca

SEQ ID NO: 282031 - DNA, 1000 bp, Homo Sapiens; identical to SEQ ID NO: 195112

SEQ ID NO: 282032 - DNA, 1000 bp, Homo Sapiens
gaatgtggaaaagccttcaggggcagttcagagctcatcaggcatcggagaatccacactggagagaagccttatgaatgtggagaatgtgggaaggccttcagccggagctcagcccttattcagcataagaaaattcacactggagataaaagctatgaatgtattgcatgtggtaaggcttttggtaggagttctatccttattgaacatcaaagaattcacactggagagaaaccttatgaatgtaatgaatgtggaaaatccttcaatcagagctcagccctcacccagcaccagagaattcacactggagagaagccttatgaatgtagtgaatgtagaaaaacatttaggcataggtcaggccttatgcagcatcagagaacacacaccagagtttaactctgtgggtaagagttgtacaattgtgaaatgcaaggagttcactgtaggggtgagactccacagaaaagaaaagtttcctgagagcagaacttctgtccttccctcccagttcggtactataagaagacatgcacacaaagatgtttgttatgattattgaagtgttaaatggaagaaaaatgttacccaagtcttctccaaaaagaatggtagatatttccttgaaatgcctaacccatttctggatgagactcatcaatatccccttcactccactctctgccaactcagatataatttccattgggcaccttcacagtaatgccaggattggggcagagatcctgaaagagcttcttataagatggcaaatgtgcctggcaagagcatttgtattttgtcaggtggaggcatgtgctgagagttattcaactatctgaaatgttgaatttggaggttgtgaaaatattgaattatgctattagtttaataatatctgaggcagtaaaatagtacctgaggaatggtgcctcattctgcccccttgccagttgtctcctcaatcctgagcttcctgctgaggttaattcaa

SEQ ID NO: 282033 - DNA, 1000 bp, Homo Sapiens
gctgaggccaagagtgctggctcactggggtggaagggacttcagagggcgttcctcactcctcttattgcaggtgaagaaacagaggcagtggtcctttgccccaggccattcagctggccagtagcggagcccagggctacccagatcctccaatgcccaggctggtcctctttcctttctgaccccaacacatgaagagtccatctggaaatgttggctcccacacttcaaaacattaaactccttgttctctttctccaaatgattaatttgttttcagtgtttacattagctggaagccaagttgggaacactcctaactcgtttctcaaacaagatgtttttaaaatgaagtttcccagcatggaatgctttgctactttgtaagggcttcagttgctaagaacttactgcacctgtgtcaaaactgtgctctcagggcccctggtggagtccagaagaagagttccacgcagtccctgtttttcttttttttccaggaactcctggaaactgaatcacagatcagatcatgttgttccacaagaacgatgtgtcactgtgaggctgcattcctgaccacgaactgagcaccaaataagtcatggacatgcaccaaaaggtgtgacccaagggaggcagggtgagccccatgtctcagaacatcctcgcggacagcaaagcccttgatgtggtggagtaggggcctgtggcaacccctcacacatggcaggtcctttgcaaccccaagtgcttcagatgctaccagccctccttgggcaggtctgagatgtgacagagaagaagatgagaatgggaaaagagaaagaagagcggaaaactaaaagagggaagggcagaggaaagagcagaaatgcagtctagctggagggcaggctgctggctccagccactgcctcagatccccccgacctggggtactcaggagtctgagtgggtacagggctatagcctcaatttccccatctgatgtggg

SEQ ID NO: 282034 - DNA, 1000 bp, Homo Sapiens
gaagactttggagagtggtgttccagtaataatatccggccgttagaatagtctcctaaaccacagaaaaatatataccagaagagtatctaattcaagaaagaggaagatatgtaacccagaaaatgcaatcaggtctgccatacggaagcaaatagatggcatctgtatggcagacctggagaggacagaggggctcaggggggaagatgtactagtcatttacctatgggtccttggctccagatccatattcctgtactcaactttgtgatgcttaggttaggactgtacaaattgtatttcagagacctatttttcagcactagagaaatattaggaggtaaaagaagaggagctgggtcttcctatttattgctatttctgtcaatatcaatctacagtggtaattcatttccacatttggcagctgaataaacactattgggaaaaaatatacacctgctttttaaaagtcattattatttaagttctccctatccacctgaatagcacactgttcaaagctcatatgccattgcaaaaataattctaaaatttgtttggaaccacaaaagcacctgaatagccaaagcaattttgaggaagaagaaaaaacatgaaatcacacttcttgatttagaattatactacaaagctatagtgatcaaaacagtatggtatgggcataaaaacagacacatagaccaatgaaacatactagaaagcctgaatataaacccaagcacaaacagttaactaatttttcccaaagtcacaagaaaaacaaaatgagacaaggatagtcacttcaataaatggtgttaggaaaattagatatccactcgtaaaaggataaaattgaatccttatctaacactaaacataaaagctactcaaagttgattaaaggcttaaacataagacctgaaactataaaattcctagaagaaaatataggaaaaaatactccgtgacattggccttgccagtgatttat

SEQ ID NO: 282035 - DNA, 1000 bp, Homo Sapiens
ctagctaataaatgtcctcttcaattacatttagataatattgctagatatgtaactgtaatttcttttaatgtcctcatagaaaaagaatcaatttaaaacaaattaaacatgttattcttttagtgttcaaatactaagcattcactttaaaagactataccaaaattgttttaagctttcttgtaatgcacaaaattttaacatatttattaatgtcttctgaatataaaagtaatgcatgtttataaaagactaagaagagtataaaaatgcaaataaaaactatctgtaacttaatcaaccacatacaaccacatttctactatttaaaaataaagcaagcatggatttgtaacagaagaggaactaataataaaaatgaacggcatgcttatccatttttattaactcatatatgcaaagtaacgtccttaaaaataaattgttctacacgaatacatggacaaattaaaggcttttaaatcaataacatcttttggatttaaatattaaaagttactttgagaagattttagataaaacatttcattgtgttattttatcacacattaatttattcctcttcctcttataggtttcatccaaagaatatcaaaaggaggcctaattaaaaccaaaagaaaaagaaagaagcagagagtgaaaatagcatatgaagaaatttttgttaaaaatatgtgaatttgttatagcaatgtaacattaattctactaaatattttatatgaaatgtttcactatgattttctatttttcttctaaaatgcttttaattaatatgttcattaaattttctatgcttattgtacttgttatcaacacgtttgtatcagagttgcttttctaatcttgttaaattgcttattctaggtctgtaatttattaactggctactgggaaattacttattttctggatctatctgtattttcatttaactacaaattatcatactaccggctacatcaaatcagtc

SEQ ID NO: 282036 - DNA, 1000 bp, Homo Sapiens
ctcagaccagtacagggttttgggggcccagaggacatccctgggcccaggtaggaggttagaacagggttctggagatgacctctgacctcctcctgagggatgagcagcagttttccagaacaaaggattgcagggaactgtcaggcaaaaggagttctgagtttaaaggccttagcctggccagcatggtgaaaccccatctctaccaaaaatacaaaaaattagctgggcatgacggtatgcacctataatcccagctagtcaggaggccgaggcacgagaattgcttgaatcaaggcaacagaggttgcagtgagctgagatcgggccactgcactccagcctgggtgacagagtaagagtctgtctccaaataaaataaataaataaaatcaattaattagaagaaagccttggaggggagagagaccttggcctgtgtattggttccactgaccccctgggtcaccatcgtcactccagctcctgtgactccctcagtgggaccattttcattcttggtgattataggatctgtgattgatggaacgccccgcctcctggcttctcgccctcctctcctccatggtcctgtcctccagcctgtctcagtcactcaacccttgaccaaggctccccacacttattccataaagagccagggagcaaatttattttaattttttgagacaaggtctcactctgttacccaagctgaaatgtgatcgtggctcactgcagccctgacctccagtcgcagcctcttgagcagctaggactacaggcatggaccactatgccgagctaaattttaaatttttttatttttattttttgggtttccctgtgttgcccaggctggtctcgaactcctgggctcaagtgatccaccggcctgggcctcctgaactgctgggattacaggtgtgagccattgcgcctgaccagaatcaatattttacacttggcaggccttacagtttctgcaacaaccact

SEQ ID NO: 282037 - DNA, 1000 bp, Homo Sapiens
tcaagattttaacttctcaggttattaatcaaaattattgtataagttagccaatagaatttttaggttaaaacaacagatggggggtttgtggagtgtttaatgtcatgggcatttttagtagcatagaccctttgttctgcatttgaatgtttcgtatatttttgtttcacagttaatcttccctccccaagtttgctattcaaatcaactgcctgaatgacatttctagtagtctgatgtatttttctgaggaatagtttgtgattccaatgcaggtgtcttcattaccattacctctacactgcagaagaagcaaaactcctttattagaattactgcacatgtgtatggggaaaatagttctgaaaggctagaatgatacaagtgagcaaaagttggtcagcttggctatggagtggtggcaataatctctaaacattccaaaagaccatgagctgaacctaaactcccttggaatctgaacaaaggaatataaaattgccatttgaaaactgaccagctaatctggacctcagagatagatcagccagtggcccaaagccatttcaagtacagaaattatagagactacagctaaataaatttgaacattaaatataattttaccactttttgtctttataagcatatttgtaaactcagaactgagcagaagtgactttactttctcaagtttgatactgagttgactgttcccttatccctcacccttccccttccctttcctaaggcaatagtgcacaacttaggttatttttgcttccgaatttgaatgaaaaacttaatgccatggatttttttcttttgcaagacacctgtttatcatcttgtttaaatgtaaatgtccccttatgcttttgaaataaatttccttttgtaattttgttttgtgtcttgatgtgttataattatggtaacttcagattcttggatagttattaacatttattgattgcttctactgtgccaataggct

SEQ ID NO: 282038 - DNA, 1000 bp, Homo Sapiens; identical to SEQ ID NO: 206248

SEQ ID NO: 282039 - DNA, 1000 bp, Homo Sapiens; identical to SEQ ID NO: 206249

SEQ ID NO: 282040 - DNA, 1000 bp, Homo Sapiens
tctttgatgagcagcgggacaaatcatctaagttttgtttcacattgtagggagattaacctgtggggggatgctcagactggcatggggcgacccaggatgaatgagggtcttcaggtggtgagattaggcaagtgggatcttgctgtgttgcccaggctgatctccaattcctgggctcgagctgtcctcccaccccagcctcccaaagtattggaattacaggcgtgagccactgtgcctggcgaatgtgtacatttcaatcatggatcatggggaagccatgtgtcagtgtctcaaaagcatactcaataggccggggccgtgttaaatgggatttgccccagccctgtctgattccttattagggagaacgatacttaccaatacttgtcacccactcgagtggcactatcctgtgaagatggtgacagatgaggaaatcaaggaatggggaggtttattttttactttaaattttttgtttgttttttcagagtctcactgtgttacccaggctggagtgcagtggcctgatcttggctcactgcagtctctgcctcctgggctcaagtgattctcatgcctcagcctcctgagtagctaggattacaggcgcctgccaccacgcctggctaatttttgtatttagccaggcgtggagacagggtttcgccatgttggccaggctggtctcaaactcctgacctcaagtgatctgcccgcctcggcctcccaaaatgctgggattacaggcatgagccacctcactcagccaaaaaattttttttagagacagggtcttgttctgttgcccaggctagagtgcagtggtgtaatcacagcacatgcagcctcgacctcctgggttcaagtgatcttcccacctcaacctcctgagtagctgagactataagtgtgcgccaccatacctggctaatttattttgtagagacagggcctcactctgtcacccaggctggagtgcagtggtgggatc

SEQ ID NO: 282041 - DNA, 1000 bp, Homo Sapiens
cctcagcctcagggatatgacacatgcccatgatgagaagcagaatgtggtgacctttcacgaacatgggcgtggctgcgaacccctcatcataaggtgcatagcaagtgaaagcaagtgttcacaacagtgaaaagttgagcgtcatttttcttagtgtgccaagagttcgatgttagcgtttccgttgtactttcttacagtgtgccattctgttagatattaacattttcactgttcagcaatacatgcttaatgcatatttcggtttgtgtatccatgcacctaccttagaaaacaagtatagtcaggtattctctccatagaacagcactaccctcctctctccccagatgtgactgctgaggggaggtctgagtgtttaatttcagattttttcctctgcatttacacacccccccacacacacacacaccaagtaacactataagcacctcccatctgcttgtactcccctcatccgattcccctctatcagtcactgacagttaataaacatttgcaaacgttccccagttgtttgctcctctcattattgtgcacacagctctctgcatgtgtatgaatatttctttaggaaagattcttagaagtggaattgctgtgtcaaacgagtcacttattcaacaaaaaactaatgagtgcatactcgtgctgagcgctgttctaggtgctggagagacatcagggaacaaggcagacagatgtttctgacccccattctagaggaggatgtttcccgttgttgggtttcttggtttgtttgtttgtttcttctagagatggggtcttgctctatccaggctagagtgcagtggcatgattatagctcaatgcagccttgaactcctgggctcaagtgatcctcccacagcagcctccagagtagctgtgactacaggcatgcaccatcacgccccgctgatttttttaggttttgtctagagagtctcactatgttacccaggctggtctccaa

SEQ ID NO: 282042 - DNA, 203 bp, Homo Sapiens
aaatggacacaggctaacttaaggaaaaaggaaatctataaagctacgtaggagctttgcacagtggcagtatcgtagccaatgaggtttatccgaggcgtgattattgctaattgaaaagctaagtaagagctcacagaatcaaaggagccaacttggaaagggtaggaaccagagccattccagagatccaggaagcagga

SEQ ID NO: 282043 - DNA, 1000 bp, Homo Sapiens
cagcaaccgctccggagaccaccgtggcaaattcaaggtggcgtccccccgtaaaaagtacgcgctcggggtcccggtggccggcacgtgttaccaggccgagtgggacgactatgtgcccaaattgtaggagcagctgtctgggaagtagggggcagctcggcgacctgaaccgtcctggaggccccgagctgtgttctccagttcagtgctgcatgtaccatagctttctcctcttcccactcccctttggacagacaagacctgagcactgagatggtggcttagggtgacttttcctgctgcctggcctttatcattctagtcactcactctgttttatgttttgatcaattttgaacttcattttgggggatattttggtattgtgatggggtcatcaaattgttattatgaaaatagcaacccagaatttaaagaaaaaatttggcagaaatagaccaggtctacagtaatagagcaaagcatcaaagaatctttaagggaggttaaaaataaataaataaggattggttgcctctgcctttgtgatcctgagaccagaactgtagcagtgtgtttttatggcaccatcgctagacaaccagaggctcgcaatgaggctcagccccaacacgggcctctcagttgccttaataggcgtcagtatctcactctggtccctttaaagagcaatcctggaaaaaggagtagggagagtggctttgctgttgttggggcatggccctgtagatgggcagcagtactagctgaccgcttatcaggaatccctacatctgtgtctgtcaaattgattgctcttcatgggggtaagaaaagctggtctggagttgctgaatgttgtgttaattctgctgtttgctgatagttgaataaaaataaaaaccctgaatgaaaaatcatcatcatcataatttttcagctgtcactacttattcattgtcagggcattcccatcatctattctgaagaaaggcaa

SEQ ID NO: 282044 - DNA, 1000 bp, Homo Sapiens
agtgagactgtacataattgcatgaaaatatctatttttatcctaagacatttttcattcatgagtagtttcaagtttttcatactgtacacatttcgtaaaacacacgataccagaagcaactgaaaatgaatgctgaatttggtatatgtgtgttatctacctcaaagtaacaaaaatatgcggcaaaacataccacccatagtgcttcacaaaacgcacttctatttagccagtgtgtattgtagtaaactattcttaataagactcattcactgtttataaatgttctggtattcattctttatagtgaagtgttaatacatcacatcttatttattttagcaaatcaatatattttctgtatttaattataaaaattaacttagtttttaaaatttatttgcaaatacactttttccatttggcactatggtttgttgcctacctagccgaatctatgtcagtttatcctaaggcggtccacatactcattttaagtaacgtgctcactgtgtataggaatttgtattttggaggtgcttgatctagctacaaagaaaaattaattaggaattactttattataaaatgctctagaagtcttaattgtgtttatttttttaaaaaaatgaatgttagaattgtgtgcatggaagtaattaaggtacatcattattatagtttaaaagttgtacatgataagacattttgttttcactgaatgatctattccccatcccaaggcaagcatgaataaaattaggttaaatgtagcatgtggcgtcacagtctcttagaatttgtttcatctattttattttattgaatactgtctatatctttggttatcctgtttgaagtaaaaggacaaataaaacatggccagcaaaaaaaaaattaattaattaattaattaaatcaactataaaagcaagaaatgtactattaattgctagatcagttgtggcaataattaattaaaactaaagattaagag

SEQ ID NO: 282045 - DNA, 1000 bp, Homo Sapiens
tggaacattctgattggataacaagacttttgttacagtgaccattaaggaagcaagactagaatctattatttacatagactccaccccctctgacgacaccgttgtaagttaaccaattaaagcgcagcactttgcgagtcttcatttgcatacaggctctataagtagcgcataaccagcccgttttgcggtagttcggattacttctttaagtgtctgttctcttttttcgcgcaaaaatgccggatccagcgaaatccgctcctgctcccaagaagggctccaaaaaggctgttacgagagtgcagaagaaggacggcgagaagcgcaagcgcagccgcaaggagagctactccgtttacgtgtaggaggtgctgaagcaggtccaccccgacaccggcatctcgtccaaggccatgggcatcatgaactccttcgtcaacgacatcttcgagcgcatcgcgggagaggcgtcccgcctggcgcactacaacaagcgctccaccatcacatcccgtgagatccagacggccgtgcgcctgctgctgcccggcgagctggccaagcacgccgtgtccgagggcaccaaggcggtcaccaagtacaccagctcgaagtaagagtgtgcaagggacgcaatagatcaaccacctaaccccaaaggctcttttcagagccacttcagtaattgagaaagcagctgtaaacacttgtcagagcgtttgatagcttttggtcaggtagggagtgttaccatggtcacggatgcattcgggtttaggactaaggagtttcctgtagtcctgtaatgagttggccctcagtcatccccgtctagtcttactgagttgcttgttatctgtgctacgagattagaaaggtttgactcattctgggatatttgggaaggatggagggaaggaggcggggggtggttctacaccccttcagcctttaacctgtatctttaaagtcgttttcctttttgtttctgaaa

SEQ ID NO: 282046 - DNA, 1000 bp, Homo Sapiens
gatcataaacacattcagcatcctgccctcgcccaaggtgtcggacaccgtggtggagccctacaacgccaccctctcagtccaccagctcatagaaaacgcggatgagaccttctgcatagataacgaagcgctatatgacatatgttccaggaccctaaaactgcccacacccacctatggtgacctgaaccacctggtgtctgctaccatgagtggggtcaccacatgcctgcgcttcccaggccagctgaatgctgacctgcggaagctggccgtgaacatggtcccgtttccccggctgcatttcttcatgcccggctttgccccactgaccagccggggcagccagcagtaccgggccttgactgtggctgagctcacccagcagatgtttgatgctaagaacatgatggctgcctgtgacccccgtcacggctgctacctaacggtggctgccattttcaggggtcgcatgcccatgagggaggtggatgaacaaatgttcaacattcaagataagaacagcagctactttgctgactggttccccgacaacgtaaaaacagccgtctgtgacatcccaccccgggggctaaaaatgtcagccaccttcattgggaataatgcggccatccaggaactcttcacatgtgtctcagagcagtttacagcaatgttcaggcgcaaggccttcctccactggtacacgggcgagggcatggatgagatggaattcaccgaggccgagagcaacatgaacgacctggtgtctgaatatcagcaatatcaggatgccacggccgaggaggaggaggatgaggagtatgccgaggaggaggtggcctagaactctccttttctaggtaaaggggggaagcagtgtggattctttactgtgttctgacagccatgtgtcactatacgcttgttaatttgtgtcttcacatctcctgctgcgttttaaagcatttttatagtatgcggttttgactaataa

SEQ ID NO: 282047 - DNA, 1000 bp, Homo Sapiens
tgggctcacgagttgcttgtggcgttctcgttgctgggcgagctggaggaggacgatgacgacgaggaggagaagctcaccccagtgaggccaggggggttcgtggccgtgttctgtcccgtgaggctttttcggcagacggggcagctgtcgtgctttgtggggacagaggcagggacgggagaaggggcaggttagaggcgggagggccgcggtcggggtgggggggcgggtgggcggggcactcacctgctccagccagggcacgatgcagccgtcgtggaacaggtggttgcagggcagctgccgcacacgctcacccagcgcgtagtcgtccttgcacacagggcactcgagcccggagcctgcgggagtgtgcagctgcggtcacagcgggcgtggggggcctgccgagccttcaagggcaggctactccacagcctcagccggaggccgcccctgagcccagcgaggggagaaaagccgtgtgtgtgtcccccgggctgccagaggggacctggacagaaccctctcctcccagcccaccttcagggaaatgctcgaggccgggtgcggtggctcacgcctgtcatcccagcactttgggaggccgaggcaggaggatcacctgaggtcaggagttcgagacctgcctgaccaacatggtgaaaccctgtctctactgaaaatacaagtatgagccaggcgtggcggcgggtgcctgtaattcccactactcgggaggctgagctctcatacctacgtgctcctcagtgacggggacggtggggagggcctggattttctctttatctgccggtggggggcctgtgttttcaaactgattgaggagctgaaagacaagaggcgagagtgccgggagctcctcgggggcccggcccggggctctgaaacgcgaggctgcaggacctgcaaaagcaccgaggccgcgtttgtcctgggccctgggccccttggagcccgcccggggtcggagatc

SEQ ID NO: 282048 - DNA, 1000 bp, Homo Sapiens
ttattttaaaaatttatcgtcatattagcagtgatattataggggtatatgataaagaagtacgtaatcccaagttttagccaccctgtgtaaatgtagaagttaaacatgtaagagactctgaaaaaggtataagattttagtgtttgtgattgagatggaaacaactgcatgggtagtagtctttgttctccccaaatcttgtttactataaaaataatttctaaaagtcacttgaaaatggacaaactaaatgacaccctagcagctcagtctcttatattctgaggtgtatgatgagataaactgattcaaaatggccctagtgtgaaaacttcctgttcaaatccgaagtgatacattgatgaggaatctgctttttgcactcttgcctcactctgagctttcacagggcagtctgtgaagatcagagatatctgttttttgttttttgtttttttctgagacagagtctcgctctgtcgcccaggctggagtgcagtggctcccgatctcagctcactgcaagtacgcctcccgggttcaaccgttctcctgcctcagcctcccaagcagctacaggcgcccgccaccacacccggctaagtttttgtatttttagtagagacggggtttcaccggatcacagatgtcttttgtgtcgttaagaggtaacctgacctctccactaaggggcgtgtgactttctgatgacagaaggtatgtgttgctagtctcctgtttctctactagctcatctcctttagtagaaaattgtaaatattaaatgtgatgcaacaaggtaaagttaatacagaataaaatcaaagtagaactgtctgtacatgaataattcagggtgaaaagcaacccaaaatataatatatgtttgaggatttcttaaagtatttacattattgcctgtggagaattagtcaagcacatgcatacatcataataggtttgttaatcaatataatttagagtgaaaccgataaat

SEQ ID NO: 282049 - DNA, 1000 bp, Homo Sapiens
acaattgattccgtaaaaagctaagacttggggttattagaatggaattgtttgaaatgcttgttccccggtgtcataaaggaataggacttgaacataaatttaatttatttagtaaggccattttttacttcctgcagaaagggtacactcactagcagttctgccatgagagtacaccgaacaaaggagacagggtcatttataacctgacatgtccacactactgctgtgtccggtttccactggctggaacgggacctcacattctgtatttgtcccgattggctagcaacttagaactttttaaaagaggcaaaggtagaggagaacaaaggaaggaggaagtaacttgtggaatgctgagaaagataaaaacacttttaaataaggaagaggaacaggctatgacctaacgcttgcttggaccagtataagcatgccagggcaaatatttaggagcacaggtctttgaataaattttgcttctaagagaagttactgtttatttctaattagatggggaggaaagtctttgaagaggaacctctactttactttttacaatattccccctttttttatttcataattcctcctcagtcttgtttaatatgttttgacttaattctttgtccttctaagagaggtaattttttttcaatagggtggaggatagttaggagttaactctgtaagagcagcagagacaagtttttgcataaaaccttgaaggcagggcataatataacagtctacaagaataagtacaccaatagtaagggtaaacgaggtgagaattgaattgaagttaaatttttttttaatttatggttacctaccagaccaacatggatttaaattttgcagctatttgatttttgtgctttaaacttatttggcacttctcacggaccttaataacatttacgtaaacctgaggattaaaggactcaaggagtttcctttggctgcggtgttttgtttttacctttttaga

SEQ ID NO: 282050 - DNA, 1000 bp, Homo Sapiens
caattagaaggaggacatagggtttgagccagagctaaggcaatgaagcaaaagagtgattggatgccagttaagctacatgcttgtttttatttattagtgtggcttattattgttattattatttacagtttgtttttctttagtttttatatggattcttacatttacataatttacttcatttgagatacatttggttgagcctactggagagcaggaatctggtagaagtgcagtgtttatatacatgtccagtcaacccctcccttggatggaataattgagcagattgtgcatatttcttttctttttttttgagatggagtctcgatctgttggccaggctggagtgcagtggctggtgtcagatcactgcaagctccacctccggggttcatgccgttctcctgcctcagcctccccagtagctgggactacaggcgcctgtcaccactcccggctattttttttttaatttttagtagagacggggtttcgccatgttagccaggatggtcttgatctcctgacctcgtgatccaccccccttggcctcccaaagtgctgggattacaggcgtgagccaccgcgcccagccggttgtgcagattttttagtggaagttataaacttcatgctgggcattttcaagtaatcagcaagggtcccatgatcacacatccaggctgcactcttactcatgaacaaggtatgaggccagccttttcactgttgagagtccatcaccttccatatggcacatccaatcagtctatctagagtcaggccactagaatcgggagaggaaggtagaatcttaaagggttgtttggagcaacaaatgatgaaaggggtcagggttccatcacgtggtataactctacaggggaggacctctattagaatgaagaggttcaagtaggaacctttccgtttttggcacaaggtgtgcgaaaggcacaagctatacctctggagacaatagatcctcgagctc

SEQ ID NO: 282051 - DNA, 1000 bp, Homo Sapiens
ggcaaaggcgggcttgtgacagactgagcctcatctcggcagctctcacacccatggatcctgagcctgattccccaggagggttggcgacgggagggttatgttaagtggctgcgtcttccatctcagggagccccacactggggaacgtcaccactatagcggctgagaggctttgggtcctcatttactacataaaattcccccttctctgtacttgggtcctgacgcctccgctggtcccaggagtttcactccgtggggtggggttgaagggtgcggtgaggcccagaggggctgagtctgcttggaagggtgggccttctcccactgcgggtgctaataccctgtgcccatatcctagccaccctgtcccttatccacataccccactctggtatttcaacagcccagagaccaccacggtgcttgggggctctcggcaagggggcgaagcctccctgagaacttctgcaggccgcccttctcttccctttcctgccggggctcttgctgcagagaagctctctgccacacttttttttttttaaataaaaaaaatgaaaataaagaaatcatttatgtttcaaaactttgattaaaattgaaaacagaaacaccacagcacttcccgtttcctctgcatctggcaccactcacctgggtgcagagggtgggtgggtgcatgccagctggtcattcgcccggaaatctctgggaggaagtatcagcacagcctagcagggcgcctgggactggctctgtgggctggccgtccctctggctggggacacggggaggccgagcgtgtccgcaaagacacgcgagctgtccacctttctgggctgcaggggtctgcagaacctcggaacctcggaggggctctctgtctgcttcagcgtctctttctcaagtgactgaaagcagaggctccctgctgcgttacaccattgagtcctttcgcatctgtgcgcatcccgcttccatcgctgcggggatc

SEQ ID NO: 282052 - DNA, 1000 bp, Homo Sapiens; identical to SEQ ID NO: 195281

SEQ ID NO: 282053 - DNA, 1000 bp, Homo Sapiens; identical to SEQ ID NO: 201479

SEQ ID NO: 282054 - DNA, 1000 bp, Homo Sapiens
tgaaatatacttttaagtgcccgttttggtgccactggccaaaattaaaactctccttccgtatgtgaggtgacttgagatttcttttttgctttaaatgcctgccttcagggtacgtgaaagtgggagaccggttggaaaactggggctaagggggctgggagcgagatggctgtgactgaatcaggaagctggatgtgagagagaaaaatcctcctccagcctcggagggggtgtctcccctaataccagctccctccccccgggctcgtggggcgggtctggtttgctcagtagcggcagcggccgcagcagcagccccggggctgagcagcggtggcctcctggcagcgcagggaagcggcggctccaagagcgcgaggccctggggagatccggccaagactgctgccgggatggaggaagcgtccagtggagcaggagtcaccggggacgaatttcctccccagctcagctcccctacagcttggctaggcctgctccgagcgcctgcaaggtggaggaggcctgcgcctcgggcctggcagcggcagccggcgagggaggcgggcacagcggggtaaccggcgagccgtagccgctctcgaaaacctacgctgccacggccgctcattgtctctccccttccacccgggggcaaacaggaagcgcgccgcctggcagaccgacggacaggcgcctggaccaatgagcacagccgacaaagagcacggcggcgaatgagagccaagaagaggggcgggagttccgggcgggctgtcaccctcttccccccttttgggctggaggctccaccttttgtgtttcccgcacagtcaatcaaaataggaaaaaaaaatccccggaccgctccggccgtgtccgccgccgcttcccgcatcctctcccgccgccgccgccttcgctcctcaccatgtgtaaggcggcggggagccccgcctgaggtgccctaaacacactatgaccggtacgtaaagcc

SEQ ID NO: 282055 - DNA, 1000 bp, Homo Sapiens
ctcggtcttcccaaagtgctgggattataggcgtgagccactgcgcctggccggaagaactggtttttaggagatggtgactggggactgtgagggagctgagcatggcttgatagaaatcctgttagagagatgattataatgttcaaaatcatgtgtgtctgagtgtgttcgtctgttaacctggcaggcaccccatgtatatgtgcatgtgtatgtgtgtgtgctattgtgagcttgggcttgttagagcctgtattggcgtgtgatggggttggcacgcacactcatgcaaatatatgctgtgagtgttattgtgtgactgtgctggtgggtcaggtgagtatggagtgtgaaagagagctgggtgtgggtggtttgccctatgtgacgggggttgtgtaagtgtgccaggggtgataggaaggaaaagtgaaggcagaagtcatgctgggcagagcccaggccttctggcttcctgaagagggcaggagctgggcagggggctgctgacagaaacattggcagagacttcatcttccttgtccttctgtctcaccctcaggtctctgacccctcccaaggatcatgccgcagccccactgacccaggagtaggggcctaaggggtgagtggggtagactgagggctttcagggtcaggaaacagggtgggggtggccttcctgaaccccacaactcctcacagcctcctcctcctacaaggaccctgttgctaggtaacggatgggggagccagaatgaggcagcttgagaggctgaaggctggacccacgacaggaaatggccttgatccccctctgcagtgactgtccaggtgcagacacacagcctcacacacactcacacacaaacatgcgcagatatatagacatacatgcagagatacacacatccagagacaggcacactgctcccacacagagatggtgcacattcatagacacacagacacagagacacccactcacacagacagg

SEQ ID NO: 282056 - DNA, 1000 bp, Homo Sapiens
attttactggtatgtgcatacaatgacatttttatataagatattcagtctctcagttctaaaatttgtcctgttatctctttatcgtttttacttctctgttgagattctccatatattccctcttatgaccatctattccttaaatccttgaatatgcttgcaatagcttattttaaatttcttatcttctaatcccagcatgtgggccatttcactgtcttaatccattgtttactttttttgttatgcatcatattttcctggttttatgtctaggcaggttaaattatatgttagattatgtgtatgatattttatagagataggatcttctattttcgtttgaagagtgactcttttctaacattagtcttttttctgtagtcaaacaccaaactttcactcctgagctatatgcaatggaagaaatctctgctctgtactagcaatttagctgttgttttctgctagattcatggagtctctttttatgaatgtgaaatgtagcagccatcttatatctgaatgaagttgaagtgtgattttagatttttactctgtgacattctcctctgtgagctttcagttgtgtgagatttcctcccatgtcattcaaatttcccagttcttcttttctgtcagcctggaactctgtgctcttattcctcaagctagtaaaactcaccactttactcgtagacatctaattttgcacagactgggaagcttcatgaggtgtgaagttgcacttgatgcaaatttaaatcgaattgctaatttctttattcaatggtcaaatacttctatcagtggttggatattctactatttctgcctgttttctgtttctcattgccatcaaatgtgtatttaattttttttacagttaatagtttttttccctgcatttgagttagacctgagctactaccacattttgtaattcaaactttttgtctaacaatgttttaaaaaactctttatttggagggaattc

SEQ ID NO: 282057 - DNA, 1000 bp, Homo Sapiens
gctgcgatgccagactaagagatggagttttctgtggaagataaaagctgcttcctttatttgaagaaaattaaagtttattccacagatcagtggttaactctccagggcaagcccttttcttcctccaaacttcaacacatatttctacaagtcagggaaatatgaatcttcttccttggaccagctaaatggatatcctgtggcaagttatttggaaacaataaaacaggcaatcacctgcttaagtggcacaatcagaaaggccaagagagacttccgacctttcccgaacaccttaataattgaaacttacattgataccattctgtttgcaaaaagacagaaattccctattttcaaggttcttatgtggttctgaaccattcctttgaggaactggtgtcaactactgtcacattatattaaagacctgacaaaaaagagacatgggattgatgtttttaactgagcagaagttgaaagctactggggcagtacctaggggactttaggcactgaggggctaaaaattagatatattgtggtgcagagagatgaaggaaggaagggaatcaaagaaagaagaagcaatgacaaccaaaggcaaattttgcctttttctagctcctaatctttattgtagcagttatctcttattaagcactatgtaccaggtgtgcaaaggtctttgcatgtgtttgctcattacacctttacatttctgtttacaaggagcagaggggtttagggccctggctccagaggtttctccctagtaggggatgagatcatcccatgccatgtgagcttgtcaggaacttggcatagaccctgaggttctactcagggcctgaggttctcaagaatgaacattcctggacattcagtaaagagttgttaatatccctgcctggatccctttctttctattttgagaacattaagagagggaaggctactgacacttggaatgaatagtcatgggaaagaaaacagt

SEQ ID NO: 282058 - DNA, 1000 bp, Homo Sapiens; identical to SEQ ID NO: 195283

SEQ ID NO: 282059 - DNA, 1000 bp, Homo Sapiens; identical to SEQ ID NO: 195292

SEQ ID NO: 282060 - DNA, 1000 bp, Homo Sapiens
aaatagacagacaccctgactgttgaagggaggtttaaaaacagatattcaattgaaatgtaagagagcaccccaattgagagcccaggttacgaagacaagcttgcctcgcctgacttttctgtcccttgttctgcaggattagtattctgttacagacctctagtttttagactcttcaattaaagggccaatggttataacctgcattcccttttttgttcttctttatgtataatatatagttcatgtggcgctgcatgaaatcaagaagtgggtgtcttaggataaaagataccaagagtctacaaaaataaccatgtagtaagataaactgctgaacaaaggttttactgttagccaccttctcatgtgttttcttttctctttttctttttctttctttctttcttttttttttttttgagacagagtcttgctctgttacccaggctggagtgcagtggcacgatctcagctcaccgcaacctctgcctcctgggttcaagtgattctcttgcttcagcctcctgagtagctgggattataggcatgcaccactaggcctggctaatttttgtatttttagtagagatggggtttttccatgttggccaggctggtcccgaactcctgacctcaggtgatccgcgcacctcagcctcccaaagtgctgggattacaggcatgagctaccatgcctggccttctcatgtgttttctgattaaggctcttgacttccaaggctgtgtggggagatggggtggggctcttggactgatataaaactttgtcaaatgtagttctttgaatggagcttgaaacgccgcatattcttgctcccacaaggatagtgggcatcatgaattaataaaacgtcctaggtaactgcaagctagactggtctcaggcctcttcttattgccccctatccctagacaagttaagactgcaagtggggattattggccttacaacattgttggtagagaggaattc

SEQ ID NO: 282061 - DNA, 1000 bp, Homo Sapiens
tacagtattcataataatttgacccaccaatattattcacagaccacttagggccatattttattctataacatttaatattaatgtttgttgactttattaaacactcagcattctaagtaaatattagtagccaagtatattgaaaaagttataatttaaatggcacacatattattttggaaaagtaaatataaattattttttgttttacattcaattcaatatatattaaatgtcttgttagattacttatattccttattgtcatgttttagaaaaaatatcacaatatttatatttgactattagctatgttttaattcacagcctctgaaatgaattacattttgtgtggtcatttctttttctttatattttttctttttgagacagagtctcgctcttgttccccagactggagtgcaatggcgtgatatcgactccctgcaacctctacttcccagcttcaagcgattctactgccttagcctcctgagtcgctgggactacaagcgcccaccaccacgcctggctaatttttgtatttttggtagagacggggtttcataatgttggccaggctagtctcgaactcctgacctcaggtgatccgcctgcctcggcctcccaaagtgctgggattacagatgtgagccactgtgcctggccttatgtggtcatttctaaaggcagttaggtaatttaggcttgtggcaaatttcaagaagacactgaggaggaaaagggcatggcagattgtttggggtggcaggaaaaaaagagaggaaagcaataaaaggtagaaagggagtaggcagtggggaaaaaaacaggcaagcagagacgagtgcaacatatcaaatatgctgaatatcatttcatcaaatacattaacttctttttagatgtaacctcaatgttagattccacccgacttttaagaaatttttcatcaattaaagcttttgatgcaaaaactgcagccaaatgattaatg

SEQ ID NO: 282062 - DNA, 1000 bp, Homo Sapiens
aacaagattgctaccctgatttgggacacttgagagaacttgaaaaaaatgaccacccttaaagccctagaaaaaagttgtatgtttgttaacagctatgctgcgctcactttgcattgtgtgttcttgaaagctctgtataaatcaaaattttgacgacacactaaatacactagagaaatacactatagaggaatccttttatagggctgaagactcctttggtaagaaaaatatgctgcattaggggcagctgcaagtttactatttctggggaagaaaagatcaaaggtaagagccaggtttgttttttaaagcaatcaatccaaacagtttgggtgtttgttagttgttacccctgaggggcttgaggtgtaactatatcagctataaaaatagcaattccatacatttaattaggttactttatatctttcactcttccccatggctgtaataatggagattgaatgagactaaggctaagcccaactccactcaaatccaagtcacacgtcaccttggctgcagtacagggaagctccgcacaccctggcttgggaaagtttcggccgatggagcccaagatgcagggcaaccatctactctttagggttctgatgattccactccagaaaggtgcatgaagaggtccccgagctctgtcatgtcgacatcttcattgttggggacatgccggctttctcggttctcgatgaaatcccagagccgcactgaattaaagaactgcaaaaacagccagtggacatgcctggttactgctaagagcaacaggaaggctgcgttccttgatcgttcttttgcctaccccatttctctgccaggaacggtacctggaaatgcccacagctgctaagtgtccccaactagagatggctaaagtccttaccctcacagtgccttgagaactgagctgtttccgaggtttctcaggctctgctagccgcccatcggggtaagcatggcgataaagacattt

SEQ ID NO: 282063 - DNA, 1000 bp, Homo Sapiens; identical to SEQ ID NO: 206243

SEQ ID NO: 282064 - DNA, 1000 bp, Homo Sapiens
ctgatccccagggccttcatggggaaggaaggagggggcttgaggagctcaggcctgctctgactgtgccttttttccccctcaggtttctgcaaatgcgtgaatgagccggatgccagcctctgtcccctggagcccagcgtgaggaagaggcatgccccatcagccttcagcttgagcccggcggcccccgcccccgccccctgccaccctgcactgccccggctcccccgcggcccccacgctgcagtgcggccgggccccctccccgcaggggccgcccccgccgcccacccctagcgcccgtggtggtggtggtggtggtggtggtggtggcccgggccgcagggccatgaaactacaggccgtgatggagacgctgttgcagcggcagcagcgggcgcgccaggagctggaggcccggcagcagctgccccccgatccccctgctgcaccccccggccgggcccgggctgcccccgacgaggacagagagcccgagagtgcccggatgcagcgggctcagatggccgcactggcagccatgcgggctgcagctgcgggcctgggacacccagccagccccggcggctctgaggatgggcccccaggctcggaggaggaggacgcggcccgggaggggacaccgggctcacccgggcgaggcagagaagggccaggagaggagcactttgaggacatggcctccgacgaggacatgtgagttggggtctggggcagggccttctgggggctgttactggctctgagtgtcactctgctcatctgcagaatgggagtaagggtcaggtcgcgggatctccttcctgtaattccagcagtttgagaggccgacgtgggaggatcacgtgggcccaggggttggagaccagcctgggcaacatagcaagaccccatctccgcaaaaaattaaaaaattagccaggcatggtggtgcacctgtggtcccagctactggggaggctgaggcaggaggatc

SEQ ID NO: 282065 - DNA, 822 bp, Homo Sapiens
ataaaaatggcttccaaaagagctctggtcatcctggctaaaggagcagaggaaatggagacggtcatccctgtagatgtcatgaggcgagctgggattaaggtcaccgttgcaggcctggctggaaaagacccagtacagtgtagccgtgatgtggtcatttgtcctgatgccagccttgaagatgcaaaaaaagagggaccatatgatgtggtggttctaccaggaggtaatctgggcgcacagaatttatctgagtctgctgctgtgaaggagatactgaaggagcaggaaaaccggaagggcctgatagccgccatctgtgcaggtcctactgctctgttggctcatgaaataggttttggaagtaaagttacaacacaccctcttgctaaagacaaaatgatgaatggaggtcattacacctactctgagaatcgtgtggaaaaagacggcctgattcttacaagccgggggcctgggaccagcttcgagtttgcgcttgcaattgttgaagccctgaatggcaaggaggtggcggctcaagtgaaggctccacttgttcttaaagactagagcagcgaactgcgacgatcacttagagaaacaggccgttaggaatccattctcactgtgttcgctctaaacaaaacagtggtaggttaatgtgttcagaagtcgctgtccttactacttttgcggaagtatggaagtcacaactacacagagatttctcagcctacaaattgtgtctatacatttctaagccttgtttgcagaataaacagggcatttagcaaactaaaaaaaaaaaaaaaaaaa

SEQ ID NO: 282066 - DNA, 1000 bp, Homo Sapiens
caatcacacacacaccccccgccacagagacacaccgttacatacacagacatacacacacacacagacacacaccagacacgcaaagacacacagacacagatacacagatacaaagacacagacatatagacacacagacatgcacagagacacatggagacacatgcaaaaatgcacagagaaagacatacagaagtgtacacacagacacatagaccacacagacacacagacatgcatgcaaacacacagacatgcagacatgcacacaaacacagactcacgcacacagacttaggcagcccaaattcagcgcctggggcataagttcctggaggggtggccaccttcagcccccacggtaaggtcctgaggaaccttccccttagacaagggatcatggaggaggtctcttccggagcctggagggaggcctcaagtggtccttccacctcggcatcccaaagtgctaggattataagcatgagccactgcacctggccccaacatcatttattgaacagactgtcgtttccacattgtgtttcttggcatttctgtcaaaaatcagttgaccgtaaatgcatggattcacttccgggctctctattctgtttcattggtctgtttgtttttatgccaataccatgatgttttgattattatagctttatagtatatcttgaagttaggtagtgtattgtctccagctttgttctttttgcttaagattgctttggctatttaggggtctttgtggccattactgacagttaaaatggccctggctcatgtctcctgggcctctacagtactttaggtggggaagtactgtggcccacatgtcccaacaggctgtgtgtggcacctgacagtgctttgtgccactgtggagcaggtgttactccctcatacgaattttaggattattttatttatttcagtgaaaaatgtcaatgaaattttgatagggattgcattgaatctgtagattgtt

SEQ ID NO: 282067 - DNA, 1000 bp, Homo Sapiens; identical to SEQ ID NO: 206252

SEQ ID NO: 282068 - DNA, 1000 bp, Homo Sapiens
gcccggtcttgaggaggtgcctggagcagacccgggctgggcgctgcgggggagggaggaggttgcggaggccggcgggcgggaacggggaggaattccaggtttcaggcaaagaaagacggcaggactggggaaaagggatcctggacaggagactccgcaggaggaaggagggggccggtaagtgggctccttccagctggggagcggggctggaaggggctggagacgcgagtttcaactcatgggatttatggcttggaaagacccctctgcccttcgggggcgctggggtccccaggggagagatgagggcggcagcgagggccccctcgtgcagtgagatggagcgagctctcggtgggctgagggaaagagcagcccaggggtttctaagagaccgggagggaaccaggctgcttccagggacagggagggcctgggaggggagaaagggctgaggaagcgcttggtcaagttcagggggagaggtccctccgcactcgcagttgtgccctgtgtcaccacgatgttgttcccaaagtattcttctggtgttttttttatttttattttttccttcttttcacaggtgttgacccaaagtattttctctcatgcctggccactctgccctggaccctcaacccagccgaatatgacacatctccagaaacccagcaggcgcaagccgcagggttggccttaaaatcctgcttaaacaggagaccctggaggcctgcttcagtgccaccagcctaaccgccagggctcatcaaagacgctgcccagatgcattgaacgtaagcaagatcagcaaaggtttatctcaacttcagactcactcccagaaactcattcttgggagctctctgtggaattgggccccccttcttctggtattatgttttcaaaactgacagggatatgaaagaaaaacttatccaggaaagaaaattgggttgaacatttaacatctcatttaagtctgcaataatgg

SEQ ID NO: 282069 - DNA, 1000 bp, Homo Sapiens
cttgctgaaggaagaaaaagtgtttttcataaacccattatccaggactgtttatagctgttggaaggactaggtcttccctagcccccccagtgtgcaagggcagtgaagacttgattgtacaaaatacgttttgtaaatgttgtgctgttaacactgcaaataaacttggtagcaaacacttccaccatgaatgactgttcttgagacttaggccagccgactttctcagagccttttcactgtgcttcagtctcccactctgtaaaatgggggtaatgatagtatctacctcctaggatttattgaggcagcttaaataccttttgtatttcctgttgctgccaaaacaaattgttgcaaggtcagaagtctgaggtggctcaactgtttctttgtttcaggtttcatgaggccaaaataaaggtgttcgcagggcgtgttcccttctagaggctctgggtccttgcagttctaggactaagatccctgtttcccactggctgttggctgggcatcattctcagcttcttgaggctccccacattcctaggctcctggcctgtctgcctccatcttcaaaaccagcaatgggtggtcaagtttttctcacactgaatcttgctgactactgtatctttctaactcctgccagagacatttctctgtttctaagggctcaagtgattagattgcacccacttggtaatccaaagtgatcttcatatcttaaggcccatagccttaattatagctgcaaagtcccttcgcagcagtacctagattactgttggaatgaataaccagaagacagcaatcaagggaggacatctttagaattctgcctaccacttgtatttaacatgcttaatccacagatgacactctctaccattatttcctggtcctcacactgctcagagattggaatcctttttaagcaaagagaatgaagtcatcacatagttcagtcctgctgtatttgctggaaacagtgaag

SEQ ID NO: 282070 - DNA, 1000 bp, Homo Sapiens; identical to SEQ ID NO: 206251

SEQ ID NO: 282071 - DNA, 1000 bp, Homo Sapiens
cagcctccgggaggcagtcgatcccctactcagcgccccctccgcccgctcggattctctccggtagggggaaagggggcggggagcagaggtgtccctctgacggcggcagaagagaggcagacagactgacagacacgtagtaccaacagtgcggccccagggttcgtccccagactcgctcgctcatttgttggcgactggggctcagcgcagcgaagcccgatgtggtccggaggcagtgggaaggcgcggggctgggaggccgcggcgggagggaggagcagccccggcaggctcaggtgaaacccccaccctgtccctcagccccctcctcctaaagacctgtccgtgcccggggaaccccgaccgaattggaaagtggttccactttgtaactccgcaagttggttgcaaagcagcattcaccttccttcctctcaaccatctctcctcctctgttactcccccaccccacctcctgccctccccgctctcggttccctcctccttcccctcccctccacctcctccccgcgctccgctggtaccccacaaaaaatgggggtgggggtgtccaagggaggggggaaatgctttgggtctcgtctctgcctctctctctctctctttgagacctaaaaatcctgacaagtgaaacttaaaggtgtttaccttgtcatcagcatgtaagctaattatctcgggcaagatgtaggcttctattgtcttgttgctttagcgcttacgccccgcctctggtggctgcctaaaacctggcgccgggctaaaacaaacgcgaggcagcccccgagcctccactcaagccaattaaggaggactcggtccactccgttacgtgtacatccaacaagatcggcgttaaggtaacaccagaatatttggcaaagggagaaaaaaaaagcagcgaggcttcgccttccccctctcccttttttttcctcctcttccttcctcctccagccgccgccgaatcatg

SEQ ID NO: 282072 - DNA, 1000 bp, Homo Sapiens; identical to SEQ ID NO: 114855

SEQ ID NO: 282073 - DNA, 1000 bp, Homo Sapiens
gccagcatggggagagaccagcgcgcggtggccggccctgccctacggcggtaagcgactttctgcctggtccccgtgggtcacgcgcgcatggacccttcggtgtaactctcggggactgacaagccgggcccgcacgttcacgtctctcttcctccctttcccatgcaggtggctgctgctggggacagtgaccgtggggttcctcgcccagagcgtcttggcggtaagtcctggctcccgcgcttggacttgcgcgcccgagagtggttgggacgtttgagtggccttggagaaggcagctcgtccgtgcgctcccgagtgtgtgtgtgcgtgtggatgttcgccaggctgcccaccaaggttctgagaaagcttgctcttccctcatcatgctttccacctttccttccccttgggttcccagcgtcaatcctgtgttttgcaagcgtcggcctttcacgggaactgggaacttaaaatgtagcctgaggcaccgttttcgttgctttgggcaaagctgcagccgtagaggccaggaaagtgtgtcagtcactaggcagtgagacgccaggcttagggcgaaaaaagttttcctggaactcgggagctggtggggagtctctgtcacggactgagggttttttgtgtttttaaatgggagtctctgggtaaaggggcggggcgaggaggcgaacgagacaaccttagtattgtttgaattgaagcattgcgagggaacaatggcagaaaaaccgcgttttctcccaagtcctgttccggccctggaagagctgctccgggcgccacactgggatcctgttcgccgagcctgcccctccacgccggccgtgcacagccctgccgataccgtgggtgcagctggcgactgcactgcgaggctttgtccattttatacgttttgtttaaagagtaggagccacttttactgagctttatgtaaccatggctaaaatgaagaggtttggtaggtgaattc

SEQ ID NO: 282074 - DNA, 1000 bp, Homo Sapiens
gaaggtgaaggccggcgcgctcgccggccgaggtgggatcccgaggcctctccagtccgccgagggcgcaccaccggcccgtctcgcccgccgcgccggggaggtggagcacgagcgcacgtgttaggacccgaaagatggtgaactatgcctgggcagggcgaagccagaggaaactctggtggaggtccgtagcggtcctgacgtgcaaatcggtcgtccgacctgggtataggggcgaaagactaatcgaaccatctagtagctggttccctccgaagtttccctcaggatagctggcgctctcgcagggaattcctttttttttttttttttagtttacagaacttccaattctttattaatcacaagcttgctcacaatgacatacaggaaaatagcactaatgaagagtaaatatgcaggcagcaaccttgaggagaagactgcagttgggaagaatctttgaacagatacttactaaaaactaaaatattttgtgagtcagaacatttagccaatccagctactaagatatttcaaagtcgaatgagttatcacaaagctagaagacaaaaaacactgtactggggaagctgtctaatttagttaatccagttaactaacttaggcagttagtgagtctggtgccaagctacatgtcgaatcgaaagggttaagtttttcaccttgcatcactgatataaggtgctctgaaaagtaaattttattactaagaagtgtcaagctcctatgtaacttccttttgcaagaaaaaaagcaagaaaagtaggtaaacacttaaaaaaatctgctcttatgcttttggaaaaaagaattttctaagaatcgtggttatgatttaggacagaggtaagcaaatgggccaaatctggcccaccacctgttcttgtaaggcctgtatacttggaacgatttttatgtttataaatggttgataaaagttacaagaagaataatattgttacttgtgaaaatt

SEQ ID NO: 282075 - DNA, 1000 bp, Homo Sapiens; identical to SEQ ID NO: 114857

SEQ ID NO: 282076 - DNA, 1000 bp, Homo Sapiens; identical to SEQ ID NO: 206257

SEQ ID NO: 282077 - DNA, 1000 bp, Homo Sapiens; identical to SEQ ID NO: 195296

SEQ ID NO: 282078 - DNA, 1000 bp, Homo Sapiens
agatttgatcccttccctccccaccagagacctgcctgccctgggcatcaccctggctggccaccagaagaagctgctgcaccacatccagctccttcagcaacacctgaggcagcagggctcagtggaggtctgagaatgacgatacccgtgactcagccctggacactggtccgagaagggacatgtgggacgtgagccgggctccaacagcctctgtgagagatgccccacaccaaacccaaccctcccgatggctgcattccctggtcctccgcctctccaccagccccctcctcattaaagggaaagaagggaatttgcaagtttggtgtggtgaggcctcagtctgcaacaaagggtgagggaggcctcaacgtaggagcagaggggtggggccggcagatggcactgcagagatgcagaagggcagctgggcagggatccgaaaacgactttattgaagatggagttggcaagacctagccccacttcccacccccagagccgttcctgtctccctcactcacacgctttccacaagctctgcacttccctgcacctgcctgggtgccctgggaagggctctctccccacttatgaccctggggtggagaccgagcgcccaagcaggctggcctgtttttaaagtgctctgacatgcagtgctcctgtcggaagggtgatgagcaggccacaggagagttcctcacgccctgccagccccgtgcttgggctgggcttcctctgccccagagctgaaggagtaatgcaggcctggagcagtgattctcaacgtacattccttggcgttcatgctactcctctttctcccctggggcctgggagatgagacctctgggtgtttggtttttgttttgtttgatgcacccaggaaaatgagagcaagttccaggaagcgaagtgagaacacgcagtcagatctgatattcccagctctccccgtcctccagacccctgttgattatcccacgcaggt

SEQ ID NO: 282079 - DNA, 1000 bp, Homo Sapiens
gcctgcctcagcctcccaaagtgctgggattacaggcgtgagccgctgagcccagcctatatttttttctattacgcatcaaaacacttatacatgtaagtttaaaaatagtgtttatccacgtaccacgggtagttgtgtaccacactctgatatgcgctaatttagagatgtagaaataacaccaaaagaataaacagagattgtctctgggcatgggactaagggatggggagacttggttttcatcaaaagcacctccgtgtatatgtattgctttactaaacatgaaacatttaaattatacgtaaaacaaaaattctgtcacactgagtcacttatactctacctggcaaaatggtaggcacaaaataactactcagaaatatgtctatatttcacacctcctccctaatgattttataatttcagccatatactcatgctgctcaaaactgtcgttcatgcacacaattccattcacaaagtttgaggaaaaaaaagacagctatccactgcaaaatgaaaactttcagtgttttatttttgactgcagctgtttacagaaatatagttgcgagtatacaaatgttccaatagaagcaaaatatctttttaatatttaacaagttatcacagatagctaaaaacatagatgcaaatgaaattcccccagagaacaaactgaaaatatctggtatcagtgctctgaaatcccaactatgaaagccatatacacaaaaatgtaacccttatatcattgcaggacaatggaagaaggcagttcagtggttgatcagtgtgctcaagcaaataaaattaaataaaaattaaaaatggcagaatggtagctaaaccacttgagaacaggttaatgaaattattggtactatacttaaaacattaagtaaaagaagtgaatgaaactcatttaaagttgtcaaaaaattagcaactacttggagcttatcaattaaaaggaaacaaggtaagcagacac

SEQ ID NO: 282080 - DNA, 1000 bp, Homo Sapiens
aacagccacctgcccggcggcactccagggccggcagactggagggagaattcctgcttccccgctgtgagcccctgcaagccttcagaccagctcttggccaaaaagggaggctgaggcttggggtggtcaaggcctgagccagggtccccagcccggggctcacgactcctccttcaaggggccatctgcaccctgcattcatagagccccccgtgcagtggggtgggcaccctgccgcaccctgcatacagccggctaagggcaccggtgtccacagggacccagagacgtcgttccagctgcccagggccacacagcccacaagtgacagggccaagaccggaacccagtacctgctgggcctgcggaagtgggagcgggcacaggagggtggggcggcttccggagacggggtggggtggggtgggggcaggttgatacctgccctggcgggggtgaggacagaggctggaagagccgcttagcaggctccccgcgcaaccctcagtctgtccgtttggagggtgggcgaggcgtcggccagcttgccagggtcacggaagggtcgcctcccaattagaaaccagcttccccctggcttcccgctcacacccgctttaccggctgcttgaaacagccagagacccgccccccgccccgcttccccgtggctcagttgactcccggctggacggcacggaggcagctcggatccacagtgtctgcggccttgcatcccggcttgggggtccggacccgctgggaacagctggttcagatttagccggggaggcagcgcgcattcctggcagtttgtggtgaacaggaatgtgctggaaggccggcggccgggcagcgggggggcgggggtgggggaggacggcagcggctgggggtggggccaggggacctgggcccctgagccggcagagacgcggcgcagctgggcaaggcagggctgtgtacccagcagccaccgttctcattcctcgggatc

SEQ ID NO: 282081 - DNA, 258 bp, Homo Sapiens
gattctttgtggtgggtctgtcctgtgcactgtagggtgttgagcagcatctccgggctccacccaccagatgccagtaacattcatcccatttgtgacaaccaaaaaaatgttgccagacatagccaaatatctccttggaataaaatctccttggttgtaaacaactgccatagacaggtaggtaggcagatagatagatagatagatagatagatagatagatagatagatatgggtgtatgattgaatgaatag

SEQ ID NO: 282082 - DNA, 1000 bp, Homo Sapiens; identical to SEQ ID NO: 206236

SEQ ID NO: 282083 - DNA, 1000 bp, Homo Sapiens
cagcgtccagttaactgcagaagtttaggctcacctcaaagatgtctagtttttccaagttacaatacagcagtttcctacagaacacccccttcctcaattgccaaggggccgcatcgcacggcatcaggccaccactgcaggccagcagattccaccccaggaacggtcatgaactcagcctttgtctcaacgaggggcgtaacatttccttacagtcaagccccatcaactagaagtgcttattacttttaggattaaaaaagtaataacagactttgacttaatactctgtcttttcagaggcaaagtgggtgggtagaggggagctttaaaaatagaagtacaaaacaacatcctggaaacatatgaccccagatggaataatgtcacattccccagtgcagataatgggctgctgctggctctgtggtgtctgtctgcagaagatttgctcagtcaaggaaattcaagtggtgagacctttccaccatgggtggtaagagaaacctgccttcaccaaaatctctgaaggggaaagaagtggagagaaaggtttgcttcacttcggggactgcagtttgagaaataaaagggatacagagatatctgcactttgtagaaagggcaagattatttgcttatatctgaagggaggtgggtggttttgctggatgtttggtctgaaagagttacttttgataaagttaatctaattgtagttatattttctgtgtgcttttttttaattactaagaaaaaaattggtgagttcagtagctttggtattatgagtgcaaatcataatagctccaatgtgaaaaaaaaaatcaaaagtataacttgtcacttaatgttagaaaattgcctaaaatgcagtgtaataaataatctctgtaccaaatagtaatttaaatggggtaattttctgcaaggaaaatgtactgtttttatgtttccaaccctcttgaattaaaataaaaacaacttcttttctaag

SEQ ID NO: 282084 - DNA, 1000 bp, Homo Sapiens
gagaagatggcttttatccctcagaacctgtttttgttccagcaccaggaaccaatgaagaagatggtggggttattctttctgtggtgatcactcccaaccagaatgaaagcaattttatcctagttttggatgccaagaactttgaagagctgggccgagcagaggtacctgtgcagatgccttatgggttccatggtaccttcatacccatctgatgggacaaccacaaggaaacttttccaagcctgttattaatcagtgacttgtcctgcttttcatcatatacagtgatgatttttctcatatagagtggagctgtcctctccagtacctggaacaatgccagccacatagtagatgcccaataaatatttagtgaaagagtgaatggaagcaagaggtgacatgattctgggaactgtgtgtagtttggttactcttgtgagtagatgtgaggaaacaagatcctttcactctcaatgtgtctacactggcagaagaattgctaatatgtgtttaggggtgtctgtattcacactatgccaacccagagtaataaatgggtccatacatgcttgtggataagaatggctttagaatttcccttagtaaggatcattacacaacagtccaaaggactgttgtcacgtggtcctatttgtgctctcaaattcttgctctttaaaaatttttttttaaagaaacggtattaatcctaagcaaaaagaacaaagctggaggcatcacgctacctgacttcgaactatactacaagcctacagtaacaaaaacagcatggtatgggtaccaaaacagatatatacaccaatggaacacaacagaggcctcagaaataacaccacacatctacaaccatctgatcttagacaaacctgataaaaacaagaaatggggaaaggattccctattaaataaatggtgctgggaaaactggctagccatatgtagaaagctgaaactggatcccttccttaca

SEQ ID NO: 282085 - DNA, 1000 bp, Homo Sapiens
tgatcatgccactgcactctagcctggtggcagagcaagaccctgtctcaaaaaaaaaaaaaaaaaaaaaacgaaagaaagtattgagaagtttaacttatttcattaccttaatgaaaaatagttaaggccgggtgcagtggctcatgcctgcaatcccagcactttgggatgctgaggtgggtggatcactgaggtctagagtttgagatcagcctgaccaacatggcgaaacctcttctctactaaaaatacaaaaatgagccaggcatgatgccgggtgcctgtaatcccagctaaaaaaagacaaaaaatttttccaaatatggtatttttattaaatcttattgagtagttttcacattggcaactgtttgtgtttctttctttttttgagatggagtttcgtgcttgttgcacaggctggagtgtgatggcacaatctcggctcatggcacccttcacctcccaggttcaaacgatactcctgcctcagcctcccgagtagctgggattacttgcatgcgccaccatgcccggctaattttgtatttttagtagagatggggtttctccatgttggtcaggctggtcttgaactcctgacctcaggtgagggggggggggggggggggggggggggggggctgtcacttaagctagtttattcgtttattaaaacaaaagaagtagcctgcagttacgtgtttctttttttgttgtttggtgtcaggagtagaatacatttggccagcttcatgagaggattagaaagttggagaaggaaaaatagaattgtttatggagccaggagaataattgtctataattatagatgcttgttttgaggtttggaaaaggtggtttaaaaaacttttaagaaaaaccatgataaacatctataaatatgaggaagaaaaattggttgcaacatttaaaaaaaattgttttgagagggagtcttgctctgtcacctaggctggagtgcagtggcaggatc

SEQ ID NO: 282086 - DNA, 1000 bp, Homo Sapiens; identical to SEQ ID NO: 114858

SEQ ID NO: 282087 - DNA, 1000 bp, Homo Sapiens
agaccagcaggctggcctatgtggtctaagattcagcctgaaactcatagacactgatctggctgcagttttgctatctgggctgtgggcaagcctaagggatcctgcctgcccctaccctggacttgcctctgcacaccctccagagacaacaggtaaaacagggccacatagatgctgatggagccttcccaagttgtgcttgagccaggaggcctgctagggttaggaggtccttaggcctctgagaagctctgaagaactctctggaagcccctgggcccagtacctagctggctctgtgagggtgctgactggcttcagcaagttagaactagccaaaccaggaccctgtccaatctttgacaattgggagctgccaagagtgaagggaagagacagcccaggatactggcacagaggtagtctcactgcttgaactaggctgagcaatctgaccctatgggtctaggacacagttcctgggaacatcacattcctctgcccttcctgcaggcaggaacaaacagggctgccttctggccttgtaagacccttattgctgtcctggaggggctggggacttgtgtctgcggggatccagagcgcacagggagtgcacatatccaggcaccaggactagggctggagtgaggggggggtatttcaattaccttctattggtctcccttctctacactcttgtaataaaatgtctatttttaatgtttgtacacaacaatccttctattctagcctgcattgagcttgcatgcttgcataagagcttaagaaccattgatttaatgtaatagggaaaattctaacccaggtatccaaaaatgtgtaagaacaactacctgagctaaataaagatattgttcagaaaatccatatggtggagattttttggaatcataaatagttcatcactcgtctaaatactcaccctgaaccccattctgtgttgggtttactgtagggaggaagaagaggaggt

SEQ ID NO: 282088 - DNA, 1000 bp, Homo Sapiens
cttccgtttcctatagggacattgctgctgttcttatttgcaatgaaacactgaagaccctgaaacttgggcatgatgaaatacgaggcgctggtgtcaaacagttatgtgatgctttgaagcaccctcactgtagatgagagtgtcttgcactgcaaacatagccgatcacccgtgcctgctgtgaagaccttgctgtggcactcactgcctgcaaaacatggaggagcctgaacttcgactgggttggttaccttggatgctgatgtggtggtggtgctgtgtgaggctttgagccacccggactgtgcactgtggatgcttggtgtcactgtagctgaaaggaaacttaaccatcttccctacatcggaagatttaaggctgcacaaatctgcctttgatgaaaaaaaaaaaaaaaactcagaagaggctgatgtctgtggaagaaaaaattccccacctgaccaattcacacgaaccttggaccaatgaggaatacaagatcaggggtgtgctcctctgatggggagcaccctgaagtagtcttctcacaaaggctttccttggtcacaatgggctcttctcctcctggcacctctgtcctgtaattgcacgtcatggcagcaggtctgtgatttcagggctactccctgacggtgttctagcaatatgattatagagagtgattcagtgtgtatgtgctggctgtctttgcctcggttctttattcccttatctttagaaatcccatcctaccttgcaatatttggaagaacaagtacattaaattagtgctaaatgctctggaaagcttggctttatttttttaatggatgtcttggtgtgtatgagcatgcatttgcaggcatcgcaattctctgatacttctgacgtagaagtgatgatagaatgaatgtgtctatagtttgtattgctagcacccaaactttctgtttccagtttgtccagatttagatttgatcagttttcttgtccaat

SEQ ID NO: 282089 - DNA, 1000 bp, Homo Sapiens
tctttcagtgtagttcaggagagcatttgttttcttttctaccaattaacccatcattgcttttaaacaaccatctgaaggagcagagaggcagggtagaagacagaagggggatctatgtggtaactaaagaatgtttctgttttgttaattattgtgtgtgtgtggttttattgtttgcttaagagaatcaaaaactgaaaaaaatgagaatacaggaaatggctcttgtttatttttttgctgtgtttacagcttgttaatgctctactgtctttgtttcaagagagatttgttcactgcccagctcgttttgtgtcctgagccctatggccagcccaccttataaatcatgcctgtttagatgtttgattttgttctgtttgctattgttatcttaaaggtgtataactctgacatgccagacatcaaattaagctcaaattaagctctcgtttaaatgtttaagcacctaatttatattctaattgatcccagccactgatgcatgtactttagctacttctgctaaataagcatattaattttccacatcagaccatcagatcttgagaaccaacagttatctagaattccgtgtctactaatgtttcacctgcatgcagccttcattaattttgtagcaaaatataaagtgatcattatgtagcttctggattaaaaaaatttgtgtgtgaagttgctttgtaaagtgcatgtggaattaatgggacagtgtgccctttgtgttagatgttagagcaaaagaaagggcttatagtgttagtattggagcactttgaagatagatattttcagaaaagatgtaggatttaaaagttaaattttaaattttagaaaaagatatgatggcaattggaaatagtcacaatgaagttcttcatccagtaggtgtttaacagtgttattttgccactggtaatgtgtaaactgtgagtgatttacaataaatgattatgaattcaaaaaaaaaaaaaaa

SEQ ID NO: 282090 - DNA, 1000 bp, Homo Sapiens
gtgttgtggaaatagaagcaaatgacaaaaagccttttgcagaagatctgaaatcattagacctgttcaaaaaggaaaaaattaatactgaaggacacggcagtggtattgggggggtctttatgcatgtcatcttctaggccaagcatttctagcagtgatgaaaatgaatcttcacacaacacttcgaacactgtccagtattctgctgtggtacacagtggctacagacaccaagttccatcagtccaggtcttctcaagatccaagtccacccagcccttgttagattcagaggagaggccaaaagatctacaattagtagatcatgcagatggcggtgatggcattttgcccaggcaacactacttcaaacagaactgcagtcagcatgaatccagtccagatatttcacattttgaaaggtcaaagcaagtttcatcagtcaatgaggaagattttgttagacttaaacaacagatttcagatcatatttcacaatcctgtggatctgggcaaatgaaaatgtttcagaaagtttctgcagcagatagatacttttggtccaggtactgagggactagtagaaagatctgaaacagttgggatggaggctgtgattgatgaaggaatgcctaaaagttaccacagactgtacggcaaggcagctacatgcatcagtgaaggactagtagttcctgctacaacttcagcagtacctataaagtaaagctaaaattattttatctgtgaattcagattttaaaaagtcttcactctctgaagatgatcatttgtccttaaggacaaaaatgaactgaagtttcacatgagctatttccattccagaatatctgggattctactttaagcactacataaactgactttatcctcagattagctgaatgattttgtgctgtttcaggatgtttgcactgaagaaaaacagaaagcttatctgaaatttataaaactttttgttttgctacatagaaaa

SEQ ID NO: 282091 - DNA, 1000 bp, Homo Sapiens
agataccgaaaagagagcatatttattgagccagttttcaggtgctaatacaacaatgaaagtcttttatgatctttgagagaatgaagaccttgacattatgtcttcacttcccatcgtctcctggatgatatgcaatgtcctgcagtcacagggagatggtgacaggactctcttgaggtcacttcagaccatgactgatgtgtatttattctacttttccaagtgcctcaaaacccttacaggtatctcagtatgggagggacaaagttgcctgtggggtctttgccgtttggctgcagagggtctgcaaaatcatcaggttttgtttgcagtcagtgacctcagaagacatgggataggagtgtgtgataccaactgcacttttctcagtcgctttttgaaaaaggctgaaggagctgtcagtgtctacactttccttcacttcagtttccaagagttcttgactgctgtcttccatgccctgaagaatgacaatagctggatgtttttttatcaagcagagaaaatgtggcaagaaatgttccaacaatatggaaaaggtttttcatcactaatgatataattcttatttggcctcttacataaaggaaaaggaaaggctgtggaaactacttttggaagaaaagtttccccaggacttcaagaggagttactgaagtggactgagagagaaataaaggataagtcttctaggttacagattgagccggtggacctgtttcactgtttgtatgagattcaggaagaagaatatgcaaaaaggataattgatgatttacagtcaattatactgcttcaacctacctatacaaaaatggacattctggttatgtccttctgtgtaaaaagcagtcacagtcacctgtcagtgtctctgaagtgtcagcacctacttggatttgaggaggaagagtgagcctcaacattcgtgccaccagccttaacacttaatcagtgcgtatatccatgtctttcc

SEQ ID NO: 282092 - DNA, 1000 bp, Homo Sapiens; identical to SEQ ID NO: 114859

SEQ ID NO: 282093 - DNA, 1000 bp, Homo Sapiens
agagcataattaacaccaatgtatacttaaggtagtaacagcttcttcataaagtagcaaaactaaggatctgtgggaaggttgctggtgcaaatgctttataagcttactagagactgagccttggatttaggactttagacgagtataggatggaacaaaatttttgcagtaaatgtaaaaaatgctgtgtaggaggaaggcgtataaggatgccccagctgtaggttctttagattgtctgtagtatttccacgagtaagttgtttttgatgtgtgtactggtattgctggtagatttgaagtggagtctggcggcttcttccacactcccctcccactagcttgtgtcaagatgtgacatcctatgcagcaaaactaggtgagcttgcacccccaggcggtggctctcaactttgtctcattgttcagaaatttcggccaggcgccgtagctcacccctgtaatcccagcactttgggaggccatggcaggtggatcacttgaggtcaggagttcaagaccagcctggccaacacggtgaaaccccgtctctactaaaaatacaaaaattagccaggtgtggtggcacatgcctgtagtcccagctacttggtcaactcaggcaggagaatcacttgaacccaggaggcagaggttgcagtgagctgagatcaagccactccagcctgggtgacagaccgagactctgtctttaaaaaaaaagaaatgtcatctaagccccagtgaacctcctgggaggagagctagccctggccagctgtctccaaagtgactggatgctacagaagaactgggactgtcttctgcacactcgtgcctcctggagttgtcagaacactgagcagtctcctagttctgcgtccgtctagccatggggtctgccatgaaagcctgtggatctgctattgggttggtattttaaactttcacttgggtgaaacttgttcatcattttaaataaagcaacatgatttgg

SEQ ID NO: 282094 - DNA, 1000 bp, Homo Sapiens
cttctggaaacgcagtgcttacattccatctccctagaccaacagaaactgccctctggaggtgaatcccaggcttagagattctgatgattctgcggtccagtgagtgctgagatctgtcctgagctctgtggggaggggcctggactgatcactgcttggaaatgattttgccctacagtaggccttcaagttgatcaaatgcatgaatgagcaagcttttcttggagtttgtgatgaagcccaggaaccgggtgcttgcagtcgtcccataaggctcccagggacaagctagagaatctggctgtccctctgtctccatggtgccagccctcttaggctcagttcaaagggagaggaggctagttaaataagaaactgagagaaacatggagcattattgatttattagaaaaactagtaaatgggtttcctctggttggtggaagcacggttgagcaggtggaggacaggacccagctggccccagggccagccccagattgcatggtctgtgcccaacagggttgcattcctctgcagccgccgcctcctcatttcctccctgagcttgtttgtccaagccaccaagccatgtggtcccgctggcttcatcctcctctggattcctgcccccctcccatgaagggaggaagaggattcagggtcagcctaggggaccctggctccctccgataggcaggaaggaggagggatgcggaggagaggctgagccttccacgggcctcctgttaggggtgttggtggaggccaggttggggagggaagcctaaggaccctccacacctcccacagccagagtcagttgaggctgggacaaaggggaaggagagagggaaggaggaccgcctgaccttgcccagaaggagcttcctctaaactgccctgggaaggaagcctggtatgctggtgtggactggagctgtgtcaacctcgtttgggaatactgtcaaaagactgtagagtagaataaggagag

SEQ ID NO: 282095 - DNA, 1000 bp, Homo Sapiens
agccagggtgtcggcgccgagctgatggggctgcaggtggactactggacggcagcacagcctgcggacaggaagagggacgccgagaagaaggacctgcctgtcaccaaaaacacgctcaagtgcactttccggtccctccaggtcagcaggctgcccagcagcggcgaggctgcagccacgcccaccatgtccatgaccgtggtcaccaaggagaagaacaagaaggtgatgtttctgcccaagaaagcgaaggacaaggacgtggagtctaagagccagtgcattgagggcatcagccggctcatctgcactgccaggcagcagcagaacatgctgcgggtcctcatcgacggcgtggagtgcagcgacgtcaagttcttccagctggccgcgcagtggtcctcgcacgtgaagcacttccccatctgcatcttcggacactccaaggccaccttctagccccacccaccagggggcccacctcctgccccatgctgtgaggggcccagctgcatttctgttaacatttcagtttactacagagacagacgcttaaaacacaaagagaaacagtcttaagtatgaatgtgctcacaacgtggaaactaacgggggagctcctgccaggagccgaataactgctctgcttattaacccgaacgttcggcccggggctgggaagccagaaggacgatgctgagccatggatcgcggaaggcgtcctctggcctcaggagccacccagagcctcacaggctgagttcttgcctctgtgtcctgtccttcctggaagtcaggactctgcttcctcagggagcccggggaaggcggagctcagtggccacaggccgagggccatggggccgctcagtcccgttggggttgtcctgagttgagcctgggggggccgtcctgcccgcctaagagatgcccccagcaccgcacactcgtggttcccaataaactcctgcctgcggcggaggttttatagcagcag

SEQ ID NO: 282096 - DNA, 1000 bp, Homo Sapiens
tccagtcatttcctagagacttctggtttcctgtcaggcctatagcaagcttgaaatttgtcactcagttctaacaacaagtaaaaagctgaacaaactcaaaaatcaacaactcttttagatcccacagagaagtgaggtctcaatgctaactgacccatatattgaagagaccaacaggcaaagacagacaacacactttacctgagcagaaacccctggcacagaaacctcagtgggaaccagtactggggtcagaaaaacctgaactgtcactaatgaattgctggagggtcagtgtgaacaagatccagagttaaacactcaggggaatggattacttctgggggtagggggacatgtttgtgactcttagcttctggagcactaccaggttcctatagtaatacccagtaaaaatcagctcatccttcctgcaggggaaggggaaaagaaaccactttgaaagatgccagtgaattctattctgggcaagacctgcctttaagagaaactattttaccagagtctaatcagctggggtttgataggagccttaaatgccctggggaaggggaaatagccaactctagccccctgtagccatcatgtcccacctaagggaaagaaaaaactgagaggcacttacagcattcacagcccaggacacagctctaatgcaataccacagaacccttccctccatggcatcactgaatgcctcactcaccacagcatcactgaatgcctgctcacccaagtttcttttacccagtacatcatgtctgatttgcaaaaaaaccatacaaggcagactaagaggcaacattagacactatgcagaaacagatgggtgacataagtagagagatggatattctaagaaagaaccaagagaagtgctagagataaaaaacactgtaagagaaatgaaaaatgcccttgataagcttttgaaagtgtgtatactggtaggcttaacacagctgaggaaaagatc

SEQ ID NO: 282097 - DNA, 1000 bp, Homo Sapiens
agattgtgttttcctcggggggtgtgaacaaatatccacggatactcaggggggactgttactattacaacaagtggtgtaaaaataccatggtaggtcttttacaggtaattaacaatcatgatcccatttgatcctaacaatccctatccatctccctttgctcagacaagaacatgctatccccatgaggtagataatctccattatgccaattttatgatgagaagacaggctgttcataactcccgcccgccccaaccaggctgtcccaagtttggttttcctcactggaaacttgctgttacctctgagaggggcatgttcacttatggcccagacattagtggcggggttggtggggtggggggtcaccctgtgctcagcctttgagaaaacaggtggctgaggtactgtgcccttagggagcctgcaattaggaggcagggtacccctcagtacacaaactgatggagatgatagagtgtacggcacacacaccgaggctactgtattgtgtgtctgtcctactgggtcatgatgtgcggctacctcccacacctgagtgtcccactgccctgctgggggttggggaaaatcattattgggatgagcaggtttgcaaatgcctggtggactgaggcaggctgtcctgagtacccacagtgggagtacctggcaggggtcttgcaagatgtggtattaccaaggagctgatgatatctttttctctgtctcctgaaggatacttatccgctttttccccttggagtcctggcagattggcaagatagggacggtcatgacttttttatgattgggcacggagggatccagggcatctgtgaactggctgcttcttccagagagatctcttggcagagtgagggcctggagataaccagctttggattatcccgcatgcaacattcctgtgatcacataatcctcttcttcatcctcatatgaaataaatgaagagagcttcctcattcaaaaa

SEQ ID NO: 282098 - DNA, 899 bp, Homo Sapiens
acgaggccaagaattcggcacgaggctcggcctccctgccgaagcggcggcctttcaggccctagatccggcccggcctcaagaggcgacctccgttcgggcccatccaagccgggccgcatccagcccgccgcctccctctccctctgcccggcgtccacgacccgcagcgtccgcccggggtgagcggggcgccgcgtctcaccgaatttaaggcgaagaggaaagagccagaaatccccgatgtaccggcaactgcggcgtgtctcctctgcgaccggaactaacgccaggaggagggagaggtgccacccccttgccccgccctgatcgtggacaggcgcttccgccttttctattgcgcgcggattaggcagcttgtttggaacacatggagtggaggatggataatttcccaaaggaagagacagcagtcaaataaaaacaacaggagcattacatcaagtctttgggtttaaaacattttttggatgagaggaggctggatgttcctggctcctggggcatgggactgtgtcattcccttcaattgacaactgtgaaaagaaggccattcgaacccattctggcgttgctgggctcttcaccgtgaagtcctcagctatgtctctttctcttcgcactgcggccacagcgtcagcaatggcaaagaacacagatgaccccaggaacatcccagactccccgaggccctgtaagaaggcacattggtgtaagaaacttccatactacactacaagtttctagagggtaggggccaggtctcgttcaccattgtgtccccaacccctgcacagtgttttgtacacaaaatcttctcaataaatgtttgttggctgacttaaaaaaaaaaaaaaaaaaaaaaaaaaaaaaaaaaa

SEQ ID NO: 282099 - DNA, 1000 bp, Homo Sapiens; identical to SEQ ID NO: 206259

SEQ ID NO: 282100 - DNA, 1000 bp, Homo Sapiens
ttgcaggcaggcagcttctgcggctgcagtaccaaggacaggcagggatgtgactgggaatatctggagttcaagagacccaggactgagccgggaagtagaggcctgagagtcaactctgcccctctctgggcctcagtttcctcactggcaaacagaagaggtctcaagatcactgaggcatctcggaattcctttggccacatcctggtgtatgagtccctcactaagccctttcatggctttgagcctccatatataaaatgcaaggatgaaaaaataagaaataagatctgagcacaggaggtgacctttcctgagctcagggcccgatgcttaaaccccaacctggctgggcatggtggctcacgcctgtaatcccagcactttgggaggccaaggcagtggatcacctgaggtcaggaattcaagaccagcctggacaacatggcaaaaccctgtctctactaaaaatacaaaaattagctgggcgtggtggcacatgcctgtaatcccagccactcaggaggctgaggcaggagaattgcttgaacccaggaggtggaggttgcagtgagccgagatcatgccactgcactccagcctgggcgacaagagcaaaactacgtgtcaaaaacaaacaaaaaactctcatgatagctaattgattgaactcctactgtatacctggccctacactgagaactttctaaggaatttagatctgctttaggcctcacagcaaccccacgacataggatactattaatattattacccccattttgcagatgagaaaattgaggcccagagaggttaaaaacattcacccaagatcacacaacatagtcaagaagtttcagaggctgaatgggacctggtctctctggtcccaagactggtctgtaaaccctcacactgtcaaatgaatagatgagtgtctgttcatcttttgggaaaggagagggtgctggccactttccctaatgacacagggatc

SEQ ID NO: 282101 - DNA, 459 bp, Homo Sapiens
atggactcgggaaccgaggagtacgagctcaacggcggcctgcctccgggcacacccggctccccggacgcctcgccggcccgctggggctggaggcacgggcccatcaacgtgaaccattacgccagcaagaagagcgcagccgagagcatgctggacatcgcgctgctgatggccaacgcgtcccagctgaaggccgtcgtggaacagggccccagcttcgccttctatgtgcccctggtggtcctcatctccatctcccttgtgctgcagatcggcgtgggggtgctgctcatcttccttgtcaagtacgaccttaacaacccggccaagcacgccaagctggacttcctcaacaacctggccacgggcctggtgttcatcatcgtggtagtcaacatcttcatcacggccttcggggtccagaagcccttgatggacatggcaccccagcagttg

SEQ ID NO: 282102 - DNA, 1000 bp, Homo Sapiens
ttgattttaactcattgtcactctgacgttcacgtgaactggttgcttcgggctctttgatctgtcacctatggaatctgagtggttttattttttagatttctcagtcccaaagatctaagataaataaacaagagaacttacgctgggccaggctgcatttttgacacctctaaaactagcaacctttctgcttgaaaataagaaaaagcctgaaagtgtttctacggtacaagaacagtgagtggtttataatgctagatttagtatacatttaatacatattcaatgaataagttgagtttaggtagtagactctcagcaatatccttaggtttatcatattggttggagagagagctgctttcatggataataaaggatttgctggtatttccatccactcacccacatgattatgaatgatggcagtccaagaaaacatatcccaagaaaacagtgaggctgcactacaggaaggactagagtgagaatgaggcctacctttatctgaagtgtctcatggaattgggcctgtcaacttcatctagccatatgcatattacagctacttatttctacacatcattgtattatatctatgttattctgtcttagttatattgacaacaggtactatgaggaaacaagaccatacaaatgtccaaaggaccagaaataattctggctccttagagtttagccagttggtaagaaatgaatacattgaactaatcattctggaaacttcatgaatttctgcttaaatttgtttggaatgcagaaaatgccagcagaatgattatattcttatgtgtagattgttagaggaaaacataattaactgaagtttattgttagagaaatggctgcatttgtgtatcagggcatatgtatgagaatgttcatgatatcactatttttcatagcaaaaccttcagtgacctaaatgcccatgaacagtgaaatccaataaataatctcaaagttatagaatgta

SEQ ID NO: 282103 - DNA, 1000 bp, Homo Sapiens
taagcaattctgctaacctgtgaccttacattttcatctgaaaagcaggggctggacaccaattgccctatgaagctattgctagtcctaacattctttgttttgtttgcttttttggcacacttaagtgtgtactatgaagtttatgatgctttaatgaaattttctgtctctaccattgtaatgagaaaggaataaaatactttattttgcaaatctacttatggaatatagttctgtacctgattgttttcataatccctgtgttgatgtgtaatgccacagacatgctcttgatggtaacaggaaagaaaatcagacacagctaaacataaaggtcagttggctggcaggtgcttagcaggtgtaaatagaggcccattcatgctgctccacttgctcctgaaaagcataatgtaaatacagtatactaattaggaggcaaagaaccatctaacatggttctttttttttttttttttttttttttgagataaagtcttgctctgtcaccaggctggagtgcagtggcgcgatcttgactcactgcaacctccgcctcccaggttcaagcaatttccctgcctcagcctcctgagtagctgggactacaggtgtgcgccaccacgcccagctaattttttgtattttagtacagacggggtttcaccatgttggccaggatggtctagatctcctgacctcgtgatctgcccacctcggcctcccaaagtgctgggattacaggcatgagccaccgcgcccagccctaacatcaaattttaaaagagttggccacagtttaatgacatccctgcacaccagcctccacccatactgcccttcataagccccttaaaggagatcccatagttctaaacccgggtccacaaacacacatatcctcattctctccttttcttctctttggcagtttgacaaaatctttagggggaattggaggaaacattaatctcctaaatcaacttcattcaaagct

SEQ ID NO: 282104 - DNA, 1000 bp, Homo Sapiens
attcatttcaacttaattctctcttcaaagaccctggctctccaactgcaccctagactgggcagcatagtcagaccctgtctctacaaaattttttttttattacagaagtataaaggggggccagtcatggtgcctcacacctgtaatcccagcactttgggaggccgaggcaggaagatggcttgaacccaggagtttgaggccagcctgggcaacatagtgctaccctatctctattaaagaagaaaatttcaaaaaaagaaaaaaaaaaaaggtaaaactgcaacatggtccctacaaggtcacacttttgtaatcccagcactttgggaggctgaggcaggaggactgcttgagcccaggagtttgaggccagcctgggcaacatgacaaaaccccatctttacaaaaaaaaaaaaaaaaattagccaggcgtggtggtgtgcacctgtagttccagctactcaggaggctgaggaaggagggtcactggagcccaggaggtcaaggctgcagtgagccatgatcacaccactgcactccagcctgggaaacagtgagatcctgtctcaaaaaaagaagaggaaagaaaaaaactaaaaataagtcaagaccctgtctccaaatccgggcatattcagaggtactgagggttaggacttcaacacaggaaggtgtgggaaaagggcgcggattcagcccctgatggctgcttcaggtcatgtccataatacactgaaatgatatggaaatctttttcttttttgttttctgaaacggagtcttgctctgtcgccaaggctggagtgcaatggcacaatcttggctcactgcaacctctgccccccaggttcaagtgattctccagcttcagtctcccaagtagctgggactaaaggcgtgtgccaccacgcctggctaatttttgtatttttaataaagacggggtttcaccatgttggccaggctgttcttgaacgcctgaccttaggtgatc

SEQ ID NO: 282105 - DNA, 1000 bp, Homo Sapiens
gaagggacaggccagcttcctccccacacgcctccccggctgcctctgtgggcttctcctggggggcccaccccacccctgccagtctcctggagatgcttgaggatcggtcctccccagaaccaggccaggacgttgcccctggcggctggtgaccctgtgaggtcaggtcccccagattgaggtctgagtgtgggcaagtgtgtcaaaaggggctgccccccaggagatgaggctgagagcagggagttgaggccgaagaagtcaaggcccctcccgcaaatgtgtacccctgcccgcgccactgcaccccgccgcacccccacctccccgggggccctgctgcggatcgcggagtgggagagtctctgagctatgagattgatcttgcccctaattggagaggaagccgggcgccaagacacacggggctcctgccttgggagccagggccgcggccgcaggtagaccccagtagggggggccgggctcgaagttcctttgggaggggctggcgggactccagcaggccgtcctcacctttcttagaaagtccacccagggcaagttgatgttgggggaaagcagaagtcaagccagccgcggccccacacgccccgacccgctcaaccgacttgtcccttaaatgtgtcttggatcccgcagtgatgacgtgagccagccaggcccgaaagggtgaggccagtgcagagaagcttcccaggggattcctggttcccccgaaagacaagcgaggtcattgcagttcacccgatgttgctcctgtcccgtgcgtcccggggaggctgtccttggtccgcatggctcgttgcagcccctcccctgctggcggttacgatgcgtggggtccccctccccacccagccccggcaccgtcgccgtgtcccgcctgtgcctgtgacgtccctgtggacctgtgagccatcccccccttatctctgctctgaatactgcatgaagcattaaacgtgcaatgaag

SEQ ID NO: 282106 - DNA, 1000 bp, Homo Sapiens; identical to SEQ ID NO: 195312

SEQ ID NO: 282107 - DNA, 1000 bp, Homo Sapiens
cccagatgtctcatagtgactgacttgagccagtgacctctaaagatagagcagagtccaaggaatgacctacaaagagtgaaggggacaggcaagagctgatagctttggacgaagaccacgttccctgttctgggtccatgatgctcccttccccctgtagagggcaggtgaggaccatgtggatctttctggaaatacatgtggatgtttgcaaatgcagaactgactggtggaaagggcaaacatgaactgatgatggaagtctggccctcatggaccatatgtgtttggtggatattagaccaatatttgggaagaagtcttgcagatactttctctcattagacattctactctctgattctgagtttgactactctatgtacctgatatcagtggattccagagtgaatcagagagtagaatagtagtttgcaggagctgggatcaggggaatagggcgttgttccgtgggtgtgcggtttcagttatgcaggatgaggaggttctagagatctcctgtgcagcctcgtgcctatacttcatgcagatacagtgctccttatgcagaaagcttaaaacaaagtgttttggatgtctaattatttttttattttggaatatttgcagtacatgtactggtttagcatcccaaatctgaaaaatttaaaatccacaatgcgccagtgagcacttctttttagcatcacatcagtggtcagaagtgttgagttttgagcatttcagattgtggatttctggatttcagatgctcaatttgtaatactgtaattttcccataaaaagttttcaggactttagacctcatgttatgttctgactctagtaacaaaaaaaaatttggaggaaacattgaaatgttttcataagtgggaatttttactgatggtccaaacatctgagatcaattgctggtagtagtatttctcttgaggccaacataaggtttaggtgtgccatgaattccagcaggatc

SEQ ID NO: 282108 - DNA, 1000 bp, Homo Sapiens; identical to SEQ ID NO: 195313

SEQ ID NO: 282109 - DNA, 1000 bp, Homo Sapiens
ttcagcctcagcatctacaataaagttcatcaattggcctccaacttttaatgtgaccacaggcccctggaggcctaatgagaaggagcctggtctgtcctaatcctcacatccttcagctcctgtcagcccaatcaggtcagtatctggttcctctaaggcaccgcagcccttggccgatggcctctttgtctcacggccttggccatttctttcattgccttctggacattcatccttttagtgtcctttctttttgcatctctcatattgatccctctctagctttcaaatttggtcggctttcaaatctttgtctaacttaacctcttccatgtccacgtccacgtccgtgtcctctcacattgctaatctctttttctataaggcctgctgccaacagatctgccttttttttaagccttcaatctgcttccttgttttcctcctggtcatagttaacatacactttggtggctacttctataagctgggtggcgttcacgcctgcaaaaccttctaactgatgaagctttcatttgatgttaccatgggcctgtcctacaaatgatgtattcaccatacgctgattttcagtggcctcagggtcaaacagggtgaaaagttggtatgcctcacagagtctctcataaaactgacttgggctctcatcagctccctgaagcacttctgaaatcttccctgtattaattgctttctttccaccctcccttagcccttgcagaagtgcctcttggtacctctgcaaacgctgaagctgagttgcatcctctgggtcccagttgggatcttggtctgggagctggccctgagcatatgcctgagcgttcactgcatctgctggtgcaggggcttctagtcagtggagagctccctgtgttactcttctgtgctcctcagtgttaaacagcgtgagaagaagctgcctacagtctggccaggttggattgtgtgtcagaaagatggattgcatcagatc

SEQ ID NO: 282110 - DNA, 516 bp, Homo Sapiens
ctagcatttccactcttgtaactagggaaaagcattttgaatttttagcagtagtatattatgtgatgatgactcagctgacttcccgtttcaaatggaatgttcaaaacagattgaaacctggttgaagaattttatactttgaaccttacaagatattttctgcaaacagtgactgattggattttgtataataacaaacaagattaagccaactcagttgttttgctgttcttattagtggttttcagtcagggagcacttattgagcagtttgctgcaataatattgaatatttttagagttatgacgtctgtgttttgttgactttggtcccttctttctcccattcttttgaagtttccctaaaacatgtgtgcacagacgggagagaatggtagttaagtgtgtgctgattttaaatgtccttttaaatatcatttattccttgataattgactgtataactgatgtaagagaaatatgttttatatgttattccacttgtgaatctct

SEQ ID NO: 282111 - DNA, 485 bp, Homo Sapiens
gattctctgttgcggtcagatggtggctgcccatttttcattatgttacaggggtaccaatagcatctattcagtttaaatgcttactgtgatacctttaggagagtaccctgaacatttataatttctgctgaaacacacttcaaaatcatattgaaagtgaacattattgtttcttccctaaaactttaaaaccaatgaaatctgctgcattgcagtattcaaacaatttctggaatgcaaaatccaaactatacttttaatacaaaatgtaaaaatagaatttgtaaacctactaattgcctttaaaagcacagcctgggagactactatgtttcctctgagggacacgccagatgtcatatcagatcagggggatttttagtattgcttaaagagcctacagtcaaacaattgatgtgatcccgcaagctaaattttattgactttactcaggtctggcctgcatgttatatacacatgca

SEQ ID NO: 282112 - DNA, 528 bp, Homo Sapiens
ttctggacctttgttttttaataggtgagtttagctgatgagtatttactgtggggctgctcatttggctttactgtttccacttgattttgtttactatttgttaactcatttcatctttttcctctcctcgcttttgctaatttgatattacttctctttattccttcctggcctgcttacctctgtgctcactatcatccttgatccctgttattttgggaatactatgttttactacttggttagtagttacctgccatttctaacactcttaattaaaccttcatccaaactaaataaccatgccccccagtcccacaccaacaaagatgaaatttttagaggaattttatatctgaatgcctgcaatcctagttcaggattttgctgagatggtctagaatttttagttccacgctatttcctagatgttccaaggcagtacgatccttccaagaattcttactttacacttacattctgaatcttcagccgtgttaatatcttccatttatgtatgcaatg

SEQ ID NO: 282113 - DNA, 1000 bp, Homo Sapiens
ggtgtgtgtgtatatatacacacacacacacacacacatatatatatacacacacacacatatatatttctctcactttcttttccaaatcccgtcaaaatatcataagtaatatcaaaataagaacaaacctattgcattactgaaaaccaagagggcatcttcaagcaagtaaaaaatttctggaatatataaagcaaatgacatatttccccgaagctgaagaatctgcaacccatgtagttgaacagaaaaaaagaaaaaaaaaagagagagagagaaaataaaagattaaaaggaagaaaagaaggaaggaagaaagttagttttccagacgaactttgaaatcctaaaaccaacaatagttggaattaaaaggagctggaaatggggtgacaggctgggtgaataattaaagacctgtggaacagctgcacgagtcccctgctctcagaattgctggttctgttgtttgcctgcaggatacaattttccatttgtgaaataatttttaaaccctgatacagagtattcccaggatggttgttgggaccagaaaagcagggcactccctaggtaatatatgatcactacgagattcgcaatgaaaaaacaggtgactcagataactattggttctacatctttctctccgcttcctttatcaactgccaaaagaaagcttgctatattggaaaaccgtcactgccagagaaacagagatgtttcacttgggctgaggaaatggaccctagctaccaatccaggtcaatacataccattgataaacgtgagtatacaacaaacaatcaccaatcatctgaagaaaatgaatagcataaaagagagggaacaaaccaaaagagtagaagaactaattcctgaagaaagagttagtagaaaaaaacaaaagagagttaagagcatgccatatcctaaagaagagcagatgtgtgtgaaaaagaatctatcaggaccttggaaattaaaaacatgatcc

SEQ ID NO: 282114 - DNA, 98 bp, Homo Sapiens
ggctggctttagctcagcggttacttcgacagttctttaattgaaacaagcaacctgtctgggttgttcgagacccgcgggcgctctccagtcctttt

SEQ ID NO: 282115 - DNA, 88 bp, Homo Sapiens
ggctggctttagctcagcggttacttcgcgtgtcatcaaaccacctctctgggttgttcgagacccgcgggcgctctccagccctctt

SEQ ID NO: 282116 - DNA, 1000 bp, Homo Sapiens; identical to SEQ ID NO: 195255

SEQ ID NO: 282117 - DNA, 1000 bp, Homo Sapiens
aggcgtttcagttaaaccccaaataactctgtgttacactgagctatgaaacggctccttctagctccatttctcctcagacctaagtgctattcctgattgtccttcattgtcatttccagggagaaatgacaccagcacagtggcaggccttccaatctggagcacggtccacacaacttccgaattggtgttcagtgtaaagtgtatcggagtgcggaaaatgcgcagggcattgccaactatagatgctcggagtaattcagtgtattcagagaacacggtgaaacaaggaaaaccggcctgactggggggtgaattcagcagggagtaaatctgatcggcatcaggtctgcggaaaggagctggtgagcacgacaccaccaggcattgcctggctctctccgcggcgggctaagttaaccgcgggtccaggtgcgggccatggtcttggggagggtgctgggtgcgctcgagcaggctagcgtcgggagccgccgctgctagtgagaggccggggccacacacgctcctccccggtacctcctccagcatcaccaggggaggagagggtcggggccacaaggccgcgctaggcggacccaggacacagcccgcgcgcagcccacccgcccgccgcctgccagagctgctcggcccgcagccagggggacagcggctggtcggaggctcgcagtgctgtcggcgagaagcagtcgggtttggagcgcttgggtcgcgttggtgcgcggtggaacgcgcccagggaccccagttcccgcgagcagctccgcgccgcgcctgagtgaggaggggccccgggggcgaggcgggagtgggaggaagggcacggtcgccgcgctggaggtcgggaccccggagcggcgaccggccggggtgggctcgctgagtcgcacccgctctgctggccggtcctgggctcacagtccctgcagccctcggaaacagcgctaggatccttcgggagaggagagatgac

SEQ ID NO: 282118 - DNA, 1000 bp, Homo Sapiens; identical to SEQ ID NO: 206262

SEQ ID NO: 282119 - DNA, 1000 bp, Homo Sapiens
gggcagtcattctgtccgtaggagtacctggattgatgggaggcatgtcccttccctgggggagttcctggtctgagggcgggaaaggcagccaacattctctaggaactcatggaatgaaaagaaacaaacaattatggaatgacctatactcattgggggctgagaagagtcccagagcttgaggtgaagggctgggaaatagatgagtctaatctgggaagtattcctggagaaggagtcgaggaagtgattcaaagcaaggaaggatgcagcgaagccaaaggtgatgggatgagggcctgtcagtgtgcacgtccaggtcctggtgcaaaaactgaactcagcgtggttgccaaaaacagcacgatgccccttcacacgtgcgctggcttataaggtacacctttaggaatatctgcttgttttctcccctgacaaaggaaaacataaatctggaatgtttcaaacataaatctagaatggcttcgatggatttttccaccccttccctcatttcagggcctgagggtgtaggcaatgcattgtcttctatgtttatcacagccaagcagagctgggggtggcaggcctgccagcctggtcatgtgaaggtgatatatggaggtttgcgagagggccccagagaggaaacttggcattcgtccttcaaacacaaagtcatgctctttatttatttatttatttatctgctgcatggggacagcttgcttgcaatcccactgtggggacgtgagacacaggcctggggagggaggaccagggggcctgctgtactgggcgtccccaagaagaagccaatatagccccgctggtgggttaggccttggtggctgggcagatgggtggccacgctctcctgtttctttccaggactgtcctggagctttgatttctgtgactctggaattctgtgctgctgtagactccataatcaatgctggggtctgtgacttaggactgaaagactccagaattc

SEQ ID NO: 282120 - DNA, 1000 bp, Homo Sapiens
tccaatgaataggcagtccttttcccattgcttgtttttgttgatttcattgaagaacagatggttgtaggtgtgcagccttatttctcgactctctattcttttccattggtttatgtgtctgttttttgtaccatgctgttttggttactatatccttgtagtatagtttgcagtcaggcaatgggatggttccagcttttttctttttgcttaggattaccttggctattctggctcttttagtggctccaactgaatttttaaatagtctttttcttattcagtgaagaatgttattggtagttttttgggaatagcattgaattaaaaagtgctttaggcattatggccattctgtcaatattgattcttccatgagcatagaatatttttccattttttgtgtgttatctctgagttacttgagcaatattttgtaattctcagtttagcagtgtttcacctccttgcttagctgtattcctaggtatcttatttctttttgacaattatgaatgggactgtgttcttcatttggccttagcttaaatgttgttggtgtgtaggaacactagtgatatttatacattgattttggatgctgaaactttgctgaggttgtgtatcagatcaatgagcttttgggcagagactattgccaaagtatagaacctcatcgtctgcaaacagggataatttgacttcctctcttcctatttggattgcctttatttctctttcctgattgctttggctaggatttctagtactatgttcaatgagatttgtaagagagggcccccttgtcttatgccagttttcaagcacaatgcttctggcttttgcacattcagtataatgttggctgtggactttttaaagatggttctaattactttgaaatatgttccttcagtgcctagtttgtcgaggatttttaacatgaaagggtgttgaattttataggatgccttttctatatctactgaaatgatcc

SEQ ID NO: 282121 - DNA, 1000 bp, Homo Sapiens; identical to SEQ ID NO: 195254

SEQ ID NO: 282122 - DNA, 1000 bp, Homo Sapiens
agctgagtgttgtggcctgcacctgtagtcctagctgctcggtaggctgaggtgggaggatcacttgagcctgtgattgcaccattttattccagcctggttgacagagcgagaccctgtttcataaaaataaaaaataaattctactgtgtatatttaaggtatataatatattatttgatacatgtagatattaaagtggttacaatagtgaagcaagttaacatatctgttatctcacatagttacccatttttgtttttgtgacaagaacctctaaaatctgcacattagcaggaatcccaaatacagtacaatttttttttttttttttgagacggagtctggctctgtcccccaggctggagtgcaatggcacgatcttggctcactacaaccttcacctcccaggttcaagcaatcctcctgcctcagcctcccgagtagctgggactacaggtgtgcgccaccacacccagctaattttttgtatttttagtagagacagggtttcaccatgttggtcaggctggtctcaaacgcctgacctcactcaggtgatccacccatcttggcctcccgaagtgttgtgattacaggcatgagccactgcgcctagccccaaatacagtacaattagagtccctggagtcctgatgttgtaccttagggctctagacttgctcattctccatatctgctacttgctatcctctgacctccatctccctgctccctttccccctcaccccctctgccctggtaaccactgttttattctctatctctgtatatttgactttctttctttctttttttttttttttgagactgagtctcatgctgtcacccaggctagggtgcagtggcgtaatctcggctcacttcaacctctgcctcccaggttcaagcgattctcctgactcagcctaccaagtagctggggattacaggtgcccaccaacatgcctggctaatttttgtatttttagtagagatg

SEQ ID NO: 282123 - DNA, 1000 bp, Homo Sapiens
gcagtggtttgcagttctccttgaagaggtccttcacatcccttgtaagatggattcctaggtattttattctgtttgaagcaattgtgaatgggagttcactgatgatttggctctctgtttgtctgttgttggtgtataagaatgcttgtggtttttgtagattgattttgtatcctgagactgctgaagttgcttatcagcttaaggagattttgggctgagacaatggggttttctagatatacaatcccatcgtctgcaaacagggacaatttgacttcctcttttcctaattggataccctttatttccttctcctgcctaattgccctggccagaacttccaacactatgttgaataggagtggtgagagagggcatccctgtcttgtgccagttttcaaagggaatgcttccagtttttgcccattcagtatgatattggctgtgggtttgtcatagatagctcttattattttgagatatgtcccatcaatacctaatttatggagagtttttagcatgaagcattgttgaattttgtcaaaggccttttctgcatctattgagataatcatgtggttcttgtctttggttctgtttatatgctggattgcatttattgatttgcgtgtattgaaccagccttgcatcccagggatgaagcccacttgatcatggtggataagctttttgatgtgctgctggatttggtttgccagtattttattgaggatttttgcaccaaagttgatcaaggatattggtctgaaattctcttttttggttgtgtctctgcctggctttggtatcaggatgatgctggcctcatgaaatgagttagggaggattccctctttttctattgattggaatagtttcagaaagaatggtaccagttcctgcttgtacgtgtggtaaaattcggctgtgaatccatctggtcctggactctttttgtttggtaagcaattgattattgccacaatttcagatc

SEQ ID NO: 282124 - DNA, 1000 bp, Homo Sapiens
ggagaagtcgcagtgcgcactggaggagtacgtgaggagccagtaccccaaccagcccagccgttttggcaaactgctgctgcgactgccctcgctgcgcaccgtgtcctcctccgtcatcgagcagctcttcttcgtccgtttggtaggtaaaacccccatcgaaactctcatccgcgatatgttactgtctgggagcagcttcaactggccttacatgtccatccagtgctcctagaccttgggcgcttcccacctgccccgtccccctagagactcagaggacccacctgggccaaggactccaaagccgcggggacaccgggaagtgcagcgggccaggcaggctgggtgggagggaggagggccgagacaggagcagcccacccagcagaaatacaatccgagctacaaagcatgggaaaaagagactcttttaggatcagatctgtgagcacgttggcgaggaaaaacaaaacaaacaaaaaaaagaaccttgtgtctgtctggtgaaaaaaagaaaaacaaattggaagagaggaccatgagaattttaataaaacagaaggaaactaatggaccttccaggatttattgtggacggatgtggatatattctgtacaggaacaacacatatggaagtggactgaagcctatgtagaaacacacacacactgaacattgttattcattttgtaaaatactagtctttattttcattttttgtaaaatttaaacatcgtatgcgcataaagaaaaaggaaacaagaattaggggaaaataacattttccaaataattataaaaaattgtcctgtgtctatgtatctatatctgttttgtatttttttctggttccaaaccagatttcctgtgattctatactaataatttttgatataaccctttgcttcttataatgagtgcgatatatgttgtcgaggctgttcttcaagaattaaaattgaagtgaaaatttaaacaaaaataaaagaattg

SEQ ID NO: 282125 - DNA, 1000 bp, Homo Sapiens
ccccaggagttcaagaccagcctgggcaacatagtcagaccctatgtctacaaaaaattttgaagaattagccaggcatggcatcacgtgcctgtagtctcagctactcaggaggctgaggtgggaggattgcttgagcccaggagtttggggctgccatgagctgtgactgagccactacactccagcctgggtgacagagcaagatcctaactttagaaaaaagataataataaaatgaaatcaaattggctgtggtaatggttgcacaactctgtgaatgtactcaaaaccattgaattacttactttaaattggtgaatggtatggaatgtgaattatatctcaataaaggtgtccaaaaatatgtcatggattcgtgctattcttacatatatactcatataatatatagttcctattctactaaacttatatgagggcctcaccctcagctatcttgttattacatggttgttttgtttaattacgttgggttagttccacccatagttttgaatgatcactggaattcaactgatatgcaacaagtaaacctaagtctccaagtaaacctaagtttcctaaataacctgtactttgttctttaggataattggtatttacccatagtctgttttgttctataatgctaagactggcctttagcttaacggatgtatcagtttcctattgttgctgtagctaattaccacaaacttagtgacttcaaacaacacaaatgtattgccctacaattctggctatcagatttttttcttttagactccagcctgtctcccaggctggagtgcagtgatgcaatcccggctcactgcaccctccgcctcccaggttcacgccattctcctgcctcagcctccccaggcagctgggattgcaggcgcctgctaccatgtccagctaattttgtatttttagtagagatggggtttcaccatctcggccaggctggtcttgaactcctgacctcgtgatc

SEQ ID NO: 282126 - DNA, 1000 bp, Homo Sapiens
gtgtaggagaaaaaaatccatatttttatattagcatgcacactaaaaaccaaaatattattcatacttaaaacattcatacaaaacaatatgtaagcagaaatagtactaaaatactttgcctaatttctaagttgaagaataacactgggacacagttttttcatatgagagaatattccgctatttcaaatttaagggattttcttcctaacattgaaattttaaaaacagagttacttctaaataattatacagattttttcttctattaaatattattatttagaattgtttttgtattacatattcatgttaagaaccccgtcttcccttaaaatacattaaaattatgacatttttgctttgtgattgaatttcaaatagcagtatggtatccttttatctagttaatatatgaaagtggcttgaatatagtcaaatccattttaggtactctactgactttttccttcacttgccaagcccttttattgttcactgttagaaaaatagagaaggtgagacagctgggggaaaatgtggagtaaatgataatcaaatgttgaattctaaaagtctctacatttacctaggttggctttctcccccagttcagaagtttccagcttggccaatcatcagaatcacttgaggaacttagaaagaactccctggctgtagctcctatgtaggtttaggttgagactctggattccacaatttttaaaggttaccatctgaggtttctgatcatagtctacttttgaagcagctgctgctgtttctttattccattgaacaccctggaattgacataattttatctatcagcatttctccccttttagtttatttaataattaacccggtctccagggcagttttcatatgaccatgtgtatattcactgctcacgaaaaagtttaatgttagattaccaaatttaatatagttacagaattactgcataagggcttcccttcttggagactcttac

SEQ ID NO: 282127 - DNA, 1000 bp, Homo Sapiens
aatcctggggtggggggagacccctcatctgtagcccctcccttgctcctcccaaagggtggaattagaacagggactgttattgggagacagtaagtgggggatagtagttgacctttggtaagggggcaggtgcagggccagaggttctgcttcaggctgtagtgggcacttggctgccagcccagtgtgaaggggggaggatggagagaaagagaggcggggctggctggggaccgagtggctcagggataaatgcgcacctgagagggggtgagctgacactgtcccagctgccacctagactcggagctccatccaaacctccagcgaagacatcccaaggtcgggtgaatcttccagccctgggggtggaggtagtaaagggtgagcatggtattggcttggaggaagtgggggacatttctgctttttttcctcctgggactaggagatgcttgaaaaagctgggggaaggggcggctggagcaagcagatgggacaccctctgggacacgaagatctagggaaaggaggctgtgaggagggcagcagggatggatagaaaagggcagctagagctggaacctgatagggaattgggggcccaaggagatttcggagcaggaaaatgagaaccagaaaggatttgaaggccaccagccatggagaacagactgcttgaccagaggggtggaaggagaaggcctaagtggaaggcttggggaaggtgggggcttggtgagcggtggcatcccaggagctatagataagaggcccctggattcttaggatgggagggtggaataagagctgttctgagtgggggagggggctgcgcctgcctctttggtctgtgacctttttgtagggtatttttagctccagcacctgccttcttggagtggggaagaatcttaaagggcaagggatttctggttccttaagagatcaactgtctacactcactcacacctcctgtcctgcagccatggccatg

SEQ ID NO: 282128 - DNA, 1000 bp, Homo Sapiens; identical to SEQ ID NO: 224118

SEQ ID NO: 282129 - DNA, 1000 bp, Homo Sapiens
  misc_feature (862)..(862): n is a, c, g, or t
  misc_feature (879)..(879): n is a, c, g, or t
  misc_feature (888)..(888): n is a, c, g, or t
  misc_feature (951)..(951): n is a, c, g, or t
  misc_feature (984)..(984): n is a, c, g, or t
ttgagcccaggagttcaagaccaacatgggcaatgtggcgaaactccatctctacaaaaaatgcaaaaataaaaaatatagtactcaagtattcttgatcctgtgtttcaaaactagaatttgtaatgcaaatggagctcagtctaataaaaaagaggttttggtattaaaagttcatacattagacagtatcagccaaaatttgagttagcaacactgttttctttacgagagggtctcacccaaatttatggggagaaatctatttctcaaaaaaaaaaaatcttcttttacagaaatgttgagtaaggtgacattttgagcgctaataagcaaaagagcatgcagtgctgttgaataaccctcacttggagaaccaagagaatcctgtcgtttaatgctatattttaatttcacaagttgttcatttaactggtagaatgtcagtccaatctccaatgagaacatgagcaaatagacctttccaggttgaaagtgaaacatactgggtttctgtaagtttttcctcatggcttcatctctatctttactttctcttgaatatgctacacaaagttctttattactacatactaaagtttgcattccagggatattgactgtacatatttatgtatatgtaccatgttgttacatgtaaacaaacttcaatttgaagtgcagctattatgtggtatccatgtgtatcgaccatgtgccatatatcaattatggtcactagaaagtctctttatgatactttttattgtactgtttttcatttcacttgcaaaattttgcagaattcctcctttctacccataaattacatataatttttcttctttagtcatggagaacncccccccatcatctcanccctattanctttcccatgtgtactggtattattaaaaagacatttacatacgcaagtttttcactgacaancaagaatgttattaatgtgtaatactgagcacntttacttcttaataaa

SEQ ID NO: 282130 - DNA, 1000 bp, Homo Sapiens
ttgttttcatgttccattcattttttaacccatgcaaggcatttagtgttaatgatatttgatctcttccctaccactccctcccatccccctctttttctctatctctgtcttccatcttttacttttcgttcttttccatctcacatgctcattttttcttctcaaaaccatccttcgaattccttcagtggtgtctcatctcccttttgctgcttctatcatgacctttgattttggtctctttttgtgtgtctctctctctctgagattctgaggctctgcctattccgtttttattctcatttgtttctaattgtttctaagactctgtatactcctttttcattctcatttattactaatttatttctgaggctttatccactcacttttcattcccatataacctaatgtattatcagttcttccttaaagccttatattgcttctttaaattctcatttcagagaaacaatattgtctttaattgattccttagaaataaccttgttcatggtttttggctgcgttgtggtatataatctttccgtttctcatcttcataaatcatgttctgttcttcttttttcatttcagcatcattataaggcccccggctggctccaccctttttaagtagcattgttcctcatctttttggactagaattttgggcaaagttctggggaaaggggaagaagaatgtgccaaacaagtgggaagattgggtttcagtctgttatctctaggatgtttctcagctggacttggcctgtgggttatctgttctagcatagcaggatatcttccaggctcacaaggaggctgtgcattttacagaacattttaatgtgattattttaccttgacttatcttcaccaggcagctttgggcaaagacggccaggtagcttttatcttattgactcttccttctatcctatgccatgattgaaacatgatgtaggcttccaaaaccaggccatgaaccttgatc

SEQ ID NO: 282131 - DNA, 1000 bp, Homo Sapiens
gccattgcatccagcctaaataaaattgttattattattatccatccgggcatggtggctcacacctgcaatcccagaactttgggaggctgaggcgggtggataacctgaggtcaggagtttgagatcagcctggccaccatggtgaaatcctgtctctattaaaaatacaaaaattagccaggcatggtggcgggcacctgtaatcccagctacttgggaggctgaggcaggagaatcgcttgaacctgggaggcggaggttgcagtgcgccaagattgcactactgaactccagcctggtgacagagcgagactctgtcaccaaaaaaaaaaaaaaaaaaaagaccaagtgcggtggctcacgcctgtaatcccaacactttgggaggccaaagtgggtagagcacttgaggtcaggagttcaagaccagcctgggcaccatggcaaaaccctgtttccactaaaaatacaaaaattagctgagtgtggtggcgcatgcctataatctcagctacccagggggctgaggcatgagaatcgcttgaacccaggaggcagaggttgcagtgagccgagatctcgccactgaactccagcccgggcgacagagcgagactccgtctcaaaaaataaaaaaataaaaacgatggcactgtgaacgggtctgttgactatttcttggtctcttggtttatctcctcccagctcaggcttgctcctcgccacagtggggctcaaggcagttgcacctcggcacaattttctttttttttttggagacggagtcttgctgtctcccaggctggagtgcagtggtgcgatctcggctcactgcaagctcctcctcccgggtttatgccattctcctgcctcagcctcccgagtagctgggactacaggtgcccaccaccatgcccagctaattttttgtatttttagtagagacggggttttaccgtgttagccaggatggtctcgatctcctgaccttgtgatc

SEQ ID NO: 282132 - DNA, 1000 bp, Homo Sapiens
caaacaacaataatgacacaacctatcaaaacctctgggatacagcaaaggcagtgctaagaggaaagttcatagccctaaacacctacatcaaaaagactgaaagagctcaaactggacaatccaaggtcacgcctcaaggactagagagataagaacaaccaaactcaaacctagcaaaagaaaggaaataaccaagatcagagcagaactttaaatgaaattgaaacaaacaaacaaacaaacacatacaaaagataaatgaaacaaaaagctcgttccttgaaaaggtaaataaaattgatgaccattagcaagattaaccaaggaaagagaaaaaatccaaataacttcattaagaaatgaaacaggagatattacaactgacaccatggaaatacaaaagatcattcaaggctactatgaacacctttatgcacataaactagaaaacctagaagagatggataaattcctggaaaaacacaaccctccaagcttcaatcaggaagaattagataccctgaacagaccaataacaagcagcaagattgaaatggtaataaaaaaatctaccaacaaaaaaaggtccaggatcagacggattcacaggataattttaccagacagtcaaagaattggtaccaatccttttgacactattccacaagatagagaaagaaggaaccctccctaattcattctacgaagccagcatcaccctaataccgaagccaggaaaggacataaccaaaaaagaaaactacacaccaatatccctcatgaacatagatgctaaaatccttaataaaatactagctaaccgaatccaacagcatatcaaaaagataatccaccatgatcaagtgggtttcataccagggatgcagggatggtctaacatctgcaagtcaatacatgtgatgcactacataaacagaattaaaaacaaaaatcacagccaggtgcagtggctcatgcctgtaatcccagcaccttg

SEQ ID NO: 282133 - DNA, 1000 bp, Homo Sapiens
agtaggatcctaaatgaaattggtaaatgatcaataagctctgtcctcaaagttgaccattcgacatttttattaaagtcacagaagaggacatagaagacactatcagatttgtaagtagcacaaaatttgataaatggccagttagttagatgacacatttaatatttttttaaaaatctgaatagtcaggaaactcaaatctaaaagaagacatctaacaagagataaatgagaacccctgtatttggatttattgttttttcaaacacaagggcagaacagttcatgtggaaggagctttgttgtagggtcagggggttggggtcttgcaattgcaacactatgtgtctcaagtaaatcactccttctttgggtcacaatgccttcatttgcatgctaaggggtttaggtgggtgatataggatcagtcgcacgattctaagtgagcgattgccctggatttgaaaatcttgccatatagtgatacttggtaataatatttcatgtaggaaggagtcatgtatatatcgtcttaaaacttggagctggttggtatcaggtgagtgggttaggattgataccccccggccttttaccctagtgacacacacacacacacacacacacacacgtacaatattaatgtgcatataatagttataactgaagatatcatatatatgatttataagtcattttatttttatcacattttattatagtcacccagaatatacattatcaaataaaggtttgtatataatacactcctaatgagaaaaactcatgtaatattaccctaacatttattgtttaaaattgatgtaatatttttctaacattcaaaaacctgttggaatttgggttgtctttttgcccatttgtggacatcagaaattgccttgtgtgttacaattgctaatgatgttaatactacttgtggagcataccaggactgggaaagattggttgtacaaaaatacaaggaaaacattca

SEQ ID NO: 282134 - DNA, 1000 bp, Homo Sapiens; identical to SEQ ID NO: 205727

SEQ ID NO: 282135 - DNA, 1000 bp, Homo Sapiens; identical to SEQ ID NO: 205728

SEQ ID NO: 282136 - DNA, 1000 bp, Homo Sapiens
gggcttgccggaccagaccagggatctttgcaccttccctggcatagggcggctgcaggtcatctcagaagagtagtaaagaaaggtgacatcactcgtttatccctcagatgtgtcttgggtataaaaatgtgcttaaattgaatgtgagttctaaaaactgaaagaaaagaacagatttcaggctgtgcacagtggctcctgacctcagtgatgccatctcggctaactgcaacctctgcctcccaggttcaagcgattctcttgcctcagcctcccgagtagctgggattacaggcaccggccacgatgcccagctaatttttgtatttttaatagagacagggtttcgccaagctggccaggccagtctcgaactcctgaccccaggtgatccacccacctcggcctctcaaagtgctaggattacaggtctggagtttgagactggcctggccaacttggcaaaaccctgtctctactaaaaatacaaaaattagctgtgcgtcgtggcgggtgcctgtaatcccagctactcgggaggctgaggcaagagaatagcttgaacttgggaggtggaggttgcagtgagccgagatcacgccactgcactccagcctgggtgacacagcgagattcttgtctcaaaaacaaaaaaaaaaaaatgaatttcttcattgctctaaagctaccttccatatgtgaccaaaggtgagcggaaatggcctggcgagtgtagccctggtgggtgagacaccacgggcagggcaggcaggggcggggaggagaatcagaggccccttcaaggtaatgttgggctgtggtatggtttgtccccaccaaaactcgtggagacctggtccccagtgtggcaacactgggagctgggacctttaagaggtaatgagttttttttttctctagactgaattagatctttttacaaaatgaggccctcaccagaagctaagcagatgtcggtgccatgcttcctagactt

SEQ ID NO: 282137 - DNA, 1000 bp, Homo Sapiens; identical to SEQ ID NO: 205729

SEQ ID NO: 282138 - DNA, 1000 bp, Homo Sapiens; identical to SEQ ID NO: 114861

SEQ ID NO: 282139 - DNA, 1000 bp, Homo Sapiens
atgagttctcattacttagctcccacttctaagtgagaacatgcggtatttggttttctgttcccgtgttagtttgctaaggatgatggcctccagctccatccatgttctataataacccgaaaatcaaacagatctctgcttttcagaatgtctatctcccttcctttaacaaccctgcattggaagagtcatttagatcttaactgggggcatctattggtcagataaaaaagatgagggcttaatgaattggagcgggtgggctgttgagttaatgttttctgagacattgctgttgcttaccctcaaaggacttgggcaacaacccagggttgcctcaaaagacttgggcaacaggccaggctttttcaaagtatgatgaaccagaagtgctaaggacaaactagatgtgcatttttgttctattttcataaccgagcgctctgcatcttcaaaaactgctgatgagcacaagtaattttagttcaaatctccgctgacgaattttcttcctttggacgtcacagacattgcattactatccaaaaaggactttgagaagtccttagagctctttgaagtttgttttagggtcctgaaaacccctgccttatgggcaaaagagattaaaatattcctcaccatcctggaaagccatgccaggcatggccacaggccacacgccaccctccacccctctgagataacacttaggttctccactgaagcctggaaaaatagtaccaccctgctcaacgtaacacacagaacaccttcctccatcgcaaaccccactttctttcatgaaccatcagctttccaaagtctggactggcttgtgtgagcacctgaacactgtaccaagtgaaagggctgcaggtctgtcatcagacttttcacattagtgtagcctgatagatgcaaatagagacccctccccacttgaagctccctcctcatcacttcccaagctaaaaaattatttgataatctgatc

SEQ ID NO: 282140 - DNA, 1000 bp, Homo Sapiens; identical to SEQ ID NO: 114862

SEQ ID NO: 282141 - DNA, 1000 bp, Homo Sapiens; identical to SEQ ID NO: 114863

SEQ ID NO: 282142 - DNA, 1000 bp, Homo Sapiens; identical to SEQ ID NO: 114864

SEQ ID NO: 282143 - DNA, 1000 bp, Homo Sapiens
aaaggtgtatagtccctccttccctctctcttcctcctgctccagctgtaagatgtgcctgcttccccttctcttcccaccatgattgtaagtttcctgaggcctccccagaaacagaaatcgctatgcttcttgcacagcctgcggaacagtgagccaattaaacctcttttctttataaattacccagtctcaggtgtttcttcatagcagtacaagagtggcctattacaccttctcagtgagatctgcctcaacttccctattcaaaattgtaacatcttctgcccagcactcccagccccctaccctgcagcattttaccccataacacttatcaccttcttacctttaaatgtgttcctttccttacaaaagcatagcttgtaaaatccaaagtcttgtttccaactagatatcatctgcctcctgatgccatgcaaatgcacatagcaccagctaggaaatattcttgtcacaaaaacttgatcctgaatttagtcaaacttctccagctaacttccactcacttggaatagagggacaagagcatggcaccataaggaagcatgcagacaaatgctgaatgtgggacattctccaagacaatcgacctggtctctgcaacaaaccaagggaagggggattaaaagagaaaataatggagactgcggtagatttaataacacttacaagatataacaacaaaatgccatggggagaacctgctcaaatcctgatttgtgccaaccaacaataaagagacactttggagtcaagtaagtaaattttattatggactgaatattacatctagtatattaccaaagaaatagtgtgcactttgagaggcataataactgtattatggttacataagaaaatagtaaccatttttagagctattaatatgtactgaaatgtgtagagatttaatgacatgattttggggacttactttaaggtacttcagcatattgaaaagggataaatgggccag

SEQ ID NO: 282144 - DNA, 1000 bp, Homo Sapiens
tagggctgatggcaggtgggttgggtcagactggttggtcagcatcaaaaattgttcccaggttaggtggagattgcagtgagccgagatcacgccactgcactccagcctgggcaatagagtgagacttggtctcaaaaaaaaaaaaaatattgttcccaggttagatttggagggtcatggtgaccaccagagtcccctaaatatgagatgagcatatttagaatatcaggaattgaaaactaattaaaccatatattagcaattgagagagtaaagaagattagaggttaaaagaacctaattcacaaaattcacatacagcccttcaaaactcacatagagaaaagcactaaaagaattgtctctggctaggcatggtggctcacgtctatgatcccaacactttgggaggctgaggtggtggatcacttgagcccaggaattttctttttttctttctttctttctttttttttttttttttttttgagacaaagtctcactctgacacccaggctgaagtgcagtggcgcgatctcagatcactgcaaactgcctccagggttcaaatgattctcgtgcctcagcctcctgagtagctgggacttcaagtgcctgtcactatgcccagctaaatttttttgtatttttagtagagacggggtctcaccatgttggccaggctggtcttgaactcctgaccttaagtgatccacctgcctcagcctcccaaagtgctgggattacagacatgaaccaccacacttgtccttgagcccaggaatttaagaccagcctgggcaacatggtgaaaccctgtctctacaaaaaacaaaaaaaataccaaaaaaaaaaaaaaaaaaaaattagccaggcatggtggagtgtgcttgtagtcccagctacttgggaggctgaggtgggagagtcatctgagcctgggaagtcaaggctgcagtgagccattatcacaccactgcactccagcagcctgggt

SEQ ID NO: 282145 - DNA, 1000 bp, Homo Sapiens; identical to SEQ ID NO: 205733

SEQ ID NO: 282146 - DNA, 1000 bp, Homo Sapiens
gaggtgggaggatcgtttgagcccaaggctgcagcaagccgtgagggaaccactgcactccagcctgggcaacacagtgagacccggtctccaaagtgaggggtggggttgggaggaaatgaggtaggtctccacgtgcttatgaaggaaatgtgtccttatattatcatcagttgccgagcaatattataatataataccctcctagggaatggaattgaggatgtaaagagtgaacaaacaaggaattctaacttgacatacctctgcgctgtctgaattttacttgatattcttctgtcatgtttaaatgttttaaacaacctgaatgttactttaatcatttaaaaagtaaaacgggctaggtacggtggctcacgtctgtaatcccagcactttgggaggccgaggcgggggggggttacctgaggtcaggagttcgagtctctactaaaaatacaaaaattagctgggcgtggcggcgggcgcctgtaatcccagtttacttgggaggctgagacaggagaatcgtttaaacctgggaggcggaggttgcagtgagccacgatagcgccattgcactccagcctgggcaacaagagcaaaactcggcctcaaaaattatatatatatatacataagttaaaaataaactttaggccgggcacagtggctcacgcctgtaatcccagcactttgggaggctgaggcaggtggatcacgaggtcaggagatcgagaccatcctggctaacacggtgaaaacccgtctttactaaaaatacaaaaaattagccgggcgtggtggtgggcgcctgtagtcccaactactagggaggctgaggcaggagaatggcgtgaacccaggacgtggagcttgcagtgagccgagatcttgccactgcactccagcctgggagacagagcaagactctgtctcaaaaaataaataaataaataaatttaaaaataataataatacactttaaaaggccaggcgc

SEQ ID NO: 282147 - DNA, 1000 bp, Homo Sapiens; identical to SEQ ID NO: 114865

SEQ ID NO: 282148 - DNA, 1000 bp, Homo Sapiens; identical to SEQ ID NO: 114866

SEQ ID NO: 282149 - DNA, 1000 bp, Homo Sapiens; identical to SEQ ID NO: 114867

SEQ ID NO: 282150 - DNA, 1000 bp, Homo Sapiens; identical to SEQ ID NO: 205736

SEQ ID NO: 282151 - DNA, 1000 bp, Homo Sapiens; identical to SEQ ID NO: 114868

SEQ ID NO: 282152 - DNA, 1000 bp, Homo Sapiens
ccaccatctcaagctggggggtcccaggtgagaggcttccatagaggacaaggtggtgcagaaacatctgctgtgggagtggggtccccagcactgggtgcttcggccagctacccccgaccccaggccccctcataggctgccctcccataccctcctttctcgtcttttcctcctacaggtgctacacccctgtgagagtgttttggagtgttttcattgttagggtggagggaggctgtgtgtgtccaggaaaggtgactcctgtgttaaccatgagggtcctcgcagggaggaatcgttgggagccctagggtgtgttttgtcctctcctcacctgtttgctccttgggatttgctgatgagaaatgaagggtagggcaccctagtagccactggaaccaagggcagggaggatgggaagatgttttactcagcacctaacacacgcagatccctgtgacaagagctcatgctctcccacttcttcgcaagaccccagagtggatggggagtgaggtggcagcagctggcactggaagcagtgcggagtgtttggtctggttgctgatggctgcatgggaaacttgcaggagtgtgtgttagtaaacgtctccccgtcctggcccagtttgtgtcgaacatgcgttttccatgtggggagtcaggggagttccatcttaaattgcactgtgcttgctggatgctcttcaggacaatttaggaagcaggaaagaatttacaaagttctgaggacagacagaccctgctcctacaagctgcagtgctcaccatagtcaaagtggactttcacgtaagcccagacctcattctctctgaaggaggccgctccagcctttgccaggagccctggtgactttattctgcctaatcctgctgcggcctggggtcctgttagaacgtgaatggaagaccacagcagaggtgggatgcccttggatttctgccatccccacgctttcgtgacatgctcagatgg

SEQ ID NO: 282153 - DNA, 1000 bp, Homo Sapiens; identical to SEQ ID NO: 205739

SEQ ID NO: 282154 - DNA, 1000 bp, Homo Sapiens; identical to SEQ ID NO: 114869

SEQ ID NO: 282155 - DNA, 1000 bp, Homo Sapiens; identical to SEQ ID NO: 205741

SEQ ID NO: 282156 - DNA, 1000 bp, Homo Sapiens; identical to SEQ ID NO: 205742

SEQ ID NO: 282157 - DNA, 1000 bp, Homo Sapiens
catacagtgggttaggatcttatcagcactcagatgtaaggatcgaattctcaaccatcaacccattcctctttccagtaccttaactccccaaatactgtaatcctcgcagttacatagcagctcccacagacttggctgcatgggggagtaatgggtcgccatctgactcaggccgaattgtgaggaagcaacttctccctccacagtaaatgttgagctttattgaaaagtattactaggatgtgataaacaaacaaatatccttagagagtatacatatattttaaataatcaacccatctttcttcagagaatcttatcttaccccccaccccctccccgttgtaggtaagtaaggagccctagatcccagcggatcattcatgagacccagggaaggggcctacctataggtttcccagaaatgtgagtctcaggcctaaatttctttgggtatcagggatttggaattgaaactccaagaaatgaagaaaaatgttcagaaaggcaatgatgaaatgtggctggcggacttttttttttagacggattcttgctctgttgcccaggctggagtgcagtgcatcctctgctttctgggttctcggctcactgcaacctccgccttccgggttcaagtgattctcctgcctcagcctcccgagcagctgggattacatgcacacaccaccacaccccgccaatttttgtatttttaatagaaacagggtttcaccatgttggccaggctggtcttaaactcctgacctcaagtgatctggcggacattttgaactataggcctacagagaaagagaatgagaatgagatagggagagagagaaagaatgcacaagagaaaatgcatatgagggccttgtgtttccagagagaaagggacagaaaaagcaaaggagagaggacaccctggagagcaccttagctgcaacctttctggtttccagttcctgtcatggggccctgcttaccttggatt

SEQ ID NO: 282158 - DNA, 1000 bp, Homo Sapiens; identical to SEQ ID NO: 205743

SEQ ID NO: 282159 - DNA, 1000 bp, Homo Sapiens; identical to SEQ ID NO: 114870

SEQ ID NO: 282160 - DNA, 1000 bp, Homo Sapiens; identical to SEQ ID NO: 114871

SEQ ID NO: 282161 - DNA, 1000 bp, Homo Sapiens; identical to SEQ ID NO: 206266

SEQ ID NO: 282162 - DNA, 1000 bp, Homo Sapiens; identical to SEQ ID NO: 206268

SEQ ID NO: 282163 - DNA, 1000 bp, Homo Sapiens; identical to SEQ ID NO: 206267

SEQ ID NO: 282164 - DNA, 1000 bp, Homo Sapiens
ataccccatggctcccctgggacgcagtctgtctcattgcaatggatcaataaacctaattttattacactacaggtatattcctggaagtcttagacaactgggctaaaacaaaaatattcaacatccattcttaattattaaattagttactaaaataggatagacagatgttatttggccataattttatatacatgtaaacaaaagctaatacatacctaatgatgaagaaacagaagcattcctactaaagttaggaacatgaaaaaaattgattactatctatcttattttacagtgttttagaacaggtggccaatccaattatacaagaaaaataagttataatatttaaagaaatgccaaaattacttttatttgtaagtgattatacacctaggaaatccatgagaaccaaataataataaagtattatggccaggcgcagtggttcatgcctataatcccagcattttgggaggctgaggtgggtggatcacctgaggtcaggagttcaagaccagcctggccaacatggcgaaaccccatctcttctaaaaatacaaaaattagcctggtttggtggcacacacctgtagtcccagctactcaggaggctgaagcatgagaagtgcttgatcctgggaggcagaggttgcagtgagccaaggtcgcaccagagcactccagcctagtgacagagcaagactctgtctggaaaataataaaaataataataataggcagggcgtggtggctcacacctgtaatctcagcactttgggaggccaagtcgggcggatcacctgaggtcaggagttcgagaccagcttgacaacatggagaaactccatctctacttaaaataaaaattagccgggcgtagtggtgcatgcctgtaatcccagctactcgggaggctgaggcgggagaattgcttgaacctgggaggcagaagttgtggtgagccgagatcgcaccattgcactccagtcta

SEQ ID NO: 282165 - DNA, 1000 bp, Homo Sapiens
cttcatggaccagagatcttggatgttccttccacagttcaaaagacccctttcgtcacccaccctgggtatgacactggaaatggtattcagcttcctggcacttctggtcagcaacccagtgttgggcaacaaatgatctttgaggaacatggttttaggcggaccacaccgcccacaacggccacccccataaggcataggccaagaccatacccgccgaatgtaggtgaggaaatccaaattggtcacattcccagggaagatgtagactatcacctgtacccacacggtccgggactcaatccaaatgcctctacaggacaagaagctctctctcagacaaccatctcatgggccccattccaggacacttctgagtacatcatttcatgtcatcctgttggcactgatgaagaacccttacaggtaattaattgttctcttcacttctcatggggcagcacagaaaggaataagttaggtaactgaagtgaccagccctcgaataaaaagtggcttcatggccgggtgtgatggctcacgcctgtaatcccagcactttgggaggccgaggcaggtggatcatttgaggttaggagttcaagaccagcctggccaacatggtgaaacctcgtctcttgaaaaaaaaaaaaaaaaagtggctccaccttttagaacctcttagaagatggcacatttaagccctgcttttttttttttttaaatcccaatatggctctactttggaggacataccagagagtcactagccttttatttccatagagaaaatgaaactatttctcttattctcacacatttgaggttcctttttgagtaagatagatggttctagaaaagaaagaaagatattctacctgaatttccatttgtgtgcagaagtctaaaacactacctttacgatttgtccttgaagaaccccactatctacaacatatctaaagaaaaaaaaaaacagcgaagctgtgcatagcag

SEQ ID NO: 282166 - DNA, 1000 bp, Homo Sapiens; identical to SEQ ID NO: 201654

SEQ ID NO: 282167 - DNA, 1000 bp, Homo Sapiens; identical to SEQ ID NO: 201655

SEQ ID NO: 282168 - DNA, 1000 bp, Homo Sapiens
taaaaggtgtgaaggtgatttaagggcccaggtcagccactgtttgtttacaaaatcaggtaactaactgcatacactttttctctttccatgacatcaagactttgctaaagacatgaagccacgggtgccagaagctactgcgatgccccgggagttagccccctggtaatagctgtaaacttccaatttctagccatacgctcagctcatccatgcctcagaagtgcatctggagagaacaggtttctaagcataaaagatgaaagagcagttggactttttaaaaattcagcaaagtggttccctctcttagggacagtcaaaaccaagtcacttaggtagtaccaaaataaataaggaaaagcttagctttagaaacagtgcaacactggtctgctgttccagtggtaagctatgtcccaggaatcagtttaaaagcacgacagtggatgctgggtccatatcacacacattgctgtgaacaggaaactcctgtgaccacaacatgaggccactggagacgcatatgagtaagggcactgacggactcatgatttcttcttaccagatgctttcctgttctttaagagtttaaaatcatcagaaaggaaaaacaaactctatattgttcagcatgcaatacataccacgctagggctggctcaattgaaagtgggcaaaagcttacaaatactaaaaagaagtgctgccgcgcagtgtggaggccactgtttggaaataaatcttcctaacactacgacttttcatgttttggagtggacttttaaaaaagttttccaaccacaatggaaacaggttgaaccacactgcgcctacacatccatccatacgtcagccattataatcagattctcactgggggaggcattttcttcccaaaggagctgtatgcagtcatcacccggaactaatgggaaagtgttcttaagcagcaagtgactctggaccacctctctcacacactgactcttccaca

SEQ ID NO: 282169 - DNA, 1000 bp, Homo Sapiens; identical to SEQ ID NO: 206269

SEQ ID NO: 282170 - DNA, 1000 bp, Homo Sapiens
  misc_feature (284)..(284): n is a, c, g, or t
  misc_feature (289)..(289): n is a, c, g, or t
  misc_feature (972)..(972): n is a, c, g, or t
ttgccaacatcagttgtctttgacattttagtaatagtccttctgactggtgttagatggaatctcatttcagctttgatttgcatttctctgataattatgtttcatatttttttcatgtgttttttggccgcttgtatgtcttcttttgagaattgtctgttatgtcttttgcctattttaatgggattatttattatttgattatttaattgttcctcatagattctggatattggacctttgtcaagtgcatagtttgcaaatatttttcccattctgtntgttntctgtttataggagcttaaagtttcttttgctgtgcacaagttgagcttattttgtatgtggtatgaggtatagatcaaaatattttgtgtgtgcatattgatagccaagtgtttaaacatttgttaaaaagattatactttctccactgaatgcctttacatctttcttgaactattctacattccatatatttgtggatacatttttgcactttgtagtctatttgattaatctaggtatctatttatatactggttccacatcttgtgaaaattgagagaaagctacagagacttcccatggtcctcactcatgcactacttctcccatgatcaatatcccccatcagcatggtatatttgttacaattgaaacatcattattattgaaagaccatagcttatgttaagtttcactcagtgttttacactttatgggtctggccaaatatataatgataatgacatgtctttatcatcatagatcatacagaataattgcattgccctgaaaatcttctgtgctctgctcattcatcctttcctccttcaaacacatggcaagcatcgatttttgtactgtctccatagttgtttacttttcccagaatgtcatatagttgaactccatacagtatgttacatctgagccattacatccttaaccatatcatatatctcnacccattttaagttgacagtccgtagtg

SEQ ID NO: 282171 - DNA, 1000 bp, Homo Sapiens
caaggcagtccatctggaccttggtaaaggcaccaccttggccaggttcccaagccacagccccatttcaggcaccccagcgggctccctcatgactcacccatcttcccgtcctccacaaagaggatgtgcagtgggtacaaggtgctgaagtagaagacatcgatgttgttcttcacggccacctaggcacaagggggtccccagtcagtctctggggcttgacgccacctctgaggccccaggaagagtgtcactgagcagattctctcccagggccttccctggtaaacacaccccttcgttccccaacctgggcctccccaacacatctgcagctaagagcatgactccgcagacacgaccttctactgaccccagtggggcccggctggtaggtgagtaaggactggggtgcctgccctgcccggaacccacctggaggttgttcagaggctccatcttcatgaccgagcccaccgtgctgagaggcagggagatctccactgtctggttggggctgagtggtgcgtggacctggaggggggcggcgggggccaggccaaagctggggagagagaagccccacagggatggcagggggagtaggtgctgatgcgggacaggtgagctcctccgactcgggagctggggctgtggttggcagggagcctctcaccgtgccagccttcccatgttctggaccctggacagaaggatgggctgtgggtcccctcccccagatggccatctggacagaaagaaagagccccaggccaattgctctgctctgccccagcctggctgcaggcctgaagcccagctctgttcctctcctctgggccaggcactggtgggcccaggtaggcaggccttgccctgtcctgccctcaaggagctctgtctaatgccaggggcctggagtataagctgcttctaccttgaaaactctgggaccacccaagtctctgctgccaatcctcaactcccagaagggatc

SEQ ID NO: 282172 - DNA, 1000 bp, Homo Sapiens
gaggctgaggcaggaagatcatatggggccaggagttcaagaccagcctcagggagaccgtcttcacaaaaaataaagaaaaaagaaaaccacgttcccgtgggacagtgagatgctacgttggggatctatgtggacatgttgggggagtcgtgttgtaatgggggcaacgctaggctgctgttggtgaatgacgagttagaagtgaccaccagcttctcttccactgcccacaggtgtttgtcagcaaagatgtggccaagcacttggggttccagtcagcagaggaagccttgaggggcttgtatggtcgtgtgaggaaagggtgagccggggaagccaggaaggggctttagaaggtacaggatgagcctggactccaggagtccgccctggagctgggaggatggctggggggacggggtgggctaacacccagctgagtggagccgtcttgcagggctgtgcttgtctgtgcctgggctgaggagggcgccgacgccctgggccctgatggcaaattgctccactcggatgctttcccgccaccccgcgtggtggatacactgggagctggagacaccttcaatgcctccgtcatcttcagcctctcccagggtgagtatggcagcaggaggggaaaaggactgggacctgtccctgcccaaacacctggctgacctagctacttgcccctcctccagggaggagcgtgcaggaagcactgagattcgggtgccaggtggccggcaagaagtgtggcctgcagggctttgatggcatcgtgtgagagcaggtgccggctcctcacacaccatggagactaccattgcggctgcatcgccttctcccctccatccagcctggcgtccaggttgccctgttcaggggacagatgcaagctaagccgaattccagcacactggcggccgttactagtggatccgagctcggtaccaagcttgatgcatagcttgagtattctatagtgtcacctaaa

SEQ ID NO: 282173 - DNA, 1000 bp, Homo Sapiens; identical to SEQ ID NO: 195005

SEQ ID NO: 282174 - DNA, 1000 bp, Homo Sapiens
gtctgctggtattgaaggttgcgttccccaaaatgctgtttggacactccgtgcatgggggtgagtgatcaggtgaagctgtttccctgggtattcctctaaggctgtatctttctcttttttttttttctggaggggcagggaggcggccatgtttttgtcagatactttttttctacttaataaacttctggtgtagtacaggttgaaaagtaatgggaagtctgccagttgaggggatctctgctttgctcagctgggcgagggtgatcatctctgccccccaactctggctgtagtggttccagtttggagggaaggttaccactaggcagaggaggcagtgcttgcttgcttgcatccggagctggatcttgctctcagttcctaaccgtttctaatcagtaatcctctgtctgtccaactagaatcattcctattttattgtggtatcatggggattaaatgaggcaacacataaagctatctctagtaaattcaaattccccctcacttctcttcctcactttccctactcaatcctgattcattaagaatttggaactttgggaggccgaggtgggaggattgcttgagcccaggaagtcaagacaagcatgggcaacaaaatgagaccccatctctacaacaaatagacaaattagccaggcaaggtggtatgtacctccagtcccagctacttgggaggctgaggtgggaggatcgctttgagccaaggaggttgagggtgcagtgagccaagatcacaccactgcactccagcctgggcgacagagtgagactctgtctcaaaaacaaaaaataaataaaaaataaaaataaaataaaaaatacatctaatgcccagcatcagtacatttcctatgttatttgtagcccaccagaagtgattctttcctctcctctaccaaaaaacttttttccagaataatagtgtttcttatttttataatattaataaagggagtagctctttcag

SEQ ID NO: 282175 - DNA, 1000 bp, Homo Sapiens; identical to SEQ ID NO: 195211

SEQ ID NO: 282176 - DNA, 1000 bp, Homo Sapiens
ggctaaaatccactcagacatcgtgaagactaaagtgtgagcctccattactctggcagtgggtctgacactgatccattaatggaatgatgctactaaatgcagggttgcacttagggatgaggaaaggccttgttcatatgtttaaaagtattttcttctatacaaaaaactcttgcctaaaaaaaaagaaaagaaaaggaaagaaaagaatgctttcctctcagagccatcttaattctagacataggagccaaaacaaacaaacaaacaaaataccaaaaactattctactgaaagtgtagtatatatgtcagtgtgaagaagtcagatggaagtgactagatttggaatttttctggtaattcttttgagttgcaaatgaatttctatttaaatgacagccatagctactgtcagcctgtccctccacctttatttaacctttctaagcctgcacttggcttcttgaatataactccgaactttgtccagtgtgcaggaccctttgccgtttcagccaaattcagtgatgtgtctcctccatctccagattcaaggacttcagtgagctagaacctgacaagtttcagaataaaaccaatgggatcactccaaggcgctggctcctactctgcaacccaggacttgcagagctcatagcagaggtaactgggaagtgctgagaggaaaggaggcctgactcgaatgcaagaggcatatgactatacttgtaacttataaatccagtctgcagcagggctggcttcctcagcatgtggtttgtgcagtcacacagggctccatgctgggtttaattctctgctgtagtcatcttgaaattatttattattattattattattattattattgagacagagtttcactctatcacccaggctggagtacagtggtgcaatctctgctgactgcaacctccacctcctggttcaagcaattctcctgcctcagcctcccgagtagcagggattacagg

SEQ ID NO: 282177 - DNA, 1000 bp, Homo Sapiens
aatctctgaaaaatggagaaaccctctgactagtccatgtcaaattttactaaaagtctttttgtttagatttattttcctgcagcatcttctgcaaaatgtactatatagtcagcttgctttgaggctagtaaaaagatatttttctaaacagattggagttggcatataaacaaatacgttttctcactaatgacagtccatgattcggaaattttaagcccatgaatcagccgcggtcttaccacggtgatgcctgtgtgccgagagatgggactgtgcggccagatatgcacagataaatatttggcttgtgtattccatataaaattgcagtgcatattatacatccctgtgagccagatgctgaatagattttttcctattatttcagtcctttataaaaggaaaaataaaccagtttttaaatgtatgtatataattctcccccatttacaatccttcatgtattacatagaaggattgcttttttaaaaatatactgcgggttggaaagggatatttaatctttgagaaactattttagaaaatatgtttgtagaacaattatttttgaaaaagatttaaagcaataacaagaaggaaggcgagaggagcagaacattttggtctagggtggtttctttttaaaccattttttcttgttaatttacagttaaacctaggggacaatccggattggccctcccccttttgtaaataacccaggaaatgtaataaattcattatcttagggtgatctgccctgccaatcagactttggggagatggcgatttgattacagacgttcgggggggtggggggcttgcagtttgttttggagataatacagtttcctgctatctgccgctcctatctagaggcaacacttaagcagtaattgctgttgcttgttgtcaaaatttgatcattgttaaaggattgctgcaaataaatacactttaatttcagtcaaaaaaaaaaaaaaaaaaaaaaaaa

SEQ ID NO: 282178 - DNA, 1000 bp, Homo Sapiens
gggaactccaaaatctgatgctgagtaagctccccaactccccacagccgctttacctgcccacatgacccccccttcgtgcctgtctgctggggtggagctctgtcctgggctctgctgccacatatgcctagaagaccagcggggcccctctcattagctggggctgggagtcagctggtgcactgccccctgccttggtcctgctgagtcttgacccccatgtcttcaggccagagcctgggaacctctcagagaaggtctctcacttggagtccatgctcaggaagctgcaggaggacctgcagaaggtgaggggtgggctcagcttggggggagtcacagggctgccccaggaaaggggctggcggctctgactcctgtctccccggcaccccaggagaaggcggacagggcggccctggaggaggaggtgcggagcctgagacacaacaaccggcggctgcaggcggagtctgagagtgcagccacacgcctcctcctggcctccaagcagctgggctcacccaccgccgacctggcctgagccgtctggaaccacctgggcccctggagggcactgtggtcacactgggccctcctcaggaactctccctgcgcagaggcgtgtcttagcactgcccccctccctagcccccttatttggtggcggaagtggcctccaccccttccctgtttgtaaatattctgtgaagaaaagaggacttcagggagtaaaaaagccactgatgtctgtgtctgaacatgtgtccaagacagggcagggcaaggggttttgcctccagaggccccagccaaactcctcggaccagtcaggacaggccctgggaacactggctcagagatgggctggcactcactgaggggtccctgaggccaggccactgcttggcttctctcccataacgtttatttggttctgcagggaagcaggtggccacacccacagctacctggccgtgcatcacaaggcctgtgt

SEQ ID NO: 282179 - DNA, 1000 bp, Homo Sapiens; identical to SEQ ID NO: 195346

SEQ ID NO: 282180 - DNA, 1000 bp, Homo Sapiens
gggaaggtgaaaggaaaggactgaaaggaatgtttaccaagggctcatcaggtaccaggctctgtgactaatgtcttacacatgttaatttactcttccactgtcattttctgatgcagtaagagtcagccttatactgcagatgaggaaagaggctgagggaggtcaaatgagtggcccagggtcatccagccacttcatagcagagctagtgtgcttcactgtggtttgtgcagacagaaaagtgagacgtggaaggaaggcaaaacatttttgttgtgggtgatgtttatgaaagtgacccatatgaggcagaataatggcctcttaaaaatgtccacatccaggccgggtgcaggggcacatgcctgtaatcctagcactttgggaggctgatacgggtggatcacaaggtcaggagttcgagaccatcctggccaacatggtgaaaccacatttctactaaaaatgcaaaaattagctgggcgtggcggtgggcaactgtaatgccagctacttgggaggctgaggcaggagaatcatttgaacctgggaggcggagattgcagtgagcccagattgtgccactgcactccagctggggcaacatgagtgaaactgtctcaaaaaaaaaaaaaaaaatccacatcctaactcttggaacacatgcatttacttttcttggcaaaaacactgttcaaaggtgatgaagttgagtatcttgagaaggaaagcttattctgacttatctgggtggctcccagtgtcatcataagggtccttgtaagtgaaagagaaaggcaggagggtcagggtgagaatgatgcagcctgagagactccactggccattacttcctgtgaacatgtgtgataagacaaaattacaactaatttagttattgatgtaattggcttttatttttgatttatgatttggggcagctctccctctacagatgcttcagcatcccaagtagctgggactatattgcgggatc

SEQ ID NO: 282181 - DNA, 1000 bp, Homo Sapiens
agggccagggcctggacatttcatgttcccaccccagcctggccactaggagtgttctacgcaggctcagatggatggggctggcctcacagtggggtctggaggactaagatttggtttctctatgcaaggtcagaaaaactcccacagtacagggaaactggccagggctgcagactcaggccacagtgctaaagccatgaactccacctgctctctgaaggctcgccaacctgagtccagcagaatgttctcgcttgtgccaaccccactggtttaggttgaatcagcctctagggcccagaggcactgcacctggagtagggagcttctccagtatcagagtcaccttcagaggcctggagcctttcataaagcaggtaagaggactcaatagatgcatctgcatggaaaacatcctcccctctaccaggcacctgtatgtacaaccaatcacagcagcacacatacacccagaaatgggcacgtgtgggcccacacccctttagctatgaaacccaggcatggggcagcttgagccagataccttgtgcaaacacaaactcgtgcagtcttctctgaactccattgtgaaaattaaacacttgtcagcccctcaagagcctttagatttcctacttccacacttccacagaaaggcctctggagttgggggatgctggggttatgtaggaaattaagcctggaggccttgctggggaagccattgtccctgtacctgagatggatgcagccacagccctggagccagcctgaagctcctggtgccttctgggggctacatataggagtgtagtccgaacctcagaggggcaaacctgctctgcagagggaatcaaggttcacataaccagagaggggagtcactcaggaaggtggctccagagccaagagtcagactctgggtcccgacttgacccagccccaccccctctgaagcttgctgagagtggctgcagtctcgctgctggatgtgcac

SEQ ID NO: 282182 - DNA, 1000 bp, Homo Sapiens; identical to SEQ ID NO: 114872

SEQ ID NO: 282183 - DNA, 1000 bp, Homo Sapiens
cagtctagagtctgtaggggttcccaggtaatctgatgtgcctagggctgagactcgctttgaaaatcatgtccttgatacgataaggcatgacctctgatgccaactgctcagattcacccctgactccacccttcactgagtgaccttgaacaagtgagttcatctacaatctgtaagatcgatgtgaggatgaaatcagcatttacctgggggagctgaaaagtcaccttctcccttctcagtgatctacttctgttaatacgaccaaaatattcagtgtctgtggaatttccagatcataactgttctatgaaaggtgtctaaccacacctgtatcttacatgaatatttgtgcatctattgctgtgaaaatgagatctctaccccaaaagttacttgatgaagaataactcaatttgttactaatagtcaatgtatatgaagctaattcttacaaagtgagacaaaacacttttattttctaatatgatgtctttttttaaattaagactgatttgaacacttaacacacacattttgaggaccacaaaataatgtttcctaagatgatttaatgtcatggaaagatgctcacagcatattattatatgaacaacctggacagaaaaaaaatgtatgtgagataaaatagcaaatttttttgattgaggtagaattcacataccacgaaattcaccatttcaaagtgtccaattcaatagcatttagtgcactcacagtgtcgtgctaccttcgtcagtatctaggtccggaacattttcaccatcccgggaggaaaccccatactgattagcagtcgctcctcagtcccacctccccacagctgctgaaagccaccaatccgctatgcatctcttcagattggcctgttctggaaatttcgtataaaaggacagtacactatgtgaccttttgcatctgacgtctttcattcagtatcatgcattcaaggttcatccacagtgtagtagggatc

SEQ ID NO: 282184 - DNA, 502 bp, Homo Sapiens
  misc_feature (7)..(7): n is a, c, g, or t
  misc_feature (235)..(235): n is a, c, g, or t
  misc_feature (457)..(457): n is a, c, g, or t
  misc_feature (500)..(500): n is a, c, g, or t
cccacangagttgggagctgaagttaggcattttggacaattgatgggggagctgagtctctagaaaagccctgcctaagtgcattcaaatttttaaaatgtaaatgcctggctaagcccctgtaagcagaatgatagggactggggttgatgttttgtgattgtaacccattctactcactaggtagatagacggacagtttaactcccttaggagtacataccacactttcanaattcagaagtcctggtttaccttatttctgctcctagtagatgttccacctcttttaagttaacatttctttggacaatgacatgcagaaacagtagcctctcattttactcttccttctttaagggattgatcaatgaaggcaggccatgtcttttctgaaggtcagctagtaagaatagaataaagagttcctgatttatatagaagtcaataatttcncagtcagaagagacttcaaggtcactagtcaaaactgtcttangg

SEQ ID NO: 282185 - DNA, 311 bp, Homo Sapiens
taagcctattgggctttggcagcagaaaaaaagaagaaaggaggaatttgtttctaaaatgaaaaccaaatttagttaatataaatgctacccatgtgcaactcatcctgccagatcccagtaaatgtacaaatatcaaaataacacaatagataaaaatcacggtggaaaaagagaaattgagacacttctgtgttttgcagggccagaataatctacacagtttactccttccaccatgcatattttacatactacattattatctgattttatataatattcacattgttaatttctgaatcaactct

SEQ ID NO: 282186 - DNA, 376 bp, Homo Sapiens
  misc_feature (88)..(88): n is a, c, g, or t
  misc_feature (196)..(196): n is a, c, g, or t
tggaatattaaatggatccttgaataaactcaagagggtagattataaaaggaagaactgttaaattagtcaaaacactttataacanattagctgcataagcagtgcgtgcgtaagcaggtagtataatgcttaggttgaggtactaaaattattattagagaaaattacggaagtactatgctcccactatgtnttgtacttggttaatttttctcctctgaacttctggcaggtttactggggaaatttccattaggaatattctggtccttaagtttcattttgaatgttataatataatcatgcagattacgaacccacaatctaaaatcaaggcattcttttttaaagtttcagatgaagctggggttgt

SEQ ID NO: 282187 - DNA, 1000 bp, Homo Sapiens
gggcatatagacaagacggatgggggagaaggggaggaggtgggtactggaggaggacggaaaggagtccccaggtcctgtgttgtgcatgtagatatccctttgccctacgacctctgctcacccctgtcccccactgacttccctacatgccctcatgggcacgtcatttatccacactgaaccttctgtgcacactgtgccgtccgtcaacactgatcccacctgtgcccccaggtgcttatctcagagggtctgggcctctttgctcgagacccacgtttcgtggccctggccaagcaggagattgcagatgcgtgtcgcctgacgctggatgagatggacaatgctgccagtgacctgctggcacagggaaccagctctctctatagcgacgaggagtccatcctctcccgcttcgatgaggaggacttgggagacgagatggcctgcgtccacgccctctgaattcccacccctccccaactgctcaataaacctcctgccctcccctccccagcaggaggcaggcatggaccacatccctggattttgttgtctttgcactgggggtctggggctgcccaggggcccccatccatccatcccctgttctagccctgagccactgcccacacacgggtatttccagaaaccaggacagccaggcctgattattcagcgtcagggaaggagggaggaggaggaggaggaggaagagacagcagccaaaaaaagctggaggcagagtggaggaggggggagggggagggcactggacagagatggaggaaaggggagagagcgggtgtgaggggtgcttggacccagagaggaagagaggcagagatttcaccagggctcagccaggtcaaactaggaagggtagacggatgagaaggaaaggacaaggaaacccagagaagaatcctgccaggggagaggcctggaggttggaatcggcctggtatgtgatgcatcttaggcagaggggtcctct

SEQ ID NO: 282188 - DNA, 1000 bp, Homo Sapiens
ttaaggccccagtactgactcagggagagggtcagggggccctctcccctcagggagagggtagggtcctcagacacaaaagagaggcaattcacctgctgcggggaagcctgggggatgtccaggggcagcggtccctcgggctgaggctcccaggctcctgcaaagaggttggccaggtaattctctaaatacctgcaaaagggagggggaagaaaccaagttgccagaattaactaactacaaggattccaggatctgagcaaggaaaggggccgggagaaaagccaggagcaaagtggcatggggacagggtggatgagtgacacctcagggacagacgaaccctagtggccaggtcttcaactgcctgtttgccctcggtagcctctggggtccaccccaactccacgtagccccccagaagcaaggaacgcaggctcagcatgccaggattaagcctgtgggtccaacagatgtgagctcaagtcctggctctgtcacttcctagctgtgcaacttagggcaagtgacttcacccttctgagcttccacctctgtcaatgtaaatatgaacctccctccccaggttcaaggatctgtccacttaggacatgaggcgctttgcatgggagttctgaacactgtcctctcctgcttcaaacagggtcttctcggtctccttgctcactgggccccagggccccaactttcctgaaggacctgtgcagggccctggagacacaaagatagatcctgcccagccctcccctcagggggcgctctatccagcgaaagacagacacatgggcattggcaggaaacagtcggagctcagagtcagaagcctctgctttcaccgttaaggacaggccaagacagcacagaagcagcccaggatggaaccgtgggaagccccgcaagtaaagaaaaggcaagggaggctgaggcaggaggattgctcgaggccaggagttcaaggctgtggtgagctatgatc

SEQ ID NO: 282189 - DNA, 1000 bp, Homo Sapiens; identical to SEQ ID NO: 114873

SEQ ID NO: 282190 - DNA, 1000 bp, Homo Sapiens
gtaagcagcacactaggaggcccaggcgcaggcaaagagaagatggtgctgtcatgaaataaaattacaacatagctacctggggatacttttttctttctgttttttgtttgtttttaattttagctttaaggagcacatggccagtactgtttcaggggaatattgggtggcgctggggtttgggcttctattgatcccatcacccaaacagtgagcatagttcccaatagatagtttttcaacacttcctttcctcccttccttcccgcttttggattcccagcatctattgatcccgtcttttcacccctgtgtacccaatgtttagttcccacttataagttagaacatggggaatttggttttgtttctgtgttgattcacttaggataatgacctccagctgcatccacgttactgcaaaggacaggatttcatgtttttttatggctgcatagtattccatggcgtccgtgtaccacactttctttatccagtccactgttgatgggcacctgggttgattccatgtctttgctactgtaaatagttctgtgatgaacatacaagtgcaggcatcttttcatagaatgattttttttttccttttggtagatacccagtaatgggattgctgggttgaagggtaattctatttttagcaaactagaaatatttaatgaagtacatgaatgagtgtcttcagaattgtacacagtgagatcaaatattttaataatgagcttgttatgttgaattctattctgaccatcactcactgagattttcttttctttctttcttttcttttctttcttttttaaagagacagagtttcactatgttgcccgggctggtctcaaaccccttgcctcaagtaatcttcccaccttgggcctcccaaagtgctgggattgcaggtgtgagccaccacacctggcccagattttctttaatatttgtctaatatctttccatctccctatattcaagcttc

SEQ ID NO: 282191 - DNA, 1000 bp, Homo Sapiens
  misc_feature (91)..(91): n is a, c, g, or t
aagctgcttttgagctttgtcccacaggttgtaaaatgtaagcatttggtaaaattgtcagcatcttgcccagtcattttttaaagggttnaaaaacctttttgttttaattcgtatagttgggtcttaactattggaaataacatcatcagtaattttttccttcattccttttgcaggaggcaagtgaggcctatctggttggcctttttgaagacaccaacctgtgtgctatccatgccaaacgtgtaacaattatgccaaaagacatccagctagcacgccgcatacgtggagaacgtgcttaagaatccactatgatgggaaacatttcattctcaaaaaaaaaaaaaaaatttctcttcttcctgttattggtagttctgaacgttagatattttttttccatggggtcaaaggtacctaagtatatgattgcgagtggaaaaataggggacagaaatcaggtattggcagtttttccattttcatttgtgtgtgaatttttaatataaatgcggagacgtaaagcattaatgcaagttaaaatgtttcagtgaacaagtttcagcggttcaactttataataattataaataaacctgttaaatttttctggacaatgccagcatttggatttttttaaaacaagtaaatttcttattgatggcaactaaatggtgtttgtagcatttttatcatacagtagattccatccattcactatacttttctaactgagttgtcctacatgcaagtacatgtttttaatgttgtctgtcttctgtgctgttcctgtaagtttgctattaaaatacattaaactatactgcttttggtctttattatagccttgccctacaattatattccaaataatttcagtattaagtcctttaatagtcactttatatctgagacgtgagacttattagagagaaggaaagtatagacttggtggcaaaaggaacttggctttatttctaatttttagaagctt

SEQ ID NO: 282192 - DNA, 1000 bp, Homo Sapiens
tcgacttcagactgctgtgctggcagttagaatttcaagccagtagttcttagcttgctgggctccgtggaattgggacccactgagcgagaccacttggctccctgtcttcagccccctttccaggtgagtgaacggttctgtcttgctggggttcccaggcgtcactggggtatgaaaaaaaactgctgctgctaactcagtgtctgcccaaacagccgccctgttttgtgcttgaaacccagtgctctggtggtgtaggcacatgagggtatctcctcatctgcagattgcaaaaaccgtgggaaaagcatagtatccaggccaagtagcacagtccctcatggcttcccttggctaggagaaggatgtctcccagctttttgcacttcccgggtgagatgacgccccaccctgcttctgctcaccctccatgggctgaacccactgcctaacaagtcccagtgagatgaactgggtacctcagttgggaatgcagaaatcacccaccttctgccttggtctcactgggaacagcagaccggagctcttcctatttggccatcatgcctcgccaacccaatatctgttattttttgtctttttgataatagccaatctgactaggttaaaatgatattgtggttttgatttgcatttccctgataattagtgatgtacagcattttttcatatacctgttggccatttgtatgtcttctcctgagaaatgtctattcatgtcctttatccactttttaatgggattatttgggttttcctgtttactgtttgagttccttggatattctagatgttagtccccagtcagatgaatagtttacaaatattttctcccattcaataggttaccaattcactatgttgattatttcttttgctgtgcagaaactttttagtttaattaagtctcattggccatttttgtttttgttgcctctgctttgattgcttagtcatatattctttgcctagatcc

SEQ ID NO: 282193 - DNA, 1000 bp, Homo Sapiens
  misc_feature (398)..(398): n is a, c, g, or t
  misc_feature (665)..(665): n is a, c, g, or t
agcctgggtgataggtgagactccatctcagaaaaaaaaaaaaaaaaaaaaaaaaatgcctcttcttcctgttattggtggttatgaaggttagatattttttttccatggggtcaaakgtacctaagtgtatgattgcctggcaaaatagggtagacaaatcaggtagtggcactttttccattttcatttgtgtgtgaatttttttataaatgtggacatgtaaagcattaatgcaagttaaaatgtttcagtgaacaggtttcagcagttcaactttataataattataaataaacctgttaaatttttctagacaatgccagcattagcatttttttaaaaacaagtaaatttcttattgacagcaactaaatggtgtttgtagcatttttatnacacagtagattcatccattcactatgtttttctaactgagttgtcctacatgcaagtacgtgtttgtttgtttctttttttttttttttttttttttggagatggagtcttgctctgtcgcccaggctggagtgcagtggcaagatcttggctcactgctacctccacctcctaggttcaagcgattctcctgcctcagcctccagagtagctgtgactaaggcatgtgccaccacacctggctaatttttgtattttattacagntgggtttccccgtgttggccaggatggctccatctcctaccaacgtgatcctgccacctcagcctcccaaagtgctgggattacaggagtgagccactgcacccaggcaagtacatgtttttaatgttgtctgtctgctgtgctgttcctgtaagtatgctattaaaatatattaaactattaaaaaaacaaactcattcaaaactacaaaactacacgtaaactgaacaacctactcctgaatgactactgaataaatataacaaaattaaggcagaaataaataacttctttgaaacccaatgagaacaaagacacaacataccagaatctct

SEQ ID NO: 282194 - DNA, 1000 bp, Homo Sapiens
accaataaacaaatccacacacctacactgcactcattttctacaaaaggggcaagaacatacactgggaaacgacagtctcttcaataaatgatgctgggaaaaacagatatccataagcagaaaaacaaaactagaccactgtctctaaccatatacaaaaatcaaataaaagtggagtaaattcttaaatataagacctcaaattgtgaaactactgcaagaatacactggagaaactctccagggcaatggcctgggcaaaaatttcttgagtagtaccccacaagaacaagcaaccaaagcaaaaatggacaaatgggatcatatcgagttaaaaagcttctgcacagcaaaggaaacaaacaacaatatgaagagacaacccacagaatgggagaaaatatttgcaaataacacatatgacaagtgtttaataaccagaatatataaggagctcaaacaactctatagggaaaaatctaataatctgatcagaaataagcaaacgatatgaataggcatttctcaaaagacatacaaatggtaaacaggcatataaaatggttctcaatatcactgattatcagataaatgcaaatcaaaactactatgaaataccatctcattccagttaaaagggcatatatccaaaagacaggcaactataaatgctgacaaggttgtggagaaaacagaaccctcctaaactgttggtgggaatgtaaattagtacaaccactatgaagaacggtttagaggttccacaaaaaaaactaaaaatagagggaccatatgatctagcaatcccactgctggctataaactcaaaggaaaccagcatgtcaaagaaatatatgcactcccatgttttttgcagcactgttcacaatagccaaaatgtggaagcaccataagtgtccatcaacagatgaatgcataaaaaaaggtagtaattgtacacagtggaatactattcagccataaaaagaatgagatc

SEQ ID NO: 282195 - DNA, 1000 bp, Homo Sapiens
ttccagtgatgagctactcctgggtcatgagaaggcccctgccttcagagactatgtggctgtggcacgaggaagcaaagatcacaacattcgtgcccaagaaccagagagtgggctttcagaagagactcaagtgaagtgcctgatggaccaggcaacagaccccaacatccttggcagaacctgggaaggatgggagccctggatgtgaggtctgtgggagtctgcagatagaaagcattacattgtttaaagaatctactatactttggttggcagcattccatgagctgattttcctgaaacactaaagagaaatgtcttttgtgctacagtttcgtagcatgagtttaaatcaagattatgatgagtaaatgtgtatgggttaaatcaaagataaggttatagtaacatcaaagattaggtgaggtttatagaaagatagatatccaggcttaccaaagtattaagtcaagaatataatatgtgatcagctttcaaagcatttacaagtgctgcaagttagtgaaacagctgtctccgtaaatggaggaaatgtggggaagccttggaatgcccttctggttctggcacattggaaagcacactcagaaggcttcatcaccaagattttgggagagtaaagctaagtatagttgatgtaacattgtagaagcagcataggaacaataagaacaataggtaaagctataattatggcttatatttagaaatgactgcatttgatattttaggatatttttctaggttttttcctttcattttattctcttctagttttgacattttatgatagatttgctctctagaaggaaacgtctttatttaggagggcaaaaattttggtcatagcattcacttttgctattccaatctacaactggaagatacataaaagtgctttgcattgaatttgggataacttcaaaaatcccatggttgttgttagggatagtactaagcatttcagttccaggag

SEQ ID NO: 282196 - DNA, 1000 bp, Homo Sapiens
ggccttacacatagcaggttcacaaagaaataggaacagtaggtaacagatgccaaatgatactgcacaagacctacccatcccctgtgaataagggctgccccatcgtccttccctggacagctccctcgacctcatccagccctgcctctctgctccccctgctgcatcagggcagtctccctgtgtccctgaaaaccttagcttagcaggtgtttctctactacagattcaaggtggatctcaccccctaccctaccatcagctccatcaacaagaggctgctggtcttggaggccttccaggtgtctcacccctgccggcagccagatacacccactgagctgagggcctagctcccaaatcctgccccgttggcacagggccacaggagcagaagctgggtgggctgaagaggcctggaaacgagagtcttaattgaggagatgggagactcgaactctagccctggatctgccttcctgctgaaacttgttccacctcagtcccctcatctgtcacacgcatgtggggtggagtagggagatgcggggagcagggtgggcaggaatactgttatctatgtgacggggcagtcgtgaggctgagatgagaatgcggattaaaatgcctggcgtgctcaccgtaacaccacggggaaggctgtgtgccttttctcatccgcttttgttgtgtgtgactccaaagaatgcccgcgctgaaatttggcgtgaattaaactgaagcccaggcctctaccttgtttgtctaagactgagctaggttccagaagatgaacactgtccctagctggaatcccctgtgcctggaccagtagaggaagtcagtcagccacttgcctaccctgtggcaggcctggcccatgggacctaagggcaatgatgagaaatatacccaaaagcctgcctgaaagaatcagacaagatccagggagataacagatagaagcaggaaagcatctagtgactggctgagttct

SEQ ID NO: 282197 - DNA, 1000 bp, Homo Sapiens; identical to SEQ ID NO: 114874

SEQ ID NO: 282198 - DNA, 1000 bp, Homo Sapiens
atgctaggactcacatgaccatttattctcaaattctacaacattgattgatagcagtattctattacattaaaatgagctctcttagagggtttgattagttcagatttatcatctcaactagacatcttttggatagtgagagtgggagggctagttaaggagaagaggggcagccacaaccaaacagccattgcaagcatttaagctgtgtgagctgaattggagaggggaatttgtacagcttggtatagctgaggatggcctctttagaaattactgtgagtcagtaatttacagaaaattattgactacacttttgctgtaattagaggtaaaaaggtatgtgtgagcactaagaaagaaccaaggcccagatactagagaatcagtttgagtttttctctgaaatgacctgtggtcacctgtatgctcagccctctccagggtggaacaggctggacagaagagagtgaaggatctttaagcctgctctctgcctgggtgatctgctgagcaatgagatgcatgtggcaggacaggatgtttgatttcaggagacgatacaggattaaatctaaggggcacatctcacactgaagagcaaaacacatcaataccaatctcctgagcattatgttcattgtggagattttttcatgaccagtgtttctcgaagtatgctcctacgctaggtaagtcttgaatttattaattactttgccagttagcaaaaataatgggtaacctctacactggaagccgagagaagatggcagatgatttagtttacaattatatatttaaagcttaacggattgcttttttcattttggtgtgcttggaacacagccctcctacccctatccctgccgcttgttttccatcctgagcaagtttgagagctgcagagggaggtatgggcactcttgcatcaggatgtgagttttctaacagctgctccctaaggccaaaagaagagcctcacactaacagctgg

SEQ ID NO: 282199 - DNA, 1000 bp, Homo Sapiens
atctgcttatttcaaagaacaagtgttgtgccccagaattgttaagaatggcccagagttctgcatttatgacaaagtttccagatagttcttgcgcatcctcaagtttgagaagcattgccatacagaagtaagcatggacttccaggtcaataggactgaatttgcatccttgatgctgggtttacatagtgccaaaaaattttttctgtatccactacaattccatgacccatcattgacgtcgttcctttgcatatattcaactcccttgctcttctctcctttggtagtgtttgctggccaaactcatccctggcaccatctgccttccttatgcctgcacctaaggaactgaacgtggctggaaaaaaaagagaaactcacaaccatgccaataggtcccattttaaattcataaacacaaactttacatgggcctccagctctgcccgacaatcctattatatttctctagtttgttcactcccttactctctaaagtggctatttcacttctcaacctttctcaagccaccttccttctcctcacccttagctgataacttggctccttatttcactgagaaaatggaaaagatcaaaagatcatttttttttaatctttccactcccgaatccatcattctaccagcatcggcaaccacagaatctgccttctgtcaggttacaatggatgaacatctaaggacaaacccctctctttatgtgctaggtcccattttctctctcctacttaaggattttactcctctaattaatgcttatccatgtttattttttcctttctattggaacacttcaatcagcatacagatatacagtaatatcacccattaaaaaaagaagccctgttacttcacatctttcttccagctactgctccaactctttagtccctgtttttacaaaagtcctggagttatttcctctgccatctgcactaggtactacccatcacttctccacaatctgcatt

SEQ ID NO: 282200 - DNA, 1000 bp, Homo Sapiens; identical to SEQ ID NO: 114875

SEQ ID NO: 282201 - DNA, 295 bp, Homo Sapiens
attcggccattacggccgggtggggtggcacatgcctgtaatcccagcactttgggaggccaaggctggtggatcacctgaggtcaggagttcgagaccagcctggccaacacggtgaaaccccgcctttactaaaaatacaaaaaatagccgggtgtggtggtgggcacctgtgatcccagcttcctgggaggctgaggcaagagaatcgcttgaatctgggaggcggaggttgcagtgagccaggatcacaccattgctgtccagcctgggtgacagagcaagactgcgtttt

SEQ ID NO: 282202 - DNA, 1000 bp, Homo Sapiens; identical to SEQ ID NO: 206271

SEQ ID NO: 282203 - DNA, 1000 bp, Homo Sapiens
acccagtcatcctgtgggaagagcccaggagccagatgacctcggctgcagcctggcactgccacccacttctttaaggcctcagacgagtcgcttcacccctctgagcagccctctcctcatcacagaaatgaggacaagcagtatttttgctgcttcttaccatggtgaggtcctaacgttaccaggggccccatgagtacattagaccccaccgtcctacaccacttccagccccctccccatatttgagaaggaagaggagagggagggagtccaccagtcagacgcagggttcaagctccaggcaagactactagggaaatacactccttcccctccctcagtgctggccctgtcctctgggcccagccatctgctctcccttctccaggagccatgtgcaacatgaatgagaaggagtccactgtcttgagggcctctgaacccctgtgccaggctgctgggatgcaggatgcagaggcccctcttgttggggaagggcctgcctcctcaccaggtctctgtactttctctcctaccacacagcattttgtcccctccacttcctagcccctggcacaggcctgacacagagtgaacacatagcaaacgtttgctagagcaatgaacaaacatgagggcttggtgaccacagttccctgcagggtggcaggggtggaaggtgagggaggagggtctgcaccgcatgccccggcccccaggcttccaagagatggctgccctccacgtacggatctcaaaggaaaactccccaacatcctcaccctcggttcagaaacacagggccctgagcacagaccacactggttcaagctcagagcccagagtaagcctctgcaaaagcgccagttcctcctcagacacagacagagtggaggtccccatcagcggtgcctttattatcataaacattgggagcaaataaatggtacagaaagggcaacaggcccagttcctcttcaggagaacttcagtg

SEQ ID NO: 282204 - DNA, 1000 bp, Homo Sapiens
gagatcaacacaatcttcaatgattatatcccatatgtttttaaattgttgaaagaaaacctatgccttaatcttcataagttcaatgaatttattcaaaacgagcttcaggaagcttctcaagagttacagcagatccatcaatacattatggcccttcgtgaagaatattttgatccaagtatagttggctggacagtgaaatattatgaacttgaagaaaagatagtcagtctgatcaagaacctgttagttgctcttaaggacttccattctgaatatattgtcagtgcctctaactttacttcccaactctcaagtcaagttgagcaatttctgcacagaaatattcaggaatatcttagcatccttaccgatccagatggaaaagggaaagagaagattgcagagctttctgccactgctcaggaaataattaaaagccaggccattgcgacgaagaaaataatttctgattaccaccagcagtttagatataaactgcaagatttttcagaccaactctctgattactatgaaaaatttattgctgaatccaaaagattgattgacctgtccattcaaaactaccacacatttctgatatacatcacggagttactgaaaaagctgcaatcaaccacagtcatgaacccctacatgaagcttgctccaggagaacttactatcatcctctaattttttaaaagaaatcttcatttattcttcttttccaattgaactttcacatagcacagaaaaaattcaaactgcctatattgataaaaccatacagtgagccagccttgcagtaggcagtagactataagcagaagcacatatgaactggacctgcaccaaagctggcaccagggctcggaaggtctctgaactcagaaggatggcattttttgcaagttaaagaaaatcaggatctgagttattttgctaaacttgggggaggaggaacaaataaatggagtctttattgtgtatcata

SEQ ID NO: 282205 - DNA, 1000 bp, Homo Sapiens
gagtcaaggttctgagtcaaagctgtgctattggtgagaaagtttcagaactgtcaggcagaactcttccaggagccgtgtcagtattctcaggagtcccagaagttctgccagttggcagtgccagagggagattactctttctatacagtgtccctgtgtgtcaccaacagtattgggagcaagttcagcaaaacccaaatattagagggttatggaatcctgcagtccgacccacctgtcaacatcacagtcattgctgtggccagaaagcctgctggctcaacgtcacctagcaagacccccactcctggaacttatatttctacagactatggtttgagctttgatacctggctaaatagtcaaaaatgttcataacatggatggccaaggatctccaacatcagtgtgtcattcacaacacctggaaaggcatgaggcaccagacacagcttcaggcccaggaggagctggggcaaggcttgtgaagtaagtggagcccagaggtcatgggaacctttgggcagactccaggagtcctccagctgagaccacctccatgcaaacacctactactaataaagatgatgataatattctccccagagattctgcaaatgcaacaagctttctgggttaaagaagacgtggaagttgcagggtctgaaagaagataagatcaggatgcactggttgtgttctttggggtggctggtcctagagagacctagaaccaccccagtgcttgttcctctcatctcccttcagtgtcccccagcagccttggaatggacaccacccccagccacggctgaccagatgccagggacccgtggaggccttatgacatcagcaatagagattacttcttccccatatagcaggccaggtggcacctggcaggttgggtgcgtaaaccaaaaaagtatctgagacagctcccaatcagtttaaaagtgtattttgccaatgttaagaacatgcctggaagaaacaa

SEQ ID NO: 282206 - DNA, 1000 bp, Homo Sapiens
taataggtccacttcttactttgaaaggtttgggttggtgagaatgaaaatcctttgttggcagccttaaaaaggaacgagatcatgtcctttgcacatggatgaagctggaagccattatcctcagcaaactaatgcaggaacagaaaaccaaacaccacatgttctcacttaacaagtgggagctgaacaacgagaacacatggacacagggaggggaacaacacacactggagcaggtcggggggtgaggtagggggcggagagcagtaggaaaaatagcagtaggaaaaatagtaggaaaaataggaaaaattgcatgctgggcttaatatctaggtgatgggatgatctgtgcagcaaaccagcatggcacatgtttacctatgtaacaaacctgcccagcctacacatgtaccccagaacttaaaataaaaatgaaaaaaagaaaatccttcaaagaatataaaattgtctataagaacatggcatatgggaacaacacacactggggcctgttgaggggtggggttaaggggaggcagagtattaggaaggatggttaatgcatgctgggcttaatacctaggtgatgggttgataggtgcagtaaaccattatggcccatgtttacctatgtaacaaagctgtacatcctgcacatgtaccccagaactaaaaacaaaaacaaaaaatcaaaaaaaagtttggaaaaaaccacaggctattgaataaaacaaatatgaataccaaaaaaagggaacataacatatgtttaagtgtaataataagcaaatgctaaggatccattcatccaccaagaatttgctgtgcatgtaccatgtgccaggcactgtgttaggtcctgggaatccagggatgactactttgagggatatagaaagacagtgctagatgtgtatgtcagtagagagagattagaattcaactactctaagacctttatattgtcttggatgagggtacagaaattgattca

SEQ ID NO: 282207 - DNA, 1000 bp, Homo Sapiens
cactgttttgcaggcacagaggacacactcaagactgcacccacagggcagtggtcagagcccatcacctcaggcagcaggaaagaggcctgaaaggtgtctatgaccagggtcctgtcccccagcacatagtcaagccgggagccatagttgagatggcgggcgccagtgactgctgaccagcaggtgaaggccccctcctgctttggttggaagcagcggtagctatcgatgaagggccctacatgagaggcagactggcaccccaagttactgagcaagctgtccatccacttgcgccctgggtcctcttcaaagcattcctaggtgaggaggaaagggggttggaagagagagagacagaactagatacctagaactggaagggacttagactaactgctgcattttgcaaataagaaaatttggttgtcccaagaggactactgctcaaggtcacacagtccggaattggcagagctgggattctgattttcatccttactgatttaaaagaccatgcttgtttttccctctgcacgagcttgcatttgtcttgcattggtccgtcaatggcaaatctgaaagtttgcttactcaaagcaattcctggaactgcttttcaaaaggatggaaaacaggaagttaaaagtgtttgcctctaggaagcagggctggggttaagagttaggaagactgtcagcttcttcctttaaaccctctggcactatttggtttatctagtgtgtcaaagccctcaatgaccattcctacctcctgagctgaggacctgcaaggatccaggtctgaatacttccttaggctctgatccccaatccatcatccatcagtccatccattcaatccacctacccacccactcattcaatgcaagaaatgttcatggaatacctattatgtgccatgcatgatgccagggacaaagtaggaacctgatctactcctggggaccaaggaggcttcctttcgagaagtgatc

SEQ ID NO: 282208 - DNA, 1000 bp, Homo Sapiens; identical to SEQ ID NO: 206215

SEQ ID NO: 282209 - DNA, 1000 bp, Homo Sapiens; identical to SEQ ID NO: 206273

SEQ ID NO: 282210 - DNA, 1000 bp, Homo Sapiens
cagagaaagatgccactgaaatgctgaaattatctttgctgagcagcttttgaatgctaagggttccagtatgtgacccaaagaaagagttgtctcaactccttggtacagggttcattcaaacccccaagctgtgagagtgtgtttatttttaattttttaaaaggtatttaatttccaaccacacttcttatttttttgaaaagacaattttccatttcagtattacattttaccaagaagtcactgctttttaggtgtgttgcatcaatatttaaataaaatcccagaaatgtattttaaagaatttcaggtttgaaaactcaaaccaacaggaagatatcacacctttgtatgtgcttctttgttcttgaagtagtcattatggttcattggaatctactgtagcataagctcctaggttgctccatttcttaggaaaatagcaatgaatgaatgtatagtagctgcatgtgtgaactactgctgtaaagtttgctgacatttctgcaacaacatttctccatctgatttaccagaacctgtaacaagaccagaacatgtattcatccagaaactcctgggctctgctttgttcaaagaggagcaaatccacatagaaattaaatgttataaatttatttttttaaactaatttccaaagaatttagctgaagactcagagtcagcctacctcttgactctccacatccgcatctaagatcctgaaggccaaaggaatgcgcctgtgggatgccaaagccatcagtagctggaagaaagaatacctctttctagaggtttggtgtcctcttgctggcctgtcattatttggaaatacgcgcttttggaatttccttcattttcgctatttccaggttcagaaatcatacctaccacttgttctttctttgcccagtaaaactcagggtttctcttattcagagttaccatgttgcacacccccagtgctcagcctgcccagaagcccttctctgat

SEQ ID NO: 282211 - DNA, 1000 bp, Homo Sapiens
taaccctaatgtagctgagcagtgcaacatagttaacattataattgcagtaattgtggatataaagttaatattcagatcagcaaaatttgtgggaaacaaacttgatattggattgtagccttgagtcttaatatgtttagattaacaactctattccatattgttcaacaggaaacaaagcttagcaggagaggagagccagagaagtgacagggaagctacaggttacaacagatttgtgaactcagccaagcacagtggtggcagggcctagctgctacaaagaagacatgttttagacaaatactcatgtgtatgggcaaaaaactcgaggactgtatttgtgactaattgtataacaggttattttagtttctgttctgtggaaagtgtaaagcattccaacaaagggttttaatgtagatttttttttttgcaccccatgctgttgattgctaaatgtaacagtctgatcgtgacgctgaataaatgtcttttttttaatgtgctgtgtaaagttagtctactcttaagccatcttggtaaatttccccaacagtgtgaagttagaattccttcagggtgatgccaggttctatttggaatttatatacaacctgcttgggtggagaagccattgtcttcggaaaccttggtgtagttgaactgatagttactgttgtgacctgaagttcaccattaaaagggattacccaagcaaaatcatggaatggttataaaagtgattgttggcacatcctatgcaatatatctaaattgaataatggtaccagataaaattatagatgggaatgaagcttgtgtatccattatcatgtgtaatcaataaacgatttaattctcttgaatgaaatgacaactgtatggatttgggactggcagagatttggactttccctacccactccccctgataataatgttgaatgcttctatcacaattcaagttcaaagctctgctagggaatagaaacta

SEQ ID NO: 282212 - DNA, 1000 bp, Homo Sapiens
cctcccacagtgttacacacccgaacataaaaccccagggaagcagatgtgtgaggctgggctgccccagctgctcctcctgatgcctccatcagctgagattgttccccagactgcagccacactctgatggtgttggtagaaggggacatgaagtcacctctgcaccctaattcttttctctttcctcagccccaactacacagacatagcaatgcctctcctaatttaatacagacagagatcatgacacctgaggagtctagtttatggcttcagttggactttatataacagagaagaagccactatagatattctaggcaggaattgtctttaatacagagaattaaagtaaactactgagcgtctaaataaaatgtagagatgaatctctaaatgtaatgttttatttacacagaaatatttcccaaatggggcatacaggaaaactcagtggtcttcaatatgtggcaagaacaaagaaaaagttagtgtttcatgaaaaagggaaaatattacctatggctctttgagaaagttcattggcactaggaagggttgggagctgggcaagctcaaactgggaagcagtggtggacaaagtgaatcctagaattatatcaagttatctcagaagttgtggacaaatttgatttcaggttacaagaagccaaagcagtgaaggttgcagagtgttttgttactgaaataccagggattcagcgtagatcctgcagctcaccacacagaaagccaatcactaaggcaagtattgccaaggaaaaggctttaatcaggtgctgtagctgaggagatgggacaccattctcaaatgtatctccctgaccaacaaaaattaggggtttatatagcagggaagaaatgtgggaaaacaggaattatggagggttaagggagataatttggttaaaaagaagcaggaggtcagttatgcagtcataatgagtgaagggtctgatgtcccactgtcctgatt

SEQ ID NO: 282213 - DNA, 1000 bp, Homo Sapiens
  misc_feature (16)..(16): n is a, c, g, or t
  misc_feature (895)..(895): n is a, c, g, or t
gttttcaaatgtaaanaacattaattgggaattgtaattggaaataattagggaagacttaatggaccttcaatatggggggttccatatgtaggggttcatcccttcgcagttggaaaatatttcggggggaaaaaggaaaaaggatggttgtcactgtactgaacatgtacagacttttttttcttgtcattattccataaacaatattatttaataactatttacatagcatttacattgtattaggcattataagtaatctagagatgatttaaagcatacagaagcatgtgtatagattttatgcaaatactacaccattttacataagggaattgagcattagtggactttgatgtccacaggggtcctgaaaccaattccctgaggataccaagagatgactttatgtatttatgatgtgtgattttgtgttttaaaaaaggattgggaagttcagccatgaatatacaaatgcttttggaaaaactcaaaggaattccccagttagaaggccagaaggacatgataacgtggatacttcaggtaaactaaaaaagtaaagtgatcatatcttggtttaaatatttaagaattctctgcttgcctccagtgttaaaccactgtaccattgtagacatttactactggttttcataatcacttatttttcatgttaataattctatttccctatattttattgtagttttaaaaataaactaagatttattcattttttttgtcgttatttagtcaactttactgaaaacctaccatgtgccatgctcacttatagatttctagatggaacaaggcagacaaggtgcttactatcatggaaacatatactccagttgagggacagacattaaacaaataaataaacaanaatatcagggtaattcaatagatgagtaaggggttactttgggtaattagggaaggcctctctcaaaacacgacattagagcctaagacctcaatgacatggagt

SEQ ID NO: 282214 - DNA, 1000 bp, Homo Sapiens; identical to SEQ ID NO: 114876

SEQ ID NO: 282215 - DNA, 1000 bp, Homo Sapiens
attcactgctttttgtcagtgaaatagacatcttgcctcctgaagtagcttcatcacagagtgtcatgaagacagacagtcaggctgaaatggacagttctttgtggactctacccttcccttcaaggagtatgtcatatatcacaaaagaaattgccttacactggttcacgtttgcagttactgttgtacattgcatagatgtacacacgaatttaaatgtgatgtctttgtatatatctgtataatgttgagattacttacgaaatatgtctgagtgacacttttcacccttgtacagccaaaataatgtatatatggaaagtgacagacaaattctctaatctctttggtatctataacttattagaatcctctggatgagggttagaagagactttttccaaacttctacatgtagaagtatcataaatgtgctacacatttatgtttgtggatttaattaaagtattttaatatggttttcagtgctaaaattggagtcagatacttcttggttttaagctgtctacctaattgctgtctcccagcagactggtggcatgcccagtggctttgggggcaaggatagaaatgccatcaggaaatagctgaattcattgtgaaacatgaattcagtcatggtgataattggaaactcctttcaggtttttgcaagtagattttgtaatgtttgtgtatgcagccttgctgttgagtcagtccaaggggttttacttaggacaagttgtaccttgccctctctccagctctgctcccacattttcacatacctagctgtttctacctcattgggtaagtcatttaccactctgtgcctcagtttactctgtagtttaccattagactgtgagctccttgagggactttgtcataatcactgttacatcccagtgcctcacaccatgcctggcccttaagaagtgctcaataaatgtctgaacaaataagtgagtggagtgagtgaattgtaagatca

SEQ ID NO: 282216 - DNA, 1000 bp, Homo Sapiens
ctctggtccaatgttatttactgagaagacattctattccaccttaatccgcatggcagcctctgtcaactataaaaggactgtgtgtacacagatgtattttacacactcttttctgctcagtggctctctgtgtccactctcatgaggatgctgcactttatgtggccttatagaaccccttaaaatttggcagcctgaatcctctaatttctccttcctctttaagattgccattattattattattggctatttgcttttccatgtaaatttgtaatcatttttctcatttccaccaaaaacaatgcttgtaattttgttgtgactcccttacatctacaggtaagttctgtcctatagaaacataatgcaaaccacatgcattctttcaaacttgctagtatccaaattaaaaagctaacaagaaacagataaaattaatttaagttaacccaatggacccaaaatattattaacccaacagacccaaaatattaacctaatagatccaaaatattattttattatacaagtagactcaaaatattatcatttcaacatgtaatcatgtgtcatcttggaaaacatcagatccctgtctaggtgggcaaagatttttcttcgtaatatctcatttccacatttccacttggcacagaaactgcccccaaggctcaggatactaagatgcagtaggaatgggtagatgtatctggaggaaagtgactgaatgaaattgagacatcagagtctggggaactcactagaactacagggacagtgtgggggagggaattgggagatgttgatcaaaggatacaaactatcaggtattcaggaggaatgggtctgaagatctcttgtacagctttgccactatggttgacaatactgtactctatacttgaaatttaccaggaaagtagatttttttttttaaatatggaacacttcacgaatttgcgtgtcattcttgcgcaggggccatgctagtttt

SEQ ID NO: 282217 - DNA, 1000 bp, Homo Sapiens
cgcctgaacgcgggaggtggaggttgcagtgagctgagattgcgccagtgcactccagcctgggtgacagagcgagactccatctaagaaaaaaaaaaatgaaattgaaaactctgttccttagctgcaccagtctgctgtcaagtgttcagtggcacacgtcgcgaggggctgccatcacggacggtgcagatgtcccatatatccagcattctaggacattctgtcagatggcaccgggctctgtcctgtctgctgaggaggtggcttctcatccaggtcctgagcaggtctgagctgccgcccgctgaccactgctgtcgtcctgcaggtggctgggagcccgagccccacacctgccgggcagcaggtgctggacatcgacagctgcctggactcgtccgtgctggacagctccttcctcacgttctcaggcctccacgctgaggtgagggctctactgggggtcctgggctgggctgggggtcctgccgccttggcgcagcttggactccagacactgtgcacctctcagcaggcctttgctggacaggtgaagagtgacttgtttctggatgattctaagaggtgggttcccctagagaaacctcgagccctggtgcaggtcactgtgtctggagtaccgggggtgtgcgggctgcgtgtccttgctgggtgtctgtggctccatgtggtcacaccacgtgggagcaggtttgctcggaagcccagggtgtccgtgcgtgactggacgggggtgggctgtgtgtgtgacacatcccctggtaccttgctgacccgcgccacctgcagtctggtgtgctggccctccagcgagggaacgcccagttggccggacctgctcagtgacccgtccattgtgggtagcaatctgcggcacaacccccacttactgggtctctccttttacaaccaacacaaccgaaatctagggcttcttttttttttttttttttttttttttttgagacagagtctc

SEQ ID NO: 282218 - DNA, 227 bp, Homo Sapiens
gtaaggcaattaataacttacacttgtctttatgttccagcctgaaagaatagacccaagcgcatcacgacaaggatatgatgtccgctctgatgtctggagtttggggatcacattggtatgtttatgctgattcaaccttgccacagtagcgtaacaataagaaatttagaagtgaaagaaaacttaatcagacttccccgttcgttaagaactataatcacaga

SEQ ID NO: 282219 - DNA, 1000 bp, Homo Sapiens
atttggaagcagttgtgattgggcgtggcccagagaccaagatcactgataagaaatgttctcgacagcaagtacagttgaaagcagagtgtaacaagggatatgtcaaggtaaagcagagtttgaggaagaggcaaagaaccctggcctggaaacacacaggaagagaaagagatcaggcaacagtgattctatagaaagggatgctgctcaggaagctgaggctgggacagggctggaacctgggagcaactctggccaatgctctgtgcccctaaagaagggaaaagatgcacctatcaaaaaggaatccctgggccactggagtcaaggcttgaagatttctatgcaggaccccaaaatgcaggtttacaaagatgagcaggtggtggtgataaaggataaatacccaaaggcccgttaccattggctggtcttaccgtggacctccatttccagtctgaaggctgtggccagggaacaccttgaactccttaagcatatgcacactgtgggggaaaaggtgattgtagattttgctgggtccagcaaactccgcttccgattgggctaccacgccattccgagtatgagccatgtacatcttcatgtgatcagccaggattttgattctccttgccttaaaaacaaaaaacattggaattctttcaatacagaatacttcctagaatcacaagctgtgatcgagatggtacaagaggctggtagagtaactgtccgagatgggatgcctgagctcttgaagctgccccttcgttgtcatgagtgccagcagctgctgccttccattcctcagctgaaagaacatctcaggaagcactggacacagtgattctgcagagcctgagctgctgctgtggtgtggcccactggagcaaactgctggcacctattctgggttgcttgtgaacttctactcatttcctaaattaaaacatgcagctttttcacaaaaaaaaaaaaaaaaaaaaaaaaaaaa

SEQ ID NO: 282220 - DNA, 1000 bp, Homo Sapiens
agcacatcaaaaatcttatccaccacgatgaagtcagcttcatacatggggtgcaagtcttgttcaacatactcaaatcaataaacaaaatccatcacataaacagaaccagtgacaaaaactacatgattatctcaatagatgcagaaaaggcctttgacaaaattcaacagcccttcatgctgaaaactctcaataaactaggtattgatggaatgtatctcaaaataatgagagctatttatgacaaaccgacagccaatatcatactgaattggcaaaagctgaaagtattccctttgaaaactgacacaagacagggatgccctctctcaccactcctattcaacatggtgttggaagttctggccagggcaatcaggcaagagaaagcaataaagggtattcaattaggaaaagaggaagtcaaattgtccctgtttgcagatgacatgattgtatacttagaaaaccccatcatctcagcccaaaatctccgtaagctgatgtgacttcagcaaagtctcaggatacaaaatcaatgtgcaaaagtcacaagcattcccatacaccaataacagacaaacagagagccaaatcatgagcgaactcccattcacaattgcttcaaagagaataaaaaacctaggaatcaaacttacaagggatgtgagggaccctttcaaggagaactacaaaccattgctcaatgaaataaaagaggatacaaacaaatggaagaacattccatgatcacggataggaagaatcaatatcgtgaaaatggccatacttcccaaggtaatttatagattcaacgccattcccaacaagctaccaatgaccttcttcacagaattggatgctacctgacttcaaagtacaccacaaggctacagtaaccaaaacagcatgatactggtaccaaaacagatatatagaccaatggaacagaatggagccctcagaaataacaccacacatctataaccatctgatc

SEQ ID NO: 282221 - DNA, 1000 bp, Homo Sapiens; identical to SEQ ID NO: 195190

SEQ ID NO: 282222 - DNA, 1000 bp, Homo Sapiens
gtattctttctagtataatgatccacgtggttaatttcatttgtacttctccttctcccaaatttatcattacctagtatacttttagatatctggtattatgctaccatttgtacacctctgattggccacctcctcttctcatgccaatggaagatgattgagctttgattcacgggatgtaaatccactttattggtcacctgttcaatccatgctccttgctgatgataaaccacttcaggacatgtataactgcagtttgaggcatgtggttatatagactttgtgtttatccaaatttttatttgtctgtaatcttaaatagtggcagcccaccagactttctttttgctttctgttttggttgttataagcctggagtaactggcaaatctgaacaacatgaattcatttataacaaaccaagttttaaattacatagttgagtttgtaagatgaaaaccaaaagtgattagtgaaaaatagtaatatttggtctatccatatattctaaactagtaaactaaggggaccttatgctttagtttacattgcctcaaacttaaaagtaaaacaatttaaaataattatgccccaagttattacatgtattcaatttgttgatataagtcaatagagaaatttgagtctgtagaatttccttagaattacctttctgaatgaagtctatattaaatgaagtttgcctttacttgactgggtcttgtaattaatcttatgttcaatttgcttaaccagatccattgaattctttctgcttagcacttcagttagaagtgccacattcccaaactttaatgttagtttaggagagttgggagagcttatgcaaatagagtggtatcatgttgaaaaatgtcttttcctttcagtttgaaagtaagcaaaactggatcttgtggattggtgatctgatgtaaatattccctttttgcttattttttgtcttcatatatttaacatgtccacagcatat

SEQ ID NO: 282223 - DNA, 632 bp, Homo Sapiens
aggagtgctttaagagccctttagactgctgagccagagcactgtcaagagggtctatgccatgcaaggcaccagaaacaaggtgtctcagagccactacctgctcaagaccaagaacttggagatcaaagcatgctagggcatgaaggaagtaatggagatatagctgcaggagccaaaggacaagttgaacacctacatcagtagtgtgcaggccatcatccacaaattagaaaatgaattgaagatggcaaagttaaacatctggatacctaaatgaataccaagtcctccaggtgaagatggctctttgtattgaggctgcagctcagaggaaacccttcaaaggcaaggagacccagctgagtttcagcagcatgggaagcacactgcttccagaccccctggtctttggtttatcacctactggggttcacataccaactcctacatgatgtccacccactccttcctgtcctactacagtagccatgtgcaagaggagtagatcatggtggaggaatccattgagagtgctaagattgaggaaggcaaagactagtacccctctgaagaaaaagcctaggaggagaaagataataaagaggaggaggaagaggtggcagggaaga

SEQ ID NO: 282224 - DNA, 1000 bp, Homo Sapiens
tgaaaaccatagtcaggacattgacttccttcaagactgcctactgattcgtccagaagacagagatctactggggtagtccaggactgactgtaaagaggctcaggtaaggcagaggttattggcagtcaaaggggctgcggaaagctgaaaatgaaaaggagaggaagcagagggatgataagacccaaaacctctgatgggatcagggtctgtaggaagagagaaatgaagctggggagaatccagctcagggtaggtgccagtagaaggcctggtcgtacggcctccaacaggttgcagtggagcagactgtgtggagctcaatgagctccctgaaagagcaatgccacagtagggtgcagaagaggggttctggggaggtcctgtgggacaagacgccaactgtgggatacagtcagcacaactgccaggcacagggccttggctgaattgagatgcatcaaactgtctgggaggagcagcaaaaccaaaactagctatctgacaatatgaggcaaaaggcaaggaagcaggactgtgagagcgggcagccgggggaagagaggaaccaaaggctggagcagaaacacaaaaaaagttagaagtagatgtttccggtcaggcgcggtggctgacgcctgtaatcccagcactttgggaggccgaggcgggcggatcacgaggtcaggagatcgagaccatcctggctaacacggtgaaaccccatctctacaaaaaatacaaaaaattagccgggcgtggtggcgggtgcctgcagtcccagctactcaggaggctgaggcaggagaatggcatgaacccgggaggcggagcttgcagtgagccgagatcgcaccactgtactgaagcatgggtgacagagtgagactccgtctcaaaaaaaaaaaaaaaaaaaaaaaaaaaaaaagaagtagatgtttccagtggactttcttaactttcttatatagtggttcagttgctgttggtttacatg

SEQ ID NO: 282225 - DNA, 1000 bp, Homo Sapiens
caggagaatcgtttaaacctgggaggcggatgttgcagtgagccgagatcacgccactgctctccagcctgggccacactagcccaggagatagtatgagactctgtctcaaaaaaaaaaaaaaaaaaaaaaagggaagaagaaatgcaattgaagtagatttccttatttatttggcattataggaaacaaaccagtgctatgtatatttaaatggtcatgtaagtgaagctgaaatgtaaatcttgattcaagaaaatatattaagattgtgtaatgggtgtaggacaattggtagggggtgaaaatgggtttggttaatgtgaggtctctgagcccaagctaagccatcatatcccctgtgacctgcatgtacacatccagatggctggttcctgccttaactgatgacattccaccacaaaagaagtgaaaatggcctgttcctgccttaactgatgatattaccttctgaaattccttctctgggctcatcctggctcaaaagcttcccagctgagcaccgtgtgacccccacccctgccagccagagaacaacccctgcttttcctttacctacccaaatcttataaaatggccccacccctatctccttccactgactctcttttccgactcagcccgcctgtacccaggtgaaataaacagccttgttgctcacacaaagactgtttggtggtctcttcacacagacatgagtgaaagttaaatggatcttttatggccctatgatctacactttccttggaagcttttgaaaagtgtaaaaaaaaattttttttttttttttgcatttccccatttaaaacagcaagaaatcccaatcccttctaatggcttgtattgaacttttatatttgaattaaagattgttaaacaccaaaaaagcagatgttttttgttaaagacagtaagaaaaagttaaagacagtaagaaaagacaaagaaagtcattatttaatgataaagggatcaactt

SEQ ID NO: 282226 - DNA, 1000 bp, Homo Sapiens
ggccttggcaccgagcgtgcccgcgggaggcgggggggggcgctgctcggtggctctgctgcgtagccggtgaacacttggcaccgatgcccgccttctgggcaaggtgccctgagcccagcccctcgccgggctgcagcccaccctcggcgcgctcagcccgcttcaccgcttcagggacggaatagaactcgcagatgcagggtgtcgctgacattttcaactttttctgcggtttccgcccgctgtctctgacccgaaagtgcccccggacggttacagaggacacttaagtggtttgcaaagcctgtggtaggggaggagggtgtagaagggccaaaccacggaacttagttttattcatttatataaagcagcactccgattctttttgcgcggcctgaaatgcatgtgaccagagaagtaattaacaaaacaatgtcaacttctaaaaccgagacattacttagatgataaggcgcagcaactcggtgaatctgtacaaaccttggaaaaaaaacacattagtctatgggaccttccagttttctcatgctcctttccagctactaacctctcctaaagggaacaaccactttttggatttgattcccaggcctcgctttcaccgggaaattatcgttgcttgtaaaacagaagaagccgggaaggcaggcagggggagctgctactttacactctgtgctttgggatagcaaaatcccgcatttaagcaatccgaggaaacgagcaaatagacctccctcgcctctccgagcacactcaacagttccggttgcaaaatgtttgcctcctgggcttcccagcgtcccgttagttgttctatttacacataattagatacttaatggagagagaaactagaagttgaggcgttcctccaggctgtattgtaaagtatgaagtgaaatccaaaatgaaatggtaatgttagaaagcaacctcattaaaaaaaaaaaaagtaacactggtcttgaag

SEQ ID NO: 282227 - DNA, 1000 bp, Homo Sapiens
aatgtttaaaaggtattaaaaattaagtgaacacccatgtacccagcacccagcttaagacataaaatattaacaacagaatatatatctttccttgattatatcacatatcctcccacccatgctctggaggtaatcacttttttgaatggggcttcaggatagctattctctattccctcagctttattgaggtataattaattagcagaattgtatacaaatgctcctcaacttacacatggtgtgaagtcctgataaactcatcataagttgaaagtactgtaagtcaaaatgtagttaatacacctagcctaccaagcatcgtagcttagcctaacatgctgtatgcatactcagaacatgtacattagcctgcagttgggcacaatcacctggcaacatggtccactgtagagtatctggtgtttacccttgtgattgcacatggctgactgggagctgcacccgctaccgctgcccagcatcttactgtgtatcactagcccagaaaagataaaaattcagagtatggtttctactgaatgtgtgtcatttttgcagatcagatgcccctccctgtgcattcccatagcgcctcgaagtcatctctatcaatcattcatttagtcgtaaggaagtcttgtttgtatatgtgtatccctgacatgactgagacctcataagttctctaagtgccatatgaataaagaaatgaattggtgttcatcttaagtcatagtctctgcagatattgcttgatctaagggagtggcaccctttgttttgattttcctttgatctttggaagaccatgcatttctatttcagtgatgcttttaaaaagccatttttgtcattaatccagatttgttctcatttgattctagttgttgaaatggatgaaaacaacggacttttgcttttagaactgaatcctcctaacccttgggacttacagcccagatctcctgaagagttggcttttggagaagtacag

SEQ ID NO: 282228 - DNA, 1000 bp, Homo Sapiens
ggtgccagctctgctttgtacctctggtagaatttggctgtgaattcatctgcttctggactttttttggctggtagtctattaattactgcctcaatttcagaacttgttatcggtgtattcagggatttcacttcttcaaggtttagacttgggagggtgtatgtgtccagaaatttatccatttcttgtatatttgctagtttatttgcatagaggtgtttatagtattctctgatggtaggttgtatttctgtgagatcagtggtgctgtcctctttatcatttttattgcatttatttgattcttctctcttttcatttttattagtctggctagcggtctattttgttgatcttttcaaaaaatcagctcttgggttcattgatggttagaaaggtttttcgtgtctctatttccttcagttctgctctgatcttagttatttcttgtcttctgctagcttttgaatttgtttgctcttgcttctctagttcttttaattttgatgttagattgtcgattttagatctttcctgctttcccttgtgggcatttagtgctataaatttccctctccacactgctttaaatgtgtcccagagattctgctatgttgtgtctttgttctcatttggttcaaagaatatctttatttctgccttaattttattatttacccagtagtcattcaggagcaggttgttcagtttccatgtagttgtgtgattttgagtgagtttcttaatcctgagttctaatatgatagcactgtggactgagagatgtttgttatgatttccattcttttgcatatgctgaggagtgttttacttccaattatgtggtcagttttagaataagggcgatgaggtgctgagaagaatgtatattctgttgatttggggtggagagttctgtagatgtctattagggccgcttggtccagagctgagttcaattcctgaatatctttgttaattttctgtctctttgatc

SEQ ID NO: 282229 - DNA, 1000 bp, Homo Sapiens
ccgatggtgagggctggctaacttcaatttgtctgcttggttgtttagtgccacttcaggtttggatgttttctggaggtgtcaacataggattcatgctcaatccagatggaccatttctatctcatgatggatgctttggggtctgtccgatctatgactttctgagttacagaagccaattcatatgggcatttgaaatcacatggttgtttgctgtcccatggcaaggattctatcttatcaaggccagtaacataccaaaagttgcttctaacaggggcatatgtctctgctgtggatgacatggccttactccagaatcccaggccgtccatgtgactcccccactggtgcttgtttcagctccatcctgcatctttccccaggactgacacctctaggtgggtctgagggatggcgctgcctcatggcctgaatctgccagtgtcctttcctcagcaggcctaattgaagcaagtcccctcctatttctcctagagtgtaggtcaaaacaatagatgtgggatgtggtattgtcagaactcaaagaggctcaccaggcagtgtgcttccttccttgtagtgaggatgcaagatgcaacactttgtcttttactgtggaggagaaactcctggatgtcctcaaccactggatgaataaaacttcaccacagtggccactcctgaatctctgtatggtttatcttccatcttctggagagcacgtgttttgccaaggccttcagcatactttccacctcctactcatccatcctagtcaacatgatgttgttgatgaaataagctggtttaccattctataggatgccaggttcttcagatctcttttttttttttttttttttttttttttttttttgagacggagtctcgctctgtcgtccaggctggagtgcagtggcgggatctcggctcactgcaagctccgcctcccgggttcacgccattctcctgcctcagcctcccaagttcttca

SEQ ID NO: 282230 - DNA, 1000 bp, Homo Sapiens
gaccctgtctcaatcaatcaataaaatcattatgattataattaattaaatgtgcagttcaagccttgagaaagaaaagccatccctgtttctccttttcctacttgcatcttggagttacattcattcagtcattcaacaaaagataagtattccttctagtgggcatcttacatcacttggtatctctgctaactgagtgcctctaagatcacagaagcataacttcctgctgctttatgcttgtagagtggtccccattcacttcctagggaaatatatgttggtgctggatcattaggatatgggactgattttctacaatattctttgtgtgtgtgtgtgtgtgtgtgtatgtgtgtgtgtgtgtgtgagagagagagagagagagagaaagagagtctcaactctgtcaccaggctggagtgcagtggcgccatctcagctcactgcaacctctgtctccccggttcaagcgattctcctgcctcagtcttctgagtagctgggattacaggcgtgcaccaccacacccagctagtttttgtattttagtagagccacggtttccccatgttggccaggatggtctcaatctcttgacctcgagatctgcccacctcggcctcccaaagtgctgggattacaggcgtgagccactgcgcccagcccattttctacaatattttattcagctatattaatacaatctcactcatttggaatacaagaagctccctatttagcacaggtagggaatacagaagagtcctttgtaattagcacactgattgcatgtaaccattgtattaaacgactctatagggagtgatcataaagccacttattctttctctcactgtttctataaaacgcccctgggggctgattttttccatgcccccatttgaatttaggccaatcccatagcttttctgtcctctcgggtgcatgaacagtctcatttttgcaactgagggtccaggttgatgtaataagc

SEQ ID NO: 282231 - DNA, 1000 bp, Homo Sapiens
ttagctttgtcttaaatttcagttatattaattatacagtacccatctcttttccactcctgaataacatctaacatctagaaactttatgaaaatcattattgatttgagcatttttaacattaacttgttgccttagacaccaactctacaacattacctgtcatatactgaagaatctcttcttccagttatgcagcacctggctaagaatgtagtcatggtaaatcaaggacttacaaagcacatggtgagtcaatatagtggcattgtaagatgctgaaaagtgtaataattcaaacttaatgcctgcaaatgcctggtttatttttaatgagttaatgttttaaatgaatacctgtatcattgcatcttgtgatttttttttcttttgcctctttaattgctatctttttgtcttccagactgtcaagaacaagtatgccacatcgaagcatgctaagatcagcactctaccacagctgaattctgcactagttcaagatttagccaaggctgtggcaaaggtgtaacttgtaaacttgagttggagtactatatttacaaataaaattggcaccatgtgccatctgtacatattactgttgcatttacttttaataaagcttgtggccccttttacttttttatagcttaactaatttgaatgtggttacttcctactgtagggtagcggaaaagttgtcttaaaaggtatggtggggatatttttaaaaactccttttggtttacctggggatccaattgatgtatatgtttatatactgggttcttgttttatatacctggcttttactttattaatatgagttactgaaggtgatggaggtatttgaaaattttacttccataggacatactgcatgtaagccaagtcatggagaatctgctgcatagctctattttaaagtaaaagtctaccaccgaatccctagtccccctgttttctgtttcttcttgtgattgctgccataattct

SEQ ID NO: 282232 - DNA, 1000 bp, Homo Sapiens
aaaatcagtggattttatctgaaatagatggcctcagtccttcagtaagcaattattgagttcctacaaagttttgggtatgtgttaagtgttgtagaaaagaggtgaataatgaatggtccattatctgaagatctttaatttagtggttaataaagacacaatccctgcaccacagaaaggaggggtcataaaaaaaatgaggattttagaaacttgtagtgacttgcagaagtggtcatgatgaaggctaactgagggaatcaggaatggcctcaggtaggaaatttgactgaatataaaccttaataatgggcaaatttgcaatgaataaaggggaaagaggttctacaaaatttatcaggacatgttccattgaaaaaacattcggaaaaattctatacaatatattttcctctcttggaatttcagattgcacatcggcagcatattataggtttcgagaagtcctgcaaccttcttagttttaatagagccccccctttttttttccaaattagcagagactttgtctcctctccctcacctcctcagttaccaccaattaacattaagaaacccatgctgggctgaatacagtggctcactcctgtaatcctagcactttgggaggccacagcaggtggatctgttgagcccaggagtttgagaccagcctgggcaatgggcaaaatcccacctttatttaaaaaaaaaaattagccaggcataggggcacaaacctgtggtcccatctacatgagaggctgaggcaggaggatggcttgaacctgggaggtcgaggctgcagtgagccatgatcatactactgcactctagcctgggtgacagagtgggaccctgtttcaaaaataaaaataaaaataaaaacccttgctgtcctatgcaatgagggaacccttagagttctaaggagagatctgggaatcaaaagagagcagctgaaaaaaatgtcctccacatgaaactacaccaagct

SEQ ID NO: 282233 - DNA, 1000 bp, Homo Sapiens
tttgtcatggcagccctagcaaactactatagtgactgtgggggttaggatgacaccaagcatcaaatgccactccctgttccaacagtgagaccattccacagcccctgaatgacaagacaggccttcaaactcaagactacctggctaggtaagaagtactttagtcacaccacttctgaactttcttgcctacctgcagggcaggaatttttaccatttttaaatgaggacactgaagctcagagaagtgatgctatttcctgatgggtaagaggtgatatatttcagtcctcagaccaactctggagtagcaaggttctagtcttaagagtcaaacttggctaggcatggtggctcaagcctgtaatcccagcattttgggaggccaaggccggtggatcacctgaggtcaggagttcgagaccagcctggccaacatggtgaaacctcgtctctactaaaaatacaaaaattagctgggcgtggtggcatgtgcctgtaatcccagctacttgggaggctgaggcaggagaatcgcttgaacccgggaggcagaagttgcagtgagctgagattgtgccattgcactctagcttggggaacaagagtgagacatcagctcaaaaaaaaaaaaaaaaaaaaaagtcaaccttgagccaggcatggtggctcatgcctgtaatctcagcactttgggaagccgatgaagtcaggatttcgagagcagcttgggcaacatgctaatacgctgtctctaccaaaaattaaaaaattagtgggtatggtggctcatgcctgtaatcccagctatttgggaggctgaggcacaaggatagcatgaaccctggaggtggagctgcagtgagccaagattgtgccattgtactccagtctggagtgcaaaaaaaaaaagtccatctcaaaaaaaacacaaaaagaataaatatggggcctcatgactgtatattactgggcttccgacctagactgaaagatc

SEQ ID NO: 282234 - DNA, 1000 bp, Homo Sapiens
tcctctccactccaactgcagtcaaggtgattggagtggagtcttggatccatcacacctgaatcaaaccttggatacagcctgaaaaacccgcagaatcattagcttgggaatctaagagtcagccagacaaaccttcttacacccacgagccattggaagacttatgtatcctctttcagaaggaaaattaatcagtgctcataagttctacctcagttcttgttttaaaaacagaatgtactctaacatcctaacattccttgcctttgcccaagtcttaacctttccccgctcaatgtcttcccctaatcttgagggaattattattattattattattttttttttttttttttgagacagagtctcgctctgtcgcccaggctggagtgcagtgacgtgatctcggctcactgcaagctctgccttccgggttcacaccattctcctccctcagcctcccaagtagctgggactacaggcgcccaccaccacacctggctaattttttgtatttttagtagagacggggtttcaccgtggtctcgatctgctgacctcgtgatctgccctcctcagcctcccaaagtgctgggattacaggcgtgagccaccgtgcccggcctaccttgagggaattataaacatgtcctccaggtttttatttgaagcacttcccaatcagagtaactcatcctgttgggtttgcatgaaccctaatttcccccttatatacagcagttccggcccccctcaacatatgggtggaaagctctgaggcctcatacatagctaacacttctaagggtccaggattttttcatcctagtgataggtccaatttccctgacagggctcaagcagccttaaaagcagccgccgccattctccgacaattcgctctatcagctatcccaatcataggttctgtgggcacaataacctccttctcttcgcctccactcctttgtatctcccatcaagtgttcccatgatc

SEQ ID NO: 282235 - DNA, 1000 bp, Homo Sapiens
cagaattgctcctgcatgcaactaattcaataaaactgtcttgtgagctgatcgcttggagggtcctctttttatgttgagttgctgcttcccggcatgccttcattttgctatggggggcaggcaggggggatggaaaataagtagaaacaaaaaagcagtggctaagatggtatagggactgtcataccagtgaagaataaaagggtgaagaataaaagggatatgatgacaaggttgatccacttcaagaattgcttgctttcaggaagagagatgtgtttcaacaagccaactaaaatatattgctgcaaatggaagcttttctgttctattataaaactgtcgatgtattctgaccaaggtgcgacaatctcctaaaggaatacactgaaagttaaggagaagaatcagtaagtgtaaggtgtacttggtattataatgcataattgatgttttcgttatgaaaacatttggtgcccagaagtccaaattatcagttttatttgtaagagctattgcttttgcagcggttttatttgtaaaagctgttgatttcgagttgtaagagctcagcatcccaggggcatcttcttgactgtggcatttcctgtccaccgccggtttatatgatcttcatacctttccctggaccacaggcgtttctcggcttttagtctgaaccatagctgggctgcagtaccctacgctgccagcaggtggccatgactacccgtggtaccaatctcagtcttaaagctcaggcttttcgttcattaacattctctgatagaattctggtcatcagatgtactgcaatggaacaaaactcatctggctgcatcccaggtgtgtagcaaagtccacatgtaaatttatagcttagaatattcttaagtcactgtcccttgtctctctttgaagttataaacaacaaacttaaagcttagcttatgtccaaggtaagtattttagcatggctgtcaaggaaattcagagt

SEQ ID NO: 282236 - DNA, 1000 bp, Homo Sapiens; identical to SEQ ID NO: 206283

SEQ ID NO: 282237 - DNA, 1000 bp, Homo Sapiens
atgtatgtttctaaagaaagattgatgaagacatttaaagtctcttgaaagattttaataaagtgcttggcatgtagctggtactcaacaaatatttgttgaatacagggtgcctgttaagatctgatattaggtgaagagtaagtatgtccattcatttttcagttgcctatacatccatccattcatccatttatccatccactcatccatccattcattcatgcatgcacccatccacccatctatctcttcatctcttctacgattcactgaacagttattgcatattctgtttgtgccagttacagagacagtgtttgtcactgtcacagttacgcatgaggagtaactgctctctgtgtttgctattttcaggaaaacggatttgtgtgggagaagccctggccggcatggagctgtttttattcctgacctccattttacagaactttaacctgaaatctctggttgacccaaagaaccttgacaccactccagttgtcaatggatttgcctctgtgccgcccttctaccagctgtgcttcattcctgtctgaagaagagcagatggcctggctgctgctgtgcagtccctgcagctctctttcctctggggcattatccatctttcactatctgtaatgccttttctcacctgtcatctcacattttcccttccctgaagatctagtgaacattcgacctccattacggagagtttcctatgtttcactgtgcaaatatatctgctattctccatactctgtaacagttgcattgactgtcacataatgctcatacttatctaatgttgagttattaatatgttattattaaatagagaaatatgatttgtgtattataattcaaaggcatttcttttctgcatgttctaaataaaaagcattattatttgctgagtcagtttattagaccttccttcttttatgcataatgtaggtcagaaattaaagaaaatagagttccaggaggccat

SEQ ID NO: 282238 - DNA, 1000 bp, Homo Sapiens
cccaccgggtgacatcaccgggcagggaggggtgctggtggtggttcatacggagtaagctgctctgcctgtgtgagtggctcctgggccctaaacaggcacctttaggccatgggtcactcaccgtgagccatcaatgtgctctggtctgacatggtttctctctgtcttctagtctagacctagtttttttgttctgttccccacgtatggatatagtagagattgttgtctgtgaaatttctcttttgtagattttgagttttcccttgtagtgtaaagaatgatcactttctgtaacaataacaagaccactttttaagatttatcctgtttgttctttgttgattgaaacataataattgttaaaattctctacagccttctttttcttccatagctaatcttccttctaatagtttttgctttctgttttgctgttgttgctttgcaaagctttcccctcatagcctgtacctgttatcaatataaaataatcttcctgttgaatgcttcatgacttgaattctactttgataaaaacattgccatactgctttttatcttgatgaattcatctggcattgctttgccttatcatctcatctggagtttttaaatgccatttgtttcagttgtctttaacaacataataaatagactttgccatttaacaaggtagctcaaattcttttactaattgttacatcgaaacattctttcatcatatttcctgtttttatttggttttttcaacttcttctgtttactatctacagtgatttggaaaggagatttcctttaaaacaaacaagcttattgggaatggcttttatgatttttaaagtagccttgagagcttccagttaaatctgatgagctgaacatacacctttccttctcccctctctattctgaccccagttgaaatcacctcaaaggaatttaggtgggggagtggccccataaagagagtgagagagagtcaccactgcagatg

SEQ ID NO: 282239 - DNA, 1000 bp, Homo Sapiens
catgtatttattcctctgtcctaaaccgtcccctccttccctcacccccagcacagggggattctgagcagtgcctcttgtctgagggacatatcagtgacctcgacgttgcctttagactacagttgtgttagcctcttgcgtattggctttttcagagtcatttatgagcagaaaaaaaaaaagtaaaactttgctaatattaacccttctctagctcctcgagggtctgtgacctgcaacacaaggggtggggtcaggaaagggctggggaagacctagcattttttttttcttttttttttttttttgagacggagtctccctttgtcacccaggctggagtggcatgatctcagctcactacaacctccacctctcgggttcaagcgattctcctgcctcagcctcccgagtagctgggactaaaagtgcccaccaccacacccagctagtttttgtatttttttttttttttttttgagacggagtctcgctctgtcgcccaggctggagtgcagtggcgggatctcggctcactgcaagctccgcctcccgggttcacgccattctcctgcctcagcctcccaagtagctgggactacaggcgcccgccactacgcccggctaattttttgtatttttagtagagacggggtttcaccgttttagccgggatggtctcgatctcctgacctcgtgatccgcccgcctcggcctcccaaagtgctgggattacaggcgtgagccactgcgcccggctccagcatttatttctgatgtatctttgtggtagaaaatttggaaagtgcagagaagtatacacaggaagaaaaattcccaacccccagaggcaaaccagctgaaaccacgcaaccccagtcaccccaatgcaccgcgaggctgctgcctcctgtcagggtcagatgagcctcgaggctcaggaaagtcagaggatgccatctgcatggtggtaaattacagaggtgatgaggcaagg

SEQ ID NO: 282240 - DNA, 1000 bp, Homo Sapiens
ctctaatgcaggagttggtaactagaaatgaggtttctgagggtctccaactcttggggtgctggggacacatggagtgatgtgtccagccctaggtctagaattatctgaaggactgcatccttacttgtctggagattgagggagttgttggctgggaccccagcaggggctgtcacatgaagcccctatacatggcctctctgagtggctgcttggtcttcctcgaagcatggtggctgccttccaagaatgagcatcccaaagaaaattgggaggaagctgtactgtcctgtatgacttacccctggaagtcacgtggtattgtgcccaagccctcccagattcaatgggagaagatgcaaaacctgccatgggaagagcatccgatggaatggtggatattgtcatgctcatctctagaaaatgtgttctccattcatccatcttagtgtaagtgtttgtcctaagtttagtgtaagtaggatgaattacttggcctttccactggcactagagcgacttataaaagtgtagacactgtgtttctagaaccttccaatcaaaccctggtgaattggcctttcaggaacaacttctacaaccagcaccttaggtaagaacagagacacacttcagcttaaatggcctggggcagatatttagaggtaagttttagatgtgtgatacgggttttctagtgtaataatcctaggttgatttgcacggttgtccaacaagcttcttgagggttcttaaagtaagagagaatttcctaacagtaaaggccccaagacgttgaactgacttcttacgaaatgagggcagaaaaactccatattttaagatctttatcctcatcatcattagtagtagataatagctatcattcattgaacactaattgtagtcagggactatgtaaagcctcataacaactgaagaagtaggtactattagtattgccttcattttacagatgaggaaactgaggcagaga

SEQ ID NO: 282241 - DNA, 1000 bp, Homo Sapiens
agaccttggagaaggacaagttcagctgtcctcaggcctgagagcagaacctgctcaattgtcattcctgagcttcccccatgagctcacgctacagatgggtgcacatcagaaccgcacatcagaggcatgcaaagtcatccactgaggctagcaggggtaaacacataaaaaatgttcacagggccttcaggaaggcacggatgaaacaaatctcaaattgcaggagaactttccaaagcataaccatccaaaggatgtggtgtgtacatggccatctcagaaaatttcaacagaaaaggaggtatcatttaaattagaagggggtacccaaagaaaatgttcacagggcatgtttcattgactctgtacttggcagtggaccttagagagactctgacaataacaatgcacattgcatggttttcatttcagattagctattggatacctcacaacccaaagcttagtcttctcagagaacctccatagccaacagcaatgcatcatattgttaaatgaaagccaaataagtttcattagaaaaggcaatgagggagctgggcacagtgctcccacctgtaatcccagcactttgggaggccaaggcaggaagattgcttgagcccaggggttccaggccagtctgggaaacaaagtgaggtcctgtctctacaaaaagaattaaaaattagccaggcatggtggtgtgcacctgtagtcctagctacttgggaggatggcttgagcccaggaggtggaggctgcagtgacctatgattgagccactgcactccagcctaggcaaaggagcaagatcctgtctcaaaaaagaaggaaaggaaggcagggaggaaggcaggcaggaaggcaggcaggagggagggaggaagggaggaaaggcaggaaggcaggaaggcaggaaggcaggaaggaaggaaggaaggaaggaaggaaggaaggaaggaaggaaggaaggaaggaaggaaggaaaatgatc

SEQ ID NO: 282242 - DNA, 1000 bp, Homo Sapiens
cacagtgagacccccaactctacaaaaaatacaaaaatgttagctgggcatggtggctcatccttgtagttccagctattcaggaagctgaggcaggaggattgcctgagcccgggaggtcaaggctgcagtgagctatgatcgcaccactgcagtccagcctgggtgacaaaacaagaccctgtctcaaagaagaaaagcagaagaaggagaagaggaaggagaagacagagaggaagaggaaaaagaggaggaagaggaagagaaagaggaagggagagaggaaggatagaaaatcccaggtagtgtgaagatgtaaatgtggcaaaacaaaaaccataaaaccccaggtgaaaattggatgaacatttttataatcttggaatagggtggattcacaaaatatccttttttaaaaaaaaaagtgtaattcttttttataaggggtacaagtgcagttttgctccgtggatatatttcacagtggtgaagtctggccttttagtatagccatcaccccaagagtgtacataatacccgttaagtaatttctcatccttcactcctctttcacccttcagagtcttcaatgactactcttccacactctatgtccatgtgtctaaaatatcattctaaagtcacacctgctgcccaaaccatcaccatgacctgcccctcccttgggctaaaaacagctttgtcattaagactgctttattaagatgccaattctccctgggaggtgggatcacctgcagaagtggcttatgggctttctttccaatcctacaatgcacaggagaagcgacggggcttggcagaagacatcttggtttggaagtaaggaggagagctggggagaagacatgatccttggaaccccaaggagggacagcagctcccaagatttctgggttgcaggagggggatttctctgccactccctccccacgaggaacccagtcctgtgccctgcgttgtagatgataaaaagatc

SEQ ID NO: 282243 - DNA, 1000 bp, Homo Sapiens
agtagagacagggtttcaccatcttggccaggctagtctcgaaatcctgacctcatgatccacccgccttggcctcccaaagtgctggggttacaggcatgagccaccatgccaggcctttttttttttttttttaagagacgggatctctctccatcacccaggctggagtgcagaggagcaatgatggcttaccacggcctcaacctttcaggctcaagcaatcctcccatgtcagcctcctaagtagctaggaccacaggtgcatgccatcacacccatgttatttcatttttattttttgtagaaatggggtcttgccgtgttgcacaggctgggaaacttgaagtcctatttaaccctgcaagggttctttcttgctttctcccaggtcatatttacatctttctctcccagcaaagaccctagttcctaataatatctttgtatttgctactttgctcagtcctgtaaaacacatgatagtttcaaaattgctccacccatacgttccccaatgacaaatccgctaaataaaggtcaaagtttctttgcaattatttttgtctctcttcttcttcttttttttttttttttttttttttttgagacagagcctcactctgtcacccagactggagtgcaatggcacaatctcggcttacggcaacctccgcgtcccagggtcaagcaattctctgcctcagcctcctaagtagctgggattacaggcacccaccaccacgcctggctaacttttttctttttttttttttttgagacagagtctcccactgtcacccagactggagtacagtggcgcaatctcggctcactgcaacctctgcctcccgggttcaagcgattctcctgcctcagcctcccgagtagctgggattacagatgcccgccaccacgcccggctaatttttgtatttttagtagagatggggtttcgccatgttggccaggctggtgctgaactcctgacctcgtgatc

SEQ ID NO: 282244 - DNA, 1000 bp, Homo Sapiens
tccccgggcgcaggggacaagagacaggcctgtgccctgaacccggctctctctgcctgcctgtgcggccccgggcgcaggtgaacccagccccgggtgccccgcagctgcacggggatgcctagagtttctggaaggtaacttcccggagctgagtggcatagctggtattattacgcattagtagaggctccctgcccgttgactcgctgcctgccacacttcgacgccactcaaccaggacaccaccctccaagatccaaggacccagctccggcacctgagcctcacaccagtccgttcccaccccacacctcacccatgcctcctgcaaacccactcgctccggctttcagcctctccttccccgttcctggggtccccctggcggcaggctctttttccatcttcttgggcctggtgtccacactggggccttcagccacctgagagtcctgtggttatcacgagacattccacatgtttccttccagtgccaaacccttcccgtgggctttagacacctgcctcccttggtcggcttgtccccaactccccaggcgtcctgggttaaaggctgagggtcccagctactcacgtggggcacgctgccggagtcggccagcctgggtgtcgctgtgggaacacaggcagagtcaaggttgtggggacccccaggccaatcccaccctctcccctggccctgctgggtgacgtgcgggtgactaaccccatcttatagataagaaagtaggtggaggccagcacagtggttcacacctggaatccagcattttggggagactgaggtgggaggatcacctgagcccaggagtttgagaccagcctgggcaacatagtgagaccccatctctaaaaaaaaaaaaaaaaaaaaattagcgaggcatggtggcctgcacctgtggccccagctacttgggaggctgaggcaggaggatcacttgagcctgggaggtcaaggctgcagtgacttatgatc

SEQ ID NO: 282245 - DNA, 1000 bp, Homo Sapiens; identical to SEQ ID NO: 195503

SEQ ID NO: 282246 - DNA, 1000 bp, Homo Sapiens
tttgggaaacacaggatttcaggttcaatgatgggtgttaagatctgagggggagacctggacattttttttgcactgactctgatggttgaggcagctgatttagttctggagtgcagactaatcaggtgaccacttgctctcactcctctgaggtttggatgcctaagaagagaggatttgagccaataaatgagtatggggtgcttggaacccagtaagccctcacttctggtggaggagaggatgggcctgtggctgcagacagacctcatgtgaccctgatctcccctttgtgtttgtgtgactctggctcagtgactgtgctttcctgtgactcagttttctctcaatcaaataagctaaatggcaaatggactgtggcttttcatgctatctgtgaataaatgttaaattattcacagtcacctgacctaatgcgtagcactgtggaaatgttcaccaaacagcatttattattaatttgcttccatgagaaagcacctttacgtcagatccctgtggacaagctgctacctggtacatcttctctcttctgtttctgcttctggggatattagactttctatggagtgtcctaggcctcctaaggcagttggctgatggcctacaaagcttgtctttctgtcctctccactctgagtgtcaggtgaagaaagctctgtccttgcccagatgaggctctgagggctgagccctggctggtgaacagctgcaggagacacagtcctcagacagctggaaaattcttagtcccagtaagccctgcccaagaaaccataacccagtcctggcacaggctcctcagctttatctggagcaaggatttagggacaggggtctggggttgaggcttctagggctgagcttctctgagggtctcagggggcccctcaggccaagccctactcagttttccagggtctttctcagggtcaaatttatgaagagggcatgaggtgcttggctgagactgatc

SEQ ID NO: 282247 - DNA, 1000 bp, Homo Sapiens
agatgatgccactgcacttcagcctgggtgacagagcgagactccatctaaaaaaataaatgccatgatgagctaaaatgcacactcgtgtggggtaaagtttacatgaccaggaagaacacttaaggtggtggtggagaaaggaataagctcaaagtgaaaaactgtcttctcagatatttatctaaaataaaattatattaatgaccttatggctgccaggtgcaattgattctgcaggactaatgcaacccacaagtgtaggagaaaaataggaatctccaccttgtttctgaccctagtttgggaaaaacattgggaaagtaggaaaatgacaaaaaaaaaaaaaaaaaaaagattggatatcagagagcggaaagctttataaaggaatacattaaattctatgtcagttgagatcaaagaaattgaaactctgagaaaaaatagaaggagcaaattccactttcacaacctgattcgtgaatcacaatttctgagtatgagacttaaagctctgaaatcacagttatttcttgaaaaatggcccttttattgctttcctctgaaggacattttcagagccctctttatgtctttattcctcagactgtagataaaggggttcagcatgggggtggccacagtgtacatcactgaggctgttgcacttgtgtgtgagttgtgggttgcagcagaagtaaggtacacacctaggcccgtacaacaaaataaagagacaactgagaggtgtgatgcacaggtggaaaatgccttgtacttcccctgagctgatgagattgcacgtatggaggaaactatcttagagtaagagcaaaggatccccacaaggggaccaccagccagcagccctgctgcaaaatacatccccatgtcattaagaaaggtgtcagaacaggcaaggtggatgacctgattaagttcacagaaaaagtgggggatttccaagtctgtgcagaaggacagccacaataccatt

SEQ ID NO: 282248 - DNA, 1000 bp, Homo Sapiens
tattctgctgcctacatgcctgaaatcagggcttagggcgaccaggacaaaaggcaacaatacccagtgaactaaagcagtgctttgataacattccttttacaactcagtttgtggtaggattcctacactctgcaagactgtgaatccccagtgaaacaaaccaaaacaaagctagccactacaaggggctttgaggtctctgacactgggagcgtggatggtggtgcctggtttaggcactgacgttgtattgtgatatgatcatggaggaagctgctatgagcagggcctagtacagtgctctacatacagtatcatacagatttgactggcaaggccactctgcattgaattctcaccatgcagtgtaaagggcacataagccccttcaagctaattccaagtgaatttaactatgtatctatatatagttcacatctagcctacctctaagaaaatgctgcttatattgtgtcctgctcgctggtcctagtcctttagacctcaaagcatgagaagcaagcctttggtgtggttcagaggactacctgagcaggcttccctgtcttttttacgcccctggtctgagaggttgctgatagcttcctttggtggttctcagggtaggaagaggctcactctagagagggagacaaagagcccttaaactttatactggggcacctgctcaccccggcttttccttcttccttcagaatggttcttcgagtttggctttgtgatccctaactccacaaatacctggcagtccttgatagaggcagcacccgagtcccagatgatgccagcaagcgtcttaacgtgagtgagcaggtctcaggaaattatgaagtgtgtctagaaacaggcattccaggcaggtgggactcctggtgccattcagtgggcagagagctcggttgagaaatagagtaaaagagtatccaagggtatctaggtttccaggttcctaccttttcatataaaaagacagata

SEQ ID NO: 282249 - DNA, 1000 bp, Homo Sapiens
gcccacctccccaggccccattcgccggaggttgcctggtgttggtgtcggaaaccagaagccaccagggaagatgttgcggtaggggggattttaatgggggcggggggcagggactagtgtcaaatttgggtcaggccaaagggggccgatgtggtaaacgggtctggcagcaagtggaggggccacatcttacaagcagatagaactggccaatattagtccatcaaccttcattaatggagatttaagttggatctcaaatgtgaatgcagctttaaaaggtgatagtctaaccccggtaaagctcatggtgctgttgcctctgttcttaagggtccccagggttcctaaatggaccattggtgttggggctatagatacatcccctgttctataaatccgccctcctggattgcgggagacatcagtgggacttcaggggaggcaggaacttttcggaaaaaatatagccacataggcacagcccttccccatgtttctgagcgcaccatttcctctggggtcacacaggtgtcttcttgatcagcctcagctgtgcttggtgagagccaggcaccgggggaggcaggcactatgctctccttccgtgacactgtagacaccatcctgagccccagtgctgcccagagcgggccccagtgctgcccagagcggagcaaagggggccaggccgaggagcgggagttggggacagggaatctacaggccaggagccctagagaccgccctggggacctgctccagaccaaactctgcctgacctcggagcactgggtcctccttccctgccctccctccccaggcagggtccttggagctcccagggcccaggactgagccagcgtcccccacagccaggaccctagaggcagacgacaaggtcatggaggaattcatcagctttctcaggaccctgcccgtgcacatgtggatcttcctggacgttacccaggcggaaggtgagctccacccaaga

SEQ ID NO: 282250 - DNA, 1000 bp, Homo Sapiens; identical to SEQ ID NO: 195305

SEQ ID NO: 282251 - DNA, 1000 bp, Homo Sapiens
tgtttattgttataagctatgggggggttttttgtagtggtttcttacacagcactattgtagcaatagataactgatacaatgaggaaactaagtcatagagaaattaaagtgacttcttagcagacttcttcactcatagtagatattcaataaatattagttaaatgagtaaatgaatgattaaatgatttggaaaccaagtccaggtctgtctgacaccacggtctgggcatttgaccaataagctataccagaatgtacatttctaacctatgccagtttcttcccttttaaaaaccacccagcacagtacctgactcaataaatcctctttcctttcatttctccctcacccctgacttctactcagtcaatttaacataatccctgctttagtataaagtccccagagaaagggggaaatgtaagtagagataaaagatgtgtttgacacaattataatctacccctggaaaaggaccatgtttctttgcaacctttctctgtattttatgtgttagctatagctggatttccccctaccaccactgccccattttttatctttatcttttagctggtgagtttagaccatttgcatctatgattactgctatatttgaagttcattctgtcatctgattttgtattttctgtttactctgccttgtccatggttccctcccctgcctttcctgtcttctatttctcccactgctagtttagaagttatattcttttcctattctttcagaacttaccttctatttttaatatgcttatgtgacttaatctaaaatgaatcaatttctgtaccctcatccaagacaatataaaggtcttagagtagttgaattctaatctctctctactgacatacacatctagcactgtctttctatatccctcaaagtagtcatccctggattcccaggacctaacacagtgcctggcacatggtacatgcacagcaaattcttggtggatgaatggatcc

SEQ ID NO: 282252 - DNA, 1000 bp, Homo Sapiens
tgaattggggtcccagataggagactgccttagggctataggaatggagggaggattgtttctgatggagggggagagggatagggttgtacctgtgcttccggagtggttgagacaggattggatttaggcgagtggagtgtgtgtgtgtgtgtgtgtgtgtgtgtgtgtagagagagagagagagacagacagatacacactcacacacacacacacacacctggatgtctcctgttctctcattgtgtttctctgcctatcaccccagatttgttgaatcctaatctcaaggataccgttatctgtgccatgaagataacccaagagcctcagggtctgggttactggtaagtaacttgggctggagccccgcagcggtggtatggttaggactggtgggcagcagcagggaacaaacccctttccttcctcacttctggtttagagaccacactctccttcttgttcttctctgggcggtgactggcaactgcagctgatattatctctcctcttccctgttctccatcctcagggaggcctggaggcatcactgccagggaaaagacctcactgaatgggtggatggctgtgacttctaggatggacggaaccatgcacagcaggctgggaaatgtggtttggttcctgacctaggcttgggaagacaagccagcgaataaaggatggttgaacgtgaatatggctctcagctctcagtgtgtctgcaggtgccatgtcagagccagagcacctccgttttccctcacctcacctgtccgcttgggctgggtttccagtggactccagaaagcccagcaccagaggcttacctccatttctggtggcctgtgggcaggtgtttggggggggcaccagtgcattttttgtctaccacacctggcaaaatttgggtctagggtggccagatttaacaaaacaaatacataagaaacaacaaaaacaggatgccccagtttaatttgaactttggata

SEQ ID NO: 282253 - DNA, 1000 bp, Homo Sapiens
gaattgaaagcagcatagcttgcttcagtaactccaataatttgggaagcagaaatggaaaaagtaatttgagtcatgtttgcttatgtagtgccgtttaaaattcccctagtaattacctttcatattttattaactaggttaacatcaactgtggttgtaagagtaaatgtttcaccttaagataaacatgggcaatatattaaactctagtctgttttcttgcctgtgaagtgaggctgcacttgattatatttgattctttgttcgtaatacatgggaacgacagctaagtgtggtgaaaaacgcggggatccaaagagctggatttttatctcagatctgccgctaacttttgtatcctataggctacttttatttctatggtctcaatctataacatgaatgagttgggttaaatgactgaagttccttcaagtgctaaaattctttttctacagtcttcattggatttatgtatttcttattcctaatatgtttaactgggatgtctgtcactctagggcggcaagacagacatttaaaagtaacagtcacactgctgaactggcatttctgttaacacaaaagtttagaaaactcacggtaactgttacttgatttaagtgtatataaaattttcagtaaggctgcttttaaaaggaaccactgtccatttaaaggtttcatagttatcttcaatgggttagtattgtttggggcaggacattaaactagaagggattctataggatgaggtgatacctagaaggtaatatattgtaaggcaaaagagattagaagaaatggggaaaggatagtaaaaggcaagtcagattaaaggttgaaacatgaagatattctcaattgtatttctgcctatgtttgcttttttggctcaagcatctgttggaagagacaaaatgtgacttggttcataataaagcaagaattatttactctcggaaaaaaaaaaaaaaaaaaaaaaaaaaaaaaaaaa

SEQ ID NO: 282254 - DNA, 1000 bp, Homo Sapiens
ccttcagtcctatcacttcattttattaattgtactctccatcatctgaaattattatatttatttactttgttagttactagtctcatttattaggtaagctttttgaggatagacaaccttgtccagcttgttactctactgtattgctaaggtttatgacagtgtctgtatagagtagttccttaatgtttatttgatacgtgaatgggtgaatgaatagcagtctctaccaacaagaggaggagtggttctcaacggggcctgagaaatggctttggaaaagggtgctgggagaagattagaacttagagtgagatcctgacctctctccccttgctttgcaggccagaggcacccaatgagttctatgatggagaccatgacaatgacaaggaaagcgatgtggagatttaagagtggcttgggatgctgtgtcccaaggaatttcttttcacctcttggttgggctggagggaaaaggagtggctcctagagtcctgggggtcaccccagggcttttgctgactctgggaaagagtctggagaccacatttggttctcgaaccatctacctgcttttcctctctctcccaaggcctgacaatggtacctattagggatgagatacagacaaggatagctatctgggacattattggcagtgggccctggaggccagtccctagccccccttgccccttatttcttccctgcttccctcgaacccagagatttttgagggatgaacgggtagacaaggactgagattgcctctgacttcctcctcccctgggttctgacttcttcctccccttgcttccagggaagatgaagagagagagatttggaaggggctctggctccctaacacctgaatcccagatgatgggaagtatgttttcaagtgtggggaggatatgaaaatgttctgttctcacttttggctttatgtccattttaccactgtttttatccaataaactaagtcggtattttt

SEQ ID NO: 282255 - DNA, 1000 bp, Homo Sapiens
atctctgtaaaatagtaggtgtgaggattcaatgagccaatatatccaagatacttacgtgccacaatttaataaatgttagctattcctgttgaagcataaccttggagaaaggttactttacaggggggtgaggagtggggaagtgagagctgagctcattcttgatggatgaggagttagtcatgtgaggcgcttaggttaaaactacattcactataactcagtaaagcagtcccgcccactctccgacccatgcagaaataggcctagagagtcacatgtctcagttcagaaatctatcgaagtggcagagctggaattcaaacacaagcagccgttctctgctattccaccctggtgtccaagcaacatggtagggcagaaggaagaggatcttacaaagagtaagggaaagggagaggggcagaggctgcttctcagagccaccaaaggacaaaataagacaggtgtgagcccagtggaggaggcacggggcagagaccagccactgttgctggcacgctggtgcacgtagcactgtggcagatggacctggagaggaagcaggagggacagcacaatggagccaagaaaggacttagcatggccgggcgcggtggttcatgcctgtaatcccagcattttgggaggccaaggtgggcagatcacctgaggtcaggagtttgagaccagcctggccaacatggagaaatcccgtctctactaaaaatacaaaattagccaggcatggtgctgcatgcctgcaatcctgtagggaaaagaaagagagatcagactgttactgtgtctgtgtagaaagggaagacataagaaattccattttgacctgtaccttgaacaattggttggctgagatgctgttaatttgtgactttgccccaaatttgagctcacaaaaacatgtgttgtatggaatcaaggtttaaaggatctagggctgtgcaggacatgccttgttaataaaacgtttacaagc

SEQ ID NO: 282256 - DNA, 1000 bp, Homo Sapiens; identical to SEQ ID NO: 114880

SEQ ID NO: 282257 - DNA, 1000 bp, Homo Sapiens
ggactcaaaggggctatgcacacccatccgtagcatacagtaggtgattagtaaatgcagacagttgggggaagcagtgggagctttgggggatgcagagttggaattctgctgtgtgaccctggacaggccacttaccactctctcattcccctgagcctcagttttcccatctgtcaaatggggatgcctgggcggggggttgggggggcgcattgtgaggattaaatgagatactgcatgctgagtttcttcctgggacacagcaagtgctcaattaacaggggttgtcaacagacccaccatccgcaaaggggcttgctttcataaaaaccaaaagcttaggctgtgtttctgagccaaatagttgtttctttcaaagcttcgtgtacaaagggaaatgtctactgcggaggggaccacctctgagcaccgcccctgccccagtaacccccctattccatgtagagaatgtgcaacatccatatcctgctagtctcacgcctccattagagaatccagcaattttcagccccagtcactctgggccacctccaccccaccaggctcacagagaaactgcctcaaggaatgtcttgctcccaagagcatccccaaggaatcagagcttcccctctcaaccagcagccataagggctatgcctaggggtgaccccaacatcccaccctacctatgagcattttggatgcaggagaaagtggcctgaggcagagcagccaggctaggaaggggtgtgctctgtgggactcacgttgttccgaggtgcgttgggctgcacagggtcctcggcggccagggcgatgctgctcatggcaatgaccatgaggatgcacatctcaaagtagcgcaggttcaggatgtaatggcacaggcggcgaaggctgttggagacagatgggcgtgcagaggtccactcagaccacaggctcacaaacccttttcttccataatctcatgttacctaccactactgagatc

SEQ ID NO: 282258 - DNA, 1000 bp, Homo Sapiens
agcttcttcagattttattaatttgcttgatgggttacttcaaagagatcctcagaaaagattgacttggacaaggctactgcagcattcattttggaagaaagcttttgctggagcagatcaggaatcaagcgtcgaagatctcagtctcagcagaaacactatggagtgttctgggccacaagattccaaggagcttttgcagaactctcagagtagacaagcaaaagggcacaagagtggtcaaccactaggtcactctttcagactagaaaatccaactgagtttcggcctaagagtactcttgagggtcaattgaatgaatccatgtttcttctcagttctcgtcctactcccagaactagcactgcagtggaagtaagtcctggtgaggatatgactcactgttcaccacagaagacttctcctctgaccaagattacaagtggacacctgagtcagcaggacctggaatcccagatgagagagcttatctacacggactcagatcttgttgtcacccccattatcgacaatccaaagataatgaaacagccaccagttaaatttgatgcaaaaatattgcatctaccaacatattcagtggataagttattatttctgaaagatcaagattggaatgactttttgcaacaagtgtgctcgcagatcgactccactgagaagagcatgggggcctcccgagccaagctgaatctcctttgctatttgtgcgtggtggctggtcaccaggaggtggccaccaggctcctccattcccccctgttccaattgctaatccagcatttgcggatagctccaaactgggatatacgggccaaggttgctcacgtaattggtttactggcttcgcacacagctgagctccaggaaaatacacctgttgttgagactacaagctccattggaatcgggattttgaactgtcttgttcaacactccactccagtgcctagacagtgccttgtgtatgtattg

SEQ ID NO: 282259 - DNA, 809 bp, Homo Sapiens
atgacaaggaagttttacaataaaaaagaatactttgtggatttagaaaaaaaagaagttattcttgaaaaagaatttcatagaaaattactaaacaaagaatttgcttttaatacaggatttaaaaaaataggtggttcatctatcggagaagttttagaagttgatgattattcttcagcctttaaagcttttattaggctagcaaaattagatatgcctattttagatactaaatacattgatgctggggtagctattgagcctttagtagtagctgcgattgagaaaaaattaaaagtaaaagtcgaagtgtttcctccgcaaaagtataactatgattattttaaagaagatccgataattgggggtattcccgatggatttattcaagaaaaaccacttataatcgaaattaagaccacaggtgaaaaaaactttgaaaaatgaggtaaaaacggtgaaaatttacctccaaaatacttaaaacaagctcagttgtacgcttacttaaaaaaggtagatagatttgctattgtagcaacatttttaaaagaacaagattatatagatcctaaaaactttcctattgaaaaaagaaaaatacaaacatatgcttttaatgtaaataaagaagaagttgaagatgatatagtgcaaattaaagcttgatatttagaacatacaacttctggtgtttctccgaaatttaattctataaaagatgctgaaattttagaatatttactctgtgaaaatgaaaaacaatgaatgaatttgcttgaaaaatgaaaaaaaaaaaaaaaaaa

SEQ ID NO: 282260 - DNA, 1000 bp, Homo Sapiens
ctgggctcaagtgatcctcctgcctcggcctctggagtaggtgggactacaggtgtgtgccaccatgcctggctaattttttattcttttgtggagatgggttttgttaggttgcccgggctggtctcgaactcccgcgctgaagtgatcctctccactcagcttcccaaagtgctgggattagaggcctccatccatatttttagaccaggaaggatggataaagttaacttcttcaactttacaattctttcttgtgcgcattccaagcctaacggagctggctgaggctgtcatttgctatgcacactttctctcagctgtgtagacttggtaccctggaaagagtctgggcttacacatcttccccctccccccagccccttattctgaaattttaacttcacttactaagcgtgtgcccatccagcacgtccaccctcagccgttgagactgtgggctgtggacctggcccctccccagacctttggtgcaggaagcctggagggagccagaatctattgagcggctgtcttaggtgattccagtgcccatgcccccggacccctctaaccagccccactctgctttgttgctggatctctgtaagccctgtccccacccccaccctggcaggtttttgagcggagctttggttcataggagattcccttccaggaggaggtgtgatgggagctgctgggcgaaatgcagcacatgtggcctttagggacctcaagagcatgtgaccctgaaccagctctgacccaggaagaagactccacccctgaattccaagtgctccattggatcagcttcccaggaagttcagcttcgggttagtacataaggccaccacaatgctcaagaaattattttagaaaaaacgtacgagttacatttagtgcaagttgaccttatgcccatgcctccatacatggactggttctgttttattaaaactaatatttcatacagattaaaaaaaaaaaaaaaaaa

SEQ ID NO: 282261 - DNA, 1000 bp, Homo Sapiens
tcctggttttgccttttcagggttttctgggggattttgttgtagtagttgcttttcttcctctctcatttgggtttgaggattgtggtcgggggagccctggctttcaccaaaggagcccagtggtttctgtggaagaggcgcccactcccactttaatgagggtgaagattgtcaggtcactgtttgacatattcatgccccgtcccttccccccccacccccccgcccacccaccacgggtgtcgctttaaagagtcaattcttgtacagagaaggatttgctaggtttgcatttgggtgttagcatcacgacccacgagggccctgcccaaccgtgcgtcccatggggcaccttgactcttcaaaccaaaattccttaaaggggcacagcccagccttgtccgcaacctcaggggcctgggattcctgtggcgcttcctgaattccaggttggcacagatgatgaggtctgagaccagccggaaggaggggctcctgccataacccaggtgccagccggtctccgcctaggaccttccctccgcccagccagggtgggcggcatcctacgcggtgaaacgagctcatggactgacccgggctggcctcgccagccaggagagagcgagggccgcacggcagggctggccaggcagctcgtccagggccattcagatcccaagcatcaggaaatcattttgtacaaccacccgaagcagagatattttttaagaagcgtaaattattttcagttgttttctgatcctgcctttttcttttccccacaacttcacgccagtgattcgttcacatcaggtaaatcttgagaaagccttggtgccctcctccccaccccccactcagtaaccacgtgcgtgcacccccgcatcctttctcagtagttaagacgttctaggcaataccatagacacatctgactgtgtctctctctttgagtgcaagaaactcaagtcatcttaaaaaaaaaaaaaaaaaa

SEQ ID NO: 282262 - DNA, 1000 bp, Homo Sapiens
tggagctctgtgggccctgattgcaggcccctccctgtgtgatgaagggatgagtcagcttggggagccacttggccagcctgcatgcctggtcatcaggaggttgagaaaagccttgaaagttgtgaagcactgagcagatacaagtgtttgttaattttgtagaaattaactttcccatctggcctttatctccaaagttggtattgttgctccacgcagactgcagtccggtttcttattgtgactttgacaatgcaaagtgcaaaataggaagaggcctccccaccccactatcccaccctggtgaccaattcagtgtaaccattgcacgtactcagtcattggtgtctttggagtgacatctgcagccagttagtgccacctgagtacagcactcgtacttttacatgatgtgtgtgtgagtagctcttctgtccaaaccatgatttgaggttcaactacctgtagatcaaagctttattttagaacgataaactgattttttccaaatgggtgaaatcttctccccatgactatgttttcttaactttgcattgaatctatttactgggttacattctatgtgtagtttgctttcttcatttttttttcttttaaaatgctcatgtcttattccaagcaccttcctccaaagtccccataaagctgcatctccaacacattgttatgccaataaggttttatttaactttatttaaggatgattgtgtctttgaatgacaaatgtactgctgcttcctacctgcaagacgcacaatgtatgtttcaagggtgagcaagtgttatttcttaaatttctcaaatgcctgtagtaactattgtttctgcctctcaattgttgccagctctttgaagaaggggagaattgtgtgtttttgtgtgggatgtttctgatatgctgctacagttgcaaaacactggagctagagaaaataaagtactgatcttcgaaaaaaaaaaaaaaaaaaaaaaaaaa

SEQ ID NO: 282263 - DNA, 1000 bp, Homo Sapiens
catgtggtgttttgtgttctgttccttcgttggtttgttgaggacagtggcttccagctccttccatgtccctttgaaggatatgattgtgttcctttttatggctgcatagtattccatggcgtatgtgtaccacattttaagtacaagggacgtgaacagatacgggagttgaaaagcttacctcagactctgtggaggttgagtttggaagatgagatgactgcacacagcagataggaggcttttgcaatagttcacatgatgagtttttcattaggaattacttgaggatgatgaaaaagattattttgtttaaaaactatcatttctagagatagtgaagcataattgaggcgcttctggtaatttgatttcttttattctaactgaaggagttcactttagttccacaaacctttgatgggcaccttggctacctgaaacactgcatttaagatgtaaagatgatgtggtctctggtgtcaagaacttgatgcaatgaggcttattctcttgtcttaaataatgttattaagttgtaccaaaatttcctttgctacataagcagtaaatgtcactttgtctttttctattccaaagaacgaaacaaaaaacttatttttaatcaaattgtaattgtcttttgatccggcaatttccttcctaggcatttataaatatccttttcctagaatcttcatttagtacaagtctttttatatgtttttatatgtttcccagctatatttcacctagctaattcatacttcattctttcatgttggcttacatgttacttcctcagggattcctttcttgactagtcagaatctacactatagaatctgtattatgcgttgccatagtaaccagtacttcatagactttatcatacttcgtagcatccagtatgttttctttgctaagattattgattttgtattgaagggtcccatgtccatcgttttcaatgctttatctccagggttggagcatg

SEQ ID NO: 282264 - DNA, 1000 bp, Homo Sapiens
cagaaacccaaggcaccagtggggcatttttacgaaccccaggctccctctgctgaggtggagatgacatcctatgtgctcctcgcttatctcacggcccagccagccccaacctcggaggacctgacctctgcaaccaacatcgtgaagtggatcacgaagcagcagaatgcccagggcggtttctcctccacccaggacacagtggtggctctccatgctctgtccaaatatggagcagccacatttaccaggactgggaaggctgcacaggtgactatccagtcttcagggacattttccagcaaattccaagtggacaacaacaaccgcctgttactgcagcaggtctcattgccagagctgcctggggaatacagcatgaaagtgacaggagaaggatgtgtctacctccagacatccttgaaatacaatattctcccagaaaaggaagagttcccctttgctttaggagtgcagactctgcctcaaacttgtgatgaacccaaagcccacaccagcttccaaatctccctaagtgtcagttacacagggagccgctctgcctccaacatggcgatcgttgatgtgaagatggtctctggcttcattcccctgaagccaacagtgaaaatgcttgaaagatctaaccatgtgagccggacagaagtcagcagcaaccatgtcttgatttaccttgataaggtgtcaaatcagacactgagcttgttcttcacggttctgcaagatgtcccagtaagagatctgaaaccagccatagtgaaagtctatgattactacgagacggatgagtttgcaattgctgagtacaatgctccttgcagcaaagatcttggaaatgcttgaagaccacaaggctgaaaagtgctttgctggagtcctgttctcagagctccacagaagacacgtgtttttgtatctttaaagacttgatgaataaacactttttctggtcaatgtcaaaaaaaaaaaaaaaaaa

SEQ ID NO: 282265 - DNA, 1000 bp, Homo Sapiens
ttaccgttggtgtctctgttttcattctgcttaagatgtagtcaattttatggcattaatggtctgccctctgagagcttacagtagaccctgagcatttgtaaagcaagaaatgatgttagtaaagatactttaattgcggggagttctctgttggctggtgaataaggacgttctctttgagttccacctttctttgagaaattttcatgtttcctgtacttttcctctattatatcatggaaacttactaaatcagcctgtgcattccgcccacatattccctcatggtgccttccggtcctagcagctgagccagggccatcaataaatcttcttcttttcccccaagatattcctagttgcttctttactattcattcttgtaattccattcatctgtgtgtatcatttaggatgctgggcagttgcatcgcatttcacctaaggtcacatcctgatgggatttggtgggatcctagagctggctaggaccacttgtgagagctgattgttaaattctccgaaatgacgtgactcagttgttagactgcttaaaggtaaaaatcagtggtgtacttaggtttgttttgttttgttttgttttgttttgttttgtttttatcagcatagctataaatcagggcttttcccttgttttttttttctcgcagagtttcagaatacttgcacaccactaattgtgaatagttttctgttttgattccccacttcttgcaatctgccttttagtgcatagagcaagcactgaggcttctttaagggaagcaaataaatgatcactcctagaacactctatgttatagtgattgtactttagaaaaggctgttatcggccaggcacggtggctcacgcctgtaatcccagcactttgggaggccgaggcgggtggatcatgaggtcaggagattgagaccatcctggctaacacggtgaaaccccgtctctactaaaaatgcaaaaaaaaaaaaaaaaaaa

SEQ ID NO: 282266 - DNA, 889 bp, Homo Sapiens
gctcagcctctttaattgtttagacacattccttcctacccttctctagtctcaggagatggtaactgggtcgcatttcagtctctgactgaggcctcagccatttttacggaagttcttttctgtctgaccttgcttataaagcatcgacgagaaaattacagtcttcaaccctcttctggattgacaaattgtggctgggaagtggcgatctagctttcagcccagtaaccagtctttcatgcctactactcccagcattccctcctctccccacgtgtctgtccacacagtgaagaggcctgaccagccgtggtaccaggacaggacgtgtccagggaacgctgacacctgtcctcgcgccttctcagtggccagcgtgatgaaaccagcacgtctccgtggatgtgattggaaacccaggggcagtgccagggggagggctccctcgaggaggctgtttctaacagatttccccactcaaagatcagatcaccaacagaggagcatcagaaactggctccactgttgggcttttcagagattttggtccctgcgggttgcctaaatagattctggcccacagttcgtagaattctcttggatatagtttacctcgaaaggctgttgatgttgttctgtttctcctctttcacttagagatcaatgttgattttgcgtacaccatgacatcagcgttaggcaattaggagaaaaaaatctaatcatttcgcctttatttcaagtggttcttgaattccctccagtctcattgtgaaaggggcagggaaaaaaataaaagggtaataatctgatttctgtccatatttccagtgttttatgctttccattaaaaccttgctaatctctaaaaaaaaaaaaaaaaaaa

SEQ ID NO: 282267 - DNA, 1000 bp, Homo Sapiens
tcgtggagtgcgagcacggccggccaatcgccgagtcagagggccaggaggggctgcggccattcgccgcccggcccctgctccgtggctggttttctccgcgggcgcctcgggcggaacctgaagataatgggcagcacctgggggagccctggctgggtgcggctcgctctttgcctgacgggcttagtgctctcgctctacgcgctgcacgtgaaggcggcgcgcgcccgggaccgggattaccgcgcgctctgcgacgtgggcaccgccatcagctgttcgcgcgtcttctcctccaggtggggcaggggtttcgggctggtggagcatgtgctgggacaggacagcatcctcaatcaatccaacagcatattcggttgcatcttctacacactacagctattgttagatggtgtctcgccatgttgcccaggctggtctcaagcaatctgtctgcctcagcctcccaaagtgctggggggattacaggcgttgcctgcggacacgctgggcctctgtcctgatgctgctgagctccctggtgtctctcgctggttctgtctacctggcctggatcctgttcttcgtgctctatgatttctgcattgtttgtatcaccacctatgctatcaacgtgagcctgatgtggctcagtttccggaaggtccaagaaccccagggcaaggctaagaggcactgagccctcaacccaagccaggctgacctcatctgctttgctttggcatgtgagccttgcctaagggggcatatctgggtccctagaaggccctagatgtggggcttctagattaccccctcctcctgccatacccgcacatgacaatggaccaaatgtgccacacgctcgctcttttttacacccagtgcctctgactctgtccccatgggctggtctccaaagctctttccattgcccagggagggaaggttctgagcaataaagtttcttagatcaatcaaaaaaaaaaaaaaaaaa

SEQ ID NO: 282268 - DNA, 732 bp, Homo Sapiens
taaatgctggggtatcaggcatgtgaagatgggaaggtgaatgcaacccccacagcaggccaaaaccttggcctccatcgccacagctgtctacatctagggccccaaaactccattcctgagccatgtgaactcatagacaccttcagggtgtggggtacagcctccttcccatcttatcccagaaggcctctcccttcttgtccagcccttcatgctacacctggctggcctctcacccctatttctagagcctcagaggacccatccaccattcattcattcattcattcattcattcattcatcaacataaatcataacttgcatgcatgtgccaggcacaggggataccctctagagacaatctcctcctagggctcatggcctagtggaggagacagattaaaacttaattagaaaaactggctgggtacagtggctcatgcttgtaatcccagcactttgggaggctgaggcgggtggatcacctgaggtcaggagttcaagaccagcctggccaaaatggtaaaacctgtctctactaaaaatacaaaaatgagctgggcgtggtggtgcatgcctgtaatcccagctatcaggtggctgaggcaggagaatcacttgaaatgggaggtggaggttgcagtgagccgagaccgtgccaccgcactccagcctgggtgacagagtgagactccatctcaaaaaaaagaaaaaaaaaaaaaaaaaa

SEQ ID NO: 282269 - DNA, 1000 bp, Homo Sapiens
tgccccaacgacctagtggcgttccatgacttctcctcggacctggagaacgtgccacacctgcgctacctgcggttggatggaaactacttgaagccgcccatcccgctggacctcatgatgtgcttccgcctcctgcagtccgtggtcatctaggccctactccgccaccggatctgctctgaccgcacttgaaggctggggcccaggcacctgtgccggccattcgttttctctctctccctttctttctcccagctttgcctcccttatcccaccgcgcctggcaattttttgtatttttagtagagatggggctttgccacgttagcaaggctggtcttgaactcctgacctcaggtgatccacccgcctcggcctctcaaagtgctgggtgtgcatttctttattttcaaccattccttgtaaatttaggcttatctctttatcaaagtgacatagagctggatgtgtttccttcttccttagcaagcgaactctaggtaatgtgcttagcccaaaacattatgtttctttgcacatcttgcagcaaaatatggacatgttattaggttgtagccaatgagaggtaaagagaagtgttttatgggactttgggggcactccttgaaaggagaggatgcacactctttattgttctttcttccctttcttttcatctgttatgaggatgagctagctaatgcttctggcaaccatcatggatgaagaggtgaccttgaggatggaagccacatgccaggagagtgaagcagaaagacagaagaagcatggggcctggggcctggggcctgccaatcagtctggactcactcatatggaatggactgcagtcacttgagagagaaaaaaacttccactgtgtttaaacctctgtttggcttttctgtcacatgtagacatcaggattaccaaaagacacatcagattttgcctttctttaaaaagaaaagttaatctaaaaaaaaaaaaaaaaaaa

SEQ ID NO: 282270 - DNA, 1000 bp, Homo Sapiens
ttggtaaatcttcagtttagattctttactgataatgatgtggttcctcataaatactggaaggagagagtgtgatgcttggtacaagggatgagacaggtaatatttcagaagaagaaaaatacgatctcagatgtgacacatggccttgatgccatcatctctagggttctgaagacattgaattttacataattgatcttttgatgtgaggatttcctggactcttgttttccctgctttatcatttttcactttcaataattccagcctttggctttaattagatagaagaggttcttcttttggaaaggaactagagaaatgcaaatctaaacttattcagagctatgtttgtaggtctctaggcaaagtatgtgtctggcctttttcaacgaagtattttcagtaacaagttgtcagtgaggtcagtgactagcggttcaggattagataccacccaccctggcttgtaacctcccctttctttcttatcctgggtgaacaacgctcagcgaaattgactgccccactgtcatctgcctctcaatttggtactctgtaactctgtgaccaccaagaagcctttttccgtcccccacaaagctctttttggaaaattccctacgggagctgaattttaagcccatttactttataggaagaaacagaaaggtaagaatcaagtttgtaaagagaagagctgaacttcagcgaattctcatttctgcattgaattcctgtgtcttagttataatcataggtttaaaatttggggttttcttctgaactgaggaagatcacattattgtatgaaataggaatgttttgactagttatgagaaacgtaggctttcacgctaattttaaagttataaataactttcgaactattgccaggggaagctggtagccaaggtcgtgctttgcattcagagagtttctggctataaaaagccgattggatactgtgcaggaaaagataagatatggcctggat

SEQ ID NO: 282271 - DNA, 1000 bp, Homo Sapiens
tagctgggtcttactggggatctggccagccttgggggcccttggagccctggcccagtggaagctcgtgcctgaggaacatggaggccacgctaatgagttacttccagagtcttcaagagtgccaactgggaccaggaccccagaccacagccccccacaccgtcctggacctggattctgactgtggttccactgtacccctcaccttaatctctggttctaaccagacctgagcctagacttccactttttcccttacccctgtgagggcctgggaacactaggtgggcagggtttgagcccacaggacctgcacacaaacttccccacctcttggacttggggacaggatctgtgcctcaacccagaccagctttgtagggatatgttccaagaacagagaagagtcttatggggaagggggaggaagggaagtatgaatatttacctctgaccaataatagaggtgccctggtccccaaagaaattgactcccgaattccctccaagccttacccatatagcttttgtttgtttgtttgttttcagacaaggtcttgttctgtccagtgccgtggcgtgaccacagctcatgacaactttgatttccccggcccaagcgagcctctcattcagcctcctgagtggctgggaccacagacgccacacacagctaatttttatgtattcgtttttatttttttgcagagacagggtctccctatgttgcccaagctggtcttgaactcctgggctcaagtgatcctcctgcttcagcctcccaaagtgctaggattatagccaccgcacctcgtcttgaaatagccttttaaatgttcacctcagcttgcctcacagtgggtctgttcctggtttcccagatgcataaaggaagacatatccctcccctgggcagcaaggctacaatgggagggagggagaacatgggagcatgtgaataaaatggcattaaatactgaaaaaaaaaaaaaaaaaa

SEQ ID NO: 282272 - DNA, 1000 bp, Homo Sapiens
accctgtcagaaaccagcactgggggccctgccacccccacatggaaggagtgtcctatctgtaaggagcgctttcctgctgagagtgacaaggatgccctggaggaccacatggatggacacttctttttcagcacccaggaccccttcacctttgagtgatcttactccctcgtacatgcacaaatacacactcatgcacacacacactcacacacatgcatacacttaggtttcatgcccattttctatcacactgggctccatgatattctgttccctaagaactgcttctgtgtgccctgttttcatcccaagatttctcacttcatcctctcctacctggctcttttgtcccagggaaggggtgcctgttcggaagcagtggctgaatttatcccctgaaagtggttttggaggaaccgggatggaggaggccttcccctgtgggaatagaatcgtccactcctagccctggttgcttctgatacacagccactgcacacacacactcacactcacactcccttgtctgatgccccaaagccaattcctggggcaccctaccctctcttatttggagtttccgttggtttacctgagttttctctggggtctgcacagaggcagcagcatggacatcatggcctctcaggtcccttttggttctcagtttcattggttcctctttctgttcccccattgacttctgtgccccaccctagccttttccataaccttaggtattcagtttggaggggttttttgtatttttgaggattcctgtattctgtatcctctcctcgcatctcctcacatggaaagaaataatgtatttgtgccttctgtgaggaatggggggaacaagtggtcccaggtatccccatttccaaggcccccctccctctccaggtccccccacagcaataaaagcttccccctgatatccccaaaaaaaaaaaaaaaaaaaaaaaaaaaaaaaaaaaaaaaaaaaaaaaaa

SEQ ID NO: 282273 - DNA, 1000 bp, Homo Sapiens
ggccttttggggccaggcttcatcagcctttctcttcaggtgtgaccaccactccatggtctttggcccggccccagggatcctgctctctggagggggtagagatcaaaggcggctccttccgacttctccaagagggccaggcactggagtacgtgtgtccttctggcttctacccgtaccctgtgcagacacgtacctgcagatctacggggtcctggagcaccctgaagactcaagaccaaaagactgtcaggaaggcagagtgcagaggtttgagggcaatgagtgtgggcagtggcctaaggcagaaacagggcaggcggcagcaaggtcaggactaggatgagactaggcagggtgacaaggtgggctgaccgggagtaggagcagttttagggtggcaggcggaaagggggcaagaaaaagcggagttaacccttactaagcatttaccctgggcttccaggcagccctggaagtcaagagaacactcagaaatggggagggagaagcagtggaaatccatatgggttgaggagtaggtaagatgctgcttctgcgggactgggaatgcgctgtttctcagtgacatggtctccgagaccaggagggatacacctaaggcagcctttccctcttgatgacttctacttgtccccccttctcaaagcaatccactgtccaagaccacacgacttcgagaacggggaatactggccccggtctccctactacaatgtgagtgatgagatctctttccactgctatgacggttacactctccggggctctgccaatcgcacctgccaagtgaatggccggtggagtgggcagacagcgatctgtgacaacggaggtgagaagcatcccctccccctacattgctgtctccctgacggcgcccagcccgaggagtgggcactcggctccggacactgtaactcttgctctctaccttgctcacggggcctcaggcttcagtgcttacctcgatgtc

SEQ ID NO: 282274 - DNA, 1000 bp, Homo Sapiens
aatgatgtccaaaggtccctgccaaccctgccatctgagtgataaggacatttcagggccttcctcctgtttgcctgggctgtgagtttggtgccaccttgtggtgtgaggaagtagtggtcagccagcctagttcagtactcaggctatggggcagctgcccaggtgcaaacctgcctggcttggcttttactcaccaacctcccttctcttcctccaggcaaggcccgaggcttcttcaagaagggagatgtggtcattgtgctgaccggatggcgccctggctccggcttcaccaacaccatgcgtgttgttcctgtgccgtgatggaccccagagcccctcctccagcccctgtcccacccccttcccccagcccatccattaggccagcaacgcttgtagaactcactctgggctgtaacgtggcactggtaggttgggacaccagggaagaagatcaacgcctcactgaaacatggctgtgtttgcagcctgctctagtgggacagcccagagcctggctgcccatcatgtggccccacccaatcaagggaagaaggaggaatgctggactggaggcccctggagccagatggcaagagggtgacagcttcctttcctgtgtgtactctgtccagttcctttagaaaaaatggatgcccagaggactcccaaccctggcttggggtcaagaaacagccagcaagagttaggggccttagggcactgggctgttgttccattgaagccgactctggccctggcccttacttgcttctctagctctctaggcctctccagtttgcacctgtccccaccctccactcagctgtcctgcagcaaacactccaccctccaccttccattttcccccactactgcagcacctccaggcctgttgctatagagcctacctgtatgtcaataaacaacagctgaagcacctgtttcctctcttttctgctggggagggggaggtggttgaaccctgccctct

SEQ ID NO: 282275 - DNA, 300 bp, Homo Sapiens
ttcttgctgaatgaatgcccagtttttcaagattcttgcttaatatgatatggttcccaaggactagtgactcaggtgttgcttttaatatttaaactgtatttatttcttaaaggtgatgttggaccaaatggacaacctggaccaatgggacctcctgggctgccaggaataggtgttcagggaccaccaggaccaccagggattcctgggccaataggtcaacctggtaagattagagtaaatgtgcattttgtagcactcataatatatacatttgttagctcatcaataaagtga

SEQ ID NO: 282276 - DNA, 1000 bp, Homo Sapiens
caaattggcctaattattcaaatttatggaaggatttcttaactgtccttttcctataatgcacattaaacctcgggtgaggatctgggggagggacttactttcctttcagtggctcttactcttaccctgggggaaaagaaacctttaaacaaccttagactactgcctctttattgtgttactcactttctaattataggacaagtctaaaatttgtagtcaagtaacatatcccctttgattagtatcataaaagtagcaagcctgtcactttaattttcagcaaaattatatggatatccatataatataatttcagagaagaaatgaacaatcatttatttcctctcgaaagataaattgagtgaatataacttacggttataaaacaagaataatagcttcttagattgccctttaatcaatcatacacttatttttcaagaggttcatctattttattccatgattaataatgttgcagcatgagagcattattggatcccagcgggggaggtctgggatgcttttagctgctttggaatggtcagttggggttcattatgggctgatattgaacaatttataaaatcttgtctaaacatctgccagctccgataggccaatgtgtctgaggatgggaaattgctggaccagttgatattgacaaacggatctctctctagtggctttttttgccatagaaattagtggcctcttgctggggtcttgttagaaagggtatttgaaagtaatcttagatacttgaggccaagccaggggactgttaactggacacagagccataccgatggggagaagtgattgtggtttgactgtggagaaggggggcagaaccaggtttctgttttctgttatttcttatgtattttgttagttttaaatattgaagcatttggaggtcagacataaagtaaatctctgtggtggagaactgtttttctgtcttctctgcctctcctagtaatagatatga

SEQ ID NO: 282277 - DNA, 1000 bp, Homo Sapiens
ttacaggcatgagccaccaccaccagccaaggaacggatttttttgttgttgacaatggctcgacccacaacgaaatcccactgtctcagcccacacaagcccacaatcctggcatctaaatacgtcaacagagaaaccgacaaacagaacagagggggatggcgctgctctcagcctgacattaaacagattaaaaatctaaatatggttcaaaggcctcgcagctccacatccaactatccctcaagtactcacaaagaaggacaaaaataatccatgtttcagcctcggcagaggagctctgcgtcctccaaacagtagctaccgtttaagccaaagctgagttttggcactggagatctagaaatcaagaaaggacctccaacttggaactcagaaacctctgaagcaacctgacctgaagaggaaattaggaaaaaaaaaaaaaaaaaaaaaaaggaacaaatgtcagtaatatgagaaaaacatgcattatggaaaccaatgggatggggttcacggggtggaaccctcaacaccacactgatggaacagaagagggcagaagtcagcaaaaggggcctgtgatctgaaagtcaccaaaaactttagaaagagaagaaatgccgataaagaggaaaattgatcaattgatcaatatcgatttgccaatgaagcagattctccagaagaaaaatcaacgagagagagaaaatgcacagggcagccgagtcaagaacaaagaaaccacctaaaagttggcgcattgaggaccgcggcgccctcagcctccctgcgcaggtggaaagacaggcgcctccaaacgttatcaaagagccgaacggggccaggcgcagagggtcaggcctggaatcccagcacttttggcacgggtggacagacaggcgcctacaaacattatcaaacagccaaatgaggccgggctcggtggctcatgcctgtaatcccagcactttgggaggccgaggcgggaggatc

SEQ ID NO: 282278 - DNA, 1000 bp, Homo Sapiens
tgttttgcccaggctggtctcaaattcctgaactcaagtaatccacctgcctcggcctcccaaactgctgggattacaggcatgagccactgagcctggcctgttctatatttctttttaccctcatttcctaagacagttcttgatcatgctatacatttcatgtatacttctcaaattgtacaaagcttgggaccattgactagagcaatgcccagggaagcatttccagtggtaaaagatttgggaaaatccacccttccccagattccacctcttgaaaagagctacctaaaatgttgtctggacagtgccctcatcatgagaacttccaagaattaacacatctagaatgcatctgacaagctcagatctggtgtgttgtgtctcttccctttaattaaaaaaaaaattgtcacctaaatagtttcttctaaaaactgtctctaaatgactgtgttttaccctggataagttctcaccaatgcatcccgacactgcagcattaaaaggaagataaacacttgaaatcaaatggtgatggctaacaatgaaatttgagctcacgaactcaaggatattattcaaaactgtgagaaaaattagcctcattcattctgatagggctagataggttctatggctgtgtgtgccttctttaattaacatgcagaaaagatgttctgattggcattattaatgaatacagtggaaatgtttgctgcttagaagacttctgccacagatggtttacaaaccccaccctggcctttttctttttccacagatttcttacatggcttgacagctcgtaagccatcttgaagctgtttccacagaagatagcaaaagcatacagggcttcaatgctatttggttgaacaatggacagtcctggaactaagtgtggggttggcagccctgcttttgtttagacaattgttgtatccccctcctcaatctgaccttcgggttgttgctcagttgtggctttcttctg

SEQ ID NO: 282279 - DNA, 1000 bp, Homo Sapiens
agtcacctgttaagaactagaaataacctatcttgtgccacttcaagagtattaagacataggcctagaaacgtagacagaggttagatcctagactgccttgtatttttctctttcctgttgattaccaacctcaaaattgaagttgaatatgtttttcctcctgcctaacacaaaactccttaagggcaaaaatttaaattattctttgctgcatgtgcaaacaagattgagtatattcatgcctaccttattttggactagcaatacaacactatactttctgaagacttgcctgaatagtatacagggtgaaggcaactgactatttaggtcagtatttttagaagctcttaatagctcatactacattgatgccaaaagcagcactgattgttaaagcacacacctgcacaagaagcaaaaagggttgcatttatacatcctgggtgcacaaaaaaaaattccaaaaagcaaggacttttgcactttgtaaagcctttgagaagttagtggatcataggaagcttataacaagactggaagattcttaagtatctcactttctttggtatccagtaacagtagatgttcaaaatatgtagttgattagtggcagcattgtgaatgctgcacacccttgtgattattatgaagtaagtcactactagtttcagaaaagtagcttcataattatttatgcactgccttccatgaattctactttgccctgaactaatccccaaaatctgaaatgctactgcaatatcagaaaaaaatggggaggtggaaatatatttcctgcgattttaatagtagagagaatcattcacatttctggttagttcatatgtctagtatgtaataaaagtcaagatgaactctcaataaataaataaataaataaataaataaataaataaataaaaggtttttaataatttctacagttttatgttcagctggcagttaaatccaatttaatttccctctagcacac

SEQ ID NO: 282280 - DNA, 1000 bp, Homo Sapiens
ataatgctgagcgtccagaatttattggaagccgagtggatctttttctagttgtctttattcccttttctagcttgtttctttctctttattcttcttgtaagcttgatgtctttttccttggcacagggtaactaaggaagtggatgctacatctaaagaggccaaatccttcttcaagcagaatgagaaagaaaaaccacaggctaatgttccttcagctctgccatcactccctgccgggtcagggtgagtatttgagtctcactccctgatgtacttggcacgttggagaagctttcagtgcaaatacctactttcgctgcagatcagactccttgcctgagagagagaattatgatgctgctttgcctttgctgcaatatttaccagaatggaagatgcaaaggaaaattagccataactttctcaggaggattgcttgaacccaggagtttgtgaccagcctgggcaatacagtaagaccctgtctcttaaaaaaaaaaaaattagctgggcatggtggcttgcacctctgtcctagctactgtggaggctgaggcaggaggatcccttgagcccagaaggttgaggctgcagtgagccgtgattgtgccactgcactccagcctgggtgacagagagatcctgtctcttaaaaaaaaaaaaaaaaaaaaagcgaagaaaattagttgtagctttcttatttgttgccagcctaaaagaagtcctagtttatagtattgaacacaaagctgaatgtgtaaattttacatttaaaaataatacttttcaaatgaaaatatcagccttctgcagaacttttcatgaagatttgcgatgaacactcactcccatcctctgtgatcttagaggaacataaaaagatcaaagatgatttacaaatagttttcttaacacattgtcaggaacttaatggttttcctcccttcatatttttcatattacttgagttatttttagctgaaggctagaattc

SEQ ID NO: 282281 - DNA, 1000 bp, Homo Sapiens
tattgacaaaattaactttgtgcagagaaaaaagcatttgatctggatgtctaggaattcatgagagtatacccttaatgaattaagaactaattaatgcatttgctttcctgacacttttatttataattttaaaacatagaaaaaattcagaagattgatacaataaacactcatatatcatccatagagatggaacaatattattatagtggcaccctagaaaacatctctctctatatacacagatttacacatacaaaacattggtagtcagtggcagatatcatggcacttccatcttttttttttttttgcagcagagtttcgctcttgttgcccaggctggagtgcaatggcccgatctcagctcactgcaacctccgcctcccgggttcaagcgattctcctgcctcagcctcctgagtagctgggattacaggcgtgtgccaccacacctggctaattttgtatttttagtagagacagggtttctccatgttcgtcaggctggtgtcaaactcctgacctcaggtgatccacccacctcggcctccccaagtgctgggattacaggtgtgagccaccgtgcccggccagcacttctgtcttaaataattcttcaacaaattctaagaataagaatgttctttatataaccatgatactattattacacccaaaggaataaataatttcacaataacttttaatatgtaatgcatagtcaaattatcccgcttgactccaaaatatcttttatactatatatttgaactagagtttccaccaaaactgatattgaatttgattgtttttctggttttgtgtcttaatctagagtagctactggccacttttttcatgataatgactttagaagagtctaggtcaattttcttgttgaatgtctcatgttctggatttgccagtttgtttcctcatcatgtcacttaacttcttctgtccctcatatttcatgtagattgaaggttagatc

SEQ ID NO: 282282 - DNA, 1000 bp, Homo Sapiens
gagaaggtaagaaagtgttctctctcccctagagagagtgtgtgttcttttaggctactagaggtgtgctaatttattccagcaatcatagaaaacttatatagataaggtctcactgagaagataacatttgaacaaagattccaaggaggtgagggcaccagctatgcagatatctggggaagagcactcgaggaagaaaaggcaggcaaacagcagggtgcctagcctatgtgcatgaagtagagaacactgggagtcagaaggctaacagaagacaagtcagagagagggactggggtgggtcaactcacactcagcctcactggctattgtaagaacttcgagttattctgagacactcagtataggaaagtctatgaatatttatagaaattctgaacgtttacaagatgaataaaagttgtatgctagcaaacctattggttgggtggggggaagcccagatttgtagcatttgctgatttacattgtgtaaatatttctactgatggtttgacaaacacttcataaaatttctgggtacttaattatcagctccagtagagcgctgcatgtatgacaccacatttgccaattccacactagattctattgggaacaagctgtatgagagtcaactggtggcagaaataaggaagtcctcaataaaaatcagcatttacttttgacagatgtgaaatcctggaacttatttctctttacttgctctgcctggtgattaaattatgattttaaaagaaatagttttaatttcttattagaatgctgccaccaaataaataaaatacgtactttaactatatgcaatcttttctatattatactgttgtcaacagaaacattatcatgggccaacttcatgaaaggagatatgtgatagaagatggagttgttggaatggaaaaaaaaagtcaaattttactttggattaatcagagggaagaaagcaaacagacaggaaaggaaaggcaagctt

SEQ ID NO: 282283 - DNA, 1000 bp, Homo Sapiens; identical to SEQ ID NO: 207082

SEQ ID NO: 282284 - DNA, 1000 bp, Homo Sapiens
tattcgcctacacaattctccgatccgtccctaacaaactaggaggcgtccttgccctattactatccatcctcatcctagcaataatccccatcctccatatatccaaacaacaaagcataatatttcgcccactaagccaatcactttattgactcctagccgcagacctcctcattctaacctgaatcggaggacaaccagtaagctacccttttaccatcattggacaagtagcatccgtactatacttcacaacaatcctaatcctaataccaactatctccctaattgaaaacaaaatactcaaatgggcctgtccttgtagtataaactaatacaccagtcttgtaaaccggagatgaaaacctttttccaaggacaaatcagagaaaaagtctttaactccaccattagcacccaaagctaagattctaatttaaactattctctgttctttcatggggaagcagatttgggtaccacccaagtattgactcacccatcaacaaccgctatgtatttcgtacattactgccagccaccatgaatattgtacggtaccataaatacttgaccacctgtagtacataaaaacccaacccacatcaaaaccccccccccatgcttacaagcaagtacagcaatcgaccctcaactatcacacattaactgcaactccaaagccacccctcacccactaggatatcaacaaacctacccacccttaacagtacatagtacataaagccatttaccgtacatagcacattacagtcaaatcccttctcgtccccatggatgacccccctcagataggggtcccttgaccaccatcctccgtgaaatcaatatcccgcacaagagtgctactctcctcgctccgggcccataacacttgggggtagctaaagtgaactgtatccgacatctggttcctacttcagggtcataaagcctaaatagcccacacgttccccttaaataagacatcacgatg

SEQ ID NO: 282285 - DNA, 1000 bp, Homo Sapiens; identical to SEQ ID NO: 114882

SEQ ID NO: 282286 - DNA, 1000 bp, Homo Sapiens
caagtggggccaggacaattccatattcacatgctaaagaatgaagttgaatccccacctcacaccatatacaaaaatcaactcaacatggatgatagacctaaatggaagagcttaaactataaaactcttaggaaaaaatgcagaggaataaatcttaatgatcttgaattaggcaatggattcttttgaggttcctttccaggtgattaaaatattctaaaattaaaatgttaaaaatgttctaaaataaaataaaaatgtttaaaaatgttctaaaatgtggatgattggtgatgatgatgtcccttatacaaaggggaaatttggacacagagacagacccatatagaggggagatgatgtgaagaagagacacagggagaaggcggccgtctgcaagccaaggagcgagacctcggaagtaacacatcctggctgggtgtggtggctcatgcctgtaatcccagccctttgggagaccgaggcgggtggatcacctgaggtaaggagtttgaaaccagcttggccaacatggagaaaccccatctctactaaaaaaaaatacaaaaaattagccaggtgtgggtagtggcaggcacctgtaatcccagctactcaggaggctgaggcaggagaatcgcttgatcctgggaggcggaggtcgcagtgagcggagatcatgttattgcactccagcctgggcagcaacagtgaaactccatctccaaaaaaaaattgtttttgccatgttggccaggctggtcttgaacttctgacctcaggtgatccacccacctgggcctctcaaagtgctgggattataggcatgagccaccacgcctgcccaggattggttacttctgagacctcactccttggcttgcagatgggccgccttctccttgtatctcttcttcacatcatttcccctatatgtgggtctgtctctgtgtccagatttcccctttttataaggacacccatcataaggtggatc

SEQ ID NO: 282287 - DNA, 1000 bp, Homo Sapiens; identical to SEQ ID NO: 206287

SEQ ID NO: 282288 - DNA, 1000 bp, Homo Sapiens
taaagcccgctccgtacctttctcaggccagacacaaggtcagccatgagaaaacagaaaaacaaggagaagagagtctgtagagacaaattgggagggttcaggaggagaatttgggatttgcttgtgcccatgggacacaggctgggaataaaaatgttttcctgactcttctctgaaagccagagagactccacctaaaactctattgccaagcatgctgggatccacttaccagagactttgactgtcatggatttggagctttccatgccagtggctgagttacgaacagagcaagcatagagcccgctatgctttgtagtaatctgggggataaagagcttttgtcctgatagctgaaacttcccattaattgtccaagaatattctgctggtgggttagagtccgcgaagcaggacaagtagaggttttctcctgaatggtaataggtgaatgaagggtaaattctggggaggtctggaccatctggagcaaagagaataaagccacaggtgatgtcatccgagggaaggggatgctcctggtctcttaaagggacacagtgaccctctgagccaagacacaccctcaagtgccagccaaaccccctctatgttcactgagctgaagcctgaggtattcccctgtttctcccatcacaagctgtgggccccaagtctcccatgacaagagcgtcccctccccttatattcttggttaaggctgtgcctacccagatcttcccagggcaggaagttatggccagctcggatgtccagaagtaatggtatctatacttggaccagagagagagtgagaggcctggcctctggtcgttttgatttaagctggtgtcctggcccacagaggaacaaaagatactcacagaggacattcagggtgactgggtaactgcggatgccaccatatcggtcctgtatttcacattgatagggtcctgtttcatttctcgtgacactgggtagaatgaggatc

SEQ ID NO: 282289 - DNA, 1000 bp, Homo Sapiens
gaaaaatatgttaaaattgaaaactttcttgtattttgtaaactactgaggttccaattcagggtgctttttttatatttataaggtccatctctacagcatgtaatatcatgggtctttgagtgaatatcaactaaaggcattctgacattctgtacattcataggttttacctcagaaatgagttttttcttgtcttcaggtggaactggaacgagtaaaacactaccatatgtttgtatttataaggcttttcttcattgaacccttttatgttttcaaagagaaatgacaaaaaccgaaggctttaccatgtttcttaaaattttgtggtttttctccattttaaatcctaaaatgtctttaaaagcaagtgggaaaatcaagtttattatcacatgttttacatttatgcttttcccccagtatgagtttttctaagttttcaaagagaactgagaaaattccaggctttcccatatttattacataatagggtttctctctagtgtgtgctttttcatgtgttcttaaagaactagaacttataattgctttatcacatttcttacatcagaataatgtttttgaagatagcccagtggactaacattgtcccatgttggttttcttgtgtttctcctcccacaggaatgagcttgaaagacagtttttgcagctaattgactataacgtcgaagtttctggaagtgtttatgccaagtactattttgatcttcgatccttggcaaaggacaatagcttgcattttccagtttatcttctcaacaaagaaagggcacagaacctggaagtaaggcgataaagtcactaaggggggttttctgtcaaccaccaaagccaacatctgtgactagattagattaagtagtgatgagaaaaatgaaaagctccaaaattaacttacatactgaagagcttatttcctgtatcatttatggtttatacaagaatccacattatttaaatattatagatc

SEQ ID NO: 282290 - DNA, 1000 bp, Homo Sapiens
gcgtcaggataaaatccaaacgccatcggccttgcgcggttttcttccagttccagagtgtcagtcctctggccgatctaaaagccctggggctccaagctgcccacggctgtggagcctgggctggagcccacagcggacggcagtgttaggattattataataaatgtcagagcaagaaaaacgttcccgccggttaggttttgttatttcaaaaataaattaaccgcctttcctccggcggagacgcgcaggtgagagggcggcgcctgacccagcgggctctaggtgctacgccagggccccgaggtcccgaactcggcttgcccacacaaaacatggtagcaggagagcagcatttccgccgggcatgtccatatccaatggggcccatgggagaggcgtagtcttctgggtcttgcccagactcaacatggcggctacacgtcgcctgtcagtctgtgaagcctaccccgggcgtgggccgcagcgtcgagtaacgtcattcgaaccccgtcgcgcccctttgtgcgtcacgggtggcgggcgcgggaaggggatttggattgttgcgcctctgctctgaagaaagtgctgtctggctccaactccagttctttcccctgagcagcgcctggaacctaacccttcccactctgtcaccttctcgatcccggccggcgctttagagccgcagtccagtcttggatccttcagagcctcagccactagctgcgatgcatgtgatcaagcgaggtgagggggggacgaggagggcgagaaggaaggtgaggggatgcgcgtgccgccgccggagctgatgccccagcccgcccgccgccttcgctgcttcccgcctttcccgcatttcccgccgggccttccgccctgtcagcccgctcggccttctgtcttcagtcagcctgccccgaactcttcggccttaggctgcgcccctcggctttgtcatcctgccgccttcaaaggataacacttaccc

SEQ ID NO: 282291 - DNA, 1000 bp, Homo Sapiens
caagcaacacaaatgagaaatgctatatattgaaatagattggcattagattatcacttagcctctgaaggaagagtatgtggaaaatttaatttaaccaactgttgcctagaaattgctaataatggccgggttgtcatggaaatcagagctagaatgcacaagttggcccatgttccaattcagacttggtcctaatggtccctggattctttgtttggaggatggttctcaacctttggaggattcaaaaccctcactggtgggtttttgtttattcttggcatctgcctcatcctcccttaccttttacccctgtttattaggaggattcagtcaactatagaggcagtaataactcaacacactaccgcacagttgatggcattaaccaaatatcagccactgccagtagaagaagctcagctctgtgaagaggtggcaaatagtggtgctttctattaacacctttgttataaaaagcagcaaagggggaaatggaacaggaattaaaagaaattaaagaatgcataagcaaaaactcaattgtatgtagggaaacccaattcctcctgaggaagagaaagaggtggagtcctttaaaaattcactgcctgtttttccgtctgtagctagtgagccttatctctccctttcccaggcattgtgaagaccctgtttctccagctgtgcagctgcatggtcactagacagataaactcaagttgtaaaacatgtttttccttgaaaagtaagaaatgatgtaatacatgtctcaactgaataactgtctttgtttctcacttctgtagtaagcttccccctgcacagatctcccctctcaccccatgaaatgcttaaaaggtaacctgactctttgttcagggctcagtcctttggatgttaatctgactgggctggtgcacctaaataataaatacatcctcctcaaaaaaaaaaaaaaaaaaaaaaaaaaaaaaaaaaaaaaaaaaaaaaaaaa

SEQ ID NO: 282292 - DNA, 562 bp, Homo Sapiens
tccctcctcgggtccttgatttccccagaaattcccagggaacctctcccgccccacagctcgtgtcagaggactctgagacttcactcttcaggaacccttttccagccgttatttttgttttctttaccggcctttcacctccccccccaccaagacgtacccttttctccgcaacacaggactgttctctgcccttacagagcctgttttaattccgagactttctcctgtcttcttatttgagagtcaaggagtacagggcttctctgtgcagacccgatctaacctaaaggctgtcctgcttctgctctcaagacttggcaagatgacccagttcctgccgcccaaccttctggccctctttgccccccgtgaccctattccatacctgccacccctggagaaactgccacatgaaaaacaccacaatcaaccttattgtggcattgcgccgtacattcgagagtttgaggtgagttcactgagcaggccaggaatggtttgggttctggggagcaacgggttggatttgcgagtccagcttctggcaattttgcca

SEQ ID NO: 282293 - DNA, 921 bp, Homo Sapiens
  misc_feature (128)..(128): n is a, c, g, or t
  misc_feature (161)..(161): n is a, c, g, or t
  misc_feature (166)..(166): n is a, c, g, or t
  misc_feature (225)..(225): n is a, c, g, or t
  misc_feature (364)..(364): n is a, c, g, or t
tgggagtgtataacccgcctctctgctccctgctagagtttcctagtgaagatttctcccacccccttctggttcattttctgttctgatgtctgttccccccacactcacccccctccaaaaaaaanaaaaatagaaaaaaccggtgtggtctggggtgnggagngtcccagctggcctcctgccccggcttggtgtctcagggtgcatgcttggggttgtggnggagccccctcccccacagcagagtccagcgtggagttaaccttcagtttctttgcagcgattttggccgccctgggcagggggctgttccatcatgtgggagaggaagggccggggagcctagggggtggcgggtganggtggacgtctcccccgaccaggagtggttggggcgctgagaggaagcagacgctgagatggagcaggcccttcaccggtttgggagagggttggtctggctgtcagttgcctggctgtctgttgggcgtgtgcgtgtgcgtgatgatgggacacgggcggattctgtagagctgggcctgtcctgactagaggacctctggactcctctccctcccctcccacatctgttacagccgcttacaaacacgcagatggcaagaagattgatggcaggagggtccttgtggacgtggagaggggccgaaccgtgaagggctggaggccccggcggctaggtgagcacatcctgccttcgacgggctctcggggccctggcctggtggccttgttctcccttctctgctgctttctgcttctctgtctctgccggcccacctctcccatcgcgtcctcatctccggcttctctctcttgtggccatcacatttctgacagctgcctgcctcctcgttctgggttactgtgaggagcaggggcaccagcctggagaggcct

SEQ ID NO: 282294 - DNA, 309 bp, Homo Sapiens
gatccttcacgcctccatgaatctggcttctctcttttacctgctgcacatcccaagtgtctgtgaggcgatagggctgaggaatctgcagagcctagagcctggagtcacagtgacaattcacacaggtacacaacactgttcatttgtctaacgcacacacacgtacacaaccctgttcattcatcacacacacacacacacacacacacacacacacacacacacacacagtctctcacaggcacacagaaactcctcctctgctgctcaagcagacaggcctgaaattctactgaaactccaggg

SEQ ID NO: 282295 - DNA, 1000 bp, Homo Sapiens
gtcagatcacccagaatattccccagaggaggaaaaacaggcttcggatcttcaggccagtaaaaatcaggaaggaggagtaaaactggcccagcttctaaggagccgtttcaagatccccaaccttcaggacttagttaaccaagcagctctctggtgtacggtttgtgcccaggtaaacactaagcaaggtcctaaacccagctcaggcgaccgcctccagggagactcaccaggagaaaggtgggaaattacagaaataaaaccacactgggcagggtacaaataccttctggtactagtagacaccttttctggatagactgaggcatttgccaccaaaaacgagactgccaccacggtagttaagttttcactcaatgaaatcatccctcaacatgggctgcctactgccatggggtctgataatagatcggccttcacctcgtccatagctcagtcagtcagtaaggcattaaacattcaatggaagctccgttgtgcctatcgaccccagagctctggatgggtagaacacatgaatcacaccctaaaaaatactgttacaaaattgatcttagagaccggtaaaaatcaggtaagactccttcctttaacccttcttaaagtaagatgcattccttaccgggctgggttttcaccttttgaaatcacgtataggaggcgtccgcctatcttgcctaagctaaaggatacccgtttagcagaaatctcagaagctaatttattacagtacctacagtctctccaacaggtacgagatatcatccagccacttgtctggggagctcatcccagtccagttcctgaccagacggggccctgccactcgttcccaccaggtgacctggtgttaaaaagttccaggttaaagtttaaaaaaaaaaaaaagttccagaaagaaggactcactcctgcttagaaaggacctcatactgtcatcctcaccatgccgacagctctggaagtgcacttaccc

SEQ ID NO: 282296 - DNA, 544 bp, Homo Sapiens
gaagtacctgggattacaggcacgtgccgccatgcccagttaatttttggatttttattagagacagggtttcagcatgttggccaggatggtcttgatctcctgacctcatgatctgcccacctcggcctcccaaagtgttgggattacaggcgtgagccaccgtgcccggcctgtttttgtttttaagagacagggtcttgctttgtcacccaggctggagtgcagtggtacaaacgtaattcactgcaatctcaacctcctgggctcaagggctcctctcgttttagcctctcaagtatctgggactaaaggcgtgtgctaccattcctggctaatttttttttttaatagagatggtgtctcgctatgttgcccagtctggtcttgaacctctgggctcaagtgatctgcccaccttggctccccaaagtgttgggattacaggcatgaaccactgcacccagccatgtttttattttatctgagagaaaactgaggttcataacttaactgcatacttctggaatcttcacagagaaat

SEQ ID NO: 282297 - DNA, 625 bp, Homo Sapiens
aatttctcttgccagtgactttaaactaaagaacttaattaaagaacattgttcccataggttaaatttttattcttatttaaacatatttttcttaacttttgtgggtacatagtgtgtgtatatatttatgccatatatggcatattttgatacaggcatatgaataggtattaatcacatcagggcaaatgaaatatccatcaactccagcatttatcatttgtattacaaaccgattctacacttttagttactttaaaatgtacaagtaaattgctattgactatagggtcattttcatgggtataataaaaattatatacaagtataaataaaatcctgagtcttaaaattctgagtcctgcttaaacattttaaaaattttgttatgtatttttctttgaacatgtctctctgcctgcaaacataacagaattttagtattggtttacatagagttaactatacccatatattactctaaaaataaatgttaagtgcaagaaagttatggactgtttttgtgtgagtgtgagtttgtacctattttcaaaagaaaagagcaatattggaacaaaacaaatattttaataaattaatgtactagacaactgaaaacttc

SEQ ID NO: 282298 - DNA, 571 bp, Homo Sapiens
ctgcttttttttttttttttttttagacagagtcttgctctgtctcccaggctggagtgcagtggaataatctcaggtcactgcaacctccgcctcccgggttgttcaagtgattctcctgcctcagcctcctgggtagctgggatcacaggtgtccgccaccatgccaggctaattttgtatttttagcagagatggggtttcaccatgttggccaggctgatctcgaactcctgacctcaggtgatcacctgcctcagcctcccaaagtgctgggattacaggcgcgagccactgcgcctggccgatcttttgagtttctgttcattcattcatcttaacaccatagtgttagggcattctttattttaaacagattatagactggagctaagcttaaattagaagtcacagcatagcccagagataaatagatcaggtacccagataacaggcaaccaaaataaattcacatggttgagccattattttctctaatctcctcagatgaaaccatacttgagatactcagaacatactacactatactcaactggggacatcaagcaat

SEQ ID NO: 282299 - DNA, 666 bp, Homo Sapiens; identical to SEQ ID NO: 58279

SEQ ID NO: 282300 - DNA, 670 bp, Homo Sapiens
ctgtttttttgcatccgtccatcaggatactcttagcaatgcttgagcatacttggtagccgactccaagcagtgcaagaaagtgcagtcacttttattttatcctggagttatctgccttagtcctcatccctatggaagtctcttccctggctgtgaactgcctcatttgattccctggatttttagtctctgttgctgcccccaggctacacatcagatgagtgcccttgaccttgaaggatgggaagaccacagcagttgagcttcaatgacccccattgccacttcactctccaagctggccattgcttttcataaagcaccgcaaaacttagtgtctttaaaaacaacactaaatcacattgttctcaaatcgagcgttcttagggttcaggtcatcagctcaccccagggaaatgttggacaactgagtctgcagccatctgtacaatgatgaaaccaaggttgagcatcttgggaggagtgtggggtagaaaggtaaaacacagttcctggttggattaaggaaggcacacggtgacaggatttggcagcccactggggatgtctggccatgtctaaggtttggaagatgacaattcttttttttttttttatagtattttattttattttattaatgattttagtaacttctttttttaaa

SEQ ID NO: 282301 - DNA, 545 bp, Homo Sapiens
tttttttttttttttttttttgacacggagtttcactcttgttccctaggctggaatgcaatggcaccatctcggctcaccacaacctccgcctcctgagttaaagtgattctcctgcctcagcctcccaagtagctgggattacaggcatgcaccaccacgcccggctaattttgtatttttagtagagatggggtttctccatgttggtcaggctggtcttgaactcccgacctcaggtgatccacctgccttggcctcccaaagtgctgggattataggcgtgagccacctcgcccggcccccagactacattattaccaatctaaatcttcccatgaaataggtgataatctcaccttttgcagatgagacaaaaacttttagcctaataattttagcaatagtttagtagtcaagaccaattctaaaatttatattacctacacatttctatcaaaggccaaaagctaattagttaacaaatacattaatcatagttttaaatttgtttaattaccaagtagctgtaaaaggctcagcct

SEQ ID NO: 282302 - DNA, 619 bp, Homo Sapiens
gagagagctagcaccatgagcttcaataccctggggtcgggggcggaggcggaggttgcagtgggccgagatcacgccattttctgggcgagagagcgagactccgtctcaaaaaaaaaaaaaaaaaccatgaaagaaataagctcagtgaaggcgggcattctgcctggctaacgcaggtcgctccttgccgtgcctggaacattactgtaagtgctcagcaaactactttaaggtaggaataaaatctgcaaggttgcttttgtttaaattggataaccttttgtgttccaagtctttggagtaattttgtgttccaagtctttggaataattgtgtccttaattattatactagtcactgttaaattttgaaactccagtgcgtcccatgaaggtaatgatacaaaacatttccagctgggattgttccagggaatccagactaatcaattatctgggctcattatatctatggatctttatttttcacctctttccttatgtttttcttaatccttctagctgatagtgatcactccctttaaaactgtcattcttaaaatcagaacaacatattttatcatttacttattattctcttcatgtgattgttctcc

SEQ ID NO: 282303 - DNA, 629 bp, Homo Sapiens
ataccctgtcctttgttgaaaactacaacatatttattactgacatttaggctcttctcccacctgctcccctcttgcaaacatttctgcaaaaagtctatttcagagactgaggaatcctcatttgcatctaatgctcccccgaccacactctgtggaggagtgctaggaaaggttagggcaggggagacatgactgaggaccacagagccaggtgagcacagagcttccgtcaggaatgcctcagcaggaagagaggtaaaggaatcagaggcctgctttagcactcagcaaagaactatccccgtgactggtgacaaagaaaacggtttttagtctgggactccagatccatggacacaaaccaagtccaaaaagtagtcaagtggctcctgaaccggtgagcatgcaatgacactcatcaaccagccagaaaccagaggcctggggcatttccaactcatctgggaaggctcaccttcctctcactgagcaccgctccagaataaagtgggtctaaagcacctgctggaataagtggcattgcctgtgagtctaataaataatagtacccaatagggagcaattgtcattagggtccattggaaagcctgactcaacccaagtat

SEQ ID NO: 282304 - DNA, 523 bp, Homo Sapiens
ggaaatgtatagtgttctgcttttctcctgattgggttatcttgcctctgctaagtttggtttgtcccgtctctatctcagtggccactggagagagggtgtctgctgttcttccctgattccacctgtaaatacaaacgttatctcttctccctggctttgctctgtgcatttgaggtgggaatgtactcggtttggcgaaatagtctttcatgtccctaaacctgaagcctctattgactgtaaatggtagagaaaaggaaagtacccccaaggtgtgaactctagttagggaaaaaaatatttttgggcttgacagtgactcttagttaactcaattactggaataatagagtcagaaatatttctttgtttttcagggaggtagaggcaggagcgtaagatgtggaagctagaaatatccacttgtaacacggtattagaaggaatgttattttacatggaagataatcctcagtgatccttttttttttttcttcaagacagagtgatactcagtctc

SEQ ID NO: 282305 - DNA, 452 bp, Homo Sapiens
agagagctagcaccatgagcttcaataccctgctattccccatctgcaatatcatcctctttaactgtgtgttcattttctgccttacacattaggctatacgctacacaagggcataagctgactgcctttcttgtccattgtcaccagtgagcaagcctcgcatggtgcctggcacatattataaacacattaagtactagataaataaataaagtaaatcttgactagcagagtaggctcaaaatatctgtagacagtgaaacaagaaacagaaaccaagccttgaaatcactgaagagtaaagagctgaacacctgtcagatttttctgggaatcaaggaaggcaacaagaataaatgagaaaatgtgtacatatagagaactaagatgctctaatatgccaagttcaaactggaatggccctagaatctgagtcatgccctagcagg

SEQ ID NO: 282306 - DNA, 616 bp, Homo Sapiens; identical to SEQ ID NO: 58142

SEQ ID NO: 282307 - DNA, 403 bp, Homo Sapiens
catttagtttaagcattttgagatgactatggttttataatgtgatgtgtgaaattaaatcaggaacatgcacatttgtgttttcataagaaggaaaaaaattgacacttttactatactcatacctaatttagggtataaaatgtggttcctgaaaatggaagttctatacaaatctgtgccatacgaggttattattgcatagtagctatggagatccatcatatttgaccaatcacttttctgttttacataaatcccctcatggagtgccctcagctagagttccctctagccacctttcatgggaattgttggttcatcctctgaggctgcagtagtaactttgatgttttctttttttttttttgagacagagtctcactctgtctcaaaaaaaaaa

SEQ ID NO: 282308 - DNA, 634 bp, Homo Sapiens
aaagaggtcagggtgtggcgatttttgccaatgactgcgatttccagaaggcacagcagaaggtttcccacagccttatgggaattactgtgcaggagaggaagggagcccagggtttcatatggtggctgacattctcaggggtaacagccataatgacattagtcctgaatgcctttaggcagaaagtggtgagaattctttgaataatattaggcagatcaggtggtggtcttgccagaagtgggcaaaaattctgaggatctcttttggcccctgataatgaatgcagtatcatgctagaaatctctgtatcggtattgtgcacagctgaattgttacctacttgtgtgtgccttgattttccagaaagactgtgaggtctcctatcactgtatcattgtgttttttgcattgtactttcttgctctacatgactatcatacgtgttatggattgaactgtctccactccccaaattcatatgcctcaatcctcagtacctcaccatgtgaccttatttgaagatagggttttttcaccttacttggagagaggataatcaagttaaagtgaggtcatgtgggtgggccctaatccaacatgactggtatccttatgtttaaaaaaaaaa

SEQ ID NO: 282309 - DNA, 1000 bp, Homo Sapiens
cgtacaattgttcagccagtttgtgcactgtactgaggatgaatgaacacctatcctaaatatcctagtcttctgactaaaaacaagatcatatttcataacgattattgttacattcatagtgtcccaggtgatttagaggataaataaaaatccattaaagaggtaaagacataaaaacgagaaacatggactggtttacacataacacatacaaagtctattataaaactagcatcagtatccttgaatgcaaacctttttctgagtatttaacaatcgcaccctttaaaaaatgtacaatagacattaagagacttaaacagatatataatcattttaaattaaaatagcgttaaacagtacctcaagctcaataagcattttaagtattctaatcttagtatttctctagctgacatgtaagaagcaatctatcttattgtatgcaattagctcattgtgtggataaaaaggtaaaaccattctgaaacaggaaaccaatacacttcctgtttaatcaacaaatctaaacatttattcttttcatctgtttactcttgctgttgtccaccacaatatgctattcacatgttcagtgtagttttatgacaaagaaaattttctgagttacttttgtatccccacccccttaaagaaaggaggaaaaactgtttcatacagaaggcgttaattgcatgaattagagctatcacctaagtgtgggctaatgtaacaaagagggatttcacctacatccattcagtcagtctttgggggtttaaagaaattccaaagagtcatcagaagaggaaaaatgaaggtaatgttttttcagacaggtaaagtctttgaaaatatgtgtaatatgtaaaacattttgacacccccataatatttttccagaattaacagtataaattgcatctcttgttcaagagttccctatcactctctttaatcactactcacagtaacctcaactcctgccacaatgtac

SEQ ID NO: 282310 - DNA, 211 bp, Homo Sapiens
aggattggtatctttgtaaggagagagagatttcgacacacacacacacacacacacacacacacacacacacactgcgatagacatgtgaagataggtgaagatacaggcagaaattaaaatgatgcggctacaagccaaggagtgtgaagacgcgtcaaccgccaccaccagcagctaagaggcacagagggttatttcccagaggttt

SEQ ID NO: 282311 - DNA, 1000 bp, Homo Sapiens
catttaatcaagaaaagatgtattgaaatattatttagaggaaatgcatataaatgaaatgtgtaggctatatttaagtagaagaataaaatagtatgatgattgaaaaataatttaaattgtagatgctgaatgataatttttatttattcaggaaccaatttaataattgtttaattgtctactctgtgtcaaatattattttgggccctgcattttataaactataattgtatataatatctactctgtaccaggccagaatataaatgtgtttacaggggtaaaaattttacagataatctgttatttttttttttctgtgcaggcttgattggcaaatacgacttctacatccatattctcatctttcataccatatcacactactaccactttttgaagaatcatcaaagagcaatgcaaatgaaaaacactataatttactgtatactctttgtttcaggatacttgccttttcaattgtcacttgatgatataattgcaatttaaactgttaagctgtgttcagtactgtttctgaataatagaaatcacttctctaaaagcaataaatttcaagcacatttttacatgtatgctccttatttttctcttttctatttataggaataatgatttctttcatcatcttctttcccagtttgactagcacagattgaagcccataatgtcagaggtccttatttataatttagtctgtcatattttatatgttacaaacatggtactcaaactcacttattattagagctatttatgccaagatttgatttgcccatggtttcctttgccacaccacagttgctaagcctccaaagcactcacattttttatctcagtccctgtaggtcagaagataaccaccatgtcactctacagcagtatgtaggcactctgcatgtaaaccatctaatgccctccattagtttttcagcaatgacttttattcaagaaatatttattgaatgaccccggc

SEQ ID NO: 282312 - DNA, 1000 bp, Homo Sapiens; identical to SEQ ID NO: 195527

SEQ ID NO: 282313 - DNA, 1000 bp, Homo Sapiens
aaattgcatccctatctttgtgtctcttctactattatttaccttaaacagttttaacttgactttaagtaaaactactttctaaagatttggctcaataaaaaggttataagttttatgaaaaaaaattaagttatagtgatagaggtaggaggcagccaaatgcctagacagatagagaagggtccccagtgaaacccaccttcaagtctaaaacaggctaaggactgaaagacgggaccgctggttttggatgaaacccgtgacccagaaggagaacttctgcctccgtttgcctgccctttcctgattgattctttctgaataatgcctttcaaccaatcaaatgttgccttttccgatactacctatggcttgcctgggcatgcccacctgtgttctaggagaatgggtggagccaccaggaattcacgtcttatgcaggggaggagcctgggcctcttcacctcctgtgcagcagccctggcattcaactgtgaagggaaaacctgcttggagagcccctgtctttgctgggagctttccttttgcttaataaattccaccctcctcacccttcaatgtgtctgtgtgactcatttttttctggtcatgagacaagaacctggatttagctgaatgagggagcaaaaatcctaaaaaaaaaaaaaatcatagatgtatattttgtatatatttaaattcactttaaagtaaatatataactattaaaatgtgtaaaaaaatcatcacacacacaaccagcagtaatttttgacacacttagggggcaagggctcccacgacctctgaactatcctgtgggtatagctgcagggctgtttgttcacacatgtgatgcgtggcctctacttgttcacaagaaacacagtgagaggcagacaatttgctcactgtcagcctcaactggaagaaggctcactgctggatgctcctgtgtggaagtttcccctctctccaggcaggcaggcaacagatc

SEQ ID NO: 282314 - DNA, 1000 bp, Homo Sapiens
tctagctggtactacatggcacacagtttcaaaacataatttcacctactggaaagctcagacctgtaaaacagagcatgggaactgctggtctaaatgcagttgttcctgctcaaagagacctctggccaaactggcaagcagttaaagttttctttcagggccttcctctctatggcctcaacttcctcctctctcttcttccagcaacttcccctttcatcattcctttccctggggacttggcattcagtgatcctgtagatattgcacaactggggaacctttagacatccttaaaatcacatgagatagacagtcatttggggtgtctgaaataaaccaccccaaaacttagtgttaaaagagcaaccaaaaaaaatttatgtgagattatggatttgttacttagcttgatttaatcatcctgtaacgtgtacatatatcaaaatgttatgtataccataaatatataaaattttatcaacgaaattcataacaatctctcagaccacagagaaatcaaattagaactgaggactaagaaactcactcgaaaccacacaactacatggaaactgaacaacctgctcctgaatgactactgggtaaataatgaaattaaggcagaaataaataagttccttaaaaccaatgagaacaaagagacaacataccagaatctctaggagacagggctttgcttttgctgcattctattcgttgtgaacacaaattacaggccagtctcgattcagtgtagaagggaactgcataaggaccacataccaggaggcataattcactgggagcatctttagaaactaccagagttacctgttgcccataccagtggggtaagccctatgaatgtatatgagagtttcaaacatccacaaaacattggctttctaatattcgtattcccactattcctttcttttcatgattcatgtcattgtcccatcaacatttctaagatttccattccgttaagagc

SEQ ID NO: 282315 - DNA, 1000 bp, Homo Sapiens; identical to SEQ ID NO: 206290

SEQ ID NO: 282316 - DNA, 1000 bp, Homo Sapiens
ggcagatcacgcagatactggagtctcccagaaccccagacacaacatcacaaagaggggacagaatgtaactttcaggtgtgatccaatttctgaacacaaccgcctttattggtaccgacagaccctggggcagggcccagagtttctgacttacttccagaatgaagctcaactagaaaaatcaaggctgctcagtgatcggttctctgcagagaggcctaagggatctttctccaccttggagatccagcgcacagagcagggggactcggccatgtatctctgtgccagcagcttagcagggttgaatcagccccagcattttggtgatgggactcgactctccatcctagaggacctgaacaaggtgttcccacccgaggtcgctgtgtttgagccatcagaagcagagatctcccacacccaaaaggccacactggtgtgcctggccacaggtatcttccctgaccacgtggagctgagctggtgggtgaatgggaaggaggtgcacagtggggtcagcacggacccgcagcccctcaaggagcagcccgccctcaatgactccagatactgcctgagcagccgcctgagggtctcggccaccttctggcagaacccccgcaaccacttccgctgtcaagtccagttctacgggctctcggagaatgacgagtggacccaggatagggccaaacccgtcacccagatcgtcagcgccgaggcctggggtagagcagactgtggctttacctcggtgtcctaccagcaaggggtcctgtctgccaccatcctctatgagatcctgctagggaaggccaccatgtatgctgtgctggtcagcgcccttgtgttgatggccatggtcaagagaaaggatttctgaaggcagccctggaagtggagttaggagcttctaacccgtcatggtttcaatacacattcttcttttgccagcgcttctgaagagctgctctcacctctctgcatcccaata

SEQ ID NO: 282317 - DNA, 1000 bp, Homo Sapiens
tatatttttaattttttgaagaactgccatcctgttttccacagcagctacaccatttcacatccccaccaacactgcatgagggttccagcctccccatatccttgaaacaattactattttctgcatttttctttcttttcttttcttctttttttgagacggagtttcgctcttgctgcccaggctgcagtgcaatggcgcagtctccactcactgcaacctctgcctcctggcttcaagtgattctcctgcctcagcctcctgcatagctgggattacaggcgcacaccaccatgcccggctaatttttgtatttttagtagagacagggtttcaccatgttggccaggctggtctcgaactcctgacctcagacctcaggtgatccacccccccccccccccaccccacgggcctcccaaagttctgggattatgggcgtgagccactgcgcccagcctgtgtttttcttttatagtagccatcctaatgggtatgaggtggtacctcattgtggctaaaccatgtacgtttaagaatttacacacacacacacacacacacacacacacacacacgtgatgaagctgtaagaaaagggagagaataatgacccaaaatgtcagcacaaggatgcctcaggggtagacacaggtgtcttcttagcgccttttagcccacgcatatgtgcttgcgcagtctctcggtgtgttttctaacatttcacaattaaataaggagtagttgatattcacagccaccatttccaccgtatatgtagagaaaaatgctcaaatcctagcgatcagcccgctgagctttcacaaaccgaacacaccgtgcggtcacgaggcggctctcccgaacaccggctctgcacccccagggcccggggaaccaagacttccccaagggcccagcaaaagtgagggaggaggggaggaaaggagggagagggagggaggagtgctggctgctttccgccagcgcctcgttt

SEQ ID NO: 282318 - DNA, 1000 bp, Homo Sapiens
aatgtttttgtttttgtttttgttgttgttttgagacagagtctcactttgtcacccaggctggagtgcaatggcgcgatctcagctcactgcaaactccgcctcctgggttcaagtgattctcctgcccagccttgtgtgtagctgggattgcaggcacgtaccaccatgcctggctaatttttgtatttttagtagagacgaggtttcaccatgttggccaggctggtctcaaacccctgacctcatgatccacctgcctcggcctcccaaagtcctgggattacaggcttgagccactgcacctggccactgagccaccgcgcctggccacttgttttgttttttgagacagagtctcactctatcacccagctggagtgcaacggcacgatctcggctcaccgcaacctcagccacctgggttcaagcgattctcttgcctcagccttccaagtagttgggataacaggcatgcgccacctcgcccagctaatttttgtgtttttagtagagacagggtttcgtcatgttggccaggctggtctcaaactcctgaccccaggtgatctgcccccctcagcctcccaaaatgctaggattacaggagtgcacctggccatgtttgtattttttgtagagacagacttttgccatgttgcccaggctggtctcaaactcctgagttcaactgatctgcccgcctcggcctcccaaagtgctaggattacaggcatgaaccactgcacccagcttcatgatttgtatttatttggagaatgggtctctgtcacccaggctggagtgcagtggcttgatcacagctcactgcagcctcaaactcctgggtttaagtgatcctcccacctcatccttctgagtagctgagattacaggtttgtgccaccacgcctggcttattgtttagctgtgcctgctgacgggtacctctagaagcagtgacaccccagcagcaatgagcacacacagcacccagatc

SEQ ID NO: 282319 - DNA, 1000 bp, Homo Sapiens
agtggccagcggcaggctgaatgaaatgagccactccaattcctgcctatgaagggggctaagggaacgatcccaactcatcaggagactggaggatgggaagaaagtgaggccaggtgtgtattccctactccccttccccttctggtagattctccctgccaccaccactgtggccccatagcttcccgctagtgcctctccttgtgggttcttctaatgcttgcctctccttggcaaaagcgttttccttcaacttgcctgtgccctgtgtttcctgcacagaggccattgcagccccagcagctctggtgttcactcatggtgtcattgctgtggatgttcacgtttactgaacatccactctgcagaggctgggggctgcactgagcttgagtccccatctatatatacaatgggatagtaacagcaccaacctggttgggatgtcaatgtatgaaacatgagctgagccagtgtgtggatcatggaaactggaataaaccccctttgagagcagggaattgacttggtgctgggggaggagggcagctttggctccttcctctcataggcattggacatcggctggtgctgagcccgagggaccagatccagcgctgctgtttcccagagctcaccacctatctggagacagaggaggcaccagatgattctgtttgagggggtccatttggagcaaccaggggcagccacctgcctgatacagcaaccagtcagcatgggccaggcttgcagcttctcttgcccatttctttaatcaggacagaacatgtggtttggcggacgtaggaccagcctgggtagagaaggaatgtctttttgagttctctttattgttctcattcattcattatcattatagatgaacaagcacagaacccaaaattgtgggtccagcctggcgcggtggctcaagcctgtaatcccagcactgtgggaggctgaggtgggagaattgcttgagcccaggaagttg

SEQ ID NO: 282320 - DNA, 1000 bp, Homo Sapiens
acacactcaatgactgttacatttcctacaggcaggagaagcatatctgaatggtctcttgtactcatccgatgcctggcacagggctggattcagtttctcaataacacctatatgggaaagcctcacttaacataaaaaggacctcaaaactgagggcagcccttgagctgcacggcaaaaggaccaccttatttcacaaatgtgaccaaagtgcagcaaaggtgagtgacagcacagtagagccccgcccacctgctgagccatgccccttccctgtcacaatgccaaggccttaaatacccagactcctgcccccgggccttgcaaagcccctcattttggcagaacttaccatgtcgaccagccgcaaattaaagagtcatggcatgaggaggagcaagagccgatctcctcacaagggagtcaagagaggtggcagcaaaagaaaataccgtaagggcaacctgaaaagtaggaaacggggcgatgacggtgagtgagggatggggaggagattgccaaacttaggcacacattgctgccaggccctccctcttggaggcagctctcacaggaccctgaaatcttggcctgagattatttccaataactaaatgcagatttgagcaacaagagtcttgatgggaatgttctaattcgtgtctctgttgcaaacctgtcctttcccacagccaatcgcaattaccgctcccacttgtgagcccccagcggctctgccctggtgcgcttcacacagcaccaagcagcaacaagaacagcagaaggggaactgccaaggagacctgatgttagatcaaagccagagaggagcctatggaatgtggatcaaatgccagttgtgacgaaatgaggaatgtatatgttggctgtttttccccaacatctcaataaaactttgaaagcagaaatgtttactttgatcttttggttggaaagacttgagttcctgagctaggtgggtttggggaagaattgg

SEQ ID NO: 282321 - DNA, 1000 bp, Homo Sapiens; identical to SEQ ID NO: 114884

SEQ ID NO: 282322 - DNA, 1000 bp, Homo Sapiens; identical to SEQ ID NO: 195530

SEQ ID NO: 282323 - DNA, 1000 bp, Homo Sapiens
tgatattggctgtgggtttgtcatacatagctgcttattattttgagatatgtcccatcaatacctaatttattgagagtttttagcatgaagggttgttgaattttgtcaaaggccttttctgcatctgttgagataatcatatggttttggtcattggttctgttcatatgctggattatgtttattgatttgcgtatgttgaaccagacttgcatcccagggatgaagcccatttggtcatggtggataagctttttgatgtgctgctggattcagtttaatgaactccaacaaatttacaagaaaaaaacaaacaaccccatcaaaaagcgggtgaaggatatgaacagacacttctcaaaagaagacatttatgcagccaaaagacacatgaaaaaatgctcatcatcactggccatcagagaaatgcaaatcaaaaccacaatgagataccatctcacaccagttagaatggcaatcattaaaaagtcaggaaacaacaggtgctggagaggatgtggagaaataggaacacttttgcactgttggtgggactgtaaaataattcaatctttgtggaagtcagtgtggcaattcctcagggatccagaactagaaataccatttgacccagccatcccattactgggtatataatatacccaaaggattataaaccatgctgctataaagacatatgcacacgtatgtttattgtggcactattcacaatagcaaagacttggaaccaacccagatgtccaacaaagatagactggattaagaaaatgtggcacatacacaccatggaatactatacagccataaaaaaggatgagttcatgtcctttgtagggacatggatgaagctggaaaccaacattctcagcaaactattgcaaggacaaaaaaccaaacaccgcatgttctcactcataggtgggaattgaacgatgagaacacatggacacaggaaggggaacatcacacaccgggg

SEQ ID NO: 282324 - DNA, 1000 bp, Homo Sapiens
tctgtctcaaagtactgggcccgggggtgggaggcttgtcgcggccccacccctgcttactaaccgagccctccccgcgcagaacccaggcccgggaagagtgcggcggtgtcgagcctagactgcctgtccagcatcgtggagcgcatctccaccgagagccctgcggcgcccgccctcctgctggcggacgtgccttctgagtcgcctccgcgcaggcaagaggctgccgcccccagcgagggagagagcagcggcgaccccacccagtcaccggacgccgccccgcagtgccctgcgggtgcgaaccccaacccgatataccaggtgctctgaggggatggtggccgcccacccgcccgagggatggtgcccctagggtccctcgcgcccaaaagattgaacttaaatgcccccctcccaacagcgctttaaaagcgacttctcttgaggtaggagaggcgggagaactgaagtttccgcccccgccccacagggcaaggacacagcgcggttttttccacgcagcacccttctcggagacccattgcgatggccgctccgtgttcctcggtgggccagagctgaaccttgaggggctaggttcagctttctcgcgccctcccccatgggggtgagaccctcgcagacctaaccctgccccgggatgcaccggttatttgggggggcgtgagacccagtgcactccggtcccaaatgtagcaggtgtaaccgtaacccacccccaacccgtttcccggttcaggaccactttttgtaatacttttgtaatctattcctgtaaataagagttgctttgccagagcaggagcccctggggctgtatttatctctgaggcatggtgtgtggtgctacagggaatttgtacgtttataccgcaggcgggcgagccgcgggcgctcgctcaggtgatcaaaataaaggcgctaatttataccgccgtggctccggctttccctggacatgggtgtgggatcc

SEQ ID NO: 282325 - DNA, 1000 bp, Homo Sapiens; identical to SEQ ID NO: 114885

SEQ ID NO: 282326 - DNA, 1000 bp, Homo Sapiens; identical to SEQ ID NO: 195348

SEQ ID NO: 282327 - DNA, 1000 bp, Homo Sapiens
gggtccctgtgtgtgtgtatgtgtgtgcatgtgtgcgtgtctccatgtgcgtccatatttaacatgtaaaaatgtcccccccgctccgtcccccaaacatgttgtacatttcaccatggccccctcatcatagcaataacattcccactgccaggggttcttgagccagccaggccctgccagtggggaaggaggccaagcagtgcctgcctatgaaatttcaacttttcctttcatacgtctttattacccaagtcttctcccgtccattccagtcaaatctgggctcactcaccccagcgagctctcaaatccctctccaactgcctaaggccctttgtgtaaggtgtcttaatactgtcctttttttttttttaacagtgttttgtagatttcagatgactatgcagaggcctgggggacccctggctctgggccgggcctggggctccgaaattccaaggcccagacttgcggggggtgggggggtatccagaattggttgtaaatactttgcatattgtctgattaaacacaaacagacctcagaatctgatcaacagtttattgaacatcctactgtgtgctggaaagcgagatggggcggaatgcgagaacaaacttacccttgaggggtctttgggcagcactagtagctggagggcttcaaggccaaggcaggggtgacatcagattggagacagctacggcagaatgtggctgtttgtgaacatctgcacctgtgttagggggtgagcacctgggagaaggacaaggcacatcacaggacttccctgagcatgacaagttcaaggactcaaatgtccgtggtggatggtagcgagtgacgattggggagtgggtggggctgtcaagcctgcctagaggagatcacaaatacacgacgagaataccgttgtgtgtgctcttcgtgtgtttcctaggagtgcagggcaggggtgctgggtcgatccacaaaagccctgaaacgcttgagagg

SEQ ID NO: 282328 - DNA, 1000 bp, Homo Sapiens
tccctgtggcttctcctgcttggggggcctgcctgcctgaagacccaggaacaccccagctgcccaggacccagggaactggaagccagcaaagttgtcctcctgcccagttgtcccggagctccaggaagtcctggggagaagggagccccaggtcctcaagggccacctggaccaccaggcaagatgggccccaagggtgagccaggagatccagtgaacctgctccggtgccaggaaggccccagaaactgccgggagctgttgagccagggcgccaccttgagcggctggtaccatctgtgcctacctgagggcagggccctcccagtcttttgtgacatggacaccgaggggggcggctggctggtgtttcagaggcgccaggatggttctgtggatttcttccgctcttggtcctcctacagagcaggttttgggaaccaagagagtgaattctggctgggaaatgagaatttgcaccagcttactctccagggtaactgggagctgcgggtagagctggaagactttaatggtaaccgtactttcgcccactatgcgaccttccgcctcctcggtgaggtagaccactaccagctggcactgggcaagttctcagagggcactgcaggggattccctgagcctccacagtgggaggccctttaccacctatgacgctgaccacgattcaagcaacagcaactgtgcagtgattgtccacggtgcctggtggtatgcatcctgttaccgatcaaatctcaatggtcgctatgcagtgtctgatgctgccgcccacaaatatggcattgactgggcctcaggccgtggtgtgggccacccctaccgcagggttcggatgatgcttcgatagggcactctggcagccagtgcccttatctctcctgtacagcttccggatcgtcagccaccttgcctttgccaaccacctctgcttgcctgtccacatttaaaaataaaatcattttagccctttc

SEQ ID NO: 282329 - DNA, 1000 bp, Homo Sapiens
cagctgtctggcattcctttctcagtttgcatctaaaagactacatatgtcaagcttatctccacctgaatttgctgcctgctataaaaacatttcattaatatatcccattcttcctacctccatctctggtttgtcattagtggtattctgaaaagcttaagaaaaaagaatcattgagtagaaagtgaacattttaagttattttcctttttcattggcaattagttaacatgtaaaatcttttccattaaactgtataacttttaataactatatattatatatgggataaaatatatggactgaattgtgagaatataaatgcatcgaaagactctggtgtcatgaaagcacaagaataaggctggagatggtcccagatccaagatgtcccaaaagccttttgtatcagtttctctatttttggtattttgcataatgcatggatccttagttcaaatgagggacaaagtttctcagtcagccccacttcctttctttctaactcctacctttcccttgcagaggaggtagtagagattctggaattgtctatttttatgaattccattattttgtccatggcatctctaatgaaaacaggttctagaataaaggagttgattagtctgaacagtactaattaactacaaaataaacgttagtgatcagcctcttcctctataaacaatgaccaattagacgtttccgtaattccatgtattatgtatagtacactctataaatgtaaatgtaatgcttgtctaaaaagtgcaatttattgtacattgtcccaacaaatgtttacttttataatcgttatgaacttgaattggattagtatcttgtttttatgtgtgaatgaagccttgtgaaataaacaaatgcaactgagaaggtaacaaggtgactgtttttgtgagccagtgatgttttcaatgctttgtgttgcccctttggccccattaagcagtaataaacatttgttctgaagtcc

SEQ ID NO: 282330 - DNA, 1000 bp, Homo Sapiens; identical to SEQ ID NO: 114886

SEQ ID NO: 282331 - DNA, 1000 bp, Homo Sapiens
gctggtcttgaactcttgacctcaagtgatcttcctgccttggcctcccaaagtgttgggattacaagcgtgagccaccacacccggccagggatgtcattttttataactagccataaactttagctttgaagtaaaactatttctagcaagtgattcttacctgatattttttgttgttcttgcccatattttaattgggttgtgttattatggttctctatgtattctagatttaagtttttgtatatggtgtgaggcaagtgtcaagtttaattttttttctacaaacatcctgttgttccagtaccttttgatgataagactgtcttttcccccattgaattatcttaacgccctcatgaaaagcaattggccatatgtatgtggatctacttttggactctcaattctgttccagtgatttatatgtccacccttatgtcaataccacattattttgattattgctgctttatagtaagtgacatcatgttgcctgaaatcacgttttccacctttattcttctgttgatggttgctttggcaattaggggtcctttgcattttcgtagacattttagaatcaacttatctattgctactaaaaatgcttgattgggattgtggtaaatctagaaactaatttaggaagaatggtcatattaacagtttcaagtttcagatccatgagcatattttcactctccattaggtcttttaaaatttatcctagcagtgttttatggtttttactgtagaggtcttacacattttgttacatttgttgctatgtgtttgaccttttttgatactagtgtaaatggaaattttttcttttatgttctagttgttcattattacactaaatcatctttgggtgactactaaacattctattgaaaatttgtgaatggcgtgaacccgggaggtggagcttgcagtgagccaagatcgcgccactgcactccagcctgggcgacagagcaagctccgtctc

SEQ ID NO: 282332 - DNA, 1000 bp, Homo Sapiens
agcagccccgcccacctgtcctcgccaccctggcttcaccacccctgcaagtggcatctcactgtggggctccagagcctcaagacagtcacggtctaaccagaaagtgggcaggtctcagggggcctgggagctaggggcctgcccctcggaccctggggcaagaagagcaccctgccgagtgaggtcctacctgcaggcagtcactgccccggccatgggcctctcaaggctggcacgaagccattcagggagagggctccacaacaagctgagggtgcccgactcaaactgtagaaccgggagtggacacccacagacgcccaggctggatgcgtgcgcaggcacactggatctcgtggctctctgggccgctgccaccgcctttgaacgtgtcggggagcaggagccaggccagagtctggcccagaggacagcgagaagcacctgttgatgctggggccactggaggaagctccatccctctactctcagcccgcaccaggcggccagctcagagcaccaggcgtggcgcaagcagggtggtcgtgggcagccagtcccgccctgctgcctggactgtgcccagcgggatgtgggcccgagcaggccagagaggccgagggcctggggtctctgcggcagccacagcccgtggtgagtagcagccttagctgtcctggagataccggggcctcgtggagtctaggcaggctggggcactgtggctgtggccgtggccaggtgagaagccccattcgcgcaggaaagactggccacctgggaacccacgcctccacggagggacttgccggccacaggctgtgggctgcccaagaggactgtgcaggcagggctgcctgctgattggcagctccggatcaggcccggtgcctgcagacctggtgctcccctcgggcagggctgggtgccgcagccgcctgctggcttttctggcagctcctctgtatcagaaccaataaagtgcacttgttctcgg

SEQ ID NO: 282333 - DNA, 1000 bp, Homo Sapiens; identical to SEQ ID NO: 195003

SEQ ID NO: 282334 - DNA, 1000 bp, Homo Sapiens
tggaatcacaactgagttcagagttcagttttgagtcctactagttttgtttccttgtgtaagtttcttaacctttgtaaggctagcatgtaaatcagatacaataatatatagttcagggtgtaaagattggattaatgtatgcagtgtctatctagcacagtgcctgttatgtagtagcgtgtcaagagatgttctctcttatgcatttggaggattaggtgctgcacctataggtttccattcatttctcatctatgtaattctgagtcttccttttctagatagaattccccccaacaaaaatttaaagtctaacaggtggtaggtgcttattgaggcccagcaattctacttctggaaaccttcctcaggaaaagattctgatgacagaaaatgctgtgtgaacagtattatatagaattgtttttaatagcaagaaattttttaaaacttacaagttcagtgatatgaggacatttacataaactatcgaaccaccagtcttctgtcaattccctttaaaatgatggttgtgaagactgatgaaaacacagtgtcaatgatatgttaactgaaaaagtaagattaaaaacattatggatagtataagtttcttaaatgccaacaatgcatgaggtgaatagaataagacttttttttaaagaatgtaatttttgacagtctgaaaagacaggccttatatttatattgagaaaaatgatcctgacatttaatgagacactaaaacagtttttattttttgcttacttattctgttctagaatccaaactctacatactgtttaatagagcattattgatattagctgtattagatgactgtatgaagagtcctgtttgctagaatcctactttatcttttaagttttgctaattaccctgcaatgaatgttgaacataaaaaatttgactccctttccatgtgtccactgtttccttgtgccttttgattaataaaactttatttttaagtgag

SEQ ID NO: 282335 - DNA, 753 bp, Homo Sapiens
  misc_feature (44)..(44): n is a, c, g, or t
  misc_feature (749)..(749): n is a, c, g, or t
gacatggggctgggcacttctttgaacctggcacggggctgggntacctctctgcacctgacatggggctgggcaccctttgaacccggcacagggctgggcacctctctgcacctagcacaggggtgggcacctctatgcacctctctgaagtgtcgacccctcccggcaggacagtctgctccagccagccacctcatccgcgtggaaggcaataatctctcgcagtatgtggatgaccctgtcaccggcaggcagagcgtcgtggtgccctatgagccaccacaggtaggccaggagccaggctgtgcccagggccctgcagtcagctgtacgggtcgggggaggggtcccctgaggcagcccctgtccctcctcagttggctgatctgcctgcctgtcctgtcggcatctgtccagggctccctgctctgtgataagtctgtgtcggcggctccttcctcacccacacccgccccactgtgcacactgctgctctgtccccacatccgcctcgggcactctcggggcctcagtgtgcccagctccatagtggggagtgggtcttcagccttgccctctgttggtgcccaacactggttccggcctggggctcccagacacagggatttgggagatggggaggtccccgcccatttagaccctggattggctggggcagaaccaaaccagcaacagcgcctgaaggggtggcaaattctacaaagggggttgagggatggtggaangact

SEQ ID NO: 282336 - DNA, 1000 bp, Homo Sapiens
ttttccctttagattttcttcaatcacatctgaataaatcacttgaaggtaacctggatgtaatatagtgaaatgcttgaaagagctgcgtatcttttacacttacagcagtatgattttctgttgtacccattatatggtaccagctgcagctagttcagataaagagggcatttaactgtcaagggaacctgagaggagactctagtaatctggaaagtctgttggatctttgagggattttgggatggtgagagtggggctaggatctctggctaggttggagccagcctgcatttgtatctgtatcttggaagcaaacttagaatgcagagacagatgtggcatggacgctgtcagctctagccaaccataaatcctaaggtgggagagatgcaggctttggctaggtgctaagctgctgtagccggttgaatgtagaggtcactatcttttccgaatacctgtaagtaaattaaatcattctctactcccatgtgcctgccaacctaatgggaaatcgctatagaaaagatggtttaaattttagtctttgaagtggtttatgcacgtttccggaatcaagatttaatgcagagttggattggatattgaatatttttgatttgtctgcttttctctccatagaaagcttatagcttcattgcaccatgtgtggcatttgggcgctgtttggcagtgatgattgcctttctgttcagtgtctgagtgctatgaagattgcacacagaggtccagatgcattccgttttgagaatgtcaatggatacaccaactgctgctttggatttcaccggttggcggtagttgacccgctgtttggaatgcagccaattcgagtgaagaaatatccgtatttgtggctctgttacaatggtgaaatctacaaccataagaaggtgaggagaaagaaaccagccagatgtctggatgcgattaaacttcagagctttgttggttcaagatgatgttacatatt

SEQ ID NO: 282337 - DNA, 1000 bp, Homo Sapiens
cagaaaagactgagcgctgagcatgaagggcttttcagaattcagatactcatttctgtgatggtacttgaagttcagatgatggaaataatagtagatagcggccccaggccagaaaagcctgcttctgggaagaaaaaagagggtactgtgactggaagcattgtgagcttcaagttcaacttcagggtttcaacccttctctttgcacaggaaaataattcaaaaatagagaactaataaaaacaaaagggaatctgaaattttaaccaactgttttatgatctggccttccaaggcctggtgtaaatcaatatctctggattcatttatgcccaggatgtgcctgtgaatttacatcaaaactaaggccgtttgacaaacgttcattaagagcctattccatgccaggcccttggggaaatgaaagggcacagggcagataaaacagcagccggcttttgaataagaacaggtggatttgtagtgctaatgttgtttcattagggtccaaatgtcgtgcatgctaaaaccgctcttttttgttgctgcattcattttcccatctcctattgccatatcctttcgtaacagagtgtctcctttcctctgatcaacctcttccccacctcctcattgtacaatatcttcctggacaggtccaaggaaaagatgcgtgaatcaccacatgcccatcagagctcttccctggaagtttctaattagaggcgagggtacagcagcctatcacatctgagagtctatctgcaaaaaaaggtccttagagggacaggcaggggtgaatgaggaaccgagggaaggagctatcatcccctagtagcatggagagtacttaggttctgtccctgggtctcttgatccctgcagcatttctttgagaatgtctctataggatatagagggactaaaagagagacttcaaattctatgttgacttttttcctggcccaggagttcctttgactagctctacaggatc

SEQ ID NO: 282338 - DNA, 1000 bp, Homo Sapiens
  misc_feature (981)..(981): n is a, c, g, or t
gactacttggaatgcctatccatgggggcagctgccgacaggagagcagattcggccaggacgacatccacctttaaggccccagcgtccaagcccgagaccgcggctcctaacgatgccaacgggactgcaaagccgccttttctcagcggagaaaacccctttgccactgtgaaactccgcccgactgtgacgaatgatcgctcagcacccatcattcgatgagaggacagccaaggactctcccgggcctctccggttctcccttgcggaatgatgggcgcatcctgtctgccacgtgctgacggtcgggaagcttcagtggagaggcctaactctaatgtcgcctgcttaagcaaatcatgcttctctgtttcacgtagttgggttgacaagtttctgcctttaagataaatgagtaatagtctaatgaccagctcagccatttaaaatattttcttcctattctgttcaagaaacagtaaacttggtttcaatctttactgtattttttaaatgaattttttccttaataacagccagaataagggatagtctatgctttcaggactggctttctgcacctgatatgaatgagaccagttttattttataaagcatgtgctcttaatagcattatgtctaaagaagatatcacgtaagtttgcatcttagcatgcaaatcataattttaagcaatataaattatgaaaatactatataaatgtaatttaacttaaaatgtttaagtgtagagcttccagagatggagaaacccccaccctccctccaaccacgccagagctgtagagtgctaagacgctttgcctgcccttatcacagccacacgtagcactcgacgaaatctcctccgagagctccttttcttggtagttaggagtcgccaacggattcgctgcacacggcccatccaggacacaggctggggcgttcggagtcacggctccttgtgttcttcantcagctagttgggccaaag

SEQ ID NO: 282339 - DNA, 1000 bp, Homo Sapiens
aaagattatttaaataggatttaaatcatgcaacaacgagagtatcacagccaggatgacccttgggtcccattcctaagacatggttactttattttccccttgttaagacataggaagacttaatttttaaacggtcagtgtccagttgaaggcagaacactaatcagatttcaaggcccacaacttggggactagaccaccttatgttgagggaactctgccacctgcgtgcaacccacagctaaagtaaattcaatgacactactgccctgattactccttaggatgtggtcaaaacagcatcaaatgtttcttctcttcctttccccaagacagagtcctgaacctgttaaattaagtcattggattttactctgttctgtttacagtttactatttaaggttttataaatgtaaatatattttgtatatttttctatgagaagcacttcatagggagaagcacttatgacaaggctattttttaaaccgcggtattatcctaatttaaaagaagatcggtttttaataattttttattttcataggatgaagttagagaaaatattcagctgtacacacaaagtctggtttttcctgcccaacttccccctggaaggtgtactttttgttgtttaatgtgtagcttgtttgtgccctgttgacataaatgtttcctgggtttgctctttgacaataaatggagaaggaaggtcacccaactccattgggccactcccctccttcccctattgaagctcctcaaaaggctacagtaatatcttgatacaacagattctcttctttcccgcctctctcctttccggcgcaacttccagagtggtgggagacggcaatctttacatttccctcatctttcttacttcagagttagcaaacaacaagttgaatggcaacttgacatttttgcatcaccatctgcctcataggccactctttcctttccctctgcccaccaagtcctcatatctgcaga

SEQ ID NO: 282340 - DNA, 1000 bp, Homo Sapiens
ggttcctagacgttcctcggagctctttgatgcctcagacctttcccttttatccctcttgctcaggtgcttcctttcacaactttttccagagggcaggcgtcctagctccagttgctccatcccttgggccctcccctggctcttcatctagccaaactggtttgagtcagccacaccccttcccagctccctgggctcttcacgtggtggctggccactcaaccccacccctgggcttggcttggagccctgagtcagctccatcaccacccaagccaaaccaaagctgaggcaggagccgaaactcagagtccttcaaggcctatagccaggtgatggaggacgaggagaaggcagtggagatcttgggcaacacggaagctgctcatcctccatcccccatccgctgctgctggctccgcctccgctgcttggcagctactagcattatctgtggctgctcttgcctgggagtcatggctctggtgtttgccatcaaggcggaagagcggcataaagcaggccggtccgaggaggcagtgcgctggggggcccgggcccggaaactcatcctggccagctttgctgtctggcttgctgtcctcattctgggtcccctgctgctgtggttgctctcctacgccatcgctcaggctgagtgaccctggatggcctctgctgagagccagccgagacctcctggatcctgcaatgcggcattgctaaggtcctgtgacagcagtggttggaaggatcctggttggaaggatggggactctctcaaggggctttggaagagctcttctagccctttataaaaggagggcagcagctgagactgatgagaggagggcagcctgctctgttctttcagggccccccacccccatctcccctaccctagcccaccctagggcctctacccagcgggaggggttgaagaccaggcctggttttattagaattcattttgtaataaaagccttttttagtggtg

SEQ ID NO: 282341 - DNA, 1000 bp, Homo Sapiens; identical to SEQ ID NO: 114891

SEQ ID NO: 282342 - DNA, 1000 bp, Homo Sapiens
gatcagtatttcagttgggaagatattttagagtctagataattatgtttgtatattgaaaaaatggtggccagtttttaagttccttaatagaagagaattatgtctcagcacatataacagtaatgctaatttattgaaactactgctgttagagcacttcttattcattgtcttttagtgaaatttatggcgtaacactttgtcagagaggaggctatataattcggagcggaaattgtctataagtaggcatttatttcatgattgatatgtcacagaaatcatggtagtaaatcacattgctatttgaataccctgtttttgtaagtttttaaaactcatattctgaaaagatttcattctcttagtgttagcttgggagttagattgccatgattaaactattatttatccttgtgtaatattagtttttaactttaacatctgtttctttttaatctataatgagctagttttatggaaaatggaatttcttactatataaagaatacagagactcattgtattagagaatcaagtcagccagctaaagtatcctactgttaaatccttaaacctaattttggaaaagagaaagttaatcaatgtatttaccttacatgttggaaagaactatgttaggtctgattcatgtgaagaagatgttgcaaaggatttatttcacaaattttaaaggagatatgagtaaaagtttttatcttttcttgactttttctcctgaacacttatgtcttagcaagtggtcaacatgaggatttgaacgcctaattgttggtaaatggttgaggcatgacaaaaatattaatatccactgtttaccatcatgttatttgaaacaaaagtgaccatgtatactatcttgcttgaagaagtctttgacagaaaaagcaatatcatgtcatttataaattttcttgttctaaagaaagcagttatatatatatataaattatgtaaataaaagttattttatatc

SEQ ID NO: 282343 - DNA, 1000 bp, Homo Sapiens
ggggaagaggaaagaggaagaagcgctcagatgctccgcggctgtcgtgaaggttaaaaccgaaaataaaaatgggctagacacaaaggactcggtgcttgtcccagccaggcgccctcggcgacgcgggcagctgggaggggaatgggcgcccggacccagctgggacccccgggtgcgactccacctacctagtccggcgccaggccgggtcgacagctccggcagcgccagcgccgcgccgtgtccagatgtcgcgtcagaggcgtgcagcggtttagtttaatttcgcttgttttccaaatctagaagaggagcggagcggcttttagttcaaaactgacattcagcctcctgattggcggatagagcaatgagatgacctcgctttcctttcttcctttttcatttttaaataatctagtttgaagaatggaagactttcgacgaggggagccaggaataaaataaggggaataggggagcggggacgcgagcagcaccagaatccgcgggagcgcggctgttcctggtagggccgtgtcaggtgacggatgtagctagggggcgagctgcctggagttgcgttccaggcgtccggcccctgggccgtcaccgcggggcgcccgcgctgagggtgggaagatggtggtgggggtgggggcgcacacagggcgggaaagtggcggtaggcgggagggagaggaacgcgggccctgagccgcccgcgcgcgcgcctccctacgggcgcctccggcagcccttcccgcgtgcgcagggctcagagccgttccgagatcttggaggtccgggtgggagtgggggtggggtgggggtgggggtgaaggtggggggcgggcgcgctcagggaaggcgggtgcgcgcctgcggggcggagatgggcagggggcggtgcgtgggtcccagtctgcagttaagggggcaggagtggcgctgctcacctctggtgccaaagggcggcgcagcggctgccgagctc

SEQ ID NO: 282344 - DNA, 1000 bp, Homo Sapiens; identical to SEQ ID NO: 206219

SEQ ID NO: 282345 - DNA, 1000 bp, Homo Sapiens
ttgaggcacacttgtaagtggataatggacatggtgagcaaccagcaccctggtttggcatggagcaggaatataccctcatggggacagatgggtaccactttggttggccttccaatggcttcccaggaccccagggtccatattactgcagtgtgggagcaggcaaagcccatggcagggacatcgtggaggcccattaccaggcctgcttgtatgctggagccaagatggtgggtactaatgctgaggtcatgcctgcccagtgggaatttcaaaccggaccctgtgaaagaatcagcatgggagatcatttctgggtgggctgtttcattttgcatcatgtatgtgaagactttggagtgatagcaacctttgatcccaagcccattcctgggaacaggaagtgttcaggctgccataccaacttcagcaccaaggccatgtgggaggagaatggtctgaagtacactgaggaggccatcgagaaactaagcagtggcaccagtaccacatccacgcttatgatcccaagggaggcctggacaaagcccaacacctagctggattccatgaaacctccaacatcaacgacttttctgctggtgtagccaatcgtagtgccaacatacacattccctggactgttggccaggagaagaagggttactttgaagactgttgcccctctgccactgcgaacccttttcggtgacagaagccctcatcaacacgtgtcttctcaatgaaaccggcaatgagcccttccagtacaaaaactaagtggacaagacctccagccgtcgagcccctcctagttcttcatcccactccaactcttccccctctcccaattgtcccaattgcaactcaaagggtggaatataaaggtctttttttaattcaaaaaattaaaaaataaataaatcttagctgcaaatacaactttatgctgagtcctatgaatctttctatcaaatctctagatatgagattagtg

SEQ ID NO: 282346 - DNA, 1000 bp, Homo Sapiens
tctaatagctggtggaattgatgatatgtgtcaaagtattttgtagaggttggggctatggcaattagaagagctttaaaaagggaccttaaatgcattgctgaaacttctggagggactgttctgtcaaccctggccaatttgaagggtgaagaaacttttgaaactgcagtgtcgggacaggtggaagaagtggtacaggagagaatttgtgatgatgagctgatcttaatcaaaaccagtaaggcttgtgcatctgcatcaattatcttacatggggcaaatgatttcgtatgtgatgagatggagcactctacatgatgctctttgcatagtgaagaaagttttggagtcaaaatccatgatgctagttggggatgctgtagaagcagccttttccatataccccgaaaactgtgaaaccagcatggagtctcaggaacagcttgctattgcagagtctgcaagacctcttcctgttattcactgacagttaatgctgcccagaactccacagatctggttgcatagtttaagggcttttcataatgaggctcaagttaacccagaaagtaaaaatctaaaatgaattggtcttgatttgagaaatggtaaacctagacacaacaaacaagcaggggtgtttgaaccaaccacagttaaagttaagagtttgaaatttgcaacagaagctgcagttaccattcttcaaattgatgatcttattaaattatacccagaaagtaaagatgttaaacatggagggtatgaagatgctgctcataactggggcccttgatgttctgaagcccttgataactgatctgatgtctctttgatttataacaatgttagatgcaattgtctcgtaccttgaattgagtattatacattaaagtatagcaagctgtcaaagaaaatttacactatagtggtgcctcacccagattttcttcactggttgttcccatgtcccctagctgctctgagaactattcta

SEQ ID NO: 282347 - DNA, 1000 bp, Homo Sapiens
gtgatttacaccttgattgtgctgcttccaggctgtagcagcagagttgagcagttgtgacaggagaccatgtggcctgcagagcccaaatatctactgtctgatcctacacagaaaatgtgtgtgatccctgctatggagcagaggttatcaaactaaagcccatggaccaaatcctatctgctgcttgtttttgtaaatagagttttatcaaaccacagccatgcttacttgtttagctattgactatggctgctttagacaactgtgacagactatatggctcgcaaaactgcaaatatttcctatcctttaacagaaagtttgccaacctctgctctagagtagagaaaaatgtataaaagattttaattttatgagggcaatacaactgtcacatcagaaacaagaaaacaaatgataaaggaactcatttatcaatagaggtgaaaggaaattattaaactatattgaaaaataaagatgtcaataaaaggagaaatgatatttttctagatgaaatactcaatattgttaaaatgtttgtaaattataattcagtcccagtaagatatatttactttgacggtaacagggaagcataattaggcaagaatagcaagaagttttttttgttttgttttgttttttgagatggagtctcactctgttgcccaggctgaagtgcagtggcgtgatcccggctcactgcaacctccgcctcccaggttcaagcaattctctgcctcagcctcccgagtagctggaattacaggcacctgccaccacgcctggctaatttttgtatttttagtagagatggggtttcaccatcttggccaggctggtcttgaactcctgacctcgtgatccacccgccttggcctcccaaagtgctgggattacaggcatgagccaccacgcccggccaagaatttttttttttttaagagatggaggcctcactctatcatccaggctggagtgcagtgctaagatc

SEQ ID NO: 282348 - DNA, 1000 bp, Homo Sapiens
ctcatcattgacaatggctctggcatgtgcaaagctggctttgctggggatggatggcccctgagctgtgttcccctccatcatcaggtgaccccggcaccagggtgtgatggtgggcatgggccagaaggactcctacatgggccatgaggcccagagcaagcacgacatcctgaccctgaagtaccctatcgagcatggcatcatcaccatctgggatgacatggagaagatctggcaccacaccttctacaacgagctgtgcatgaccccagagaagcacccggtgctgttggccgaggcccctcgaaccccaaggccaacagagaaaagatgactcagatcatgtttgagaccttcaacaccccagccatgtatgtggccatccaggccgtgttgtccctctaagcctctgggcgcatcactggcactgtcatggactctggagacagggccacctacatggtacccatctacgagggccatgccctcccaccacgccatcctgcgtctggacctggctggccaggacctgaccaactacctcatgaagatcctcaccaagcttcaccatcacggccaagcaggagattgtgcgcgacatcaacgagaaggtgtgctacatcgccctggacttcgagcaggagatggccactgccacatcctcctcctccctggagaagagctatgagctgcctgatggccaggtcaggtcatcaccatcggcaacaagtggttctggtgtctgcaggtgctgttccagccttccttcttgggcatggaatcctgcggcatccacaagaccaccttcaactccatcatgaagtgtgacgtggacatccgcaaagacctgtacgccaacacagtgctgtccagcagcaccaccatgtgccctggcatcaccacgctggcatccagcaccatgaagatcaagttcatcatgcccccagagcacaagtactcggtgtggattggtggttccatcctggcctcactgtcc

SEQ ID NO: 282349 - DNA, 1000 bp, Homo Sapiens
ccatcatgcagcccaatcccaacactaaaatcagagtagggtgacaggcttaccacccagaatcacctcctaataatcaggaagttatttatgattagagaaactccaaccacatcaattctgtctgggaaggaggtgtgaatcagttaatttaacacatagcaaataaaaatctatggtccacaatatcatgttgtctagctcctggggacaggcaggctccataggccactaataacagagtgagaattactgactgtggggggcggacacaaggggtcagctgaggagcgcagtttgtgactttccctataggcagtgacctcggggtagttgtggggctctttcttcctggaagcataaatgttggtctcttatggcttccgtcttcctggcattaggttacacttcaggattctgactctttgaaagggttgtagatagtcttgattagtactgtatttaaaaatgattttttttttttttttttggagtatgggaaggggcaggaattctaattaaatagcaataatggaaggtgctcggttaaagcctccattctcactgatttagaaagtacaagaacatcctcatctcagttttggtagattcagaataacgagaaaataaggatgttcatttcataaatattataaagaataaaggcatttgtagaactatctttttttaaatttacaggtctggggagtaaaatacaatggaaatggttcaaaaattgtgtctgttggagatgaccaggaaattcacatctatgattgtccaatttaaacatcaaagtctccaggcttatgctgcaaagagaatgtacggattgatcatgacattccttaccttcttaggcttgtttaaaagaaatatagcatttattgtagcaaagacttaaattttgtagatacaatatgaatcttttcatgttttattggaaatgctgttcatactttaacataaagctttcttaatgcaaaaaaaaaaaaaaaaa

SEQ ID NO: 282350 - DNA, 1000 bp, Homo Sapiens
cattaatatttaaaagctactactgtgtaatagttatttagtcattccttctttgctctatgtgtcagatggtcatttggtactaaaggtgtcctgagggaagcatgctttgttcactttctgcatgttgcacaatactataatttgaatgtccatctatgcggatttatgagttatctagtttaactattacaaaatatgtaagtctgggattagggaatttgtggagaaaatcaagtgtttaactgcaaataagatcacattgttgttcagctggtaagatatacaaaatcaaatctgttctcatgaattaagaaaaattacgctgattttgaggttttaagtgaaactttttaaaaaaaattctcatttttttgtaaggcatccctttctgctttgatagccattaaaaatcaaatattcaaactgatgttagaactagatctttgaatctctgtatcacacggtgttaagatcttcagaaataatgaagcatattcaatattttatttaaaatatttgtgagaacaaacttttgtaccataaataaaacaaattttagtctttttcttatgctctatttttgggatacagacgattattttatattgtcatattgtaaatcctataaaaatggtagataagtaaacatagataccaacatgggtatgtaattatgaataatatttggagatctttagtttaaattcttccataaaatagctttcagggccaggcgtggtagctcagacttctactccaagcactttgggtggctgacgcaggaggatcgcttgaggccaggacttcaggaccggcctgggcaacatagcaagacctaacttctaaaaaattaagataaattagcgggcatggtcgcacatgtagctactccagaggctgaggggaggattgcttgggcccaggaatttgaatttacagtgggctatgattgtccactgcactccagcctgggccacagagtgagaacctgtctctt

SEQ ID NO: 282351 - DNA, 1000 bp, Homo Sapiens
ggataaagtccaaactcctcaaaacatgggttggttcctgctgaccttctgtaggttcttctcttgccatttccctctcccaacacacaagcacattcacacacacacaaacacacacacacatgcacacatgtatgcatgtgtacacacatacccacacacaagcacagctctgtttacctgtttcctgtataaaccctatgatgtggaatcccagctctgctacctgggcaagtcacttaacttctccatgcctcatttttctcgtcagtaaaatattttgctctcctgtgcttctctagactagaagaatgcctgacacacaaaatgcaccaaatggtcattttctgtttggttttgtgaaagacaaaacgcgtagacagtacaaaattcagaaagacacaagaaagtaagtttcctttccacacctacttccaaatctttcagggtgccgctacagaggcaaacacaattattaatttctcatggaatcttccagatttgctcttacgagaaaatggcggcaccattcaaaaactgcttttgtcacctgataacatatcttggatatagagattcctatttccttctctgtaaaatggggatatgaaagaatccacctcacaggcttgttacaagaattaaatgagttaatactcactttctaacagcacttgtatacagtagacaccctataagtactagctcttattgacactcagagatctgcttcttctttttgtaatgacttcataacacgctaagggatgggtgtaccatagtttatccgacagttcttgttgatggagacgtccatcaatggagtcttccaattgttatgctgcaacaatgcttctctttgctgtaacaatgcttaataaatatggttcacgtctgtaatcctagcactttgggaggccaaggcaggcagattgcttgagctcaggagttagagaccagcctgggtgatatggtttggctctgtgtccccacccagatc

SEQ ID NO: 282352 - DNA, 1000 bp, Homo Sapiens
cccaggagggcaacagatgcttctagaagaaactaagggccgggtgcagtggctcacgcctgtaatcccagtactttgggaggccaaggcagtaggatcgcttgaacccaggagtttgagatcagcctgggtaacatagtgagattcttgtctttacaaaaaaatacaaaagttagccgggtgtggtggtgcctgcctgtagtccccgctacctgggaagctgaggcgggaggatcgcttgagcccaggagttcaaggctacagtgaaccatgatcttgccactgcactgcaggctgggtaacagaatgagaccctgtctcaaaaaataggatgggcatcagaaaacatattcatgttttgctcagtgagagaaggcagacacaaaaggccacacagtgtgtgatccaatttctttctttttttttttttctgagatggagtctcgctctgttgcccaggctggagtgcagtggcgtgatctcggctcactgcaagctctgcctcccaggttcacgccattctcctgcctcagcctcccgagtagctgggattacaggcgcccgccaccacgcccggctaatttttttatatttttagtagagacggggtttcaccgtgttagccaggatggtctcgatttcctgaccttgtgatccacctgccttggcctccgaaagtgctgggattacaggtgtgagacaccgcgcccggccacgtgatccaatttctgtgaaatgttcaggacaggctcatccacagaaacaggaaggggatgcatgggtgccggggctggggggaggcagtgggcagtgtcagctgatggttccagtgctgctttttggggtgatgaaagtttctgaaattagatagtggcaatagttgcataatatagtgaatacagtaaaaaccactgatgtctccacttaagaaataacaggaccaggcgcagtggctcacgcctgtaatcccaacactttgggaggccgaggtgggcagatc

SEQ ID NO: 282353 - DNA, 1000 bp, Homo Sapiens
taactctagaaatgggaaaaagggtcatcacactgaaacggtgttcaaccgggttttgccagggcctattgcaccagagagcagcaagaagcgggcccgtaggatgcgaccagacctttctaagatgatggccctcatgcagggtggaagcactgggtctctatctctgcataacacgttccaacacagcagtagtggcctacagtctgtgtcatctttgggtcacagcagtgccacttctgcatctttgccttttatgccatttgtgatgggtggtgcaccatcatcccctcatgtagactccagcaccatgcttcatcaccaccaccaccacccccacccccaccatcaccaccatcaccatccaggcttgagagcccctggctacccctcttcaccagtgactaccgcctctggtactaccttgcggttgccaccactgcaacctgaggaggatgacgatgaggatgaagaagatgatgatgacttatctcagggctatgatagctcagaaagggacttctcactcattgatgatcctatgatgccagctaactcagactccagtgaagatgctgatgactgaagccccagcatgggccccattgcttgggcggctgctgtattttcatttactctggcccttggactatggaaacgtgggaggggcaggggagatgtggggaagtccaggactccaggaggtgaaaaggaaaaaaaaaaaaaaatgtacctgattgctcccaattatgagaggattgggtgggcaggggaactcctaaaataatacatgaccacttcctcatttctggggaaggaaaggagactagagcagctggtgtgctcacccctccctagtcacctccattaaccacagactatgtagcgctggccctagcctctggcagagcctgttcctggccgaactgtggatacagctggagggtcaggaactgttaccttctttccccttggcattaataaatttaagttaatcctt

SEQ ID NO: 282354 - DNA, 180 bp, Homo Sapiens
agctcagtctttccactggggaacatggtggggtgtgtgtgtgtgtgtgtgtgtgtgtgtgtgtgtgtgtgtgtgtgttcattatgggaattcaacaaagagttgatgtgaatatttgtgaagacagaaaaaattgccatgagatttggaattccctttggcaatcatcatattgtagct

SEQ ID NO: 282355 - DNA, 1000 bp, Homo Sapiens; identical to SEQ ID NO: 206265

SEQ ID NO: 282356 - DNA, 1000 bp, Homo Sapiens
aggtgattgggtcataggggtggttttctcatgagcggtttagcaccatactcttggtgctgttctggagagagtgagtgagttcttggagacctggttgtttactcgcgtgaagcacctccctctcttgctctgttgcttctgctctcaccctgtgacatgcctgcttttgttttgcctttcaatgtgagtaaaagctccctgaggcctcccagaagccaagcagatgcctagcatcatacttgtacaacctgcagaaccatgagccagtaaagactctttgcttaatacattacttagtttcaggtctttctttttctttctttcttccttccttcctttccttccttcctccttccttccttccttccttcccttcccttcccctccctccctccctccctccctccctccctcccttcctccctccctcccttccttccttccttccttccttccttccctttccttccttccttccctttccttccttccttccttctttccctttccttccttccttcctttcttttctttctttctttttcttcctttctttcttcccatctttctctttctttctttctttctttctttctttctttctttctttctttctttctttcttcctttctttctttcttttctttcttcctttcttccttccttcctttctttctttctttctttctttctttctttctttctttctttctttctttctttctttctttctttctttccttctttctttctttctttttctttctttctttcagagagagattcgctgtatcaccaggctggagtgcactggcgcgatctcagctcactgcaacctccacacatcccaggttcaagcgattctcctgcctcagcctcctgagtatctgggattataggcacccaccaccacacccagctaatttttgtgtttttagtagagacggggtttcaccatgttggccaggatgatctcgatctcttgacctcctgatcc

SEQ ID NO: 282357 - DNA, 1000 bp, Homo Sapiens
gggagcaggagggttagaagtcaggcagtgtagagaagggacaagtggtttatgggcctagaggcgctgagccacatggtggctgattttcacttttttcctagcctttgtcaagcacatcatgtcagggtgaagcagagtcttccaggtgagtgcagcctctccctcctggtcccttccggggtcacatagggccttaagaataacaccatgtgccctagaaggcatctgtcccagccctgaccccttaagaggaaacctcttgggatcaggaagtgaggacagccctgctcactcaccatctcctgtctcctgcctgcccttgcctgttcaccctgtcttgaccctatcagtcacatcctcttgcctctcccaggatctctcaaggcaatgcccttccctcagcctggggcctcctgtacaggctcctgggagtgagaaagccgatcccaagtggaagagaaggtccctggcctgtgctcttgaccccgttcttcctcacttctttccctaggttttccctgggatccccctgggtgtggtaaggggctgggtctaggagggtgaaatgccctttcctcctagcactttctttcaggtgcctggcccttggctttagccataccagggtgagttaaagagaggccccggctgggtgagctgagatggagtcctcgacttatcaccacaccactgccccaaggaccttacaggccctccctgttaataaacagctctaacacggccaggctgggctctgggattctgaccagtctctgttttgtttgtttttttaaaactaattaacgaattgcattggtttgcgttgtgtgtgtgtgtgtgagagagagagagataaagtcacctgaggcctcatgtgtgctcagagaaatgagtagtatctgggagctaggagacaaggacaaaagcctgtggatctagagatattggggtcagacccaggagagcaagctctggaaggccagcagcttgaggagtt

SEQ ID NO: 282358 - DNA, 1000 bp, Homo Sapiens
tgtaatcctaacactttgggaggccgaggcagacagatcacctgaggtcaggagtttgagaccagcctggccaacatggcaaaaccatctctactaaaaatagaaaaattagccaggcacgttccaggcacctgtgatcccagctacttagaggctgaggcagaagaattgctttaaccttggaggcggaggttgcattgagctgagatcatgctagtgcgctccagcctgggcaacagagcgagacttcatctcagaaaataaaaaataggggccaggcacagtggctcatacctgtaatgccagcactttgggaggccaaggcgggcagatcacgaggtcaggagtttcagaccaatatggtgaaaccccatctctactaaaattacaaaaaaaattatccaggcgtggtggtgcacgcctgtaatcccagctactcaggaggctaaggcaggagaatcacttgaacccaggaggcagaggttggagtgagctgagatcgcgccaccgcactccagcctgggcaacagagcgagactccatctcaaacaaaaacaagaacaaaaacaaacataaagttggcacagaaaagggaccaagtttaaaaaagggttttaaatgtaatgagacttgcatagttaaaaaaaaaaaagggattatttttatttttattttttatttttgagacggagtctccctctgtcgtcaggctagaatgcagtggtgcgttctcagctcaccgcaacctccgtctcctgggttcaagcaattctcctgcctcagcctcccaagtagctgggactacaggcacgtgctaccacactcagctaatttttgtatttttaatagagatgaggtttcaccatgttggccaggatggtctcgattgcttgacctcatgatccgcctgcctcgacctcccaaagttgctgggattacagatgttagccaccgatcctggcccccccaaaaaaaggattttaagaaaaacttctcttgg

SEQ ID NO: 282359 - DNA, 1000 bp, Homo Sapiens; identical to SEQ ID NO: 206293

SEQ ID NO: 282360 - DNA, 1000 bp, Homo Sapiens
gcgagggtcacaggagacaaaggcagccagccaatggaatgacgcatgcccattgctgagccctaggtcagatatgctgaaaggtaaagtacacacaaatccaccacgatcttctaaaagtgcagacctcagctcagtgggtgtggggcatgtgccaagactatgtttccagcagactcgcatgtgatgttgacgctgcagtccacggaccacactttgagtaacaaaggctttttttcttcttccccacagagggtgcctcagaagaggagatcagacttagcaagatggtgatgaaattctgggccaactttgctcgcaatgggtgaggctggtggcaaagacagagcacggctggtgagggtggggggcggggcatgcctattgggaaggggcagcttctaaggttctagtgatcaaacttctgaccctgtgaccatagcactctgataatgagagctctctgcaaacggagaggccgcccctggagatagtgagctctccatctctggaggtatacaagcctcttgacagagataacttgggcatcctcacacatctctgaagattgttgggaacacacagcagctttggggcaattctaattgattctgtttccagaaaccccaatggggaagggctgccccactggccagagtacaaccagaaggaagggtatctgcagattggtgccaacacccaggcggcccagaagctgaaggacaaagaagtagctttctggaccaacctctttgccaagaaggcagtggagaagccaccccagacagaacacatagagctgtgaatgaagatccagccggccttgggagcctggaggagcaaagactggggtcttttgcgaaagggattgcaggttcagaaggcatcttaccatggctggggaattgtctggtggtggggggcaggggacagaggccatgaaggagcaagttttgtatttgtgacctcagctttgggaataaaggatcttttgaaggcc

SEQ ID NO: 282361 - DNA, 1000 bp, Homo Sapiens
ggcatttctgtatctttaaaggcaggctgagttggagaacagacttttaattaaaatttaccttcctatacatgtgttgccccaccatttacattgtaattttcaggtcacacatgcatattagtgctaccttttgggtgctggcagtggcagctctactgatgaaggctacactgcaggatccattgactggggctgccagagccactgggtagctggcatcccgcagcagggtgattaatctgtatgttcttcctcatagctgttgtagatacaagcatggggcggtgggtggtcctgagggaaaacagacagaagggaggcacagacccaccacggacacacaatacaaaatgcaagggcaccttctcagccccgcagccaaactgggtggaaagggccactcctcaagaccctggaaaaacagaccccatcaaggaacacaaacccattaatggacaagctgactcagagggaaaatggggttgcaaacacctttgatggggagaggcggaaaagcacttctggggtgcaatcaacctatttcagggcaactgaccatgctttctaggttgccaaggccagctggttgattggttcctgaactgtccaggaaggcagaatctgcgcaagagcctcaaactccagagcaaagtaaacaggccatcatcatgtacttagcaagaaatcctcactcctcagagagaagctggctggagagggaggccagggagggtaaatgacaggctctcatacttactgcacattcatgctcaaggaggaggggctggggtgtgggcaggaagcttcagctgtgcttctccaaaggacaaggaagaggaaaacaactgtatgtccttgggcagggctcggttccctttgatgattcagttgtcagtggaattcttgagggtcttcaactctaactcagtgcctagcacacagtctgaccaatgaatagttattggatgatgcaaaaaaaaaaaaaaatcaatgatcc

SEQ ID NO: 282362 - DNA, 1000 bp, Homo Sapiens; identical to SEQ ID NO: 195562

SEQ ID NO: 282363 - DNA, 1000 bp, Homo Sapiens; identical to SEQ ID NO: 195519

SEQ ID NO: 282364 - DNA, 1000 bp, Homo Sapiens; identical to SEQ ID NO: 195564

SEQ ID NO: 282365 - DNA, 1000 bp, Homo Sapiens
ctcacggagcctggcggaggcgcgggctggagggaggactgtgggcccggcgaggctcggcaggctggtcctcgcctccgctcccggggtgcgggggtgtgtgatggggtggggtgggggtgggggacttgcgagttgtcgtgcgaggaggaaagttttcaatatggcggcgggagcccctggtcctttgtgtggtggcggcgtcggcccggagcggccctcacmtgggcgccccaccctccagaccagggcacccctccaccgcctggtccccgggcctccaggtgtcccccgggccggggtcaagaagggggcggccagcgctggctgggggcggggaggagccgcgggtccagccccggagcggatgtttgtggggggcgttagtgtctgggggacacttttggggcggcgggggcaggacgggcggcggtgggccccgatgcctgcccgcgctcccgaacgcgcacactcccggcttcttctggctcagccgctcggctccccggggaggcctgggctgtgctggtggggatggggtccgggcgaggccgtgtttgtaggggaacgtcagacggagagacctccgaagatttcgtgctcgtttcccccggccctcaggctccgggcactgaaaggcagtcacccaccgcagcccttccagccctgtctacagcgcctcgggcctgggggcagtgagtgaggggtgggtgttgctgaaaccatccgtaacggctccaacgttcgctgaggagagcccggccaactccttcctccgtggccggaactgggtgcgctcctacacccctgttttttttgcccacctttcgggagggtctgagtccgagttggcctaagcggcggttggacgggctgggaccgttgggaagcgggtttaactgcctttcctgctgtttaagaatcttctccccactctcttcccccacccccacttctaagtggaggaagaccccttcccacccctttctcccttaagctt

SEQ ID NO: 282366 - DNA, 470 bp, Homo Sapiens
tggcttccctcccccgaaaattaaaagagcacagactgagaaactgaatgtgggagaaagcagtggattatgctgttctcaggggtcacctcaggtttggaagcattctttcaaattaacccatctcaggccatctgcagagaagaaaggtggtacctaactttttttcttgtcagcatttggtaggggtgttttattgaccaaatatgttcccacaacctagttttttgtgactgactaaatatagtagagttttaaattttatcatcaaaatctatagacaatttttgttgaaaatagactccatatctatgtcctgcttttcttcttcttattaattacattgctgtataaaagaacaaggcttcagaatgaagattatcttgtctcttggcattgaatttatacaaggtactctttctttaaggctgtatcaaaggacatatttttactcattaaaaaggaagatc

SEQ ID NO: 282367 - DNA, 1000 bp, Homo Sapiens; identical to SEQ ID NO: 114893

SEQ ID NO: 282368 - DNA, 1000 bp, Homo Sapiens
tgtaatgctgccgtccttctcttgcactgccttctgcgctaacacctccattcctgtttataaccgggtatttattacttaatgtatataatgtaatgttttgtaagttattaatttatatatctaacattgcctgccaatggtggtgttaaatttgtgtagaaaactctgcctaagagttacgactttttcttgtaatgttttgtattgtgtattatataacccaaacgtcacttagtagagacatatggcccccttggcagagaggacaggggtgggcttttgttcaaagggtctgccctttccctgcctgagttgctacttctgcacaacccctttatgaaccagttttggaaacaatattctcacattagatactaaatggtttatactgagcttttacttttgtatagcttgataggggcagggggcaatgggatgtagtttttacccaggttctatccaaatctatgtgggcatgagttgggttataactggatcctactatcattgtggctttggttcaaaaggaaacactacatttgctcacagatgattcttctgaatgctcccgaactactgactttgaagaggtagcctcctgcctgccattaagcaggaatgtcatgttccagttcattacaaaagaaaacaataaaacaatgtgaatttttataataaaatgtgaactgatgtagcaaattacgcaaatgtgaagcctcttctgataacacttgttaggcctcttactgatgtcagtttcagtttgtaaaatatgtttcatgctttcagttcagcattgtgactcagtaattacagaaaatggcacaaatgtgcatgaccaatgtatgtctatgaacactgcattgtttcaggtggacattttatcattttcaaatgtttctcacaatgtatgttatagtattattattatatattgtgttcaaatgcattctaaagagacttttatatgaggtgaataaagaaaagcatgattaga

SEQ ID NO: 282369 - DNA, 1000 bp, Homo Sapiens; identical to SEQ ID NO: 195568

SEQ ID NO: 282370 - DNA, 1000 bp, Homo Sapiens
tgttgggttataattatttacgagcagaaaaaagcggaagccgcagctgcattccacgtgactctgctgcatagccatgttcctcacaaggctcagaataaggtaaaattccaataactttaagtttaaattattttaagtttgaattatgtgatatcacaaaaccaaaatacttcaccccaaaatatgtgtcttaggcatattctgagctggctgttcagagggcctgcaaacacaaggagccctgcaaagctgtcttttgtggggcagatttgcacctgcagaggaaataaagggaagtaaacaacagatgtgaaaggctttctccgaagtcctccttgtcaaggtccaggaaagattaactgagaggctgacacctttaaaggtcttgcagagaaacatttaccagaagctgccacccaccccctttgagggctgccacctgagaggctccagctgtgtaccaagactgcctctgctaaccaggcctcttctcctcttctctctctcccgtatcctttttgccatgatccaagcccctattttctgtatattcaagagggctaaaagcatcaaccatcttgacatttgtttgagtctttatattttgtatgactcccaagcccatatgaatgctaataaaatgtttacacctttttcccctggtaatctgtgcattacatttatcttacagactcaaattaccaaaacttcaggaacaaagttaaatgttccttcaaaatataagactaggaaatcagagttgggagagaaattagagttcatctatcctctcacctcctttttcatatggaaatttatgactcagagagggggagtaactttcttaaaatcatgcagcaaaagacaaggtacaagatctcaagttttctgacttccagttaagcattttgctcccagaattttctcagactccagaaaatgataagcccttgcagggctggtcctttgtctcatctcccttttctcctctatgatc

SEQ ID NO: 282371 - DNA, 1000 bp, Homo Sapiens
atagatgtttttgcctgcaaagcagttcttccatcttcttctagcaacagaaccgccccctttcccctagaaactgcccttccatcacctgggaggtatcattcatgaggctctacccactctctatcaggacagaaatgtgatttaatgggaacagatgacttcatttctctggttgtatagtgagtggtcaaaaaacaagcggaaaatatgacccaagcagatgctagaagaaaggagtctctctctccgagtccataaaaactggggccatctttggcaccacgtcgaacaaagccaacctgagagtgacagccacaccagaaaaggcagaactaaaaagatggatccaccaaccatgcctaaaatcagctcttgtcctcagacttcctagttccaggaccaaacctcataaggcctgcttgagctgagtttctgtaacttataactgaaagaattctggcaatggagtagaacacaaatacacagggatgaggtggatctgtatgtacagacataattttccacaaggtgttaagggaaaacagcaatagcaattttcagagcattattatattatgcctggtttgttgtttttaaaagatatacatttttctgttaatagtgagcgctggcaaaagaggagaatattcattttaacactaacacataaaagaccttgaaaaatattatttatacacattttttaaaatcacacaataaaataaaacatcatgcataaaatttgcatcaaagcccagtcatcaaatttaccttaatttccaaagaagcccatggaatatttttcctagaaaggagaagaaatagcagcagcaaactgaattataaagaaacaaaagtggtattgctcccatgaggtcatcagtgtttgatatataactttcttcatctccctctggaaagccaaatccagaaaataaatatttcaacatccttctacaactccaggaaagggagatatacttgaggtcaaatgatc

SEQ ID NO: 282372 - DNA, 1000 bp, Homo Sapiens
ccaacagccaagctcgttcctaccccagggcctttgcacacactgctgcccctgcttggaactctctccctctactttctttctttctttttttttttttgttgagacagagtcttgccgtgttgcccaggctggagtgcagtggcgtgatctcagctcactgcaacctccacctcctggcttcaagcgattctcctgcctcagcctcccaagtagctgggattacaggcgtgcaccaccacgcccggctaatttttgtattttcagtagagttggtgttttaccatgttggccaagctggtctcgaactcctgacctcaggtgatctgccctccttggcctcccaaagtgctgggattgcaggcgtgagctgccgcacctggccttctccttctacttacacatggcaggctcctcttgtctgccataggtcatggctccaatctcacccctccgggaggcctccatcatcccctcacggtgcccagatcttgccttttgtagcacttcagaattactgtatttcaccaactctcaaccccataccttttcatgctctagcatatctgaaatcacgcacctaacgaggaaagagacatctgggtcagtgaaattcggttcatgcccatgtgttgttggcctgtctactcctccccctcattcattcatttattcattcaacactcatttattgggcacctgctgtgtgccagggtctgtgccgagcgccaggaacaaagtccctggcctcatggagcccacagtctaatgggaagtggagaatagtggtagtcaggcaggtgcacgggcccccgaagtcaggcaggagagagcccctggggcagtggcgcaggagggagggctataggtagctggggtacggtgacatcaggcaaaatactggtggcgctgaggtctgaggatgaagggtgtcgccggccatgagactgtaggagcagaggccttgagctgggactgagctgggggtgtttgcaggatc

SEQ ID NO: 282373 - DNA, 1000 bp, Homo Sapiens
agtccaagttgcccggcgtgaaggaagtgtgtcgagattttgctgtcctggaggaccacaccctggctcacagcctgcaggagcaagagattgagcatcatttagcatccaacattcagcggaaccgtctggtccagcatgatctgcaggttgccaagcagctccaagaggaagacctcaaagcccaagctcagctccagaagcgctacaaagcccttgaacaacatgattgtgaaattgctcaggaaatccaggagaagctgacaatcgaggctgagagacgacgtattcaggagaagaaggatgaggacatagcacgtcttttgcaagagaaggaactacaggaagagaaaaagaggaagaaacacactccagagttttctggaggcagtgcttctggagataactactattatgaggatggaggaatgaaatcaagaggaataaatgaagctgtctctgctccagctcgagtgagtcacagggaccaggagtggtatgatgcagaaattgcccggaaattgcaagaagaagaacttttggctactcatatggacataagagcagctcaggttgcccaggatgaggaaattgctcgacttctgatggctgaagaaaaaaaagcttacaagaaagccaaagatcgagaaaagtcatctttggacaaaaggaaacatgactatgactgcaagtcaaaagcaaagtcagcacactcaaagtcaaaagaaggtgatgaaacacagcgtgccaagattgacaggccgtcacgaccaccgccacccgcagcgatggcccctgaggatgtggatcccacccacttcacaaaccagcatagtaatacacgtcatttttcaaagtcagagtcctcacacaaaggcttccataataagcagtaaaacaaaacagaacaaaacaacaaaaagggatctgcctcgaaaatggacttcttgtagcacatattactggaagatacaacatgcattccacattggctgttgtc

SEQ ID NO: 282374 - DNA, 1000 bp, Homo Sapiens
ctacccactggtccccaaagctccctggagccgccattaactttgaatgaatgagtcggccaagttcagcctgggtgctgggggaaggagcacagttttggggacccccagccctggtgatcccaaactccctggggctctggcttcctgtcatcctggaaatgggtgttggaggttaggactgggtggcctgatccagacgggcgtctctcctcccacagaaggtggcctctaaccgagtgccccagcatgtacccagtcccacccctggaaggccctacacctggctcccagacaccccccaacttgcaatcaccctagtccccctcaaggctcccctatgcagagctagaccccggaggaggtcgtttgaggggcaggcattgagttgctttgcaaagttgtctttcagctgatgcttacggggaggacagtccccaggcgtgcaaaggttgacagagcggctgaagtttgggacctaattttggggagggggtatagttaggaggtccggagggctgttgggggcgggggttggagcttcaccaaggtccttcccgtcttatggggcaagagggggagttcgaagaccagccgcatgccggggggttgcagggggcgccggggaatgtgggatctttaaatatgggcggggcttgcggggtcgtcgaaggcggtgccaacccgggctcggccaatcggcggcggctcccgcgtcgcaccgcccccttctctcccggcccgggcgggcgctcgccccccgccgggcccgtggactgggcggcgggggatgcgcctgccgccgccgcccccggccccgccgcccccgggccccgcgcccgctcgctgctgcccgccccgtccgcgaccccggctccggctcccgactgggggtccgcggccgcgcgggaccctctcccctccagccttgtccgcccgctcgggccgagccccgcaggtacagggtgggatgggtgagggtgcgggaggatccaggatc

SEQ ID NO: 282375 - DNA, 1000 bp, Homo Sapiens
agccgagattgtgctgctgcactccagcctggcgacagagcgagactctatctcaaaaaaaaaaaaaaaaaaaaaaaaaccagcaaggcagggacgccagcagggcacgtgctgaggagacaggcgcgagcaccagaggtgcagggcggcctcttagccggagtccaggaggcctttgaggggagagggcttctggcagaccccaggggtggggatgagcagtgacaggggccctgggggctgggatgtgacagggcagcgtggcagtgtctggtggcccctcccgcaggccatcaccatcgaggctgagccaagagctgatggcagccgccggaccacccgctatgacatcgacatgaccaagtgcatctactgcggcttctgccaggaggcctgtcccgtggatgccatcgtcgaggcacgtgaggcccccgggtgggagggggcctgaggctcctcagcagggcctaaccaccgtccctgcacctcaacctgcagggccccaactttgagttctccacggagacccatgaggagctgctgtacaacaaggagaagttgctcaacaacggggacaagtgggaggccgagatcgccgccaacatccaggctgactacttgtatcggtgacgccccaccggcctgcagcccctgctgcccaataaaaccactccgaccccacggcctcttgtcttgactctggtggtccagggtggggccgttcctggcctgcctgaggcctgtggtgcctccaactggactaggtcgccacctagtctttatgctctctggagtcctgctgccccagccctgccttcctgtaaactccagggccccaccaggctctcatggctagaccacaggccgcagcatccctgtcaccctgcctcttcctgggcgtcttccccaaggcccagcgatgccagaggtcaccacagacctgccgttcccactctcccgggtgtcctggctggggcctgggcctcctgtctcccaaaaa

SEQ ID NO: 282376 - DNA, 1000 bp, Homo Sapiens; identical to SEQ ID NO: 195119

SEQ ID NO: 282377 - DNA, 1000 bp, Homo Sapiens; identical to SEQ ID NO: 195575

SEQ ID NO: 282378 - DNA, 1000 bp, Homo Sapiens
atccattgctttattaatgcctttaccttagtaaggctttattaatattgaagtatgtctgttttgtttttttttgtttttttgtttttgttttgagacagtgtctccctctggtgcccaggctggagtacggtagcgggatcttggctcattgcaacctctgcctcccggttgaagtgatcgtcccgtctcagcatcccgagtagctgggactacaggtgcacacacaactacacccagctaatttttgtgtttttgtagagacagggttttgccatgttacccaagctggtctcgagctcctggactcaagcgatccccttgcttcagcctcccaaagtgttaggattttacgagtgtgagccactgcacccagatggatatgtctccttttatcaattaagggtcaaaagcagaggaggccaagtgcataggatggcctgtgactatttccaaaggtgaaagtttatgagccccaaagagagtggcccttagatttaataataccaaaggaggaacttaggtcaaggaaggtgtagataaattctgccaactgggttttttgtttttttgttttgaaatggagtctcactctatcacctaggctggagtgcagcggcttgatctcagctcactgcaacctctgtcccctgggtttgagcaattctcctgcctcagcctcccaagtagctgggattataggcgtgtaccaccacacctggctaatttttgtatttttaatagggatggggtttcaccatgttggccaggctggtcttgaactcctgatctcaagtgatctgcctgcctcagccttccaaagtgctggggttacaggggtgagctactgtgcccggccatccaactgggtttttatagttccccttgtttgttccactgagccagaagattggggattgtagacagtggaaatgctgagaaattggccaaactgaactcacttgttttattatatggccagtaaaatgggctcctgatc

SEQ ID NO: 282379 - DNA, 1000 bp, Homo Sapiens
gcaaatgattttttatattgaacttgtctcctgcgaccttaaagaactcttgtattcattctgatagctttttagtggattccttagtgttttatacatagaagattatgtcatttgtaaatagagatagttttacttcttcctttccaatgtggatgtcttgtaattctttttcttctctaatttctctggccagaacctccggtatggtgttaaatagaagtggcaaaagcagggaggccgaggtgggtggatcacgagggcaggagatcgagaccatcctggctaacacggtgaaaccctgtctctactaaaaatacaaaaaactagccgggcatggtggcgggcacctgtagtcccagctacttgggaggctgaggccggagaatggcgtgaacccaggaggcagagcttgcagttagctgagattgcgccactgcactacaacctgggtgagagagcgagactccatctaaaaaaaaaaaaagaagagtggcaaaagcagacatctttctctttttcctgatcttgggagggtaaacattcagtctttcactattaagtaggatgttagctgtgggtttttcataaatgtctggtttcaggttgaggaagttttcttctgttcctagtttaatggacattttttatcatgaatgataacttcctgagaccaaactgaagaatacgtaaatgaaggatattggtaactagatcagattggtgaattatatctgttgttgaactgataaggtagccagaatgctttctgtcatagaggcaagttgagccatccctggatgcattggtatgttaatatcaaggagagaaccatagtacatatgttcgtctccactgaaatttgtttgtccccatctccttaaaccacacccctgccccattgaatctaggaagtcatagaatttacaaataaatgagaagttcctaataaagaactattgtcagacactcttttatccttggactcaagtgggtgatc

SEQ ID NO: 282380 - DNA, 1000 bp, Homo Sapiens
ccccacactctgagatggccctttgaagtctccccatctcacccctcagagacagaggcatggagatccctagggggagggaccttgctgcagctcccaaagctgggggcagggggcagagtgaggttctgtccagcccaacatgcactgagtgggcacctactgtgcgctccttctggccagtgggatggtccctggcctgcagagtttcaccactcagtggatgctgggaatgggacaaaaaagaccaaaccaccctgtaggtccagggctggctggcctccctcagcagggcccacagccccccatggttcaccctcaccaaggtcacctcaacccacctcctcctcaccctccaagctctgcacacgaactctgtcacctcttccctgcagccaggtggccgcccacctgaggccactccctctgcaggcagctcctgcccccacaccccctccttcccagggctcagtcaaaagggcatctcccaaggcacagcaactcagcccgtcacaggctctggtgtccccagtgctgtcccctcacagcccttctctcattatcattaactcctcaatcgcatgaagttcactgagtgcctgtttccctgtcacatgaggtcaggagttctatacaagcctggacaatatggtgaaatctcgtttctactaaaaatacaaaaattagctgggtgtggtggcatgcacctgtagtcccaggtactcaggaggctgaggcagaagaattgcttgaacccaggaggcagaggttagtgagccgagatcgtgccactacactccagcctaggcaacagagcgagactccacctcaaaaaaaaaaaatccaattccaaacactaataaaaaatatggactttggcatgaacccatggtaggggaatggggagaccaaaaatcccctgactgggaaagtgataggctagtacactgctgtccaataaaaagaaaacccaggacaccctcactgttttgtgttgatc

SEQ ID NO: 282381 - DNA, 1000 bp, Homo Sapiens
ctaaatgtatttgatgtgaattaaaataaatattttttcatgtgaaatttattttggttcctaaaatggaagcctaccacattgcattgtaatacagtgtattatgttcagtgtctaaaaactgctaattaagtcataatttaagatgctatgtatctgttatttaaaacatggagaaacagggcctttattccattcatattcataagagcatatttatcctgcattgaaaatgcattacttttgcacattgatattaactgttgtccaacaaataagtatcggagtacgtgagaatattcccagcccagtgatgatttggttctgaggctgatgtgagaaagctgatgtaaaaaatgtatgcatattggcttaccttactcaatttaaagtcaaaagccaacagccaggagcagctcaggtacttcagatgtgcttaatatggagtgaaaactggaccagaggtggaaagatgtatttgccccagttcacttcaaagcagcaaacgttgtttaagcattttagtttgaaccaggcattgtgttaggaatccagggataaagatgaatgaaatgtatttctgttcttcaggagttcacattctagcayatgccttttttcccccagtcatgcactctttttagcagtcttatatgtactagaaaagattttttaaagtttatttaaagctgtgtagatgaaggcttgatctaaaatagtataaggtctccagcttcagtaaaagtttttagtgtttacttaaattagtaatttctcactttctgtctggttaaaatgtcttaaaaagtagaattttcttctttaatccgtttagtagttacctcccttttacttttcaaattcacaaaattacatttctcataaattgtatagtatttaacttataatagttaatatttgtctttttaagatgactgtacatgtaagaaaaaagcttattaaaaacttgatcaaagaaaaaaaaaaaaaaaaaaaaaaa

SEQ ID NO: 282382 - DNA, 1000 bp, Homo Sapiens
gcctgggctggctggcaccaggaccctcttcctctgccctgcccaggtgaagtgtccggacgcaccctcatcgacattggttcaggccccaccgtgtaccagctgctcagtgcctgcagccactttgaggacatcaccatgacagatttcctggaggtcaaccgccaggagctggggcgctggctgcaggaggagccgggggccttcaactggagcatgtacagccaacatgcctgcctcattgagggcaaggggtaaggactggggggtgagggttggggaggaggcttcccatagagtggctggttggggcaacagaggcctgagcgtagaacagccttgagccctgccttgtgcctcctgcacagggaatgctggcaggataaggagcgccagctgcgagccagggtgaaacgggtcctgcccatcgacgtgcaccagccccagcccctgggtgctgggagcccagctcccctgcctgctgacgccctggtctctgccttctgcttggaggctgtgagcccagatcttgccagctttcagcgggccctggaccacatcaccacgctgctgaggcctggggggcacctcctcctcatcggggccctggaggagtcgtggtacctggctggggaggccaggctgacggtggtgccagtgtctgaggaggaggtgagggaggccctggtgcgtagtggctacaaggtccgggacctccgcacctatatcatgcctgcccaccttcagacaggcgtagatgatgtcaagggcgtcttcttcgcctgggctcagaaggttgggctgtgagggctgtacctggtgccctgtggcccccacccacctggattccctgttctttgaagtggcacctaataaagaaataataccctgccgctgcggtcagtgctgtgtgtggctctcctgggaagcagcaagggcccagagatctgagtgtccgggtaggggagacattcaccctaggctttttttccagaagctt

SEQ ID NO: 282383 - DNA, 1000 bp, Homo Sapiens
cctcatcaaggtcaaagggaagtgcaccaccgaccacatttctgctgcgttcccctggctcaagttccgtggacatctggacaacatctctaataacctgctcattggtgccatcaacattgaaaacggcaaggccaactccgtgcgtaatgctgtcacccaggagtttggccctgtgcctgacactgctcgatactacaagaaacatggcatcaggtgggtggtgattggagacgagaactatggtgaaggctcaagccgggaacatgcagcactggagcctcgccaccttgggggccgggccatcatcaccaagagctttgccaggatccatgagacgattaagaaacagggcttgctgcccctcacctttgctgacccctctgactacaacaagatccatccagtggacaaactgactattcaaggcctgaaggactttgcccctggcaagcctctgaaatgcatcatcaagcaccctaatgggacccaggaaaccatcctcttgaaccacaccttcaatgagacccagatcgaatggttccgtgcaggcagtgccctaaacaggatgaaggagctgcagcaataaggaaggtcccggcaagctggctgtcatgtcccactctggacccactctggaccctgctggatgtcagaagtacaggtccgtgtgcatcctcagagccagagctggtctatccagcatggcctagctctgagatgacgaccagacctgcttcctgctctctccatcctcagccactgagtgatccaccgtggagggcacttgagattaagtcccagcccctgcctttcagcttggttcttccttcaaaaatgccatgcaacctgtatttatttttaatgacagcactccctctaaaaaaaagttttcatcctgcctgatcatttcactggtggctgaaggattttagagaacctttgttctcataagaaaaaaaaaaagccaaatccattgacaaaaaaaaaaaaaaaaaaa

SEQ ID NO: 282384 - DNA, 185 bp, Homo Sapiens
gggggctttaaatagttcaaacagtaggaggacttattggctggtccgaaggtagtgagttatctcaattgattgttcacagtcagttacagatcgaactccttgttctactctttccccccttctcactactgcacttgactagtcttttacgagagtttccactctcctggcatccctcgttt

SEQ ID NO: 282385 - DNA, 1000 bp, Homo Sapiens
gcctatattacggatcatttctctactcagaaacctgaaacatcggcattatcctcctgcttgcaactatagcaacagccttcataggctatgtcctcccgtgaggccaaatatcattctgaggggccacagtaattacaaacttactatccgccatcccatacattgggacagatctagttcaatgaatctgaggaggctactcagtagacagtcccaccctcacacgattctttacctttcacttcatcttgcccttcattattgcagccctagcagcactccacctcctattcttgcacgaaacgggatcaaacaaccccctaggaatcacctcccattccgataaaatcaccttccacccttactacacaatcaaagacgccctcggcttacttctcttccttctctccttaatgacattaacactattctcaccagacctcctaggcgacccagataattataccctagccaaccccttaaacacccctccccacatcaagcccgaatgatatttcctattcgcctacacaattctccgatccgtccctaacaaactaggaggcgtccttgccctattactatccatcctcatcctagcaataatccccgtcctccatatatccaaacaacaaagcataatatttcgcccactaagccaatcactttattgactcctagccgcagacctcctcattctaacctgaatcggaggacaaccagtaagctacccttttaccatcattggacaagtagcatccgtactatacttcacaacaatcctaatcctaataccaaccgtctccctaattgaaaacaaaatactcaaatgggcctgtccttgtagtataaactaatacaccagtcttgtaaaccagagatgaaaacctttttccaaggacaaatcagagaaaaagtctttaactccaccattagcacccaaagctaagattctaatttaaactattctctgttctttcatggggaagcagatttg

SEQ ID NO: 282386 - DNA, 1000 bp, Homo Sapiens
gtgactagtgtgactgaagaactgaatttttaattgtatttaatttaaattaatttaaatttaatgtatttaagtttagtgtatttaatttaaattaatttaaatttaatttaattaatttaagtagctgcacatgactagtggctactgtgttagcacagctagacccaggactcctgtccctccatctgtacacagggaatgatgatgaaacatcacaggcttgttacaaagatcgagatatattgagataatacactcaaagtgctcaacacagtaattcaacaaattattgctgctgctgttgaaattgttattgtttttattgaacagggattgcatgacatacgccaagtcttaggaagattagttagactataatatccagttagatttgatgggggaaaattgtagaggataaagcattcacaaggttatttcagtggtaaggtgtgagagaattaagatcttatccagtgaaagaccttgagaatgggaaagaatggaatgattgttgagccataaagcacatgggtgtgcaccactcatacacatcttctcatatcagcttccttccaaggtattctcagagagtacactcccaacccagcccaggacagacactactacgacccctacaagatgcacagccattctccctgcctgcgccagaaactactagtgctccacaacacacaccaacatttgtgtgtctctttctgggcacagtacctcccaaatttgaactacacttcccagcttccttgcagtcaaacggatgccatgggatcaggttctgaacaatggaatgaaggcagaagcaatgtgcgccatttctaggctgggctcatttaaaaatcttccatacaacctgcattccctcttcccattctgtgacaattttagaggccatatgtaccacataatggaaagaacctaggcttgaatgaatggatggagcagagctacccctgtcccctagaccctcactggactatag

SEQ ID NO: 282387 - DNA, 1000 bp, Homo Sapiens
  misc_feature (958)..(958): n is a, c, g, or t
aagaagccaattacaaaaaatcagacaaatacttccatgctcgggggaactatgatgctgtacaaaggggccctgggggtgtctgggctacagaagtgatcaggtaatgcacattcctgatgttgccaggaatgcgtgagcagagcttggactgccttggacagtcaggagagaggtaagctccttgcagagaagttagagctgcagcctaggtgccagcctgctgagtggagtgccaggagggtcattgtttcacccctccttccttggccttcctgggcttctcccagagtcctcccttggaaagcatataatgggaaggtgggctgttgctcactggcctggtgattaatctccttgcttgcctggactacagcgatgccagagagaacgtccagagactcacaggagaccatgcagaggattcgctggctggccaggctaccaacaaatggggccagagtggcaaagaccccaatcacttccgacctgctggcctgccagagaaatactgagcttcttttcaatctgctctgaggagacctgctgtgaccctgagggcagggacatttgttgacctacagttacttgaattctatatccctagtacttgatatagaacacataaaaatgcttaataaatgcttgtgaaatccagtttgttattggaatctggaagcagaatatgacagtcttcctgggatcatgggcctgtttagtaccatagggatgaccaataaacatcactgttttattttttaaaacataaagcactaatgcacaatagtgggaattggggagaaaactatatctatacatggaccacattgtatggacataatatggaccaactataagctataattatatggttataaatagaaagataataagataatctatgacacttagtaatgagctaaataaataaatacatatagaataataatacgctagngatggaattagatagcttatattaggtattagaagcagttga

SEQ ID NO: 282388 - DNA, 1000 bp, Homo Sapiens
gggtagctagggtcacccgctgacctcccaggccacagtaggcccaggcagcccctaggttctcgtctgcccactaggctgggtgcccagcggagccaccctgtcctcaggggtgctgcagaagaggctctgtgtcaggacccccaaggacctggagccacaacgaccttgtcaccagggcccgtgggcccttctgggtgagcagcaggtctgtagcaaaggaagccagccaagcagccctgcttactgggagggggtgggctaaggggctgcagggggaccctggccctggtctctgcccctgtggccctggcggttccctgcttctcctgggctgcaatcctcagggcctcatggccggggtgcccaaggcatgggttctgaggccctgccaggtgctgccacggtccctgcacctgccccagctcatggtgccatctgacctctcctgcttcctccaaggcaccagtgggtccctcaggtgtctggctggacctgggctggcataagctgtggctgcagacggctgccagcttgggccgcgaggccagggtgtgtgactgtcccggggctgcccagagctggggatagcgggtggctctcggcagcctctccccaccttcccagccccccgccctgcaggaccccctccctcagcccagcctcctccctccacagggactccatcagaaataactctaaaaatagaacctgggagggctaggtggggggaaaattgctggaatgttctcattccctttcctgaacaaggtctctggggactccaagagtccagagctactgaacaagaagtcacttctcagtggccccaccacccctggcccctcagagacccccgcagctcccatactggaccctgagccacagggtgggggcagcaggcagccgacaggcatggccgctttggggagagccactgcatgctgggcctggccggcgttggcacctgtgggcacccagagagcgtggagagagctgg

SEQ ID NO: 282389 - DNA, 1000 bp, Homo Sapiens
tagatcccatttgtcaatttgtcttttgttgccattgcttttggtgttttggacatgaagtccttgcccatgcctatgccctgaatggtaatgcctaggttttcttctagggtttttatggttttaggtctaacgtttaaatctttaatccatcttgaattgatttttgtataagttgtaaggaagggatccagtttcagctttctacatatggctagccagttttcccagcaccatttattaaatagggaatcctttccccattgcttgtttttgtcaggtttgtcaaagatcagatagttgtaggtatgcggcgttatttctgagggctctgttctgttccattgatctatatctctgttttggtaccagtaccatgctgttttggttactgtagccttgtagtatagtttgaagtcaggtagtgtgatgcctccagctttgtcctgttggcttaggattgacttggcgatgcgggctcttttttggttccatatgaactttaaagtagttttttccaattctgtgaagaaagtcattgtccaaaagaaatacagtgctagccacaaattcaagccacatatgtaatttaaaatggtctagaaactatattaggaaaggaaaaagaaacggtaattgaatttcaatagtacattttatttaacctgattcatcaaaaatattatttgaaagtgtaatcagtatttaaaaactttgagattatgttcttagcttttcttaatcttcagaattaaacatattttggtaatttcatgcatctaaatttggaccagccacatttcaggtgcccagttgccacatgagctagtgacagtacagcagtgttcatgtgattttatcatacaaaccagggtactactgagagtgaaacagggtgctactaataattatgccaggacaacaagaggaaacctggacagccaccgtaatttaaaaagtggcaattggctgggcgcggtggctcccacctgttatccca

SEQ ID NO: 282390 - DNA, 1000 bp, Homo Sapiens
catggccagtgggttggtttatatgcttgaagccttcctgatgctagactaaccctgggcactctgcagccccagctgctgggtcgctggctgaggggtgctgctgcttccaggaagcatggagggagacctccctgggctagcctaggctgacataggctgaccacccctctctcattccatatgcttaagcagaggtcacagagaggaccccagcctggtctcgtcatgtgtgtaatgcagactgttgtgtttctgataagggcctggcctctcccaatggagcagtagattgggagtgtgaaggactcaggtgccccattcccacggctggagccaagaccagaagcccatgtcagggtccaagtggagtggtgtggtgtgtgggagggggccctgtcttggcaggacacagcccacatctcaacttcctgatggctgctccctcatcccatccagaggcaaggcactcatgaagcctcaaagacaggtttggaaagtgttttcacagaagtgttttgtctcctcctccagtgtgatccttacatcaagatctccatagggaagaaatcagtgagtgaccaggataactacatcccctgcacgctggagcccgtatttggaaagtaaattggggcatcttgggtcttggggtggaggagccagacaggataacccacagtctagtgggggagatgtgactggcactgtgaagtccgtatctcttggagcaaaactgtattccttaaatcttgcatgtctatgggggcatagcctcagttagcccttctttagctgctaaagacttgatcccaacagaagctcctagttaaatgctaaacaattacgtctaagatcagaaatctacatggcttgagctcaggagtttgagaccagtctgggcaacatagcaagaccccatctctacaaaaaataaaaaacttagccaggcatggtagtgcatgcctgtggttccagatacttgggaggctgaggtggg

SEQ ID NO: 282391 - DNA, 1000 bp, Homo Sapiens
aaacgatccacagtctcctgagtagctgggactacaggagcttgttaccacacccagctccagtttataaattcatctccagtttataaaggaggaaaccgaggtactgagaggttaaaaaaccttcctgcagacacttgtccagcaagtggccactccaggatttggaccaaggtgatgtgtcttcaggctgtgtctctgccactgtgccacgctgctgggtggtaggcagcagtgggtgggtgcctgcagtggtctgtaaagaccacctgagatgtccttcctcctctgttccaccctgtccaggtccaagaagacagtctatgaagagagagcaggtgtgactctctcagtgtgctcctctgtgagaagcaggctgacatcccaaagggaagggcggataacagagacagtgcaagcggaggagatgagggtgcctcaaagccgggaggctgggtgatgcaggagcctgcgtgtcccgaggggggtgctgggcccagtgtgagtacgtgtgactgtgactgagacagtgtgactgctgaaggcagggacacagcagctccctgactgggggcagaaggcgttaactgtgtgaaggctggttgtgggtgggtgggctctgggcctcgaacccgggggctgagggagatagtaaacagcagggtgactgacgggaagatcatgttggtagccctgcgaagatgctgcagggctgtgggggtttgtgtgactttgcagttcaacaaattcaaattcagccaacgctggcagggcctgttgtgccaggcaaccagctaggaggaggagactcggacccagcttgcagctgaagggcgctggctgccgggttctgtgggttcaccttgcggtgtcttcccttgctaacactgagtccttacaatagccccatctccaggttgaggctagatggaggggacagagggaagtgacttgcccaaggtgacccaagctcccgagtgccagggcaggatctgaattc

SEQ ID NO: 282392 - DNA, 1000 bp, Homo Sapiens; identical to SEQ ID NO: 114896

SEQ ID NO: 282393 - DNA, 1000 bp, Homo Sapiens
taaagaggatcagaccttctttcccgtgaaaccagtatttggcgccatatataagcctggttaaattggtcatctaaagctgtcaaataagacattctgtgaaaggtaaacatcgaaactggttataagtaaaaccatcaagccaacaacagggtcttgagataacctttgaagcttattgtactggcctgcaccagaagatgtctgcattactcattgctaaaaatgtgtagcacagaactgcactaggattaatttgtttacaagaagaaatttaaactctacgtttggttttcacatacagcagctctattgaataacatgcatctgaattttaagttgcaaaggtatctgaataatttttcatgtgcatcttttgtcgaatgttttggttcaagaaagaatgtttaaagctttttaaaagacttcagttcttaatgtaactgtacccttctgcatggaaaatcataaccaacatggctgcagtagacttcttagtggtatccagcgccacttgcagagggctgctttatcatattgtacttgggtgtaggactctagtgttcttgggtgtattgcatgggctgcattatctacagcattgtacaataacaactagaaaaggcagtatacttcactgatgcttgtctggtaataatcacttctgtgttataatggaaggttttttgtgatgtatgaaacttgtgttttttatatataaatgagtatagttagtgttgtggtaatgcctgttttcatctgtaaatagttaagtatgtacacgaggcactacttctgatttattgcaatgttcagtcctagtttttacttttattcttaaagcattcagttttgctttcaattttatgtaccttagttctgagttagacctgcagatgtgtacagatagttcatatttatgtattgcacataatcatgctattcagcattgatgctatattgtattatgtaaataataaaagccatgtacagagggaaa

SEQ ID NO: 282394 - DNA, 1000 bp, Homo Sapiens
ggtggatcggggcctcaaacccctggctcccggccccccaggggccgagctgtggggatgtggatcccagactgaccccggcatggaaaaccaccagcgtggcccggcgccagacctgcttgtctgtcgcttgtctgcgagaggccaggaaatggctgggagagggagagacggttaaacgaaaaaacatcccaagaatgcacatggctcgtctccggccctggcagcccgccccgccggtgcctgcagcagagggtcccgtgatttggggctccgcctcagcatctgcgggatgggtgcccccggccgggcaggtccagacgccaaggtctgcacaggggtcacccggacacacctgactcggaccatgtggctaagtttgttttgaaatttcactgccccagcgtaacccagagtccaggccacgcccagcacggctggctcccgtccgggtctctgtgtcctgcagctcagggtggccagggcgggcgggcaggagggcaggcacctggcacccacccagacctgcgccctggccatcaggctgccccgggaagccgggcgaccgggaagatagcagagtcaacagggcgggtgcaggaaagggcgctccccatgcgagcctctgaagccctcggcacacagccctggaggctgggaatccttgagcgttttcctctgaggtctccaagtgtttatggtaacaagaggagggaggagggcgaggggacggccgccgctgggcagcagctccgcctgctggtcaccttcctcggggacatgcaaggacaagctgccgacggaaggggctttggcagaaatgcggggagcaggggacgcacccccacggacaggggcttttctggttgccaaacgtgcagacgacgggcctgacatccccatttcccaggaactctgtggatgggtgtcctggggctgccgtaagaaagtgccacaaatgggggactgggagggggtcttaaaaccacagacatggatc

SEQ ID NO: 282395 - DNA, 1000 bp, Homo Sapiens
aagtgctgggattacaggcgtgagccaccgtgcccggcccacatgtgagatataattagatatgtgattcccaaccagagacagggagagccgggacgatgtcctccctccccgcccacccaacccagggaagggcagcagggagatggctctggtcccagagccccagccaccggcggctccctgggcgagggattgacttttctagaatgttttgcccctcctcccagtttccatcaggagccagcgcggccgcataaatcccgctttacggctgttattgacgggggagcagagagagcagccccaggaaggcccaattaattttcccacctggcatctgtgcgccagacgaatttctgaactgctgcagggaggggcagagcgagctggggaaaggccaggctgaggacaaggtcgtgggcaggccgggatatcctaggctcttagcttcagagcactgttgagggagtcccaggctctcttgtctgaagggtagaagtggagggggctgtcaattctgagtagggcttgaagctttcagttaggatgcagatgagggtttcactgaggagacactgaagcaaagacacaaaggaggctagggaggctgccacatggcttttggaaggaacagcttgccagcagagggcacagcctgtgcaaaggccctgaggcaggacctcacctggggtgttggaggaacaacgaggaggcccatgtggctggagcagagtgagtgagggggagacaaggaggaggagagggcagggaggggctggggcaggtcgtgcagggcctggtaggcctcggggaggacttgggctttgaccctgagggaggtgggagccattgagggctgtgggcagaggagagacgagatctgacttaggtgctcacgggcgccctctggctgctgttcagagaacagttgtgggattcacagggaaaacaaaacccagttactaaattctcccaggtccaggtattggctgggatc

SEQ ID NO: 282396 - DNA, 1000 bp, Homo Sapiens
ctggtgggtgtggtcatagtgtttttttgcttttgttgttttttgagactcgttctgttgcccaggctggagtgtagtggtacagtctgcaacctccacctcccaggttcaagcaattctcctgcctcagcctcccaagtagctgggactacaggcgcctgccaccatacccggctaatttttttgtatttttagtagagatgaggtttccccatgttggccaggctggtcccaaactcctgacctcaggtgatccacccaacctcggcctcccaaattgctgggattacacgcatgagtcaccttacttggcctggttattttgtttctgtgtttgtttttgacacagggtctcactctgtcacccaggccagccagagtgcagtggcacaatcacagctcactgcagcctcgacttccccagctccagcgatcctcctgcctccgcctcccgagtagctgggaccacaggcacgcaccaccacgcccggctaatttctgtatttttggtagaaacggggtctctgctgtccaggctggggttttcatggtttctatcgatcacctgcatctgtttcatgtggccaaggctcctgaaagcccttcctgtgggaacagtatccccgtgtgatggaagtaaaaatcgcagcccacagaggcagagaggctggctcaaggccacacagctgagtggtccttagtggagtcggctgttaattctggcatctgccatctaagccagacgatgttaaaaccagacccttggccgggcttagtggctcacgcctgtaatcgcagcactttgggaggccgaggcaggcacatcatttgaggtcaggagttcaagaccagcctgaccaacatgataaaaccccatatctactaaaaatacaaaaattaaccagatgtcgtggccggcacctgtaatctcagctgctcgggaggctgaggctgagaatcacttgtacccagggggcagaggttgcagtgagctgagatc

SEQ ID NO: 282397 - DNA, 1000 bp, Homo Sapiens; identical to SEQ ID NO: 206294

SEQ ID NO: 282398 - DNA, 1000 bp, Homo Sapiens; identical to SEQ ID NO: 206295

SEQ ID NO: 282399 - DNA, 1000 bp, Homo Sapiens; identical to SEQ ID NO: 206297

SEQ ID NO: 282400 - DNA, 1000 bp, Homo Sapiens
cagagggtgacacagggctcagggcttcagacgggtcgggaggctcagctgagagttcagggacagacctgaggagcctcagtgggaaaagaagcactgaagtgggaagttctggaatgttctggacaagcctgagtgctctaaggaaatgctcccaccccgatgtagcctgcagcactggacggtctgtgtacctccccgctgcccatcctctcacagcccccgcctctagggacacaactcctgccctaacatgcatctttcctgtctcattccacacaaaagggcctctggggtccctgttctgcattgcaaggagtggaggtcacgttcccacagaccacccagcaacagggtcctatggaggtgcggtcaggaggatcacacgtccccccatgcccaggggactgactctgggggtgatggattggcctggaggccactggtcccctctgtccctgaggggaatctgcaccctggaggctgccacatccctcctgattctttcagctgagggcccttcttgaaatcccagggaggactcaacccccactgggaaaggcccagtgtggacggttccacagcagcccagctaaggcccttggacacagatcctgagtgagagaacctttagggacacaggtgcacggccatgtccccagtgcccacacagagcaggggcatctggaccctgagtgtgtagctcccgcgactgaacccagcccttccccaatgacgtgacccctggggtggctccaggtctccagtccatgccaccaaaatctccagattgagggtcctcccttgagtccctgatgcctgtccaggagctgccccctgagcaaatctagagtgcagagggctgggattgtggcagtaaaagcagccacatttgtctcaggaaggaaagggaggacatgagctccaggaagggcgatggcgtcctctagtgggcgcctcctgttaatgagcaaaaaggggccaggagagttgagagatc

SEQ ID NO: 282401 - DNA, 1000 bp, Homo Sapiens; identical to SEQ ID NO: 114897

SEQ ID NO: 282402 - DNA, 1000 bp, Homo Sapiens
tacctaatgtagatgacaggttaatgggagcagcaaaccaccatggcacgtgtatacctatgtaacaaaactgcacggtctacacatgtaccccacaacttaaagtttaataaaaaaaaaaagtagaccatatgttaggtcacaaaacacatcttaaaatgtgaaaaaaaattgaaataatatcaagcatcttcttgaaccatagtggaataaaactagaaattgatcacaagaggtattttggaaactatgtaagtacatggaagtttaaaaatatgctcccaaatgatcagttgctcaatgaagaaattaagaaaaatattgaaaaatttctgacacaattgataatggaaacacaacataacaaagcctatgagatacagcaaaagcagaactaagaaggaagtttatagctgtaagtggttacatcttatgacataatgaggacatgcttacgtcttatggtgtagagaggaagaacttcaaataaacaatctaacaatgcacattaaagagctagagaggcaataagcataccaaagctaaaatgagaagaagatagaataaagcttagagtttaaataaataaaatggaaataaaaaatacagaaatcaatgaaagaagaagttgatttcttgaaaatttaaacaaaattaggctgggcgcagtggctcatgcctgtaatcccagcactttgggaggctgaggcaggtggattatgaagtcaagagatcgagaccatcctggccaacatggtgaaaacccgtgtctactaaaaatacaaaaattagctgggagtggtggcacttgcctgtagtcccagctatttgggagggtgaggcaggagaattgcttgaacctgggagacggaggttccagtgagccaagatcacaccactacactccagcctggtggcagagcgagacaaacaaaagaaaaagttcaacaaaattaagaaattattaggcagcctaagtaagaaaaaaaggggcaggatc

SEQ ID NO: 282403 - DNA, 1000 bp, Homo Sapiens
tcctcctctctcctgggacctctcttgggctgggggctggcctcagtttccccgttctccctggcccaggtgtgtgggacgccggagtacatagcccccgaggtgatcttccgccagggctatgggaagccagtggactggtgggccatgggcgtcgtcctctatgagtttctggtgggctgcgtgcctttctttggagatacccccgaggaactcttcggtcaggtggtcagcggtgcgtttcctccacgggcctgggtttgagctgcagccccaccagagctctgggcagcggtcctccacccgcatgtcagggagagaagcaggaagaggggagggagttggatgccaggtggggaggcggtggggtgctgagtgaggcgggtggctggattaattatagggtcacagaggcttcactgaagtgacttgtgaggctgggcacagtggcaaacacctgtaattccagcactttgggaggctgaggcgggaggatcatataaggtcaggagtttaagaccagcctggacaacatggtgaaaccccatctctactaaaaatacaaaaattagccgagcatggtggcgggcacctgtaatcccagctacttgggaggctgaggcaagagaatcacttgaacccaggaggcagaggttgcagtgagctgagattgtgccactgcactccagcctgggtgacagagcgagactccatctcaaaaaataaaaaaaagaagtgacatgtgagcagagacctgcaagaacctgagaatgagagaaagccatagagacagaaaagagaaaggtggctctgagcatagggcacagctgtggcaaaggctgtcagtgggtaccaagcctgccacgttgcaggggcagaggaggccagtggcttggagtacagtgaagtgaggggaaatggtggatggtactagaaaggggtaccctgccttctccctccctccctcattttacctccctccctcattttagatgagatc

SEQ ID NO: 282404 - DNA, 1000 bp, Homo Sapiens; identical to SEQ ID NO: 195604

SEQ ID NO: 282405 - DNA, 1000 bp, Homo Sapiens
aggctccagggatagcgtgtaggagtgattttcctcggagcctgtttgtgggtggatggaagggatgtgggtctgatgggaaggacctcttcttgaccttggactcaacccctttcccccaggccccttcccagcaccggtgtgctctaggtcttaccacagctggcatggggagctggtgtggatgggacaggagctccggggggtcctgcatcgcccttggcccctggcctcttcttacattctaccttcacctggtctctgcagtgtttgtggcaacacagcccgcactctgggggaaggcagcggcaggggtccgatctgtgtcatccattcttccagcctgcgggccaaggcttccctcccactcactgacaccccactcaccccgacagcggtagccttgcttggtgacaccccagagctgggaagagaaaggagaaaaggttacccatcctaggagagggagggctgtggattggcagggcagctggggagtggaagtgtggaagctacccaggttttgaaattctcaaggctagagatttaactggaattaaaggaatgtgggtggggtacagtggctcatgccagtaatcccagcactttgagacgccaaggtgggaggttgggaggccaaggtgggaggatcgcttgagctcaggattggaggctgcaatgaaccatgatcgtaccacggcactccagcctgggtaatagagcaagacccatctcttaacaaaataaataaaggaaacttggagattatctcaagtttagataatcacctcagatattagatttaggtaaaatttagagttactaaaatgcaaattctatgggcaagagttgtctgctgtattcctgctgtaaccccagggcctaggattacctggcacacaggaggtgctcagtaaatatttcatgaatgaataaatgaatgtgggaagtaatccaaggtttgtgaattagtctcgggttataggttgagagattgatc

SEQ ID NO: 282406 - DNA, 1000 bp, Homo Sapiens
ttttttttttttagtagagatgaggttttgtcatgttggccaggctgttctcaaactcctgacctcaggtgatccacccgcctcagcctcctgaagtgctgggatcacaggcataagccaccacacccagccctctccgattttattttaatgtttgtttttgttttagagacaaggtcttgctttgttgcccaggctggagtgtagtggtgctatcatagctcactgcagctttgaactcctgggctccagtgatcctctcatctcagccttgagtagctgggactacaggtgtgcaccatcacgcctagctaatttttaattttttgtgtgtgtagagatggggtctagctacattgtccaggctggcctcaataaatcctcctatcttggcctcccaaagtgctgagattacagacatgagccactacactgggtcctatatatgtttcttaagaaatggggtattgctatattgtccaggctggactgaaactcctgggcttaagccatcctcctgcgtctgcctcttgagtagctgggactacaggcacatgccaccaagcctggctagctctctttttttttttttttaatttaatttttttgagatggcgtttcacttgtcgcccaggctggatgcaatggtgcgatcttggctcattgcaaactctgcccaggttcaagtgattctcctgcctcagcctccagagtagctgggattacaggcacccgccaccacggccggctatttttcttttgtattattaacagaaatggggtttcacggtgttggccaggctggtctcaaactcctgacctcaggtaatccactcgcctccgactcccaaaatgctggggttacaggtgtgagccaccgcctccggcctagctccccgattttaaatgctagcatgaaaatatatacatatattttttaattgtttttttgaggtggagtctcactctctcgcccaggctggagtgcagtggcatgatc

SEQ ID NO: 282407 - DNA, 1000 bp, Homo Sapiens; identical to SEQ ID NO: 195601

SEQ ID NO: 282408 - DNA, 1000 bp, Homo Sapiens; identical to SEQ ID NO: 195600

SEQ ID NO: 282409 - DNA, 1000 bp, Homo Sapiens
attgatgttcttccaggagaggagacacactctaatgcctcaagaagaggacatggggccgggcacggtggctcacacctataatcccagcacactgggaggctgaggtgggaggatcacttgagctcaggtgttcgagaccagcctggccaacatggtgaaaccccatctctactaaaaatacaaaaattagctgggtgtggtggcgggcaactgtagtccaagctctggcggctgaggcaggagaatcacttgaacctgtgaggtggaacgctgtgagtcaaaatcacaccactgcactccagcctgggcaacagagagagactccacctcaaaaaaaaaaaaaaaagacatggaagctcttttggggaccctcccagactttgtcctatgtgtctctttgtttggctgtttctgacttgttttgttactttttaaatgtttttttagagacatgatctcacttcgttgcccaggctggagtgaagtggtgagatcataactcactgtagtcttgacctcctggcctcaagagatcctcctgcctcacactcctgaggagctgggactacaggtgcatgctatcatcgctggctaatttttttttttaattttttgcagagatggggtctcactatgttgcccagggtggtcttgaactcctgagctcaaggtatcttcactcctcagcctcccaaagcgctaggattgcaggcgtgagccactgtgactggcctctgacttgtggggttttttgcttatttgttttttgtttttgagacggagtctcactctgtcacccaggctagagtgcagtggcgcgatctcggctcactgcaacctccgcctcccaggttcaagcgattctcctgcctcagcctcctgagtagctgggactacaggcgcccaccactatgcttggctaattttttgtatttttagtagagacgggatttcaccatgttagccaggatggtctcgatctcctgacctagtgatc

SEQ ID NO: 282410 - DNA, 1000 bp, Homo Sapiens
atgtatttttattggaactgttatatttggagtgtatggatgttcacacttattcatattttattttctcaaatttactcttttttttttttttttttttttgagatcgagtttcgctcttgttgcccaggctggagtgcaatggcggatctcggctcaccgcaacctctgcctcccaggttcaagcgattctcctgcctcagcctcccgagtagctgggattataggcatgtgccaccatgcctggctaatttttgtattattagtagagacaggatttcaccacgttggccaggctggtctcaaactcctgacttcttgatcctcctgcctcggcctcccaaagtactgggattacaggcgtgagccactgcgcccggccaaatttactgtttttattgaggcataatttattttctttccttccttccttccttccttccttccttccttccttccttcctccctctcttcctctcttcctccctccctccttttttttttttgagacggagtctcaccctgtcacccaggctggagtgcaatggcgtgatctcggctcactgcaacctctgcctcccgggttcaagcgattctcctgcttcagccttcagagtagctgggactacaggtgcgcgccaccacacctggctcattttttgtatctttagtagaaacggggtttcaccatgttggccaggctggtcgaactcctgacctcgtgatctgcccacccaggcctcccaaagtgctgggattacaggtgtgagccaccatgcccggcctattgaggcataatttctatttggtgaagtgccctaatcttaaaatcaatgaacttttatattcgtgtacatgtgaataagcatcaccaggatctaaacagagactactaccagctcccaaagaaactctctcatgtcccctcccagtgaatgtctctctctcctccaagaaaatgttctcgctgagcgcagtgggaggcctaggtgggtggatc

SEQ ID NO: 282411 - DNA, 1000 bp, Homo Sapiens
cactccagcctgggacagagctagactccatctcaaaaaaaaaaaaaaatctgtattatatagctaaaagtttgctaagagtttagatttcaattccagcgttcttattaccaaaaatgaataaagaaagagagagggagatatgttttggaggtgatgtgtatatttatgaccactgattgtatcaatagtttcatgggtatatacttatcaaaaaaaaaacttgcatacattaaatgtgtgtggctttttgtatgtcagtaataataaagtagtttgtttttaatgtagcaaacaaaatccagcagcatattaaaagattatataccatgaccaagtgggatttatcccaggaatgcaaggttagtggtttgatgtattaaaatcaaacaatgtaacgcaccagtaggaggaaggcaaaacacatgatcatctcaatggatgtatgcattagtctgcttgcactgctgtaacagagcaccacagcctgggtggcttaagcagcagaaacatgtttcccacaactctagaggctggaagtcccaggatgacagggctggcagagttggtttccggtgaggcctttcttcctggcctgcatttgccactttctcactgaatcctcatgtggcctttcctcagagcatgtgcacttccggtgtcttctctgctttttataaagacacaaatcctattggagtagggccccattcttatgacctcatttaaccttacttactctcttaaaggctctacctccaaatatggttgcattgagggttagagcttcagactatacattgtgggcgtgagggggagagcaactaaatccatagtgatgcagaaaaaatgtttgatgaaagtcagtctccttcactatgagaatctttcacaagccagaaacaaaaggaaacttcctcaaccatataaagggaatctatgagaaactcacagctaacatcatacttaatggtaaaagactgtaaaagattctgtgatc

SEQ ID NO: 282412 - DNA, 1000 bp, Homo Sapiens
tagtgcaatctctgcctcccgggttcaagtgattttcctgcctcagcctcctgagtagctgggactacaggtgcccgacaccaagcccgactaatttttgtatttttagtagagatggggtttcgccatgttggccaggctggtctcaaactcctgacctaaggtgatccacccgcctcggcctcccaaagtgctgggattacaggcgtgagccaccgcgcctcacctgccttgtttttttaatggtcactgtagagtttatagtccacatctttaacttctcgcagtctacattcaagtgctactgcactccacactccagtgtgggtgacagagcgagactctgtctcaaaaaaaaaaaaaaaaaaaaaaaaaaaaaaacctagctgggcgtggtagcgcacacctatagtctcacctactcgggaggctgagtcacgagaattgcttgaacccaggaggtggaggttgcagagagctgagatcacaccactgcaccccagcctgggagacagagcgagactccatctcaaaaaattaaaaaaaatttttgcctagtgctacacataggaatgtgcaggtgcacacgcatacacctgcatacacacacatgtgcacaggtacacataggagtgagtaaaaccagtgaaattggaagattaaggtcttagaattgaactaatgtcaatgtcctgttttgatgttgtattacagttatataagatgttagcatcaggtaagtggatgaagggcaaacaagaccaccatgtactttttttttttttttgagatggagtcttgctgtgtcacccaggctggagtgcagtggcgaaatcttggctcatcgcaacctctacctcctgggttcaagcgattcttctgcctcagccttccaagtagctgggattataggcacctgccaccacgcccagctaagttttgtatttttagtagagacgggttttgccatgttggccaagctggtctcgaactcctgatc

SEQ ID NO: 282413 - DNA, 1000 bp, Homo Sapiens
cccagacactgatggacaggcaggatcagaagctgccaatgaggccaggcacagtggctcacacctgtaatcccggcactttgggaggctgaggcgggtggatcatctgaggtcaggagtttgagaccagcctggccaacatggtgaaaccccatctctactaaaaatacaaaaattagccaggcgtggtggcacgcacctgtagtcccagctactggggaggctgaggcaggagaattgcttgaacccgggaggtagaagttgcagtgagcagagatcacaccactgcactccagcctgggcaacagagtaagattccatctcaaaaaaaaaaaaaaaagctaggcttggtggctcatgcctgtaattctagcactttgagaggccgaggcaggcagatcacaaggtcaggagttcaagaccagcctggccaacatggtgaaaccccttgtctactaaaaatacaaaaattagccgagtgtggtggtatgcgcctgtagtcccagctacttgggaggctgaggcaggagaatcgcttgaacccaggaggcagaggttgcggtgaggcgagttcacgccattgcactccaacctgggcgacagagcaagaccctgtctccaaaaaaaggctaagtgcaagtggctcacgcctgtaatcccagcactttgggatttcaaggcgggcggattacgaggtcaggagattgagaccatcctggctaacatggtgaaaccccgtctctactaaaaatacaaaaaattatccgggcgtggtggcaggcgcctgtagtcccagctacttgggaggctgaggcaggagaatggcgtgaacccgggaggcggagcttgcagtgagccaagatcgtgccagtgcactccagcctgggtgacagagcgagactccatctcaaaaaaaaaaaaagagacatctccatctcggccaggcacagtggttcacacctgtaatcccagcactttgggaggccgaggcaggcggatc

SEQ ID NO: 282414 - DNA, 1000 bp, Homo Sapiens
accacgccaggctaattgttgtgttttttactagagacagggtttcaccatgttgaccaggccggtctcgaactcctgacctcaggcgatctgcccacctcggcctctcaaagtgctgggattacaggcgtgaatcaccgcgcctggccaccaaccatgccaagctgatttttaaaaatattttggagagatgggggtctcactctgttgtctgggctggccttgaactctcaggctcaagcaactcagcctcccaaagtgctgggattaaaggcatgagccacagtgcccggtctgaagcacaggtgttttaaaggaaacctacagagcgttactcaaaaggaaatgaccattgtccaacgtcggggatgaagcagccattggtcggcgcgcacacgtccaggagtgcagggatgcaaaggcccgcaggtgggggaggtaggcggctcacacgagcccctctccgccccgccggccccgcttcttctcccctgcgccctcctctccctcgccaggtccccgttgcctcttccggaagcgggcccccagccggtgtctgggcggcaggagatccatgcccaggaccttgtgggtctgccggaaggccagcattcgcagggcgtgctgcggggcacacacagcctgtcaggacccccgcccgctctgctccccgagtgctggggacacagaggggctggtgtctgtggccaccagcagatgggccaggcctatcctgtatccctcgagatagcccccggccccccgccgctttcttttttgagacacagtctcgctctgtcacccaggctggagtgcagtggcgcgatctcagctcattgcaaccaccgcctcccaggttcaagtgattctcctgcctcagcctcccaagtagctgggattacaggcgtgtgccaccacgcccagctaattttgtatttttagtagagacagggtttcaccatgttggccaggctggtctcgaactcctgaccttgtgatc

SEQ ID NO: 282415 - DNA, 1000 bp, Homo Sapiens
ctgttgagacaacgcgataagccacatggagtgaagttggacccttaccttacacgtatataaaaattaacttggccagaggcagtggctcacgcctataatcccagcactttggaaggccgaggcaggaggatcacttgacatcaggagttcgagaccaacttggccaacatgatgaaaccctgtctctactaaaaatacaaaaagtagccaggcgtggtggcacaattttgtaatcccagctactcgggaggctaaggcgtgagaatcacttgaactgaggaggcagaggctgcagtgagctgagactgcgccactgcactccagcctggacaagagaatgagattccatctcaaaaaaaaaaaaaaaaaaaaaaaattggccgggcgcggtggctcacgcttgtaatcccagcactttggggaggccgaggcaggcggatcacgaggtcaggagatcaagaccatcctggctaacaaggcgaaactccgtctctactaaaaaatacaaaaaaattagctgggcgtggtggcgggcgccagtagtcccagctactcgggaggctgaggcaggagaatggtgtgaacccgggaggctgagcttgcagtgagctgagatcgcgccactgcactccagcctgggcgacagagccagactccgtctcaaaacaaaacaaaacaaaacaaacaaaaattaaaatgaactacagacctaaatatgagctaacattattaaattattggaataaaacatagaagtaattttttttttttgagatggagtctcactcttgttgcccaggatggagtgcaatggcatgacctcggctcactgcaacctccgcctcctgggttcaagaaattctcctgcctcagccttctgagtagctgggattacaggcacctgccaccacacctggctaattttttgtatttttagtagagacggggtttcaccatgttggctaggctggtctctaactcctgacatcaggtgatc

SEQ ID NO: 282416 - DNA, 1000 bp, Homo Sapiens
aagctcagaaaataaagtgactagctcaagtccaggccagtagataccacagctggggctcagaagtgaaacctgagtgttctatttaccaaagtaacctggtcgcttagcacttggaagcttctacctccagaagtccagacacctcccctgtacctctcgtaccacagaggacaggtctcctccagctgtgcccccactcccctaaaagccttgtattcccccctgcaggttccctctggccccaccaggagaagaagatggcctatgaaaaatcaactgatatctctgatgtctccaggtcaatgttcctgtacccatggctggaatatccagacaagaccaaaggtgaggctgggatggacagaaatggagccaagagcaggggactgaaaaagaaatgctacctggctctcactcccaggcaagggtctaggtgagttcagcaaacccttgggaaacatcagggcaggcccttggacactttgatggctctgcacagtcctcaaggtctcaggctcctcagcagggcctacagggatctctaagatgggacacctgtgtgtctccccagcttctgctcccacacctgtaccctgctctttaccctcaattcttgcacctccaaatctttgcatagggtgttccctgtgtctaatgctcttcccccttatctacctggctagttcctgtttgtattgaagactcagcttgtggagtttactctaggaaaccttcccttatcctcccagccaggttaggtacccctcatgtttaccacctgtgtctacatctatcttcacatttgtttccctctgttaatcactaagaaacacttctgtctctccagctagaacagtggtcctcaaagcgtgatcccatgaccagcagcatcagcatcttgttagaaatgcaaattctcgactgggcacggtggttcacgcctctaatcccagcactttgggaggccaaagcgggcggatcacttgagaccaggaat

SEQ ID NO: 282417 - DNA, 1000 bp, Homo Sapiens
ctgtacattttttaaagtaatgtttttattattttaaaatcaatgtattctcattataaaaatattttggaaaatacagtgaaacatgaagaataaaataaaacaagccttaattccgccatcaataggtaactactgttaacatctctattccctccagttcttctaatgtctatgtttttatatcgttttcatgctgaattttgaagtcttcaaagtacatttctgcttccatttataaatgttaaaagtctgtccttgttaaatattacaaacatattcttattagaaactactgtgttattagaaactgcaaggcatgtttgggtataggggtagaaggtcattttgaacatacccgccaattcagggttagtattggactcctctactaaagccgcatttgtgtcccgttatactggatgtatatcacacaggagatcacactccaggctgaagatcttccaggacttcatcccctgattccataatcttgacgccttggcctttgacaaatatctgagcatcgaatggacttctcagaggcctctctggcagcctaagtgggccatggtgcatgatcccaggtgagcgagaggacggtcagggtcggggcaaaagtgcaagaggcaaaagggacgctaggcaggtttgaaatctgagcgagtggcaacctcgctttttcttatcttacttttcggtggttccacccatttgggtgaacaatctggattacctccttggcaggccaggttcccaacaggaggcgggcctgatgaagggctggtgggcgtgttcccgcccaaggtccgtgttggcccgcgcggtggctgggaggccctccccacgcccaactgcgggtataaagaggcaggctgcggactcggagcagctcggggctgcgcagcgggaaggctcgcctagtcggtccgcatccgtgtcgaccacctgtctggacaccacgaagatgccacccgttgggggcaaaaaggccaagaag

SEQ ID NO: 282418 - DNA, 1000 bp, Homo Sapiens
aggccaaggtgagcggatcagttgaggtcaggagtttgagaccagcctggccaacatggtgaaaccccatctctattaaaaaaaaaaaaaaaattagccgggcatggtggcatgtgcctgtaatcccagctactcgggaggccgaagcaggaagatcacttgaattcgggaggcagaggttgcagtgagccaagatcgtgccactgcactccagcctgggcaacagagtgagactcctcaaaaaaaacaaaagtaggccagacgtggtggctcacgcctgtaattccagcactttgggaggtgaaagcaggtggatcgcttgaggtcgggagttcaagaccagcctaaccaacatggagaaaccccatttctactaaaaatacaaaataagccgggtgtggtggcacatgcctgtaatcgcagctactggggaggctggggcaggagaatcacttgaaaccagaaggcagaggttgcagtgagccgagaccgtgccactgcgctctagcctggtcaacaagagtgaaactccatctcaaaaaaacaaaaaacaaaataaaacaaaataaaaacaaaagtagcagtatgagacggtgaaaggaaagcagagcgcctggctttgggtgcccggccagtggtggctgttactactgaggctcagagagatgaagcaacttgccacaggccacacagccagaaaggaacggggccaagattcaaggccaatcctaacccaacacaccatccactttatctttcacagaggctctctcccaccccatccggcctgcccttcagtggaaactgagatggggcccagatttggggtgggacttggctaaggtcacacagaaggaggctgcccctcctgatgtggaggtggcagcatggtgccatcaggcagaggcactaggagtggcctgagacacagacccaaggaggagccagcggtggggttcaggcctgcacctgctgtctctaagagcagaggagcttctgc

SEQ ID NO: 282419 - DNA, 1000 bp, Homo Sapiens
gacagcttctactcaccggcgacagccaccagggccagggtcaggaccacggccttcaggaacatcctgagctgcttgctgggctggaggagtttcttgccacactggatcctccctacaatcaggggagctgacagagaggtcctcaggagagctcacctgcgctgcagtgggaactgactgaagctcagagccagccagacatttaaactctctccctatcgccacccccctggctgccctcccctcctccttcctcagtgtgactccacgctggaaggtgacacattcccaagaggcctcttggacttttgtgaccctgagactacgtggaagctgacagcagatcagggctcaggcgatagttagaagtggtggctgttccgtgcgtgggcacccccacccccaccccaccaacctcagcatggaagggaggaggggaacggaaaacagtaggagaaacacctcagggagcccatgagcccgggactgatgcctcgaggccctgctggcggctctgggtttgtgccgggctcatggggggcaaagtccacatctcctctgtctaccccagtgaagacaggtccccccagtctccacatccgccactaatgctgactccatctcagagcaccagacactggagtgggaccatccaggactgcagacagcatagtgagctaaaatctaggtctcttgtcaaggtacacccaagaggagggggccctggagagcctttgggcagatgggtgtgggagacagggccttgtcctgaaagggttaattgtagagtgcttcatgtcccactcccatgctgtgcctccttggtctagttattcaaagccctgagcttcagtttctcctctgaacaatgggatggttcagtacattaaagaagacattgcttgcgaagtgggtagtacggtcatctctcagtctccatgggaaattgattccaggaccctctgcagataccaaaatccatggatgttcaagtcct

SEQ ID NO: 282420 - DNA, 1000 bp, Homo Sapiens; identical to SEQ ID NO: 206298

SEQ ID NO: 282421 - DNA, 1000 bp, Homo Sapiens
tggattgcagtggcctgatctcggctcactgcaagttccgcctcccgggttcatgccattctcctgcctcaccctcccgagtagctgggactacaggcacctgccaccacgccagctaattttttgtattcttagtagaatgtagaatttacttagtagaattttttgtattcttagccagcatggtctcgatctcctgacctggtgatccgcccgcctcggcctcccaaagtgctgggattacaggcgtgagccacggcgcccggccttattttttctttttgagatgtacccagactggagtacagtggtgcgatctcggcttactggaacctccacctcccgggttcaggcaattctcctgcctcagcctcatgagtacttggaactacaggtgtgtgacaccacacatggtattttttgtatttttagtgaagatgacatttcaccatgttgcccaggttggtctcgaactcctgacctcaagtgatcagcctacctcggcctcccaaagtgttgggattacaggcgtgagccaaatgcccagccaagggtaaagtgtttagacttcaacgtgctttggtccatctgggaaactgaggcacagaagttggcccacccagcccagcggtcctcctaatcccacagacagtggggatggagattctgcaaggggaagaggtgggagtcaggtagcaggcagaatttggacagcctgggaggtagctgcacacagtgacccccttccttattcctccccacagggagtggttttcagagacatttcagaaagtgaaggagaaactcaagattgactcatgaggacctgaagggtgacatcccaggaggggcctctgaaatttcccacaccccagcgcctgtgctgaggactccctccatgtggccccaggtgccaccaataaaaatcctacagaaaattctctcctgagtgcttctttactctggggaaggggctgcgggagagggtaggggcttccag

SEQ ID NO: 282422 - DNA, 1000 bp, Homo Sapiens
gcacagggacttttttataatatgagacttcagttggtattaataggagttacctatttaattctcccagtcatcaatgaggtaatcatcaattcctatagttcaaattagtcataaacaagagctacagcaagactgatagagtaaaaactatataaatacagtaaaaaaaaaatagaatttatggtgtgaaatatgaagtatagcaatatataacaagaacatgtaagcacttgcttccacagcataaatgtaatttacatctgcattaaaggataattttctctgtgaataagagcaaaatggtcttcagagaaacagactgttcatttgaagccatttctgtaaacatcttccaagatagaactgtaatggattgaggaaataacacagaaaagacaaaaacttttgatttcaggcatgcaaagtgcttgggcagatggacagttcccattgtgcattgcctttgataaattgggccttaatttatataacgatgctgtgttcacatccctctcctacctaaagttgtctttattggtttatattgtgttaaaattagcttataattattacttttgtattgtgttcagttttttaagttgcatgtttatactatttgctacagtatttttaagtttggggtgaaggccatcagctgtatcaaaaagacaaaacaatcactatttattcagtattgctgctttacatctccagaataagctttcgatgccaggacagtgactgcctgaaagctgcaggagctcttttcaatgcattttatatatttttagaaaccaaataaatgcagaaaactatttagtatactaattatattaaaccagcagaaatataaaggcaataaagtatatacatatatatggggggaggggaaagattaaaaaatagatttacagccagacatggtgatagccctaaatgtatttctcaatatgtttttctttattgaccctaggaggatttgagttgctgcagcttt

SEQ ID NO: 282423 - DNA, 1000 bp, Homo Sapiens
tgctaatggaccagggtcacagtttcaaaacttgaacaatccagttagcatcacagagaaagaaattcttctgcatttgctcattgcaccagtaactccagctagtaattttgctaggtagctgcagttagccctgcaaggaaagaagaggtcagttagcacaaaccctttaccatgactggaaaactcagtatcacgtatttaaacatttttttttcttttagccatgtagaaactctaaattaagccaatattctcatttgagaatgaggatgtctcagctgagaaacgttttaaattctctttattcataatgttctttgaagggtttaaaacaagatgttgataaatctaagctgatgagtttgctcaaaacaggaagttgaaattgttgagacaggaatggaaaatataattaattgatacctatgaggatttggaggcttggcattttaatttgcagataataccctggtaattctcatgaaaaatagacttggataacttttgataaaagactaattccaaaatggccactttgttcctgtctttaatatctaaatacttactgaggtcctccatcttctatattatgaattttcatttattaagcaaatgtcatattaccttgaaattcagaagagaagaaacatatactgtgtccagagtataatgaacctgcagagttgtgcttcttactgctaattctgggagctttcacagtactgtcatcatttgtaaatggaaattctgcttttctgtttctgctccttctggagcagtgctactctgtaattttcctgaggcttatcacctcagtcatttcttttttaaatgtctgtgactggcagtgattctttttcttaaaaatctattaaatttgatgtcaaattagggagaaagatagttactcatcttgggctcttgtgccaatagcccttgtatgtatgtacttagagttttccaagtatgttctaagcacagaagtttctaaatgggg

SEQ ID NO: 282424 - DNA, 1000 bp, Homo Sapiens
tccaggacccagtgggggaagcaggaacacaccaggctagcagtatggctaaatccatttattccaaaataaaaagcaaaataaacaggagttgcatcgccaggaagtcacgaccccatccccgcctccttcctctgtcctatgctatcaaataaattccccagctgcaaataattattagaacctccccgccatgtgccagctccaatctccactaggtactatacaggggcggccctaccccccagaatatataaaacgttacacagacacaatgtgtacatgggggaaggggggccaccctcagcagctcatgcccttgcctggtctacagttagccccactgtcccgcctcagctgcctctctgactaagaagacgggagcctgagggaaaaattgctttggtgaaagtaaggaggccatgaggcctcctccgaacaaaccaactcccatcagcctctgcctcttaaataacaatcatcatcatccagaaatttaaggactcagccctggccagggtggcaaagggtctgtttgtctctccctattagacaggggtcttgtcttgctactctaatggtaaaggggtgactgggaaggggtggcagggacatggtgggggtggagcctctggccccacttctccaggctttgctgacaggggcctgcttttgtttttatttttatcccatgactttttttaatcacgttttttctgtaactttttttttttttttttttttgagatggagtcttgctctgttgcccaggctggagtacagtggtgccatctgggctcactgcaacctctgcctttcgggttcaagcaattctcctgcctcagcctcccgaatagctgggattacaggcgcccgccaccacacctggctaattttttgtatttttagtagagacagggtttcaccatgttggccaggctggtcttgaactcctgacctcaggtgatctgcccgcctcagcctcccaaagtactgggat

SEQ ID NO: 282425 - DNA, 1000 bp, Homo Sapiens
gaacaggccaccaggtgcagacaggggagggaggaaggggacagaagggaagacgcctggggtgggtggaagtcagtgcccttaggtgctggtacctgtcttcccggccaccgctacaacaggcttccgagcctgttggctgtcagggctggactgcgccccataggcaccatggcagtccccgtggaatcccccaggcgccactaggcagcatacaggtaacacgcctggaaggtccctaacagcctagctggacacactcaagacactctggggctcctcatttggtggcacaaactccaggacccagtgagtgaaatgggaacacaccaggtcgggcagtatggctaaatccatatattccaaaataaaaagcaaaataaacaggagtcgcatcaccagggagccacaaccccatccccgcctccttcctctgtcttatgctagcaataaataagtttcgcagccacaaataattattacaacctcctccccatgtgccggctccaacctcagctaggtatgatacaggggcggccctaccctctggaatatacaaaaccttacacagacacaatatgtacaccggggaacgggggccaccccagcagcccgtgccctcgcctggtccacagttagccccactgtcctgcctctctgaataagaaggtgggagcccccctgagggaaaagttgctatggtgagagtaaggggggcatcaggcctcctccaaacaaaccaactccaccagcctctggctcttaaataacaatcatcatcatccagaaatttagggactcagccctgatcgagggggcaaagggtctgtttgtctttccccattagacagaggtcttgtcctgctaccctaattgtaaaggggtgcctgggaaggggtggtagggacatggtggcggtggagactccggccccacttctccaggctttgctgacaggggcctgcttttaatttttatttttattccatgacttttttaa

SEQ ID NO: 282426 - DNA, 1000 bp, Homo Sapiens
atagctgcagcccagggccaggaggtgtgttcatttgctcaagcaatgaaaccacatctggcacagcagctgcaattggagtcaccactccattaagcttataataattcactgttattgtctaagatccaactgtcttctgcacaggccaaatagcagagttcagtggggatgtggtgagaatcaccactcctgcatctttcaagtccttgatggtggcactaatttctgccatctctctgggattgcaatatggcttctgaactgatcaatgacagttcagagccagtgccctgtagttcctgaaaggtctgattacttcctttccctcaatccacaattgccccagtgaaagcctctaggtccctttggagaacactggtagaaatattttcaacagtgtactggggccctttctcaagggggcccagcccctccttcattcaaggggttctgggtctgtaaactggcttaagtctgagaattgattgaggtgccaagactctgtttttgtgattcaaattagatttttgttcacttgtccttgaactttcctgcttatacaagtcaataacaatttagtaggcttcctatcagtttcacttctaggaatgtcatgatcaagtagccaacgtcatagatccacaggagtctgactattctgagtgctgccttggctctgctgtccattagagtagctgtacctaccttgcctttgttggttgagtgcctccacttggtccctgccacccttggactctcattatttccattgcatttatgtttcccagttcagcagctgcagttcccactgtacggtctggcctacagagaagagcaatgccagagctcttctagtatgctgaggctcccctcataaatgtattccttatggtcaaggtgcaagataatgccctttggacctgcccatggtgggtaagaaagtcttaaatgacaaattccctctaacattctagtgtccctaagcctttgagttcat

SEQ ID NO: 282427 - DNA, 1000 bp, Homo Sapiens
atatttattgagctttcttttttgttacaggaattacaggagactggaaaaatcactttacagtagccctgaatgaaaaatttgataaacattatgagcagcaaatgaaggaatctacactgaagtttcgaactgagatctaagaaggtctttctttacttaacatatctgatattaaagatttcttttcattattctccactttttcttattttagattgctagaaaagacataatcatggattatgttgacattttctttttaaatttttgtttaactttttttttttttttttgagacagagtctcactctgttgcctaggctggaggacagtggcacaatcatggctgattgcagccttgacctccttgactcaattgatcctcccatctcagcctcccaagtagctaggactacagacatgtgcaaccatgtttggctaatttttttaatgtttttttgtagagatgaggtcttattatattgtccaggctggtcttgaattcctgggctcaagcttcccaagtagctgcaacaacaggcacacaccaccatgctcaactaattttatttctattttttgtatagacaggggcttgctatagtgtccaggctggtctgaaacccttgagctcaagtgatcttcccacaccagcctcccaaaatactgggattacaggcttgagcctccatgcctggcccaggtaacatgtttattgagctgtacatgcatatgagaaataagaaacttttttttcctactatcatctcttaaattttgttttctttttcttttgcttcctcttcttcttttctattttttataaatatcatgcacaactataacctatgggaatgatgtagtaacacagattattcatcttgttagagttgtattaaaaataaacaagcatttcaaattatttttgtgattgattttccatttagtaggacattagtatataataaaaatggtgcatgaactttgaagactctgg

SEQ ID NO: 282428 - DNA, 1000 bp, Homo Sapiens; identical to SEQ ID NO: 206303

SEQ ID NO: 282429 - DNA, 1000 bp, Homo Sapiens; identical to SEQ ID NO: 206304

SEQ ID NO: 282430 - DNA, 1000 bp, Homo Sapiens
aaattataaaggacaaacataacatgtttaaatatggagtattcttaacagtataaagcatgggaacgatatgaagttgaaaacttcacattcagaaaatgagactcaatgtttagtttagaaataaatttgttaagcttcaaaatgctacccttacacttcttttaaataaaaccttctgactattgcaggcataattaatatcctttcaacaaaggcagaggaaagcagatatttccagatagtactttaactaattcatgctttagtgatggcagtaaaaatgtttaaatgtagtccaacatattattttaccaaccctgcagggacctctcatggtgcaccacctgcacgagggcctaaagtgtcttatggtagaagcagccactatgattataacaatatatgagatagatatggcagaagtcgggagagttactcaaagggctgtggtgatttttattcctgtggtcatgagcacattggcagaaaagacgaaagaaatccatcttccctcgatagggtgtacctgctcctcatgaagcatatggtagctgaagttatgtggcatctacaggagatggtggggaaagtcagtatgataaaggagactgaagcacatattaaagcaagtattcaaaataatagttattgcataccaaaccttgtttgcaaatcaaaaattgaaatgttcttttttcattgttacttgcatattactaaaagaaacatactggttttgtggagagaggtcgatactgacttactccatgaattttttgagttattcaaaggaaaaggaatttttttccaagtaattttttactggttaatgctatttgaaaactatctgtttagatgtcatatctacattaaaattttctaataaaattttacatgtactgcaaaatacctgatgttattgcttagctgcacatgcttaaaaacaaattcaataggagagtaaattgtggtgtttgctgaacgtttttctttgttt

SEQ ID NO: 282431 - DNA, 542 bp, Homo Sapiens
ctccacaccgccttgcaagctgagggagccggctccggcctctgccagcccaggaaggggctcccacagtgcagcggcgggctgaaggactcctcaagtgccaccaaagtgggagcccaggcagaggaggcgccgagagcgagcgagggctgcctgccagcacgctgtcacgtctcagcaatagactgctcttgagttccaggatacatgtgcaggatgtgcaagtttgctacatgggtaaatatgtgccatggcagtttgctgcatctattaacccattacctaggtattaagcccgatcccagaaaacctgcagagagaagcagcagctggacctcgggatgactatggctggacgtcaggagagaagcagtttgacttcagagggacagcttgatggtgtaacttcagagaagaatctggttagagatggctagactccaggaaaagattacctacccttcccctacccttttctcagctccccttcccactgagagccactttcaccgcaataaaatcccccacatgcactatccttc

SEQ ID NO: 282432 - DNA, 1000 bp, Homo Sapiens
gcaccagcctgcacattacctctccatactgcagccctttatatggaaacttcctacatcactttgctgtgtgtgtttacacaggtggattttgctttacttgcactgacagcacacaggagggcagcacacaccccaacccacatcaactgccattaaagaaaagaaatttcagcccataatttcatgtccagcaaaattaggcatcataagtgaaggagaaataagatccttttcagacaagcaaatgctgagggaattcaatatcaccagatctaccttacaagagctcctgaaggaagcactaaatatggaaagaaaaaaccatcaccagccactacaaaaatgcagtgaagaacgcagtgaattacgcagtccagtgatgctaaaaaccaaccacatacgttaagtctgcaaaataaccagctgacagcatgacgacaggataaaatccacacataccattactaaccttaaatgaaaatgggctaaatgctcccattgaaagacacggggcaagctggataaagaaccaagacccactggagtatgctgtcttcaagaaacccatctcacatgcggtggcatacataggctcaaaataaaggaatggagaaaaatatttcaagcaaatggaaaacagaaaaaaagcaggtgttgcactcctactttctgacaaaacagactatgcgaataaagataaaaaagagaaggacattacaaaggtggtcctgacctttgataaatctcattgcttgataccaacctgggctgttttaattgcccaaaccaataggataatttgctgaggttgtggagcttctcccctgcagagagtccctgatctcccaaaatttggttgagatgtaaggttgattttgctgtacaactccttttctgaagttttactcatttccaaaaaggaaggcaagttttcctgcttccatgacgatggagagcaggcatctcctttcctgagtttcagcttgcttctgacagg

SEQ ID NO: 282433 - DNA, 1000 bp, Homo Sapiens
ttgtctgctcattgctgccacctgggttgggaaaataattgaagatgttttctcaagtccttcaagaatctcttcttaatgttcagaatagtttaagagcgttgttgaggtaaagtgatagctgattattttctgagatttagatctaaacaaactcagcatgacgaggaagcacacttcacagctccagggtgcaatactgatgtaaagttgcctcgtgaggatacatttttcgctcatgtatgcaaaattcctatcagttcatttgcacagccagttccaatcatgtatgtgatcaccagattaaaagcttcatccagaaagacaagactcctcagaacgaatagtagacaagtaagactgctacccacagaagccagtatgcttcaggtgtgaggcggggtaactactcatctcttcacagagccaaggaaagaaaaagaacgtctctaacatgatttaccattttaaacagccttataagttttgtctcttaaaatcatgctgcagaaggagggggtaaaagtcgtgttctgccctgtctgtggcattggagtgccccgctaggtaagaagcaatgcttagatcttgcttccaggcagcagcttgaattcccgaatcttcctgcaaggtgcatacaaatgcagcgtgagaatccatacacgtaatccatattcaccttcccatccatcccgcagaagaggcatggtgacacccaggctactgtccatgcttgagaggacgtatttgaaggttctgttactacaagttgggaatattcacggacatgcctgaataccccggctgtaactcacacgtggtctgtgtaagtggattaacctcggggcggccttgtttaatcctgaataatatctgaaagactgagtttacttgggaatgtgtagtttttttaatgcacattaaaatttattttagctgttaaaaataaaatcattttattaaaaaaaaaaaaaaaaaaaaaaaaaaaaaaaaaaaaaaa

SEQ ID NO: 282434 - DNA, 1000 bp, Homo Sapiens
tgtattatatatttatatatacatactattatatatcttataatatattatgtattatatatttatatatacacactattatatatcttattatatattatatatttatatatgtacacactattacatatcttattatatatttatatgtatacacacactattatatatcttatatattatatatttatatatactcacactatatcttataatacatattatgcatacacatatgcataatacatattatctatacacatatgcataatacatattatgtatacacatatgcataacacatattatgtatacacacatatttacacctatgcatatatgtatgtatgtatgcgaatgtacctctgccacagcagggaaaggttctatcacacaactacagagcagttaggagaagtgtagacacaaaggaatgcagcaactgagggacatgttggcttaagtctcttcaactcctcacacacctcccccttttttggttgattctcaggagcagctgagaccctcagcccatcgcaaaacaagacagactccaagactggtgtgtaaggagatgctctcggttatggggctggcacagagggtcaggtcctgtgaaggggaggtgggtgccctgggtggacatccaggggtcccgggtgatgttgatctgccctgacctctgagacctcttggtccaccatccccagcctcacacccccaggattacacagtggagaatctcatccgcgtggctgtggctggcttggtcctggtggtcctcgggattctgctgctttaggattggcacagctagagaagtccccaagatgcagcaaggaggtaaatacatgagagaacaatgcacccttcagagtgccagagccttggcaatgagtctgatagtcctaggaggttctggaagaaagtctggaccatcattcgggaaaccgtctactgagaaagtcgagaaggggaggcttgggtcaggttcagggag

SEQ ID NO: 282435 - DNA, 1000 bp, Homo Sapiens
ttgtaatgaaagatggtactcctcacgtgctatacaatgtggaaagcccactgctacggactgaatgtttgtgtcccgccaaaattcatatgttacctcctaatctgtaatgtgatggtatttggaggagattaggtcatgaaggtggagcactcttgggcacatgaacggaattagtgcccagtaagcacctttgcccctgccaccatgtgaggactcacagagaagacggctgtctatgaaccagacactgaatctgctggcatcttgatcctggacttccaggctccagaactgtcagaaataagtttctattgtttataagctacccagtttatggtatttttgtccagtagcccaagcagattaagatactcacttgctaagaagcttataaaagctcatgggcataattagtgacaatcaataaatgcattacatgtgcgaatatgatgtatgaagccaaaaaagagatactctgagaaagacagagaagaagagggaaaggtttccaaactttctaggctttcactcttcacatttgctccattggagcatcgtctgtcagtgaattcctctgaaaactttaagtgggtagttcttataggcgttcttatctatcgctttatccttggacctgttaagagcaaagctgctttctcaaagtagagaaagggtctcacctgaaatacaccatcttcttgggtggctggagaaaaactcatattcagaccagaatctagaactgaggggaaggccctaggtgagaggcagaattagcatttttccttggccctgaccttgaagaaccttaagtgtccgggaaatcagtgctgacatctaggaaaccagattccagcatcagggaagacagaaattgtcctccacatggaggcagtgtaggaactggattggggcactcaggaggacacagaagataggcataggtctgggaatccggtgagagagctatccagggtggcatcagagacctggatcc

SEQ ID NO: 282436 - DNA, 1000 bp, Homo Sapiens
gattaaatgagctcatatcatgtgaagcactagaacggagcttgtatatattaagtgctatgtggccatttgctgttaatactttttttttttttttttttgagacagagtctctgtcacccaggctggagtgcagtggctagatctcggctcactgcaacctccacctcctgggttcaagcgattcccctgcctcagcttcctgagtagctgggattataggcgaccaccaccacacctggctaatttttgtatttttagtagagacggggtttcactatgttggccaggctggtctcgaactcttgacctcaaatgattcacccgccttggtctcccaaagtgctgggattacaggcatgagccaccgtgcctggccagctgtaaatacctttaagatgaacataacgtctgccttccgcgcgtgttgggagcctggtgcattgtttgcccaggtgtgctcttctcagaacactgatcccttgtgttgttaaatgttaaataagaagggtcctgtccaagcccagttgccttaaggaagcctggggttaaaagctagggaggcttctctcctgcagaggtgcctgtgacatcttcaagagggagtgaagaatttcaccggctgatttgaccacagatcaatttcttgctatcagagtgggatggggtttccacaaaacacgtctttgaagacaacaaatactgcttccttccctccctccctggagccctggcctcatactgcttagcttatctggtagcagccagagaaatggcaggatgcatctccctgggcttagaactggggcaggaggcagcagccaagtcaacagcaggtagtggccagtcctcagctctaagccagcaggtaggactgcagaggtgcatgtggcaaatcatagacacctgatgtgggctgccactgactgagacactgctgagctggacagcagacacctgcaacccaaggatgatgaagaggaacttgaggcctttaatt

SEQ ID NO: 282437 - DNA, 1000 bp, Homo Sapiens; identical to SEQ ID NO: 206302

SEQ ID NO: 282438 - DNA, 1000 bp, Homo Sapiens; identical to SEQ ID NO: 114900

SEQ ID NO: 282439 - DNA, 1000 bp, Homo Sapiens
ggcaccgggggaggaggggctgggtatcgggggcggggaccctcagggcgaagctcgatgttaggcgggcttcttctggaggcccgtgtctcctgggcaagcattatcatctccacgttttattttattatattattatttatgtatttattgaaacagagtcttgctctgtcacccagggtggtgtgcagtggtgcaacctccaccttccaggttcaagtgattctcctacctcagcctcccgagtagctgggattacaggcgcccaccaccacacctggctaatttttgtatttttagtagagacagggtttctccatgttggccaggctggtctcgaactcttggactcaagtgatccacccacctcagcctcccaaagtgctgggattacaggcatgagccactgcatctggcctcgtctccacattttagacaaatcaagacaaagtgacagccaggggcctcaggcttgcaaggcagcagctcaaagtggaaacccggactcctggcccctcacccaggccgcacacccacagccaggcctccctcccagaagccgccaccaggcctgctccggggccccagcttcctgtgctcccggtccaggcggtggccattgtctgccagccattaggaaccagctgggggaagtgccatgccccagcccctgggcagcccatgtgtccctcctacacccgcgggcagggccctcgagtcccaggtcccagtggccagccatcggtcctctcactaaccgcaggatggccactgaaggccagaagggtgggggccttgggggctacccgaaaatctctcccaccatggcccaggcccatgggcgttctgtggctccagcctgtggctcggggtgggcggttggggggctgggttttctgaccccggtggtggtgaatgaacagcagagccccatctacgcccccggcctgccggctcgctggccttcctaatgagcgtgtgtttccagagccctttgatc

SEQ ID NO: 282440 - DNA, 1000 bp, Homo Sapiens
ggtggccgccctggctctggcccacaactgggcactggccgagggaccctgcggctccgatcccggggccccgccacggtggaggatctgccctctgcctttgaagagaaggccattgagaaggtggatgacctgctggagagttacatgggtatcagggacacggagctggcggccaccatggtggagctgggaaaggacaaaaggaacccggatgagctggccgaggccctggacgaacggctgggtgactttgccttccctgacgagttcgtctttgacgtctggggcgccattggggacgccaaggtcggccgctactaggactgcccccggaccctgcgatgatgacccgggcgcaacctggtgggggcccccagcagggacactgacgtcaggacccgagcctccaagcctgagcctagctcagcagcccaaggacgatggtgaggggaggtggggccaggccccctgccccgctccaatcggtaccatcccctccctggttcccagtctggccggggtccccggcccccctgtgccctgttccccaccctacctcagctggggtcaggcacagggaaggggagggatcagccaaatttgggcggccacccccgcctccaccactttccaccatcagctgccaaactggtccctctgtctccctggggccttgggttctgtttgggggtcatgaccttcctagtttcctgacgcagggaatacaggggagagggttgtccttccccccagcaaatgcaataatgccctcacccctcctgagaggagccccctccctgtggagcctgttacctccgcatttgacacgagttgctgtgaaccccgcaacctcctccccacctcccatctctccttccaggcccatccctggcccagagcaggagggagggagggacgatggcggtgggtttttgtatctgaatttgctgtcttgaacataaagaatctatctgctgttaaaaaaaaaaaaaaaaaa

SEQ ID NO: 282441 - DNA, 1000 bp, Homo Sapiens
  misc_feature (334)..(334): n is a, c, g, or t
  misc_feature (768)..(768): n is a, c, g, or t
agagaatactacatctttgttagtgtgcctttttgacattttttcctggattttctccctttatatattcaaatacatactaattatacgcattacaccacagaagttgaatttttagtttttcatatgcaaatataaatatatgtctgttttgtgtgtatatacatatattctaaaatcaattacatatttatgcttttagacatagtcaaactaagtatgtacacatcatcctaaaagtgcattttttcaaattgataaaatatatcgaagtcagttcatacaagtgtagccatatgttgtggcttattttcacaactaatcctaaaagggnaaatgagtcaccaagttcagctatggcccttttccttaaaatattttttcatattggcaaatcgtgaaactaaaaaaaaattagtagagaagtcaaaatctcttttaattccatttgcttcagcaagtcaactagaagattggaactaagagactataaaatagaggcccccagcacaatgaaatcagtctgctataaaaggcgacacatgccagtttttcctccccaatggcagatgccacaccctaaagcagacagaaggcactgcagcctgtaggagaagcacaacacaaagccggcaggacttggttttgtcttttaaaccacggagaatgctaaaatacctttctaaagcatctttgctgaagataagaagtgcactcgaatttgctcaacttttcatacacacctcaggaaaacaaaataaaagcctntttagtttcatttaaacatccagggcttaacaaacaaaacaccaattgtcaggggtctgttacaaagtgatgaaataggttcccattacacaaaagcacaatttcaaccacaggttcaaatttccattgtgttccttgcctcaactatctcatatggcaattctaccttattgtttctttttgatgaaataaggtactagaaatcactgcgctcatttttcctaatgaattc

SEQ ID NO: 282442 - DNA, 1000 bp, Homo Sapiens
  misc_feature (222)..(222): n is a, c, g, or t
  misc_feature (230)..(230): n is a, c, g, or t
  misc_feature (400)..(400): n is a, c, g, or t
  misc_feature (474)..(474): n is a, c, g, or t
  misc_feature (478)..(479): n is a, c, g, or t
  misc_feature (482)..(482): n is a, c, g, or t
  misc_feature (503)..(503): n is a, c, g, or t
  misc_feature (507)..(507): n is a, c, g, or t
  misc_feature (579)..(579): n is a, c, g, or t
  misc_feature (661)..(661): n is a, c, g, or t
  misc_feature (718)..(718): n is a, c, g, or t
  misc_feature (744)..(744): n is a, c, g, or t
  misc_feature (760)..(760): n is a, c, g, or t
  misc_feature (827)..(827): n is a, c, g, or t
  misc_feature (836)..(836): n is a, c, g, or t
  misc_feature (845)..(845): n is a, c, g, or t
  misc_feature (857)..(857): n is a, c, g, or t
  misc_feature (885)..(885): n is a, c, g, or t
tgcagcaactggagcgggcgcggactcaggacaacccaggcgggaggggaggaggctcgccgcgctggctcgcctgggctccgggctgggcaggggtgggcagggcccctcggcagcggcccggcaagcgcccctgacccccagggcgcaaggtagagcgcccccagcccaggcgcggggccaggcgcctatatccaaggtgctgcgcccccagccgagagnggaggggnacactgggaggacggcggggcgccccggtcaggccgtttttttccccaaagagcccccagtggggaggggaggagtggccagctgtcaactggattccacaggctgagctccccaggaccctcgggcttcgggagtgaggaggaccccacgccaggatacacacagctanccacccctacttcgctcttcctgctacctatgtgcccagggtcccgcgtgtggctggagggtagagtctggaangccnnccnggtggtctgtggcctctgacntcancaggtggtttctctcctttttccttattagcaacagaggctgcccaacaaagagtatgcagaaatgatcaangacgacctgtcctggggatagtgcaggccccgataaacaataaagtcccctgaagggttgctttcctctcatatagtctcanactccatccatcctgtgaggagggcagatgggggaagagggactccagacttcattntggctcaccgttccccatttagggtnttcccttctccccacntaagatgaagaaggagtccgtgtttgttccgtagcgtgtctccgtacaccaccaggggaatcccccntctgacacnttcagaaantttgcgcccccngaacagcgtccgtcctcgtgttaccagntggaccccaagtttttccagcgctaattaaatcgaagaagatcacgctcttccctcattgctgcagtggtttccccaaagtttccagctcattagtttaagcctaattggaattc

SEQ ID NO: 282443 - DNA, 1000 bp, Homo Sapiens
ggaaaaaaatgcatggtagtctaggaaatggagtttgtagacttccagcccttgcagcatagaggagcatgtggaagggtgggaactgaaccaagcgtctgcaggcaaacaactagcacagcgtacaggcaccagccccagtgtgagggatcccagaggcccacagctaagggatggtcactacagcacttgcctccttgttttctttctttgctggtcatcttggcagagcaatctgaattgtcaggtcccatatggttcatctcagtccagagagtgacagccccaggggaacaggaggaaaagaggagaaggaagaaaaaaaggggtgcttggaaccagggcatctctgaaattggtagccttttttataatggaatcctctggtttacttggtgttataagtaaaatgtttattcagaaacagaatgcttgttccttggaactataaggaaaaattagcatttagacaaaaagttttctcagcaaggcaattttactttctgcaggaagggtgttcctcacagatggaacaatggcgagagcacacacgaacaaaggagggaagcaatttttatcctttatgcagcttgtccctgctactgtgtcctgtctccattggctgaagccagaccacacaatctaagctaaacctgactggctaataacttaaaactttcctaaataggtgaaggcaagggagaacaaaggaaaagaggaagttgcttgcaaaaggacttagaaaagtaataaccaaatatctggttaaagtacaaggacatagaatgtactaattcccttatatctaacagctacacaggatagggcttaacaaagagttattagcacaaaacaaggtggcttgaaggaagttagtctttaaaagaaactattatttctaacacttatgatttattttttaacaagaagggaaactttgaagaggaaccttttttactttctacacttggtttattttactcacctccctattctttcc

SEQ ID NO: 282444 - DNA, 1000 bp, Homo Sapiens
taaagaaaaaaataaacactggaagaatttattagtgttaattatgtgaacaacgacaacaacaacaacaacaacaaccacaacaaacaggaaaatcccattaagtggagttgctgtacgtaccgttcctatcccgcgcctcacttgatttttctgtattgctatgcaataggcacccttcccattcttactcttagagttaacagtgagttatttattgtgtgttactatataatgaacgtttcattgcccttggaaaataaaacaggtgtataaagtggagaccaaatactttgccagaaactcatggatggcttaaggaacttgaactcaaacgagccagaaaaaaagaggtcatattaatgggatgaaaacccaagtgagttattatatgaccgagaaagtctgcattaagataaagaccctgaaaacacatgttatgtatcagctgcctaaggaagcttcttgtaaggtccaaaaactaaaaagactgttaataaaagaaactttcagtcagaataagtctgtaagtttttttttttctttttaattgtaaatggttctttgtcagtttagtaaaccagtgaaatgttgaaatgttttgacatgtactggtcaaacttcagaccttaaaatattgctgtatagctatgctataggttttttcctttgttttggtatatgtaaccatacctatattattaaaatagatggatatagaagccagcataattgaaaacacatctgcagatctcttttgcaaactattaaatcaaaacattaactactttatgtgtaatgtgtaaatttttaccatattttttatattctgtaataatgtcaactatgatttagattgacttaaatttgggctctttttaatgatcactcacaaatgtatgtttcttttagctggccagtacttttgagtaaagcccctatagtttgacttgcactacaaatgcattttttttttaataacatttgccctacttgtgct

SEQ ID NO: 282445 - DNA, 1000 bp, Homo Sapiens; identical to SEQ ID NO: 206306

SEQ ID NO: 282446 - DNA, 1000 bp, Homo Sapiens
tgaatcgcagaactgaaacaaaacacttatattgcaaagttccttccctttaaaatgagcttctggattgcagagatgattttttatggtcttagcgtgcctcatgctgtagaccacatcgttggagctctgggagagctctgagcagagaaagaccttggtgatcccccctggcccgatctataggattgaggaatgaggcttgtagaggtggcttgcccaaggtcacaacactagagggtggttgagctgggccaggacccagacaagcccttttctctcagtctagtgaggcctctgggaaggataggtgaaaactataaatagctgttcaagatactctgagtaaaagtcagtggtgttatctggaatttctactgaagaggaaatacagcagcaaaggtagactcatcagatggtgaaagtgtcatctcctttgtaatttatactggtgagaggaggggaaggatgtgctttcctatttttacactggtacttcattcatccttgtcttaaacttaagaaatgaaatgcatcagggcacacatatacatagaaacagcacataagccattttggatggcaattccagcactcttttaatggattggcttaatttttttttctgatgcctctctatgtgtttgaaaagttgtattgatagtcacacagagtgtactaaaataacctaaaaggtcttgaacctcccctttacctctttagaacctctgaatttggagacagctagcaaacggcaactgtagcctagcaaagatggcacagcaccacaaagggcaaatggagtcaactcccttccatgctctgaaggtcttggccactctcatcagggttggctgtgtactatccagcagctcacagtcaggagacctcccctcctcagtccctcccatttctttcttccgcaaggaaagaacattgcatgtgggcgtgtgtgtgtgtatgtgtgtgcatgtgtgtgtgcatgtttcttctgtgcata

SEQ ID NO: 282447 - DNA, 1000 bp, Homo Sapiens
tattaccacatgtgtcaatcacacaccttgtggtgaaagcgagctgaacgcactgatacatgaagacatttctgactcctccctgaccttcagcctgctgggagagagactggaaggccagccatgctaggtgacaagcttctgagaggcaaagttcccctccccaagatgtacccagccactattcctgtgtgtgtgtggcggggtggatagcacccttggagctgggcatctggatggtggttggggtgttagggggatgtggcgatccctgcgacagacagcagagtgaggtctgaatctgagaagctctgcctccagatcagataacctatcgcactcccagaggccccctcctcctgaaaggactttagtctttggagctgtcacctgagctgagtgggacaagagctctacagggcaggccacactgcgaaggaaggaggcaacacgggcaagggctgcctgctgcccgctggagaccgcaccatggagccaggcggggcccgtctgcgtctgcagaggacagaagggctgggaggggagcgggagcgccaaccctgtggagatggtgagccgccctcgggggtgcagaaggcacaggcaagtgggggggaggcggggagagatgcgctatggagagaaggctccaactgcctgatgccaatccttcctgctgtccagagaggccaaggaaggtagaccctggcctcagcccagagccacccagctggaagatggaacagaaaagagctatgtcagagctgtggcctggccttatccttctgactgtttagccccagatagtgaatggagtagcttcccattccctgagtgccctgttcccagtaatgtcaccaggccccctgcttgcctatggcctcctcaccactggcaacagcaacttccccttctagtagccccaaccatgatactagatattggctggttggggtgagggcagctgctgagcacacaaagcatttcctgaccacaggat

SEQ ID NO: 282448 - DNA, 1000 bp, Homo Sapiens; identical to SEQ ID NO: 206305

SEQ ID NO: 282449 - DNA, 1000 bp, Homo Sapiens; identical to SEQ ID NO: 114901

SEQ ID NO: 282450 - DNA, 1000 bp, Homo Sapiens
tgctcacctgccatcactatgcatccagttcccacagcttgtgtcgtgaaagagcagagagatgatgttaaactccttgggaggagagagggcttcttttggtttccctggagtgagacagccaggtgtctttcttttgcggggggacacttcagacccatcaatatggaattttgggagccgacctgagtgcaaatcctaattctgcccctgttggtgcagatggctgtgggcggctcacttgaccttttagagtctgcatacccacctgtataacaaggtggattgaatgagacaatgcccacgaaatgcccagttacagtacctggttcaaaacttactgcattttaatttttcacttaacttataacatgtcttgcttctccagtgtgtggaaggcaccgggcagtttgcagagataagcaaaacacagttcctctcgtgcagaaggttagaatctatttttttttttgacagagtcttgctctgtcacccaggctggcgtacagtggtacgatctcagctcactgcatcctctgcctcccccagttcaagtgattcttctgcctcggcctcctgagtaactgggactacaggcgcctaccaccacgcccagctaagttttgtatttttagtagagtcagggtttcaccatgttggccaggctggtcttgaattcctgacctcaaatgatccacgcacctcagcctcccaaagtgctggattacaggcatgagccaccacgcccagccaaaggttataatctgatggagagagacacccgtcttggaactgacataaatttctggggtttgagaaatgggcgggatttcactggtagcttctggaaggtaagagttgtccaggaattgggaagagtgagaggaaaggcacggacagggagcatgtaagataaattgaggctggctttggaaggctgaggagggtgagaaaaggtgggctgggaccagaccgtggggagaggtgagtggcattacaa

SEQ ID NO: 282451 - DNA, 1000 bp, Homo Sapiens
caatgtagaggtggaaacatgaggcagggagctcattaatgacctgtatgagaagggatgaaagtctgagctcaggcagtgagatggagggaacaatgtagacatatttagggtgtgagggtttctatacaatgtgagagcattatatgcttttctttccttgcttctgaaaacattaaaatagaaaaatctggagaataatacaaacccctaaaaccccattacccagaatgaacaaatatttacattgtatcttatgtacttcagatctatttttattataaaaattaaaaaaattacaggtaaagtttctccacttagttccatccactactccattgccagaggcaatctttgccaggaattggcatttatcacagtagtccagactttcctatgttagtctcatagttaagtgttcataaacattatatagtactcacagaaatggtttctatagttttctgcaaattgttctacatagtgttgatatgtttagctctagggcatctatttttgcctgctgtatagtgttctatcaataaatatactacattcctttcttctagtagtagacatttagattgtttacagttattagcttttgcaaacatttcagtttttgcatacatgaatgaggacctttctaggatatatactagaaatggaatttttagtcttaaggaaaacatattttcaaatttattacatactgccgaagactttctgaagtgattgtaccaactaaaattcccaccaatagtagacgttctctttctccatgtcttctccaacacttgctattatgggccttataaatttagccactctgatgtgggtgatttttctttgcatttctttgattaccagaaagaaagagcaactttttatctgggtattggtcttgaggttcccttttctgtgagttatttgttcatatgctttgctcatttttctcttgggttgtttgtcattatttttcctagatttgttggaattc

SEQ ID NO: 282452 - DNA, 1000 bp, Homo Sapiens
cacagatcacattgaaagcattgcatattcaaacatcttggtcttctttattggcatgcccacagggtcttctgacctctgattagatcagacactttttagatattgaatcatcagtttctgtacaactatctgaataaggtatataatcaatgaaatttagaatttttttctatgcttactcctgattggtaatttgtttgggtttagaattctatacaaggccatttgtaattttcctcagcactttaaaaatattaaaccatgttttcttaacatctgttgctgttgattatgtctgctcttggtgtaaatatcattcctttgtaggtaatctgtaattttttttcctctggtaatttttaaagcttcccctactactttcctatgtgttctgcagtttcacaacaatgactttcaatgtgtatttatttttacttaatctatttaataagatttaattagaaaggcagggctttcatcatttctggaaaaaatcccagctattttctctttaaatagtgtttctttaccattctcattctcttcttctgaaactgttgttattatctgttgaagcttcttgagttattttctaggtctcttaattttttttaaaacaataattgtctccgtatgttgcattttaggaaatttctcattactctttttaaattaactgttagtttttactaagcccggctagaatagtctatccactgaggtatgtattttgttttctatatttttcattcttaatgtttcttattgttccttttacatttttacttgtatatgtttcattcctgctttttttaattttctttcttctttctcttttctctctttttttttttcttcttgcagtgcagacatcgactttattagtacagcagaggtgcccacagagcaggcagaagggatcagtgcctggatctgtcccttcctccttctgccctcgctgagccctagtgtgtccggaattggtgggttcttggtc

SEQ ID NO: 282453 - DNA, 1000 bp, Homo Sapiens; identical to SEQ ID NO: 206308

SEQ ID NO: 282454 - DNA, 1000 bp, Homo Sapiens
taaggagcaggtaacctagatccctcgcatgtgcagttcacaatagggttcacgctcctgtgagactccaatgctgctgctgatctgacaggaggtggacggagctcaggcagtaacgctcgctcaactgctgctcacctccggctgtgccactcggcttctaacaggccagggaccggtactggtccatggcctgggggttagaaacccctaatgtaaaggatataaaaaacaaattactaactttgtccaacaaggacccatattacaaaagaactacaaaggcattttaagaaatctaaagggattctggttttgtgtttagccactgttgaaggctttatttttttttttttttttgagatggagtcttgctctgtcacccgggctggagtgcagtggcatgatctcggctctgctgaaggcttttaaagaattcttatgattaataaaatctgatgtgctatatttacctgatgtcttacaacgtgtcttataacagcatcaaatctactataaagctgtttccaatctcccttcctgtcagcccacttgggagttggcaccctggtgtagggatggcaattgggggagggagaaggaaggaccgtcctttggaaacctgaggagctcccagccaagctaagctgtgaggtggtggtatataggaagtgctaaatctggccaggggaggaggctgggtgaagaaatttgaatcatccttttcattctgctttatgccatgcggctctccctcaaaggaactcaaacgcattagcatatgcaaaatacataaaatgttctaattatctgactctagtaaatatttttttttccataaaccatttccatcagaagaccaggaaatgaggaccaggcaagctgcttttaaaattcaacagtgatttctcagctaagaaaacacaaattggatagagcagataatcttcgtatctaacaggaaagatacattgtagactaattaatccagttttgatcc

SEQ ID NO: 282455 - DNA, 1000 bp, Homo Sapiens; identical to SEQ ID NO: 114902

SEQ ID NO: 282456 - DNA, 1000 bp, Homo Sapiens; identical to SEQ ID NO: 195518

SEQ ID NO: 282457 - DNA, 1000 bp, Homo Sapiens; identical to SEQ ID NO: 195325

SEQ ID NO: 282458 - DNA, 1000 bp, Homo Sapiens
gacgccggaggcttgcggcccagggccggctgcaggcttgaagcctgctcggagcttgggattgtattttctttggctttctggcgcgctccttattatttatttcttttccctctgttttatttttattttcaagctgccggccaggctggatgccgtccattcaccccgctgccttggagcgctgcgcgcagacagccggagccggctcgggctcagccctgggggtggggggcagccgagggcgcggggggcggggtacgcgggtagcagctcaagggtgaggggcagccgagagcgcgcggggcggggtactccgggagcagctccgggtggggggcagccttgggcacagggaggtggggggaactcagggggcagctccgggtggggggtggccgagggcgctgggggccgggggatacaggggacagctcgggagcagccgggtgggggtggccgagggcgcggggagcagcttgggggttgggggcagccttgggcgagggaatgttgggggacgcagggggcagctcgggtgggggtggccgagggtgctgggagccacagggggccgagggctggggagaacaggggcaccgcggggttggagggaggacgccaggctgtgtgcctgcctggctggggcgacaggaatccatcttggcagtgggtgcctccgcggtccagggatctcgtgacccggcagtaacaatttggttttcctgaaaagatgatggtaattcggtgtaagacctgggggtaggaggcagctgaaacttggacccccactggagtccccttcttccattcttttctccctgctttgtgcccagggggagcacagaccttcccctcgagggtgctcgtgggcggcatcccgcgggagccggagcctctgagaggtctcctcctgcccctggagatcccaccctcacctctctggagccactggtggatggcggagtggcggggtgggggatctatggagagagtggga

SEQ ID NO: 282459 - DNA, 1000 bp, Homo Sapiens
actcacagactctagacctacctaaaacaaactgataagtgttgtcattgactcctactttctttaccaggaattattactcacctgtgcaccatgtagtctgaactagaagaaagtaccataatggaagacattacccgtaatgtttacaagagaagacaacaagaaagatggttgtgaacaaaacttatgaaagcaggtatttatatgcccatacgtagtatatgggtaatgaattaaatgattttgattttcgttcacacaaagatagtggaataagactgatgctttggatgtagaaaagaaagattagatcatgatcaaaagaaaccagtgtaaaagaagatgagggcagaaaagcactctgttacaaagttatatacccgcaaggaatgtgactcataaaaccaaatggatccatgaggagagtatttatatccattttttgttatttttattacaaaatctatgcatgttaagtacagaaaatttttaagaaactcatataaacaagataattcctatacccataaataatgtgttagcaatggtatatgtatgcatactaaaccatgagcaaaggaccctagctgtcttgttcacagctgataactcagtggatattctttggatgaatgaatttaagatgttttttctatgcatatatacatataaaatggagttatcccatacacactattttgcacttgacagtatatgacagacatagttccatgtcgaattatctccatgtcagtatatttccatctaccgtatttgattgctgtgttttatgacatggaggtaccataatttacatgactgattccttttctgtctgagcccactggttggaggcatttcctcctttttatatttcatttatttgtccctccttttccgtgagctctaatagttaatctcacgctttcatgagcgttttggtttcctgaagaacttgttaaaaattcagactcctgagctccatccctggaaatct

SEQ ID NO: 282460 - DNA, 1000 bp, Homo Sapiens
cctgctgttcagggttccgctgggaaattcccacctggaccagctacagccccacctgtttctccaataacacgcatctgggctgctgggtgtggatcccttcacaaaggcaccctgcacaggggacacaggtgggagctgagtttcccacaggagaaggcccctgcacagcccagcaagttctgcattcccccagaggagatgccttcccataatctgtcttcccagaagaagcaccttttctaattctgcaccaaatgtttcatttgctgaaggcggccctggtcatgttcactttcacacatagcaagagaaatgcacattaaaattccactgagatgccatttttatctattacaatgaaaaaaatccagaagtgtgacaacttgatctactagcgaggctgcatggggaaacaggcactttcataggtagctggtgggagggcaaaatgcccacagagggcaaattggcaatatctatcaaaattacaaatgtatttatcctttcactcagtgaccccatttggaaatttaccctatggatgcaggcacacaccacacacccgcacacacacgtgtgcacacacagagtgatgtatgagcaaatttgttcactgcagcattgttctgaattgagctggaaataatccaagagtatgtgtcacgagaactagttaaataaataatgataccaactcaaaaagggacccaatgcatttatattatgagggaagctctctctgctccaatggacaaaggtcttcaggatatggtggtaacagaaaagagcaaagaggagaatagtataaacagtgtgccacaattatgtagcaaaatacatctgttaatatatttgtgttaatatttccagtaacactcaaagatcatgcaagaaattcatcaaaatggctatctttaggggacaaggctggcaagaaatgagtctggcacagatggggtgacagaaagattttttgatacataactttttatattgt

SEQ ID NO: 282461 - DNA, 1000 bp, Homo Sapiens
ggaaaggggatctgtgacctgtacattatcatataacttcaaaaaggaaagctccttagtccaaaaagcctagatgctgaggtatagcccttgaaatgttttcttccctgtgaattttctagcaatttgaggttttagctaagatgggcatttatccaattttggcaataatgagatttttacacatttatacctttttaggcagcttgggaattcagaactacttatgaaagctctcaggttgaggcagcaccatcagacccagaaagggttcccagtattacttctgctttcgggtcttacaggctgagtgggttttctcatgccgggtacagtttgacagccgaccaaatcttctcccacattttttgcaaccatatggtctctcagcctcatgactctgcagatgaagcacaaactcctcattctttgggaaggttttcccacattctggacacttaaatatcttctcccttatatggattccttcatgacgactccgatgagaattctgacggaagttttttccacactgagaacaggaataaggtttctctcctgtatgaattcgctcatgtttattgaggtttgttttatgattgaagcttttcccacagtgattacagtcatagggtttttctccagtgtgggtcctctggtgggaaatgaggtaagaactttcattaaactgtttcccacacagtggacaagtgtaccatctccttgtcctccgatttcgagtaagggcaataatactgatgtctacatattttgagagttcctctagaggagtatcattctcaatggtaactaacagatttctcattttccttttttgtggaatggatgtatttagtcgttccttttcctggttatcgggaggctgctgagagaccaaggaagaatccatttcatcatcatctgaagacttttctctataatcttcattttctacaggttccctctcaggatcttcaccttcaggattactgccattgac

SEQ ID NO: 282462 - DNA, 1000 bp, Homo Sapiens; identical to SEQ ID NO: 206309

SEQ ID NO: 282463 - DNA, 1000 bp, Homo Sapiens
caacgtatttacagactatttacctcgtctcagtgaatctccccaaaagatacttctttttttttttttgagacagagttcactcttgttgcccaggctggagtgcaatggcgcgatctcggctcactgcaacctccgcctcccgggttcaagcgcttctcctgcctcagcctcccgagtagctgggattacaggcatgcaacaccatgcccggctaattttgtatttttagtagagacagggtttctccacattggtcaggctggtctcaaactcccgacctcaggtgatccacctgcctcggcctcccaaagtgctgggattacaggcgtgagccaccgcgcccgaccggtgggatacttcttattacaaagaaaaacagaggctgggtgcggtgacccctgcctataagcccagcactttgggaagcctacacaggtgaatctcttgagtccaggagttccagaccaggctaagtaacatggcgaaaccctgtctgtacaaaaaatacgaaaataagccaggtgtagtggtacgcgcctgtcatcccagctacccgggaggttgaggtgggaggactgattgaacccaggaggtcgaggctgcagtgagccatgatcgcgtcactgcactccagccagggtgacagagagagaatctatctttaaaaaaaaagaaaaagggagaaaaaagcaacttcacagtggagagaactggctgattctaccttaaccaaatgaccgaagttaatatcaccagtaatgggacaaactagcattgtgtacttcctgaaatgatgcactgagaaagacatctttctgcagtattcctgcccaaaattcagaacgtggaaacctcaaacacagttaagggacattttagaaaacaaatttcctttaatttttaaaaaggtcaaagctcctttaagacaaaagaagttttaattattttttccggcttaattataaagaaacatggctcctaagtgccacctatgatc

SEQ ID NO: 282464 - DNA, 1000 bp, Homo Sapiens
atgagacaaatttggagaaaagttttgcaagtagtttctttcattggatattctactctctgatcccctgggttcgactactctagggacctcatgtaaatggattccagagtgaatatgagaagagactgctggttgccaggagctgggagtggggagaatcagaagttgttcatgggtgtgcagtttccgttatacaagttggggagtttctagagatctgctgtagagcttgatgcgtattgttcacacagattatttcttatgcataagacttaggacaaaaagtgttttggatttctgacattttttgattctgaaatatttgtcatatacttactggtttagcatcccaaatctgaaagattcaaaatctaaaatgcttcagtgagaatttcttttcagcatcagattagtagacaaaagtgggaagtgataagccaaatatattcttgcccttttttttctctcaccacatttctagcttggtgattagttttcggtgaattccatactggccatgctgcactcatatatatttgaaggctttgggatgtgagaaaggctgattgctattttctatgtcatcaaaactttccaccttttcatggttgcatctttttcacagtgtttctgttgtggcagtcattaataagtgcctgtcaggtcagatttaggacagagttttctaattctgcaaaaaatgttactgggattctagtaggggttgcattgaatctgcaactcactttgggtagtattgtctttctaacaatattgattcttccagtccatgaaaatgaagtgtctttccatataatgatattgtctttaatttctttcagcaatgttttgtagttttcaaggtataatcatttgacctttttggttaaacttattccaaaatattttattccttttcatgttaatgtgaattgaaattctttccttaatttcctttcagattgttcattgttagtgtatagtctaaagaatgatc

SEQ ID NO: 282465 - DNA, 1000 bp, Homo Sapiens; identical to SEQ ID NO: 195632

SEQ ID NO: 282466 - DNA, 1000 bp, Homo Sapiens
cgccggtctaattttttgtatttttagtagagacaggttttcaccatgttggccaggctggtctctaactcctgacttcaggcgatccacccacctcagcctcccaaagtgctggggttacaggcatgagtcaccccgcccggccatcatgggtagggttcaagatcatagtcagctcctggttctccttctatagtagacccaatccaggatgcccactgattgaggttggagctgtgtccccacccacacctcatatggaattgtaatccccactgttggaggtggggctggctgcgctggtgacagttgagtggattatggaggcggatatttcatgaataatttagcaccatcccataggtgctgtccggtgatggagttctcaaaagacctacttgtttgaaagtgtgtatcacctctcctaccacttgctccagctctggccgtggaagatgagcctgcttcccttgtactttttgccatgactctaactattctggggcctccccagaagttgagctgatggccagcatcatactttttgtacagcctgtggaaccatgacccaattaaacctgagttttataaataattacccagtctcaggtaattctttatagcagtgcatgaacagactaacacatgcacttctcaactatgttattctttaccccaaagctatccatctgtacaatttggatctgagcctaaccacctgcagtgagcccacactcctctggttctgggcatatttttccactagcctaacctcacatccagtgctagccccaatttggcaatctcaggtcacttacactaccctccaacttgccacaaattcaaaagttcccatcactctcagggtgactatggagctagcatcattcacacaactcaaaaaaatcactctgtttgttttacagtgttataacagctaaaatatacaaatccaaagaagccaaagagacaaacaaatagggctgggtcagaaaggatc

SEQ ID NO: 282467 - DNA, 1000 bp, Homo Sapiens
ggatcccctggtgaaatgtctgcagggaccataggcagatgtcccaaatactggggatctcgaggctggggaatcactccctgactttcttgtggtcattctgccctggtggaagatccacctgggatcgaatatccggagtttgtgtcagttttggtgtgtttgtgagaaagacatatgttagagcctggagggaatgtcagtgaatgatgtcagggaatgaattgggtttgcccctcactgttagaaagaccctgaattccctcccgatgctactagggtaaaagccatgttcttatgctcatttctctaaggtaatgcaaatagagtttattaaggcgtttctggccaactaaggtggattttgtcatgtagacacaatatagaccataatacatgtacatatgcaaaaacacacctaaacacatatccacaaacaaataaaaatcttacagctttcattttagaattttagtgatgagatagtaatacaaactcactagttgattaaagtcaactggatccaattgtatttctgacaaattggaatcgttaacatggataaactttatttgcccctataggtaatataatgaaggctgggggaaatattttgggtaaagcagtttctaatggcagtgtaacttataaacaaataaacaaatgaaacctctacagtttcagcatcttttttttttctgtttcacatgagtttaggattaaattttcaattgcttacactttagctagaactggctgaattgtataagaaaaaaaaatctccaactagccttaaactagattttttgtgtgggttggaggggggcgggtggtggtgatgtggtttgcttgattaacaaatgtggatgaggaaggattttagctttttttcctggctttttcttttttgcctctgcatggcaaaagaagaaaaaagtttatgtcggacagagacaccttaaattattgctctgagttcaagattttgacctgtatgatc

SEQ ID NO: 282468 - DNA, 1000 bp, Homo Sapiens
tttttttttttttttttgagatggagtctcattctgttgcccaggctggagtgcagtggtgcgatttcagctcgctgcatcctctgctgcccaggttcaagcaattctcctgcctcagcctcccaagtagctgggattataagcacatgacaccgcactcggctaatttttttagttttagtagagacagggttttaccatgttggccaggctggtcttgaactcctgacctcgtgatccacctgcctcggcctcccaaagtgctgggattacaggtgtgagccactgtgcccagccaaggtgtttctttataggaccagtacctaaggactggaagtcaggagacctttgtcactagtctgactatgccacttcaaggctcattttgttcactggtaaaatgagaacaatacacatacctctcacagctggtgggaggatccagtggtgtccaaacaccagtctgtgcatggtggcatcagaattacttggagatacttaaccacagaatccagggctccacctgggatggggctctagaatttttttttttttttttttttttttgagacggagtcttgctctgtcacccaggctggagtgcagtggcgcgatcttgactcactggaagctccgcctcccgggttcacgctattctcctgcctcagcctcctgagtagctgggactataggcacccaccaccatgcccggctaattttttgtatttttagtggagacggaggtcacaggtttcaccgtgttagccaggatggtctcgatctcctgacctcgtgatccgcccgccttggactcccaaagtgctgggattacaggcgcgagccaccgcacccagcctagaatcagtatttttgaaaagtaccttaggagagtccaacgcgcacccaggtccaggagcacgtatggtcacgtatgcaaagcataggcattcaaatagcagctggagctgggcacggtggctcacgactataatcccaacac

SEQ ID NO: 282469 - DNA, 1000 bp, Homo Sapiens; identical to SEQ ID NO: 206311

SEQ ID NO: 282470 - DNA, 678 bp, Homo Sapiens; identical to SEQ ID NO: 25116
  misc_feature (203)..(203): n is a, c, g, or t

SEQ ID NO: 282471 - DNA, 1000 bp, Homo Sapiens
ggagcatgaaatagaaatgtgaaaaacaggctgggcgtggtggctcacacctgtaatcccagcactttgggaggctgaggtgggcaggtcatttgacatcaggagtttgagaccaacctggccaacacagtgagaccctgtctctactaaaatacaagtaaataagccaggcatggtggtccacacctgcagtcccagttacctgggaggctgaggcaggagaatcatttgcatccaggagatggaagttgctgtgagctgagatcgcaccgctgcactccagcctgggcaagagaatgacactctgtcaaaaaaaaaaaaaagaatgagagagaaaataaatacgacaaaatgttaacaatgggtgaatgtaggtgaagagtatgtggcagggtgttttttattctcgcaaattttgtgtaggtttgaagttaccacagaatagcaaatataagaatgattcctgcagacacacgagtgatttcaactgttcacagggctcaggcaggaagcagatctcttgccctccctctgatccaggtcacttagtccagtccctgaaagcagtggatggacaaccatgccaccctctttcttcaaatacaccttattttgtatcctgccctttttgtgtagcattagatcatgagcattttcctctgctataaatgtcccctcaaatatgttgtttcttgtgactccctagtgttctacccacgatttcctcggctgctccaccttggtggaattcagtgattcttctgccttttcaccattgtaagtgatgctttgatgaaaagctttgtaggttcatctgtgctgcacctctgaccagtcttttctggaagactctaaggaaggagacaggggcatggaccactggcttttgaaggcattcggtgggtcctgccatgccgccttcccacattccagaagggtggtcccagtgaacaacccaccagcacggggccccgctccatggtgccccagcaaggccagc

SEQ ID NO: 282472 - DNA, 1000 bp, Homo Sapiens; identical to SEQ ID NO: 206704

SEQ ID NO: 282473 - DNA, 1000 bp, Homo Sapiens
ttctggagcatcaaatagaaatgtgaaaaacaggctgggcatggtggctcacacctgtaatcccagcactttgggaggctgaggtgggcagatcatttgagatcaggattttgagaccaacctggccaacacagtgagaccctgtctctactaaaaatacaagtaaataagccaagcatggtggtccacacctgcagtcccagttacctgggaggctgaggcaggagaatcatttgcatccaggagatagaagttgcagtgagctgagatcgcgccgctgcactccagcctgggtgacagagtgagactccgtgtaaaaaaaaaaaatgagagagaaaattaatgtgacaaaatgttaacaatgggtgaatgtaggtaagagtatgtggcagggtgttttttcttcttgcaaattttgtgtaggtttgacgttacctcagaatagcaaatataagaatgattcctgcagacacacgagtgatttcagctgttcacagggctcaggcaggaagcagatctcttgccctccctctgatccaggtcacttagtccagtccctgaaagcagtggatggacaaccatgccaccctctttcttccaatacaccttattttgtatcctgccctttttgtgtagcattagatcatgagcattttcctctgctataaatgtcccctcaaatatgttgtttcttgtgactccctagtgttctacccatgatttcctcagctgctccaccttggtggaattcagtgattcttctgccttttcaccattgtaagtgatgctttgatgaacagctttgtaggttcatctgtgctgcacctctgaccagtctcttctggaagagtctaaggaaggagacagaggcatggaccactggcttttgaaggcattcggtgggtcctgccacgccgccttccagcattccagaaaggtggtcccagtgaacaactcaccagggcggggccccactccacggcaccccagcaaggccagc

SEQ ID NO: 282474 - DNA, 1000 bp, Homo Sapiens
tgccgcctgcgcgcgcctggccgaggcctcgctgctgctggtgaccctcgacccgcgcctgtgccaccccctggcccggccgcggcgcgacgccgaacccgtgttgggcggcggccccgggggcgcttgtcgcgcgcggcggctgtacgtgagcttccgcgaggtgggctggcaccgctgggtcatcgcgccgcgcggcttcctggccaactactgccagggtcagtgcgcgctgcccgtcgcgctgtcggggtccggggggccgccggcgctcaaccacgctgtgctgcgcgcgctcatgcacgcggccgccccgggagccgccgacctgccctgctgcgtgcccgcgcgcctgtcgcccatctccgtgctcttctttgacaacagcgacaacgtggtgctgcggcagtatgaggacatggtggtggacgagtgcggctgccgctaacccggggcgggcagggacgcgggcccaacaataaatgccgcgtggtctgctccgctggtctccttggactccttgcctgggtggtggggagggcgcccctcagtcttggtgatcggataggcctttccacctccaggccacctgccagaggcctaacgcgccactccggggagccgcccggacaggcccaggtgctgcctacgggaagggcccaggggcaggggtcgcccttcagtcctgcaaggcagacctgtcccttctgggctttgcctgtctccctctggcctccttcacaccccaacccgtcactcagccaaggcaaaaccccagcaccctccaccccctgcagtttatccaaccttggtgtgaagtcaaaactgtttattaatatttggtgacaaaagaacttaaattgaccgaaaatcaaaagttacattgccttggtacagtgcgcctgggtttgtcaaggctgctgctacaaagctggagaacacagcacagggcgaagcagaggcaaagcggcccagcccaacagccgggatggggcaggga

SEQ ID NO: 282475 - DNA, 1000 bp, Homo Sapiens; identical to SEQ ID NO: 207010

SEQ ID NO: 282476 - DNA, 1000 bp, Homo Sapiens; identical to SEQ ID NO: 114904

SEQ ID NO: 282477 - DNA, 125 bp, Homo Sapiens
gcgctcactaaggctcggtcctctccacgtggtcctgacctgtcctctgtgagcaagagaaacaggactggtttgggggtgtcctgtctcagtggacacaggacaccacggttttcagtacaaca

SEQ ID NO: 282478 - DNA, 1000 bp, Homo Sapiens
agtagaaaccatttgttcctctgtgtaagtctagctgggccccataggaatcagacccatggtttgacctccttaaggccactgccaaccagctgagctatggcatagggcctcaggaaacacgtgcagtacatcaggaagcaggtgggtagttacgagactacgtcaggagtctctcaaactgtgtcttcacatcctagtcaggcctcaccagtcctctgcccaattcatgcacccagaacccagagcagttcatcaggataactggtgagtggctcccctggccagcatagctgccccagtgcctctctgaaaaggtgagtgtatgttaggaacaggtacctcctgcctgctgtgccctcctgctcacttctcaattctggtttccataaacacatcatcagcaagaaaggctgacgtggcagagagatacacaggacatagactttgatacgtaacccagaagtcagggatgtgatccttctccccatttctaccttatcctaagtgcacagacctatcccatatctttcctcttgtttttgttttttgggttttttgttttgttttgctgtgtgcttcaaattgatttaataaaccatgtgatctgagcatcctaatttggctgtgagcttccagttccatgacccctggtttgggtgacaactatgtgtagagcatacttgaaaaggccaccattgcatcagagtaattccccatcacaacaggggtgggtggggtggggtggggtaggaaagaacagtcaaggtcagggatgtaggaagagaggataagtgctaatatcatatctgaaggcagagtaggattagggcctcagaaaatatcattttactgagagcctggatatgagcatcccctttctggctctgccacgaagaagttgtggactaatcactttgcctcctgggaactgttttttaatctaaaggaatgaggcaaatagactaaattatctctaatgtctcttctggaaccttct

SEQ ID NO: 282479 - DNA, 1000 bp, Homo Sapiens
tcccttggcaagatttctccctatgagggtagttattatttgagtctgccaagtggttaccatggggcaaggtgccatgatgtattcttgggtgcattggttttttgcgcattgtaaatttaagacacttatagtaagtggactcattcatagatgagtttcagaaccttttacgttctcggtagaggcttctgtcggacaggcagaagagtgtattcctcacttttttttttgtcttcaaattccagtaaggcatagcacttttaagaaattagaatttttctatcatctatgcaaatgatatttatgttaatattaaatatcttatgttacactgggagtaatttgaggtgcaattatttttattactactttgaatagaggaccattatccttctttcttcagaaaactaagaagtaagtgtaacttttaaagtaagtatatatcagtgagagtaggcttgttttacaactatttctagccagtgagttgtgttttcatgtctcatcaaaagacaataccacattgcatcattttacaaaatatgttgtcattttcatttcagttgtaacataggaaaatagatatttcctagatgatttctgagtttcttactgcaaagaacagttataaattggtatacatgtgtctctgtaatagggataatattgatatatctgttgctacatattcaagaatcattctatcttatgttgtcttgaggccaagatttaccacgtttgcccagtgtattgaattggtggtagaaggtagttccatgttccatttgtagatctttaagattttatctttgataactttaatagaatgtggctcagttctggtccttcaagcctgtatggtttggattttcagtaggggacagttgatgtggagtcaatctctttggtacacaggaagctttataaaatttcattcacgaatctcttattttgggaagctgttttgcatatgagaagaacactgttgaaataagga

SEQ ID NO: 282480 - DNA, 1000 bp, Homo Sapiens
  misc_feature (195)..(195): n is a, c, g, or t
  misc_feature (201)..(201): n is a, c, g, or t
  misc_feature (213)..(213): n is a, c, g, or t
  misc_feature (221)..(221): n is a, c, g, or t
  misc_feature (233)..(233): n is a, c, g, or t
  misc_feature (237)..(237): n is a, c, g, or t
ttccgtctagtatcacatttagaaaacatactgtttttttaaatgccaatttagcttccaagttacaagaacttcaagggtactattgaagaactggctccaaatcaatatgtgattagtggtgaagtagctattcttaattctacaaccattgaaatctcagagcttcccgtcagaacatggacccaggtaaanaattgnggattttttttnaggtttgngatccaaagaanaccnttttgtactattgctgtggactattcagaagcctatattttagaaacttcaggattatttctttctttagacatacaaagaacaagttctagaacccatgttgaatggcaccgagaagacacctcctctcataacagactatagggaataccatacagataccactgtgaaatttgttgtgaagatgactgaagaaaaactggcagaggcagagagagttggactacacaaagtcttcaaactccaaactagtctcacatgcaactctatggtatgtatttgttttgtgagatgtacacgtttcaatttatattaaagattaatatcaattttaaaagtatatcttagtctacctttataaagtttagccaatttgtctattcttggctctaatcttgttttcctttttcaggtgctttttgaccacgtaggctgtttaaagaaatatgacacggtgttggatattctaagagacttttttgaactcagacttaaatattatggattaagaaaagaatggctcctaggaatgcttggtgctgaatctgctaaactgaataatcaggctcgctttatcttagagaaaatagatggcaaaataatcattggtatgttttgggaataataactgcttactaaaactctagttacgccaaactttctttaaacattttggtgagagtaatggtggagaaagaaggcaaaatccatttaattcacctggtcacttatacacgcattcttaaaatatctgattaggtat

SEQ ID NO: 282481 - DNA, 1000 bp, Homo Sapiens
  misc_feature (73)..(73): n is a, c, g, or t
ccacaaaaattaacttgagtccaggtgtggtggctcacacctgtaatgctagcactttgggaggccaaggcangctgatcacctgaggtcagaagttcgagaccagcctggccaacatggtgaaaccttgtctctactaaaaatacaaaaaaaaaaaaaaaattacctgggcatagtggtgcgcacctgtagtcccagctactcaggaggctgaggcaggagaatcacttgaaactgggaggtggaggctgcagtgagccaagatcacaccattgcactctagcctgggtgacagagcaagactctgtctcaaaaacaaaacaaacaaacaaacttgatatcttacagaattgggaaatgtttgtatttttggattgctggagactgctctagtgattctggtgactatacccacgttttgggctcagtcaaaactacaggttcatgttgtataataagagccagacggtcagtaaatagacctgtgttttctttagatttaaaaaatcagtctgaaagataattttgccattaaaaaagaaaacccatgtcgtgtgtccatactcattgtctaccccttggtaggttatttaaatttgattttttggttaattttagactctttttgatcagaacaatgctgcaaaaaaagaagagtcagaaactgccaacaaaaatgattcttcaaagaagttgtctgttgagagagtgtatcagaagaagacacaacttgaacacattcttcttcgtcctgatacatatattgggtcagtggagccattgacgcaggtaattattgctaaaattgattgaaattaggagatgtgcatctatatttactttttaatatgttgataaaattattgtaattacttgctttggaaatttgtaatttcatctgtcatagtcaaagtagggtgaaagatctagaagtagaaatgtatttacttctttttggggattaaaaaccgtcagaagaggctgagcgcagtgggggggg

SEQ ID NO: 282482 - DNA, 1000 bp, Homo Sapiens
ggagaatcagagaattggttgctggtgttgaaagcacctgagaattggtgttagaattgaagtgaggaaagcaaacaaacaaacaaacaaaaaaaacacagcggttggtttattggctctgtagccaaaatgtcttatttttttaaaatctcaactctcgttctgagactctattactcttttagaaaatagggtttataatacagataaagtattttgctactttaacaatacaggatttcagatttcatatatttttttttctttagggtggacggcacgtggattatgtggtagatcaagttgttggtaaactgattgaagtagttaagaaaaagaacaaagctggtgtatcagtgaaaccatttcaagtaagggatgtgttatatattgtacatgatgcatacatatgcattatatatatactgaattactaaatatcagctctgatattgacttttttgggtatgttttcaacaggtaaaaaaccatatatgggtttttattaattgccttattgaaaatccaacttttgattctcagactaaggaaaacatgactctgcagcccaaaagttttgggtctaaatgccagctgtcagaaaaattttttaaagcagtgagtaaaacttgtattttttttattgttgttattaagagttgattaggtagttttcttgatttactttatttgtgattagtttctttcatcgtattaactgtgggtataagcatgcttgcactacaaactaatatgcttaatttgataactttaaagggtagactttaatgtttcctaaaacaattgttttgccaagaactaaagtagggaattatgtaactaattgcatttttagctttgtattgaccattgtaaaggtcagatttcccctaacagatgtccagatccttatgcaactctttcatctttctactcccattcaacttgatctactgatcttatcttatcatgtttaaaaatgtggtaacatgtataacaa

SEQ ID NO: 282483 - DNA, 1000 bp, Homo Sapiens
  misc_feature (965)..(965): n is a, c, g, or t
gatttggaatgcacaaataccaggacttaaatagtaaaatgattgtaatcgagaaaagaactagaaaattgaaaaggaagaatttcagatgcattcaactgttttctcttatgcactctcaaagtatttgtagagaaaatctgcaactgaaaaaactgctattaatatatagttttaagcagaaattttccaattttttatctagggaagacttgtgaatatctgtattacctgggtttccctaccattgcccattaaggtggcattataaccatgttttattttatgtattttctatccttaaatcattcttttagtgaaatctggggaaactataaaacagataaaatgataatatatttttataatgacagattcagtctattactactatattctttatttgtgtattaaaaaatttagtatgatcatcttaatagcttttgtaaaatgcatttctaaaattcagaattttggttttttgcattcacgttttaaaatttgtttatataagtaatcattttataaaagtattacaacattttttactttactaacatttatttaggatcaagatggttctcacataaaaggcctgcttattaatttcatccatcacaattggccatcacttttgaagcatggttttcttgaagagttcattactcctattgtaaaggtactctttgcattaatatatttttatattgttgtcttaaagggtagcagaaaaactaattttgttttttaataatttaaggcaagcaaaaataagcaggaactttccttctacagtattcctgaatttgacgaatggaaaaaacatatagaaaaccagaaagcctggaaaataaagtactataaaggtttgtattttaaaatacttagatcttaaatactgatataaatgtattcttatgaaagcaatctaaaagatgacttgaaagtttgactatcttagactncgaaaatagctatcactgattttaaagtattgtta

SEQ ID NO: 282484 - DNA, 1000 bp, Homo Sapiens
cctatgataagtctcttttgaatgctcaagctagttaattttaatttttcccccagatgatgctgtgcttgtataaacttctttaattgaaagaccttagtttaaatgtgtttttgattaaaatattgtaaaataacctaattttccagaaattaagaattagttattggccacttatacattttaattttgtaataaaatttattttatttttaatgtgcaaaatcgttacctggaatctttcaggcatttagtaagaagaagattgatgacagaaaagaatggttaacaaattttatggaagaccggagacagcgtaggctacatggcttaccagaggttagtcttaaagagtggtgacctggggaaagaaggagagagagattagaatccatgcagtaattaatgataatattgctatataacttttctcttagcaatttttatatggtactgcaacaaagcatttgacttataatgatttcatcaacaaggaattgattctcttctcaaactcagacaatgaaagatctataccatctcttgttgatggtgagtaatatttaaaaacctcattttttaatgttatttactatagtttaatttcatgtactttaagccatccttatgatacatattaaaattcttactttaaatcttgtatatgaagagcttattcagaggaatttaaggcctttttgattttgcttttgttttatgttttcatagtgctgaaatctttaatattccttaatttgaaacttttaaaccttttccgagtttttcaggaaaattaactttaaaagtcttaaagcttttgcccaagttgtctgcagattttctaaaaaagtaaaatggaactttgataattttctaaaatatttatcagagattaaattttaaaaagccttttattctgtattacccaaagcctaatgctttaacttaacttgaaaaaaatctaggaactatttctaatttgaaaaaaaattagaaacta

SEQ ID NO: 282485 - DNA, 1000 bp, Homo Sapiens
gacagcataccttgcatcatattatcaatgattccataattgtaaagcgggctgttcttatcactgattaaattttaatcctatatataacacaggtgttttctgtgccaatctggtgttatttattagttcttacatattataggccccaaatttatttttttcaatttactgataaatgtaattcagtatatttggatgtgtttatccaagttactaggtaccattatgtagtttacaaaaatgccttaaatgttatttttctaaaatttgttttgaaataattctagattcacaagagattacaaaatatacaaaagtttcctgagtattctttgcttagcatcatcaatgttatcttacataaccataataataaaaaccacggagttctgctcttgttgcccaggttggagtgtaatagcacgatcttggctcactgcaaccccgcctcccaggttcaagagattttcctgcctcagcctcctaagtagctgggattacaggcacccacgaccacgctcgactaatttttgtatttttggtagagacggggtttcactgtgttggccaggctggccttgaactctcgaccccgggcggtccacccgcctcagcctcccaaagtgctgggattacaggcatgagccaccacgcctggcctcctcttgctacctctttatactcacactgtcctcccaatatgacccatggtagccactgatcccattaccctaattttgttatttcaagaatgctattaaaatggaatcgtaaggtacgcaagctttgagatagggctttgttcactcagcaaattacccttaagatctatccaagttgttaggtgtctaaatagttttaatttttgttactgagttagtattcttttaaatggatgcaccagggtttgtgtatccattcactgttgatggacatttgggttgtttccagtgttttgctgttataaataaagatgctgtgactatttgtgtacccg

SEQ ID NO: 282486 - DNA, 1000 bp, Homo Sapiens
caaaatggctccatcacttgtctgtgcttctgaaatcagcgcttctggtagtgcatgctgtggatcaggatcagcggccggtgctagtacactgctcagatggctgggaccgcaccccccagattgtggcattggctaagctcttgctggacccttattaccgaaccatagagggtttccaggtcctcgtggaaatggagtggctggattttggccataaatttgctgaccggtgtggtcatggggagaactcggatgatctgaatgaacgttgcccagtgtttctgcagtggcttgactgtgttcatcagcttcagaggcaatttccttgctcttttgagttcaatgaagcattccttgtgaaactggtgcagcatacctattcctgcctgtttggaacattcctgtgcaacaacgccaaggagagaggggaaaagcatactcaggaacggacatgttccgtgtggtcacttcttcgggcaggcaacaaggctttcaaaaacctactgtattcctctcagtcagaagccgtatgtatccttcagcctttccactgtggtcagcagaaggaatttggggttggttacatatgagagcctttttgagtagtgactgtttttgtgaagacatctctactgtctctggatggactggttccatttttcccccatgattctgtcctgaggaaggcctgcttctgatggtgctctgatctgtttctgatgactacttgctgagggtggtttggtttaacacagatctctactttgccaccctagacatgaatcttttttggcactgcctccagagcttatttctagcatattctgtcttacgggagaggcacttaagttgcttcctgatgcactgatagctcagaatgagctgccaccaggcccccagcaccctcccagtgtcaataagcaatgatacccaccaaagcttctgtctcagaacagtaaactgtgtttgacattgaataaaaaaaagacaaaaaaag

SEQ ID NO: 282487 - DNA, 1000 bp, Homo Sapiens
atgggagttaatggttataaagttttggtttggaatgacaaaaagttctagagacagatagtgcttgatggttatacaacatggtgaacgtacttaatgccactaaattgtacacttaaaatggttaaaatgataatttttatgttgcatatattttaccataacaaaaagttacctcaatttaatgtgttttaaaaagccaaagagactcagaatacttggaagaacatcccaagaggaaagagaaagaggtctgtcctcaggaaaagaaccagaggggaaggcatttggaagctgtccttcaggaaggagatgggaggatagactttaggccagtccagaggagagatatgtggcaggacaagtctctaccctatacaagtgcttccggcaagccctcagcacatgacataggcccagagaaggatgcaaagaattctggtcataaattgttttcaaatatcaaataaatcatatgtgcacatgcacaaacatgccttcacaactgagtaaaaccagactcaccttcaaatatatcaacagttttctcaagcgccgttaaaaatcaggcatcggacctctggctgcgagagctggtttgatgggaagttagatcaacccctcatctctgcacagtttcagtcctgtccaaaagctccactctgggcacctgtgagtatctccagggcaggccatgacgtgctcatctctgtggctctgtgcctagcccagagcctggcacacagccagtatgaaaagaagtgtttgctgaaggaatgctgatttcaactcagtgcctgatcactttaagtaaggagacaaaagacattattcccaatgatggtgaatgatgaaaccaaggcagagagaagcacacagcctccatccagtgggacccaggctaagactgacctctccactcctaaaccttccagtttctctggcatcataaatccacgctccgtcctcataggatgcatgcactctcctcttctgtggg

SEQ ID NO: 282488 - DNA, 1000 bp, Homo Sapiens; identical to SEQ ID NO: 195619

SEQ ID NO: 282489 - DNA, 1000 bp, Homo Sapiens
gggttgaatggtattcctgtctttagaactttgaggaattgtcacactgtcttccacaatggctgaactctcaccaacagtttataagtgttcctttttctctacaaccttgccagcatctgttattttttgactttttgatagtagcccttctgactcgtgtgagatgatatcttattgtggttttgatttgcatttctctaatgatcattgatgttgagctttttattcacaaaattgttggttgccatgtatgtcttcttttgaaaagtatctgttcatgtcctttgcccacttttttatgcggttgttttgtttttttctcttgtaaatttgtagatgctggatattagatttttgtcagatgcatagtttgcaaaatttttctcccattctgtggttttctatttattctgttgatagtttcttttgctgttcagaagctctttagtttaattaactcccatttgtcaatttttgcttttgtggcaattgctttaggtgccttagtcatgaaatctttgcctatgcctatgtcctgaatggtattgcaaaggccccactttctagtaccatctagtgtattggtgattaggtttcaacatatacactttttggagaaataaacattcagtttatagcagtaagggattaagagaagcatcgcaaaggtagatcttatgaaggttgtggatgattaagggtggattacattttgggcttagttttccatgtgactgctaagtcacctttgaacaagtcttcaggaagacatgcagaagtcattagtgctgctgtctagatacttgcattctctcccatccaggggtatgagataatgttaccattttcagcagagtgacacgtgctccttccatcagttgctggtgaccctatgttatatatcaggggtttgtaaaggttttctggaaagggacagaaagtagatattttaagatttactggcaagacagtgtctgttgtaactaatcagcttggg

SEQ ID NO: 282490 - DNA, 1000 bp, Homo Sapiens
gtttgcagagaaatgcagttgaaccctggtagtggggtgtccctcacacacccgcgcacccctcccaaagttcaggatgaaaggctagaaaacccattcaaagttaggaaagaacacagatctttgaggccgatagcctagacctagaagatgaccttgagtatgtaaacattgtctccgtgacacaaaacactgaaactcttcatgtgcatataacacctgcttctgctcccattgtttcaagctcatcttatctttgtagtagtaatgtttgtctttgatacctacaaactaaaaaggtacttttatcaaggtttctcaaaacatttacaaaaccagctttgagaaaatgttatgttgcctggcaacagcactcggagtagtaattgtgttttctcattgtgatgttggtctgtgtgagcaaccagtgtagtgactctttggttcattattcgtgttgtttttatttttagtctctgtgtgacccaacagtggcaggggttacaaccccctctcctttcttttttgtatttatctatttgtaggattgtcagatcaagtacaagatgcccagttaagtttgaatttcagagaaacaatttcacgttaagaatgtttcatgcaatatttggcatatatttacagtaaaagcattcattatttgtctgaaattcaaatttaactgagcatgctggtttttctcattgtttggtttttctaaatctggcaatcctacagctgtggtcatgggaaatcacctacagcatgttaaagtcctctagtcatcatctcgtcacctgaaatggaagtcctttttccctcaccctccacttctttccaaaggagggcatcaaggaacttaacctgcctgcctggtgggtttctatttaagacatctttgtgattatatttaacctgcaattgtgctttggcttaatgtctagctcactgtacttgtaaatgattaatattcaataaaaccatttttaaagtaaaaaaa

SEQ ID NO: 282491 - DNA, 1000 bp, Homo Sapiens
gagacatctttgtgtcagagttaaggttgctatataagtaaaatgctaggttatggttctgggtacattcaatctatatgaagatcagaggctctattggacccaaaggaatacgagtcacttgtgattattcctctatagtttgaaagatgtatcagccaacttactggatacgtttcaatttaaaactctatacatcatacccccaactcacagacttcatgtatccattgaatactcttctgtttccacagtcttaatgtggcccaacaaagtcatccttttagaggactcaaaagaggcccccctacaacttctataatgtaatatttacagtagttaacatttattgatcactcactgtgtgccagacatttttcaggtagggattcatttaaatcctcaaactcatttgaggtaggtactattataatgacaaggccaaggaacagagattagcaatttgcccaaatttacattattcacagagctgggatttaagcctagtctggctgtggaatccgtattcttaatgaccatgctatactgcttaagattaaccttgagaatttattccagttacagagattgtttttatttctctgaaactgcccccaaggagccattacaataaattaatccattaccctggttatctcttttgcccaaatttatattttgaaaaaaattcaaacatgccagaaagatgaaaggatactacagaatccagtcaaagatcaggcactgcatgtcatgtcttcatttcctttaatctaaaacatgcctctactttttttgatctttcatgacatttggcattttttgagtcaaagatagttgtcttgtaagttgtcccacaatctggatttctctgtttccacatgagttccaaggtaagcatctttgggaagaatactgcataggtgacgtatctttcctgcctcgtgaccccaggtggctcataatgctaagtttgatcacttgtttaaggtgatcttcc

SEQ ID NO: 282492 - DNA, 1000 bp, Homo Sapiens
gttaccagcagacatgggtcctggtaaagtggtatgagacccaatatgtgtaatatagaaagggtgtctacgttggtgaaccacctgttgtaaccttgaaaataaagaagccaattcagaattatcaatgtgtttgatagcagcagtttctatatttttagtggcatgtacaacataagcagaatctgagacaatatttaaaggtttgaggaaatcctgtaaggcagtaatcacagcaattaactccaccttttgagcagaagcataagaggtagaaataagtttgtctgtaggacctatgtaaccagcattgccattactggagccatcagtgaacactgtaatggcctcaggaatgggttgatctttggttaattgaggaaccacccaagacgtcatttatataaaaatcaaacaatttgttttttgaataatgattgtcaataacgccaataaaatcagccaagtgaatttgccacagtacagaatgttgaaaggcagattgaacttcaagccaatttaaaggaagtacaattacatttggatcaaatctagaaatttgaagtattctacactgagcctgcccaattaatatggctatttggtctacataaacaaagttttggacatagaatgaggaaggaaacgccactccattaaatcattatgttgaactattagtccagtaggggagtgtgatgaagcaaaaaacagaaactgaaaaggctgaaacggctgtactctagataactgggaggtctgaattctttcctctatgaattccagttctagtaaagcctcaggggtcaaagtcccggggctgtggagatcggaatctccccacagcatagagaacaagttacacagcgcataagttggaatgcctaaagtaggttttaaataatttacgttacccaaaaggttttgaaagtcatttaaagtgtttaaagaatctctcctaatttgaaatttttgaggttgaatacattgtttatcgatc

SEQ ID NO: 282493 - DNA, 1000 bp, Homo Sapiens
gcgtctggccacctagtaagctgtggataaagatgttgatgttatttacttctcaggcattccagcaatcctttcagtgatgcagagagattgatcttctttaacttccatatcctctgcacaatagcccatacttctgctggttgcaactatttcttcagaaatccattatgccctacgacttgctttcagtctttcttttcaactacatctttccaagcacacactgttcccccgaaaaactttaggttttgtgtatgaaattatataatatctgggatttgctctaaaataatctggggatgacagttctctccttttgcaaacatttgaaattttttacagtacagtttttaattaagtagccagtacatagactatatataaaagaaaaacaaaattatcagtactggcatggctatatcttcaagaaatgctgtagtatgaaaaggcatgaagaaaacatgcataatacgagaccaattattttaacgacaaaaaaataaaattgatctcataagtacacacaaacattcataaatgcactagaaaatgtcaaaagaaggcattccttgtagggggggacactgggtttagaagaaatgaggtcaaggtataaatctgtaatgtttgaattttacccacaagaaggtattatattacttaaatgatttgtataaacattttaaaaataaaggtcataatacagttaaaatttttaaaaaatttaatcacagtttggaacccagcaaccatgcttcttgttacagagcactctttctattttgtgttctgtttttcctgttcctccagcgatgttctaacactctatacagcaaggtgggtttgctcagtcacctctctatcctggaacatccctgcaccacataaattgcctgtcacaaggtaagtgctcaataaatattcattgaatgcataactttcagtgccatggttttatgccatgtagtgataaccggtgttttcttttaagaagatc

SEQ ID NO: 282494 - DNA, 1000 bp, Homo Sapiens
gctcatgcctgtaatctcagcactttgagaggctgagatgggtggatctccagaggtcaggagttcgagaccagtctggacaacaggatgaaaccccgtctctactaaaaatacaaaaattagctgggcgtggtggagggcgcctgtaatcccagctactcaggaggctgaagcaggataatcacttgaacccgggaggtagaggttgccgtttgccgagatcgtgccactgcactcccgcctgggcaacaagagcaatattccgactcttaaaaacaaacaaacaaacaaacaaacaaaaaacggggagggaggcgcggaggcggttacagtcctgcccccaccagcgatgtaacctccgcgcctcctctgggcagggcttcctggtcagcgtcctctactgcttcatcaacaaggaggtaggcagagacccggccgccgcccccgccctctggcggcagcgcggggtacggcgccgcctctgagcgccatcgtctcacaggtgcagtcggagatccgccgtggctggcaccactgccgcctgcgccgcagcctgggcgaggagcaacgccagctcccggagcgcgccttccgggccctgccctccggctccggcccgggcgaggtccccaccagccgcggcttgtcctcggggaccctcccagggcctgggaatgaggccagccgggagttggaaagttactgctagggggcgggatccccgtgtctgttcagttagcatggatttattgagtgccaactgcgtgccaggcccagtacggaggacgctggggaaatggtgaaggaaacagaaaaaaggtccctgcccttctggagatgacaactgagtggggaaaacagaccgtgaacacaaaacatcaagttccacacacgctatggaatggttatgaagggaagcgagaagggggcctagggtggtctgggaggcgtctccaaggaggtgacacttaagccatccccgaaagaggtgaaagagatc

SEQ ID NO: 282495 - DNA, 1000 bp, Homo Sapiens; identical to SEQ ID NO: 114906

SEQ ID NO: 282496 - DNA, 1000 bp, Homo Sapiens
gcctgcagattcactcccagcttgcagcctcagtttccttatctctaaatcgggttgatgatggccccccactgttagggatgtttgcaggagccagcgacgtgatgtgactaaggtgcacagggcctggcatgtgtcgtggctgttgtggttattagcactactttaattgttcagataaacttgggttcacatcctgtttctgtccctccctagctgtgtgacctcgggcaagtaaccttacctctctgagccttggtttccttgtctgttaagtggaacgcctaatgaagacttgctgttccctgggttgttaagatgcgtgcatggtgcggatttgaggatggctaatccccttttctctcctccaactcttgtcactaagacctgcctgtcagtcctggtggggagtcacttgcctgcctctggaatgggaggttgcagccccctctcctgttacctggttaccatggctacagccacgtggggtcatgctcccccaccccaagttccagggccccccaccagggggccagcctccccaggttccctagcaacagtcccgggtgttggggcgccagccgggcgggagggagccaggccagctggtggtgcaggccaattttagctcccacccccggcccccaggggctttgtcacccactgccccagctgcccctcgcaggggtccctcagccatgctgccttcagcgtggtgccatcccacctccagctggctgccctggcgccacctgacagggcttcttctccaggtccttatcttggtggggatcggaggccttatctccaggatctccacctgcctccctggtctctcctgggaagaagcctgggcctgtggggaagcctggctcagcactcaggaggaatcagcaggccggggttcgcatcccagcactctgctccatctgccctgtgaccttgggggagggactccccctgcctgagcctgggtgtccccgtctgaagactgcagatc

SEQ ID NO: 282497 - DNA, 1000 bp, Homo Sapiens; identical to SEQ ID NO: 195673

SEQ ID NO: 282498 - DNA, 1000 bp, Homo Sapiens
ccagagaaactggcttcagtgagggcaagttggcaatccaaggtatagcatgcatagggctggcaaaattcagggtgactgaagcaaaagcttcataaccagaaagaccacatctgggggtagagcacaaaactctcaagagatgaatctttgtaagagtgaggcagaactatatagcagttttaggagatctgttggtgcccagcaagagctccaaacgggctatatgcagggatgcaggctgtagtctcaggagaggaggttcacaaaagtcattcagtccaagacctcaaactgtgttctctactaaaaggaatcaaggttccctagagaaatggctgactccatgtatggtgcagtatattgatcctggaacatctgttttgccagaaagcaaggaagccatcaaagtccaacaggatcacgtcaaaaagacatgaaagtcaacttgaagagataattattaacctagatgagacaatgtaagcatccaaaacaataaagactgcaatggcctgaaatacatcaaatgcaaacaataatctatgagttcataatggtattcagaaaaaaaaactactggtcattagagggaaggttactaggtcactaacttactactctgaaaagtgacttaagatgagaggtagggtggagaattagctatttattcagtctttcctgtacaaacataaatttttagggagattgaagcagatgaaacaaatctggaaaaatggaggtaactgcttaatctgcgggttgggtgcatggaggttcaacatatttcttttgtgtatatttgaaccccctacaaaaaaagcacaagacagaatgtgagccaagcagcttagggtttaggcaaggcttctgcctacaagagacactaggatatgaggggtagttttagccctaatgggctgagccaactggaggtatatagggaagtgctaaattgcagaggtatcatgttgcccagcacttgatcaaatcctagatc

SEQ ID NO: 282499 - DNA, 1000 bp, Homo Sapiens
gcgccccagctagcagctgtgccccgcggcaagacctgtccgcaccctggggcgccgcggtgggggtcgctcaggcggagagcggcccagcccctgcccgcgtggtccccagcgctgcggaaacttgccgggccccgcagcggggtcacggggccgcgcagtcggcggtgacggtgcggcaacgcggcggactggggcgggggtccgcgctgagcccccagcgccggcccggccggagcacccgcatcctgatcccctccgcggcgcccgcccgcggctctctgctcgcattgacattccgctcgtgtcgctttaaaaattcaatctgctcgggcagcagcagaaggggagagggcgactgccctgctcttgcccgctgcggggccgcccccgtccccacctgcggccgtagccccttccctgcagccctgcggggacccccagcccggcgcgccgggaaggcggcccgggaggcggtggcgacaacaagtggccggactgggcggctaagtcgcgatagccaagcctggaagggaaaggcagagaggccaggacccaaacccgcccccaccccgttccccctgcctctcagactcgcagggggatggcaggccgctggctgggcgaggtcagagcagagggcaggggcaggggtccgggacagtgtgtcctgaggagcagtgagacccctggggcccgcccagctccttccctgctgggctgggggaggtgctgaggtttcccctccccccagacctcctggagcccccatatggagtggagtgggggatcctagtattctatagtgtcacctaaatcgtatgtgtatgatacataaggttatgtattaattgtagccgcgttctaacgacaatatgtacaagcctaattgtgtagcatctggcttactgaagcagaccctatcatctctctcgtaaactgccgtcagagtcggtttggttggacgaaccttctgagtttctggtaacgccgtcccgca

SEQ ID NO: 282500 - DNA, 1000 bp, Homo Sapiens
acaagtgatctgtgaaagagcaagactgcttgagagggctgtgatgtcgcgagagaggtggccttgcgcaaatggggggcctggggcgagaatgggccgcgcacacgtaaaagcgcacacgccagtaaagatgggggttacaacgtgtgaacacgtggtgccagcgccggtgaacaacattttgtttgcgccgagaaacgacggcccacccaagaagcgcctgccggagatgagaacctccccaagtgtaacccgttgcgggaagcttcatggaaaggcagaagtcgcgagagggcgggagacgcttgggggcgcgggaaatcggagagggttgtgtagcgagtgtggcatcgcggtgtgtcggcgcaaaaaagagagcatcgtcgaggagcagcgcgcgaaaccagtggggcgcacagagagaccctgcgtggggggggtctgcagaacggccgcaaaaaaaccgcgtgacgcggtggagctcgccacggggggggggtcgcacaagaggcgcagaatgtgcgctccacgggtggcgtatgtcagagaccgtgtgacaccaagtgtagtgcacgtgcgcgcgggagggtgtgtagacggtggaggagtccgagatcggcgagacgcaggggtgcctgggggggtacaaaaattgcgtgatgggggagagcttgtcacaaacgcctagagcgcaagagcgggggtggctccaacacacaagagggattgcggcacaatggagcgggggcgcatgtcagagaaacgccgcggtgcgcagcgtcccggaggatggctgatgaggagcagaaccccgatgagggggcacggcccaaagagaggggtctgtgcggtgaagacaaagagagaggcgagtaaatgccgcagcgaccgcgcagcggagtgacgcgcgaacattcgagtgagagtgagactctatagacagacaccagaaagtcgccggagagaacaggagaaagtggggagctgctgacgccagctg

SEQ ID NO: 282501 - DNA, 1000 bp, Homo Sapiens
tttcgaagtccttttatcactgtgatcttattctgaggggagaaaaaactatcatagctctgaggcaagacttcgactttatagtgctatcagttccccgatacagggtcagagtaacccatacagtattttggtcaggaagagaaagtggccatttacactgaatgagttgcattctgataatgtcttatctcttatacgtagaataaatttgaaagactatttgatcttaaaaccaaagtaattttagaatgagtgacatattacataggaatttagtgtcaatttcatgtgtttaaaaacatcatgggaaaaatgcttagaggttactattttgactacaaagttgagtttttttctgtagttaccataatttcattgaagcaaatgaatgagtttgagaggtttgtttttatagttgtgttgtattacttgtttaataataatctctaattctgtgatcaggtactttttttgtgggggttttttttttgtttttttttttttgttgttgtttttgggccatttctaagcctaccagatctgctttatgaaatccaggggaccaatgcattttatcactaaaactatttttatataattttaagaatataccaaaagttgtctgatttaaagttgtaatacatgatttctcactttcatgtaaggttatccacttttgctgaagatattttttattgaatcaaagattgagttacaattatacttttcttacctaagtggataaaatgtacttttgatgaatcagggaatttttttaaagttggagtttagttctaaattgactttacgtattactgcagttaattccttttttggctagggatggtttgataaaccacaattggctgatattgaaaatgaaagaaacttaaaaggtgggatggatcatgattactgtcgataactgcagataaatttgattagagtaataattttgtcatttaaaaacacagttgtttatactgcccatcctagg

SEQ ID NO: 282502 - DNA, 1000 bp, Homo Sapiens; identical to SEQ ID NO: 206320

SEQ ID NO: 282503 - DNA, 1000 bp, Homo Sapiens
cataggttttgggtgtaaagaatgtttactgccctccatttaaattctgaaaagggatggtggatgttttccctctcctacgttagaaaccattcttaaaaacttttgaaaatatagaaccattaagcctgctatatctgagcaaattagtgggtaaccttttttccttttttaaagcacaagaggcccataaatcttgagttatttgcattagtttacattttttgatacaacttttcagaccaagagaataaaaatcatgcgttattaaacccctagctggctggcatgctttcctgtttgtactgtatacattttgctggatgaaaccaagatagtttaggtataattgtccaaaataacctaactgcagcagaaatgtaggacagttgcttagtacaggcttctcacttcctacagacctgaattcaaatttggatagtctgagttattaaattcccaaagacaaagaacacactcttatttcttgtgtatatttcaacataaatcatgttgttaccaatttgttgggaaggccctggttgagaagagttttagataataaggctgtatatatatagatatatatagatatataccaatgtctatatatagagatattttatatatatatatacaggtatatatatgtgtgtgtatatatatatatgtatatacatatatacatatatatatatatatggatatatacatatatatatatatatggatatatacccatgtctactgttttgcttcagctagtgcttacaatttcattcaagtcctgagtatgtgtcctgctgttactccttctttggtagttgaaagttgaattcaagtctttccttctgttttaagaagtactaagcaaacaagcaataaaaaggggaatggcgcatgctagtgtttgaatatgctctcttgttgctctaattctgtgcctccgtgcattaatatttggatgcatgcaatgccacatggaaattggcctcatggc

SEQ ID NO: 282504 - DNA, 1000 bp, Homo Sapiens
ttatgcttgacatttattttcataggtcattttagttataattttcccaagaatcggaactagttcattgtgtcatgttttttttctgccaatctaagtagctgaacatattgaatatatttaaaatgtgacgagttgatattttcctttaaaacaaactaacagactttggattaaaaaagagaagtgctttaggaaagtattcaaatttttctctcagtgctatgcaacaagtatcacagaagtacttttaaagtatattatcaatttttattaagtgtactaattataaagcagaaatatatatacttttatacgctttctactatctttaaccaatacagaatatgagtaactttacaactaatatggattttgtactttaaaatacatttttccattttgtgaataccttctctgttttttctggcagagccacatgcagggttcagaatagctttcaacatgtttgacactgatggcaatgagatggtggataaaaaagagtttttggtggtatgtatactagatgctgcactttatcaataattaaatattgcttacttatatttttatgtttttgccttattgggagtactactgtagagaaaagagtgaaaaacttacgcttttgcctttacttaataaagtataatactcaggtactttgaacaatatttacattttacaaatataaattacattcagtgtatgatgatgattatcgttgttttttaccttacataaaagtgtgaaatgtatcaggtgttttctgttgggtggataacaggcagtcctcaggttatacatgcccaattaatattcagtccccattatgtcatccacctaggcacacaactccttccataggaacttctcttccttctcaatatgggattcatgttttttctttctcttttctcttccacttactcctgccttgcattccagtcttgtccccacttccctgttcctttctgttatctttgaccataggctg

SEQ ID NO: 282505 - DNA, 1000 bp, Homo Sapiens
gtgtcaagccccgtttgccataagcttcatgtaacctattacctttttttctctttacagtgtccatggaaaacactggcgaacaaggtaagctagattatattaatgttatagattttttaaatagtttgaaaaaaaattgtattcacttagatttggttgggattaataaattgttctttgagaatgtggagacaagctagggttaaagatgtctcatttctcttaagtttgcagattgaattctgtcagacccttggcaaagaattctatcctgaaatggctgtcattgtgccagagattcttaaggctttgaggtatagggatatcaacaatttcctttcctaattcagattatgaacttataactgagtcacctacataatttatgaaaaatattgttggctttagtcatctcacaccgatttaagtgccttattgaataattcaaatttttaatgattctatgagtatcctcattctttagaaaaatttaaaattgctattaaagttttaaaatgccaaatatgctatatttaaattagcatattttattcaatgatatcttacagaattaaattgtgtattaatgtattacccagaaggaagcattatcaccatatagaaaattaatatttaaaatttgggccgggcacagtggctcatgcctgtaatctcagcaccttgggaggccaaagcgggcagatcatttgaggtcagaagttcaagaccagcctggccagcatggtgaaaccctgtctctacttaaaaaaaaaaagaaaaatactaacattagccaggtgaggtggggcatgcctgtaatcccagccactcaggaggctgaggtaggaggattgcttgagccccagggggcggaggtggcagtgagccactgcactccagcctgggcgacagagtgagaccctgtctcaaaaaaaaggaaagaaaagaaaagaaaattttggatagtatttcaagactttataacaccacccagagt

SEQ ID NO: 282506 - DNA, 1000 bp, Homo Sapiens; identical to SEQ ID NO: 114907

SEQ ID NO: 282507 - DNA, 1000 bp, Homo Sapiens
attatgatattcttggaatctctagatatttataacttattattaatttatcaatatttagatacttgcagatacctaaagataactttagactcttaatatgaaaaatggttttgagctttacatattttaaaataaatttgtatatgtattatataatatatacgttatatatatagtcaagaagtataccattcatattctattctgtaaccataatttccatattgaccaacttagatttcttagaacggatataatactcactaacaattcacgtcaacactgtttctcatattacagtatacaagttatctatgaaaatgtaaaacttccatatttttgtttttatttttatttttttttagacagagtcttgctctgtcacccaggatggagtgcagtggcgcaatcttggctcactgcaagctccgcctgccgggttcacgtcattctcctgcctcagcctccccagtagctgggactacaggcacccaccaccgcacctggctaattttttgtatttttagtagaaatggggtttcaccgtgttagccaagaaagtctcgatctcctgacctcttgacccactcgcctcagcctcccaaaatgctgggattacaggcgtgagcaactgcgcttggcccatatttttattaaagttctcttccagtgtttgcatttacatttatgttatcctaataccttaattgttggagaagaaaagaacagagaagggcctaatgtataaataatgcattcaagccaagtgaaagtaaatgattttatggttcaatatagaatgagagttctttagttgttaaggaaaaaaagcaaacaaaaatggcagacaaagttgagtcttcatatataataaaagcacacaaactaagaaaagtcttagtagtcagtatcatatccataattttatgtggcattttagttttagcacaccatcatttcatattaaattaaattttttttttttttgaggcagagt

SEQ ID NO: 282508 - DNA, 1000 bp, Homo Sapiens
gcacactggcctaatcatacttctccctctctcaaatctgagcaattgggagctcttagtcatttatacagtgggtgctttttcaggctactgactttcagttctgtaggtaagaaccacttagctaggaaaagaaagtgggcaatgtgaagaacggggccagtggaaaattttgtccctgcttatgcttaataccagttccacttccttggagttctaaaagcatacattttagattaagtaaaaccttacagaagaaaagggcagaaagacagtgccaaacaacgtaatgaaattcaagggctgtttggaaaaaatgcaacctaaaatgattccagtgtagaagcttccacagcttatgagctacgcatactaaacagtcttttataagcatgtgctttgctctctgaaaggaacgctcaacagtgttgggtgagtgggagctctttatagcagcttgtccctcttgcttcagtctttgtgggtgtcgttaaacaggatgaaaggcctgtgacgatccaagacacttggaggttgatccacagaggactgggacacaccacgagaatctcccagagtgtcattacagtggaagacttcgagacgattgatgcaggatattacatttgcactgctcagaatcttcaaggacagaccacagtagctaccactgttgagttttcctgacttggaaaaggaaatgtaatgaacttatggaaagcccatttgtgtacacagtcagctttggggttccttttattagtgctttgccagaggctgatgtcaagcaccacaccccaaccccagcgtctcgtgagtccgacccagacatccaaactaaaaggaagtcatccagtctattcacagaagtgttaacttttctaacagaaagcatgattttgattgcttacctacatacgtgttcctagtttttatacatgtgtaaacaattttatataatcaatcatttctattaaatgagcacgtttttgtaaaaaat

SEQ ID NO: 282509 - DNA, 1000 bp, Homo Sapiens
cttcaccaccaagggacagggttttgctctgctgcccaggttggagtacagtggcatgatcatagctcactgcagctttgaacttctgggctcaagtgatcttcctgcctcagcctcctgaatagctgaggagcccctacaagggcacaccatcatgctctcatgcccagctgttttttttttttgttgttgttttttttttttttttttttttagagatagtgtcttgctatgttgcccaggctggtcctgaactcctggcccactttggcttcctaaagcactgggatttcaggcataaaccaccacacccagccaggactagagctttcatctcactcatgccttgactccccaggtgtggcaatatcccaaataagaatcactctttctcccaatggcttttggcctctgtttttctcccagatgatgaacactccaagctaatgaattcctgtttccacccagatcctctggggatggagccatgtgctgcaaacccctcttcctccactcacgcctctgtggtcatgtctccttgaccttgacactaggcctgaatctaaataaacagcccgtaaaacatttctaagcattacaggctttcacacttgaggcttcatggtagggttgaaaaatgaaacctacaaatactaaattgtagagaggtacagagatcttctgggatttgctcgctttcattagtttccataaaacattctcacgtgtgtggacacataactatttgtataagggaacttactactaaattgatttgacatgactttaatttgcccaaggctgtaccggcagaagtaaggtgggttctttgcaagatgttctcagtcaattggaatggctagcaggcttttcatccccgtgacacagggatgacttttccatttctttgtaacacagatctgtacgtccgccaaatttagtatgatacttaatagctattcttgaggcgctcacatttcattggcctaacatgacttta

SEQ ID NO: 282510 - DNA, 1000 bp, Homo Sapiens
gagattctcatgcctcagcctcctgagcagctggaattactggtgcccgccatgacacctggctaatttttgtattttttagtacagacagatggggtttcaccatgttggtcaagttggtctcgaactcctgacctcaggtgatctgcccaccttggcctctcaaagtggtgggattacaggcatgagccattgctcttggccataaccaagtaatttttaatatgtttttcttacacaaataatatatagggaggaagaaatattttcatccaaataatatagtatggttaagaatgtttgcttagtatagacatgaaactaattatcaagaatgtcagacaagtctatcaagcactataacttcagaatgataggataagccttcatgtgtcttgtacttaattcgtcctcttctatggttaggtaaagatttcttaaactgctgtttaaaaacactaaccacaaaaacaaaactaataaatacgcaagaactacccatcaaaagagaatgagaaggcaagccacagccacggagaaaatatttgcagagcttatatccgtatataaaggaaacctacaaacccttagaaaaagacaaacaactgaattttaagatgggccaaaagactcgaatactcgatccttcccaaaagaagttacccaatgggcgtaatggaatgagtatatgaaaaagtgctcagtctcttagttatcagggaaatgcctattattgagatgccatgatgtacccatcaagatgatgagttaaaaacaaaacaaaacaaaacaaaaagcctgaaaatacacactgttggaaacaatgtggagcgactagaagtctcatacgttgctggtgggggtataagttggaaagataactttgaaaaatagttttgcaggattaaactaaagctaaacatctgtatacctcacacaaggtacatatagaagagaagcaaatgctttcgtccaccaaaaggaatatgcaagaatgttc

SEQ ID NO: 282511 - DNA, 1000 bp, Homo Sapiens
tgaaatgctatgtactttgaattactcaagtaaaaggtgagcgtgctctctcggttcaaaaaaagtacgtatttgtatttatttattttttggggacaaggtcttgctctgtcacccaggttggagtgcagtggcatgattttggctcactgcaagctccatctcccgggttcaagcgattcttctgcctcagcctcccgagtagctggaattacagatgtgtaccaccacacctggctaatgtttgtatttttagtacagatggggtttcaccatattggccaggctggtcttgaactcctggcctcaggcagttcacccaccttggcttcccaaagtgctcagattgcaggcacaaaaagtacatattactaataaactctgtctttacctccattaataatcctattcttcttcactgaagttgctaggccttttctgtgcagttaggtacatcactatgcacctatttttaaaaaaatacatgacgttttgtggtatgtttctttgtttttacaaactgtatatataatacactaagtattattttatagctttccttttttccccactccacattgtctcagagaactttcatgtcagtatagttctatataattataagtaattaagaaacacaaatatgataattataaaatataaataatactgcatatatatatatacacacagtacatacagttatttgtagctgcagtacagttttcagtatatcgatggactttagttaatgtataatagcatccagttactatatacttgttttcaatctttcgctatttagaaacaatgcaccaaagaatatacttgcacaagcttttgtgcatttgtgttttttaagaaggatttggagaagtggaactactatgtcagttggtgtacattttaaaggacacaacttaattggtctctagaacaattagttttctagagagcaattttctatatgtatttccgtatgtatttatatttctatatg

SEQ ID NO: 282512 - DNA, 1000 bp, Homo Sapiens; identical to SEQ ID NO: 114908
  misc_feature (681)..(681): n is a, c, g, or t
  misc_feature (845)..(845): n is a, c, g, or t

SEQ ID NO: 282513 - DNA, 1000 bp, Homo Sapiens
tttacacagctctccaaaatgtccacaaaagtgacttaagtcaggttcccccaaaccagacaccaagacaagaatccatgtgtgtgtgactgaaggaagtgctgggagagccccagctgcagcctggatgtgaactgcaactccaaagtgtgtccagactcaaggcaagggcactaggctttccagacctcctactaagtcattgatccagcactgccctgccaggacataaatccctggcacctcttgctctctgcaaaggagggcaaagcagcttcaggagcccttgggagtcctccaaagagagtctagggtacaggtccgaaagtagaagaacacagaaggcaggccaggggcactgtgagatggtaaaagagatctgaagggatccaggtaagttattgaaagtattctttctgtgctaaccccagtcctcaatccttgccagccagccccgtcttccctcttaggtaccctgagcaggctctattttatgcccttccatacctacggtggaaaccaatagggtttttttttttttcagacagagtctcactctattgctcaggctggagtgcagtggcacgatctcagctccctgcaacctccacctcccgggttcaagtgattctcctgcattagcctctcaaatagctgggactataggcatgtgccaccacacctcgctttttttttttttttaattttttattagagatgggggtttcaccgtgttggccaggctggtctcgaactcctgacctcaagtgatccactcgcctcggccttccaaagcgctgggatgacaggcgtgagccattgcaccaagacccgataggtctaaggggtctcatttgagtcattgtatataaatttttttttcaatgttttttgtctaaaaaactttagacagggaatgcactctccaattaccttcaactgctacctttccttattttattatacctagatacatcttgccttaacatttcaataatta

SEQ ID NO: 282514 - DNA, 1000 bp, Homo Sapiens
agctgtacattggcctctttcagccatggctagagtggctgggacacagggcaccaaatctctaggctgcacacagcacgcagaccctggtcccaacccaagaaaccactctttcctcctggacctctgggcctgtgatgggaggggctgccatgaaggtctctgacatggccaggagacattttcccccatggtcttggggattaacattaggctccttgctacttatgcaaatttctaaagcttgcttgaatttcttctcaaaaaatgggttttccttttctactgcatcatcaggctgcaattactccaaacatttatgctctgtttcccttttaagagaatgcttttaacagtacacaacttacttcttgaatgcttttctgcttagacatttcttttctgccagataccctaaatcatctctctcaatttcaaagttccacagatctctaggacaggggcaaaatgctgccagtctctttgctaacatataacaagagtcacctttgccccagtttccaacaagttcctcatctccatctgagaccacctcagcctagaccttattgttcatatcactatcagaatttctgtcaaagccattcagcaaatctctaggaggttcaaactttcatacatttttctgtcttctgtgagccctccaaattgttccaatctctggctgttacccagttccaaagttgctttcacatttttgggtatcttttcagcagtgctcctctctactgataccaacttactgtattagccagttttcatgctgctgataaagacacacctaagactgggaagaaaaagaggtttaattggacttatagttccacatgtctggggaggcctcaggatcatggagggaggcaaaaggcacttcttacatggtgacggcaagagaaaaatgagaaaaaagcaaaagtggaaacccctgataaacccattagattttgtgagatttattcactattatgagaacagcata

SEQ ID NO: 282515 - DNA, 1000 bp, Homo Sapiens; identical to SEQ ID NO: 114909

SEQ ID NO: 282516 - DNA, 1000 bp, Homo Sapiens
atttggtagcatcagaaaacattgagaacttctaaaacccttagagttgacagtctcacaactagcaatctatcctacagaattaaaagcccagtatgcaaagatatacacatgacattcattatagcattgattgtaaaaagccaaacagagcaaaaactgagaaggaatcatttgtgctgggtagtctccttttacctttccagatccattctaagtgtctgctgactccatcatgtgggcacctggccctctggtatcaggtggacattagaagaaggtagatgagagaagctgggtatttaaccttcattccaccctgctcctctttgcaggtgctggtcttgattgtggctgtttctccctgatatgatcacagttttactacaatggccatctctttctcacaaccacagatcttgccaggccctggtaactatactcttttctcctcccctttcaggttttctatttccttatttactgtgctaggcacttcacaagcatgcactctttcattcctcaccattgtcctgcgacatatacattatctccgtttgacagatgagtgaactgaggctcaaggggctgaagccttttgcctatataggtctttctggaaggctctggtctttccactgtgtgctctgacacggtgcaatagtgaactacttatttcacgggggatctcctgggccagaggacatcaaaatgtaacatttggtagtggaggttgtagtatgtttcatcgcagcctcatgctctggatcaaccgcagaatgttgcatctggcctactacggtcactgtgaagcgacctggacaaactgtgtgtggcttttctaggagcaatcacctacttgagtcttttctgggaaaactattgtttcctagtacctgcttattcaactctctttagtttaccttttgagtgtgatttctctcctatcagaactcaaatgaagagtagagggtgaattagagggggtaagattggaagc

SEQ ID NO: 282517 - DNA, 1000 bp, Homo Sapiens
catggtgcaggtcttgcctgaaaatagcatgtgcatggaatattcactcatcattaggagaagaaaacagagagggactttcccattcctgcgttatctatttccactttgtggagaaagccataatgtgtcagatacactaactcttgttcttcatatcccagccagcatagcccatgagacagaaatagcattcatcgaaagccgcaattacctcatttcactggcccgtttgtgtgagatgtgccttgcctcacagtgactgcatggggccaaaagtccagcaaacagagctgctgcttgtccaagaaatggccctgcaaacaggagaggacaacatgttccctgagcagattgggacccttggctgtttcacgagtgttttgtttttcaggccagaaacagtgtctgaaaactcctggggatttcccaagccccattcgtcaggcggccaggcttcctctgacatcatctctgagtgatggggtgcagagagggggtcacgcagaaggcagtccaggggaagctttagcacgattgcgggaaatcaaacagctagtgctagagtgatcagaaaaacaaggagagctttctgaaaacagtgtctggcacattatggacattcaagaagcaggtcttgaatgaaacactgggaaatctaatgactggaatcccaacttatgtggtcagtatatggcagagatgagatttcaactagggtgaccaaatattcttcttttcccaggactaagaactttctatggatgtgggaatttgtgtgctaacgttgggaaaatcctgggaaaattgggatgagtttgtcaccctaatttcaatactggtgtgtcctggcttcaaagctgatgcctttaatcataaagcaaaaatctgtcttcaaggagacttgagtttaataaaaaacaaaacaaaacacaggaatagacaactatcatataaatggaaagagtatacttgcttgaggaaaggagttagcagctta

SEQ ID NO: 282518 - DNA, 1000 bp, Homo Sapiens; identical to SEQ ID NO: 114910

SEQ ID NO: 282519 - DNA, 1000 bp, Homo Sapiens
gctattcaataatgttgtttcctgtggtttgggtttcgttatgcctcctcatggtcaaatccaataactccatgatcctggcagaagaactggtgtgtttaatgaaagaaatgtgggctcagatgtctttctctcttcatctctgattccaacataatcacactcgctggcttccagccactggggcaagccattttccaggcttgacttgagagtgagaactatacaaatttctcgacttttcttacaggcttttgcatgatcttagctaacagttttctgaaaaggaagaatatttttggcatgtttgtagactattagccaaagcatcaacagctgagttccagctgactaatttctcccctgcttggtgcatctaagacagagtaaaaatactttttgtatttgttttgttttgtttgtttgtgttccaatcccaaagaacccaaatactccccaaaacagcatggagagatgacaattgctgctagtgtattgtagaaaatgtatagaagaaacactgaatacttaataaatgtgtgtaccccccaaaaatttgaacttcctttataaaaagtttcaatcctatgtttattgattatttattttgtaaacaaactcttaggcagagagtacacataataatcccttcaaaccctcttcccttctttaaaagcaggaataggtttagaaaacacacacacacacacacacacacacacacacacaaacacacacacagagacaaacacatacacgcacacaacagatgggcactgggatgtagctaaaacattttagaatttgatctgaactcaagtcttggttcaacacatagtagctgtttgatattgaccacacatttaaccttcttgagctacagcttcctgtctagtacaagacatgtaataactgctttactttttttcttgttgttgaatgcaaaatgaatttgttaaatccttaggaattcaataaatgtcagttttcttcatcaacc

SEQ ID NO: 282520 - DNA, 1000 bp, Homo Sapiens
ctttagtccatttccacttcatcatcaccctagtccctcaccctgtttcattttcccctagtctccctcccccagactatcatcctagtccacctcccctagtgagcctttcttttgtccatttctcctttgtccatcactctagtccatcacccagtttcacttccccctagtccatcactccagtccctcgccctgtttcactcccccatcaccaacatagcctcactagcctcgttacttgtttccctgcctctacgtgggccctttcatttgttttccacttaatggaatgagaaatatataaaaaaggcaagtcagctcacgtcaatctcctagaacacttggaatcaaatccccatcatgggctcacagaccttcaaaaaactgtctaatctctactcccattcacaaagaactaaaggggatagtttcaacttgacctggccatattatttttatgtttattaacatcatcacaaaataatgttcttaaaagttcaatgactagattttcatctaattatgagttttcctagaaaatgactcaaaataaggatgatataaaactttaacagcaagcacatatttctccataaccgaacttccttttctacatatataactgtttagaagtaatgtgtgtgaaggaagaaatgaacatctttttaaaaagcccaagaaggtaaaacttgagagactgcttggtatatcagaaaaagcttaatctctggaatgagaaccatttgaattcaaattatagaaccatcatttactcattgagtaacaaggtaaatttttaacacctgactgagatatagtatcctcatatataatatagaaataattatcacttctgtttctgtgtcctagttaggattaaataaaataccatccataaaatccatctagaactttgtctgatgtggtcaataaatgaagactggttttatctgcattcttatcatattggtgactacagctcttcattctaaaacct

SEQ ID NO: 282521 - DNA, 1000 bp, Homo Sapiens
caaaaggacacagaagctaattgaaagagttttcaatggccaaaactgtaacaatttgagcaaccaaataaataaaacggtattggaatataacattaaacataagataaatatccatgactctgtattgatgtaaataaatgattgaataagtaaattggggagaaaagacaaatgccaagatgaatttcaaataatttatgtagttactctgccctcaaggaggtggagaataatttccacttccaaaatatggaaactacatttcttcttcttacagtggcttcttccaaagagtatgatatggaagggggaaaataaagagtaatttttctcatgaagaacttgacaaatggtacctcagccaggtgttcaaggttaacatccatagtcacaaaccaggttgatagtatatataatacatactatggttttaatgtgtccccttctctaaaatgtatgtgttaaaaatttaattcccaatgcaacagtgctgggaggtatagagttttggaagatgtttaggtcatgaagtctccaccctgataaatggattaacactgctatgaaaagggctgatggaattgggttcttcctcttttgctcttctaccatgtgaggtcacagagttcatcctatcttgcccttctgcctcgtgccatttgaggtgaggacatggctagaaggccctcaccagatgcaccatatgctggatccttgatcttgaactagcctgcctccggaactgtgagaaataaatttatgttctttataaatttcccagtctatggctttctgttatagcagcacaaacagattaagacagtactctcaatatgacttgatgaaaatggtcctttatctctgtgattttcctcctcaaaatgcacaagtccactctaatcatgacagaagagaacaaaaagaaaaaaaaagactgaaggacattttacagaatatctgagcagcattccacaaagctgtcaaggtcatcaaaacc

SEQ ID NO: 282522 - DNA, 1000 bp, Homo Sapiens
catctggcttgacataagaagtacatagggctctggctccagagaaaagctgagaaaaaaagctcaaagggccattaaaaattagatctgtggaaatgaaaagagggtacttatatattgagcacctactatgtcatgcaacacactaatctaatcctcatgacaactccatggtaaggtcacagagactcagagaaattaagcaacttgctgagagtcataggaacccaggtcagggtgactctgagatgtacttttaaccaccctcacccacattcaaatcagtctcaatctttagggctctactttgatgttacttttctaacttccagtagaatcttatgtcctttctggaaaaacgcttttagtaattaccaaacaaaatgaacactgaaggagtatatcataagagcgaagaaacagagtcaaagtaccttttaggaaaaaatcctcaggaacttaagggagtccctggggaggagggctggaaggaaggaaactaactgaatattggatgactagatgggaattgttgccttactccgataattagaggctacattatatttcaaatctggaagtgatcttaagaatatttgattccagttttttcattttacattagaacagaatgagatctaaagatcctacacaaagcagaataagatcctgagtcacctgacattgaaacgattgctcttctactaaaaatgattaaaagagagggaacacatccataaaagatcaagtattgtagtaaaaaagggatagcagtacatgatacattttatatatatatatatatatatgtgtgtgtgtgtatatatatatatatatatatatgaaggtcttttatatatacatatatatatgaatgtcagtcatagatcaagggttagggtgggtcatgaaccaagaattaaatttcatctaattttatgcactcaattaaaaacaagcaaatacatacatacatatatgcataaagagttagaatggc

SEQ ID NO: 282523 - DNA, 1000 bp, Homo Sapiens
atgggtggacagaaagaggaaatggcttgtccatggtcaatgagtcaacggtagtatttcatagggaaatactatgaaattaatacagaaaaacaaagatttggaagtcatgaaacacaaattccaaatctttcaactggtctttgtatgtaaggtctttgtgatccaaaacaaagtcttttgatttctattctgctgtactttgagaaagcttggggcttctgtctttggaaagcactgtcttggaatggagttagacagaactggttcaaatccctactccatgacaaaaatattgtgactatcggcaagtagcttaatcttcctaagtgttagtttcctcatctcacaaggaggataattattcgagggattgttcttttggttgagactgtaaatacaaaatatgatacgtagtgcgtagcatataataagtaggcaacacatagaaactatgatagctgtttttattccagaggatgaagttttaaagaaatataacacagtttagttatagagactatttgaagagatagacaatgataaacgaatgctatgatatagaaacaataggatcaataatgagtatttaaggagctcagagagagttttctggaagaagcaaaatgtgatgtttccatagggtaatgagcctgtctctccccttcctcctatatgacttttttgtttcttatttgaccttcacagtggtatgggacaagaatcaaacatcctaattaaaagacagaaaaacagacccccgcaaaatcacatgacttgtctacagatttcagataggttttaattgacctatcatattaactacataccaataaactttaatttatgcattttaaatgcatatttaagcttaagtcataaggtgcttaccctccttatgtatatattaatattttagataatgatttcacaacctgtaattaaattttagtgtaagttgtgctctaaattcgatacacatttaccatcagtatgactt

SEQ ID NO: 282524 - DNA, 1000 bp, Homo Sapiens
ctttaagaaccgcacgaaggccttaataagtgtgagaaagaccagcagcataacaaatgaaaggggaaggagaagaagaggaaaaagggttggaagtgtaggcctagcactatggcagtcctcgtgaaggactagtcacagattccagtgcctgcaggtgtagatagtcctgtgaaaattgtttcgagttcccagttattagtacaatgagttcaagatgtgggtggctctctttatgattgaaaacaaaatatctagcatatcatttctgcgtagacccaaaatttctttatttgtagacctttcttatttcaaaaccagatttgagccatcttagtgatacatgcaataaacataaaaataaagaaataaaatatataataaaaactggaagaagtgctcaggtataaacctataaagaatacatgggggaaaaaaactagagggaaaaccaccacatcaaatgcataatataatgttctgtacaattgctacagccaagtcacatatttcactttgtgacaagtaggtaggacaaatgaagtgtatatagtaacaagattaacagagtttatagtgaaaagcaagccagaagcagctcaggagaagcatggcttttcctagtcgtgagacccacaagaagttttatctgtggatcctcagtttaccagggcactgtgatgttaagggccgcagccaaagcagcaaccgtatagtaatcataacaacaagtttaatatagggctaattacttccttcactgtaagccaaaggagtaacaccacagcattgttcaggaaaggcaattatacagggacccaaaaaatgcgggcctagcaattagctcttgagcttgccccagaggtaaaatttggagtgaatggattgcatgtccttcaggctgtttcctaggacccgtatttcttacatataaatttgttataaaaactgaacagtagagagttccaagactaggaagaccctgatgttcccaaagtca

SEQ ID NO: 282525 - DNA, 1000 bp, Homo Sapiens; identical to SEQ ID NO: 118324

SEQ ID NO: 282526 - DNA, 1000 bp, Homo Sapiens
  misc_feature (682)..(683): n is a, c, g, or t
  misc_feature (719)..(719): n is a, c, g, or t
  misc_feature (730)..(730): n is a, c, g, or t
  misc_feature (739)..(739): n is a, c, g, or t
  misc_feature (833)..(833): n is a, c, g, or t
ggaaagccccagggcactgtggccagggttcacattggccaagttatcatgtccatccgcaccaagctgcagaacaaggagcatgtgattgaggccctgcgcagggccaagttcaagtttcctggccgccagaaggtatgtagtgctgcagcccccttctcccacctttgcccaggcctcctgactcagttctttccattgctccttagatccacatctcaaagaagtggggcttcaccaagttcaatgctgatgaatttgaagacatggtggctgaaaagcggctcatcccagatggctgtggggtcaagtacatccccagtcgtggccctctggacaagtggcgggccctgcactcatgagggcttccaatgtgctgcccccctcttaatactcaccaataaattctacttcctgtccacctatgtctttgtatctacattcttgacgggcaaaggaacttcctctgggaacctttgggtcattgccctttcacttcagaaacaggttgacaactcagccctgctcatgaggcagcaaaccctgcaaagcgctgggactggtggccttatgtcagttgtctactctggagcttgacttggacctccccaggtctagcagtagttgaaaacactgaagtcttcttcatgaaggcacagctgccacgaaagccttcgaatcnnaggctgggtcagctacagttgtgttgttattacaanacatgcggacnaagaggggnttgtgggctagaggctgaccagcagagtttatttagcaagggtaggtgtgcatcacattgggcttgttctcacccatctggtttggccattccnccctggtgactcatccagtactgctacgtcactcgattcccattcctatctctagcaacctcctggcccatgcccaccccttctagaacctgcattacccagggccttcaccacctgaccaaaggtctaggctaacctttggtcatttgtaacaagacctggggatc

SEQ ID NO: 282527 - DNA, 1000 bp, Homo Sapiens; identical to SEQ ID NO: 206322

SEQ ID NO: 282528 - DNA, 1000 bp, Homo Sapiens
tttacctaagtgtgaatattttttcttcctccaaaagctcacttttgggtttagattaaatttttgtattttagcacctttttcttttaggggttcaatgatgacaaaagaaatgacatgagaacacggctacccataacataccattatctttgtaccagaaaaatccttgtttccttcttaatgactctggtaccttagaaactgggaccctgctaagtccttgactaggctatctaccagctcctggtcggattaaagaaaaaacacactttgtgttttttaatcaccaaggcaccctgcagagatatcttcttcttgcaacttcacatctttatcagtaatgtcctctttcctttaaaaattcaagttttaagaacagcattttcatgtaaaaacttgatttgtgttttttccagactgaatacttttcctccctaactctcatcgtctcattgcgcgcaatgcctgattgagcttctgtttgactaaatatcacctactatgtaaaaaatgagcatattggcctcttttctagcatctaataaaggcttaatacactgtactcttttgaaaccatatgattccagtccaactattagccttgatttctaactgatgttcttttcatgagaataactgattattgtgtgatctttgaaaatgtaatagcagcactaaattataaatccttaaaaaacacacatacacatgcaaccaaaaccaacaaaaggctgaaagaaacagaaaatatctagtcaatttaagtagctgtgacaggcaagattttatggtttgctttgttttcttttactttttatttcctctttattctttaagtctttacatgagaaaccctattccgcattggttcattctgaagcaggaattccaaactttcctgtttggaacttgacagggtttctgtagctagaggccatatgctagcaacaaggaaaacaccaggctttacatgcctggcagctttctactttgtgaa

SEQ ID NO: 282529 - DNA, 1000 bp, Homo Sapiens
actaaatttaattattcatatctaaatctgaacataggcagtaatttctaaccagtgtttagcccagcacaaggcctgggtggtagacttccaataaatgtagaattaagtttattcacactatatagacttattgcaaggcaagaatgagaccttagactttcgtgctcaatcttgaagacaatgtttttcaacccttttcaacagattctctctcaaaacctaaaatctcatccaccatcccactctctttttaccagggagatgtgtttctcaactaaagaaatagaagaaagtgtgttctctacgtattgtcagttagctaattagagcagaatgctggtgatgccaaaatctgtagccccatcccttatatggcatttgagaggagcgagtataaagcagtagataataccaaaggttttggcctcagggccgcagttatctctcctttgtgagaccttgggggcactgtttaacctctctgggtctcatccaagaaatggaaatactaataatactccatatggttgttgctaggatgaaatgagatgtctgtaggaagtgccgaggaatgcctagcacaaccaagagcttgttgaacttgtcacgctttactgtcgataatgtgcattaagcaaacgctagttttatttgtttatttcatcttctaagtataagaatacattgtagctcgacattttggcaccagcccctaaagcattcccaccaccacccccgctgcgacaaagccctgcgctccttacgacagcgtacgacgccgagcctgacaggaacgcctcgtgcggtagaaccgggcgggccaatcgcgctgctcccgggtgatgacgtagctgcgcctgtgcatgcgcagggaggggagaccttggcggagcggcggaggcgcccagcggaggtgaaagtattggcggaaaggaaaatacagcggaaaaatgcagagctggagtcgtgtgtactgctccttggccaaggtgagggc

SEQ ID NO: 282530 - DNA, 1000 bp, Homo Sapiens; identical to SEQ ID NO: 201495

SEQ ID NO: 282531 - DNA, 1000 bp, Homo Sapiens
tcctacaccctattatccaaattgatagatctttcatgttgttgattttggagagaagcacaaggagtattctctttctagggaaagttgtgaacccaacggaagcgtagttgggaaaaaggccattggctaattgcacgtgtgtattgcaatgggaaataaataaataatatagcctggtgtgattgatgtgagcttggacttgcattcccttatgatgggatgaagattgaaccctggctgaactttgttggctgtggaagaggccaatcctatggcagagcattcagaatgtcaatgagtaattcattattatccaaagcataggaaggctctatgtttgtatatttctctttgtcagaatacccctcaactcatttgctctaataaatttgactgggttgaaaaattttcccttttctgtcttctggggaatagctaaaaagcaggtcaggtcttcgtatcccagtactccaataagatcaatggacataaaacaatgcagatgcattgtcttatatgtgaacttctcaacccccttcccactgtcccattagtaggattctctgagttcttgccagatctgacactggtaggttgaataaaggaactcccactatggggatgagttacagactgagacaactgaacaagttactgaacaagcatgggacaatacagcagagataaacttgcctgtccaaccccaccttccccccaagaaaacatacttccaccttgccaatgtataagctgggagtggagaaagaaagtaattcattcatgtcatatctcatagaccctctttttctgtatcccaatcagactcctttccatatatagcacccctgtcccacttgtttaagtaggaatctcctttttggctctaatttcgctgaatattggtacttttgtatccccagatccttcaacaaccttccctctacctgtacatgccaactcattaccacctaccaaactagattttatttcagacact

SEQ ID NO: 282532 - DNA, 1000 bp, Homo Sapiens
tttagggctctcagcattttccaggattcggcaccactggcagctcagttgaagtgtgctggacttccacgaaggccaaagtagcccccagtcttggtcacaaaccatggggacagcttaagagctgtcccattacttggtgtctccagacatgagaagggctgagaaacattcatttgccagccagcaaagaaatatttactatgggggctttagattcttaggagtaaaatttcatttgcctccccagtgttgctgggtgattgaatttaatatttgtttgattgtttccgaagttctttggttttccagaatagtcaagaggttgctaaactcagtcaggagcaatagaggaatttaaaagtcaccatcgtgtgaaaaatcaatatccaagtgctggtgtctattcacaaacttctcaaatgccaggggcaaaagcacagtttttgtgtgcttgagtaaggactggtatattgaaagggcagcaagagagaagctgtaatcttgtgcacagtggggacactgtgtcttggtggtgctgctgtgggttcaggggtgaagccctctgatttacaggccccactctggattttatcagaaccagggatgatgacacgttgggaaatgcctgtgcatccctgaacccacatgagctgctgtataaaccttaaacccatttagcatttgtaggaggtgatcccttttggtagatccctcttgaatgaaacaaagagactaagtatcccattaagatgttttgtctggccgtctcttgctgcttctctctgccatgtgaggacacaggaaaagacagaaacataaaaaaattttttaaaagatagttttgtctgtcaaccattatatcaggcctagctcagggtagagcagaaggagcttgagtaccagtgggtagcatggagtgttgcaaagaaccctcagcagggttgagagaccaggccagcccccatttccttcaggtctctctggcatcatcagtagg

SEQ ID NO: 282533 - DNA, 1000 bp, Homo Sapiens; identical to SEQ ID NO: 195011

SEQ ID NO: 282534 - DNA, 1000 bp, Homo Sapiens
ttctccatgttggtcaggctggtctcgaactcctgacctcaggtgacccacctgcctctgcttcccaaagcactgggattattggcgtgagccaccgcacccggctgggaagccagttttgaatctcaggtctaagcccccaaaccagaaatgatttcaggaatcggaaagaaaccgggagatcaggagcaggtcaggcagctgaggcgcaggcaccaggccacatggggttgggcatcagttctcgtccggggacagcccaacagtttgggctcagggattagacaatgagcttaggaaccagctagatctgggtgtgaattctagttcccaactgtgtgatcttggataagttattctatgcgactttcatcccttataaaatgaggatcctaacacctgctttataaggttgctgtgaggtttagatgacataatgtgtgtgaggcaccagcctgtgtccagcatgtaggaggcccaggaagggttgccgtcctccgcatgcactctgccccagtgtcccttcctgtcctctgcctctggcgagctcatgggccagatgggctgaaaggacagctggctcttttgctctccagctccaccgggaactccacgcccacgcgcctcacttccaggtctccttactgcgtgtcaggagaggctaacggacatcagctgcagccaggcatgtcccgtatgccaaaagagggtgctgcccctagcctgggcccccaccgacagactgcagctgcgttactgtgctgagaggtacccagaaggttcccatgaagggcagcatgtccaagcccctaaccccagatgtggcaacaggaccctcgctcacatccaccggagtgtatgtatggggaggggcttcacctgttcccagaggtgtccttggactcaccttggcacatgttctgtgtttcagtaaagagagacctgatcacccatctgtgtgcttccatcctgcattaaaattcactcagtgtggcccaga

SEQ ID NO: 282535 - DNA, 1000 bp, Homo Sapiens; identical to SEQ ID NO: 195661

SEQ ID NO: 282536 - DNA, 1000 bp, Homo Sapiens
ctaaagaggcgtgtctgacctcccatcctctcgtggccaggaatagtttttaaggtttttgctgaggttcccttgtccaagcaggcttaggatttatttttagtttacaataattacaaaatttcaaagaatctacccacagaatacatctaagttacatagttgagaagaacctagttacaatggagaagacagccacaaactatctaaacctagtaatcaaatgacatcattctgatgaaacacattgaaattgtctatcactcaaaaatgaaaagtatcctctgtgatattcctagcagagattcctctgctgaatttagtcatcaaaaaacatcagacaggcctaaattgagggacattttataagtattcagcctatactctcaaagagtggcaatgtcttggaagtcaaataataactgaagaactgctccacactgaagttgatgaaagagacatgacagctagttgtggcatgcgattctggattctgaactaaattatgagagggacaaaaagcatatattttgggacttttggtaaaacaccaacaggaacaagaattagaaagttccagtgcattaacattaattttctgatcctgatggttttactatagttatataagagaagcacaagcacattgttttgagtaaatacatactaaaatacctcaagtatctggaatcaggttagtatttactttcaaaaggttccatgtgaaacaattatttgcatgaacaagcagttcttctatataccagtgattgtttttttaaaaaataaagccaacagtgcgcttatgtatgcaaaataaactaggctttcacaaatgaaggatcactgttgacaatgcaaacttgaattgctcagcatcattaagctttatggaaatacaaactaaaacttcaattagatattattatataattcatcagaatggttcaaatgaaaaaaggacacattatgttgtctgttgatgagaaagcgaaacaat

SEQ ID NO: 282537 - DNA, 1000 bp, Homo Sapiens
gtcagggtctttaggtatcaggtgccagagagatatttaacagatttccctacctaaatttatgtatatgtactgtctaaaacaatacttttttaaaaaaaaggaacagttgggagaaaataaatataatgaaaaattcccagaggctagcacttggattctaacacgtatgctattgtattatccattagttctgtaatatttaattttagattcttttatttttttaattggcaaagcacaaggtgctgtataacagtgtcatttagagttttatagaaagcttcaacctgagttctgcgttataaagcctggagaaagctaagcttagaacataacttgctgaagtataattatctttttgtagcaggaatttatgtgccagaggtgagagtctttctggtactgattttttgagaccaaggataaaaggatcgttttgtaagacatgccatggcaatggctggttgggggacagtttccgcccaagcttggcctattttatttttcctcatacctactttcaaagtcatttaggtatttgaagccttatttcccacgtagtaacactttctggcttttgcagtttctttttttgtttggttttgttttttgcatggaatggggatcaaacaacccgaagaagaacacattttgatcaagcaaaatgtttgcttcaaatttcagaagtttattttacagaaattaaattaagtagtttgacatccttttctctgtttcacacatatattaggttggtgcataagtaattgtggtttttgccatgacttttatggcaaaacctgcaattacttttgcaccaacttaatacatctatatacatatatatatacgcgcacacacttgttcagaagttatgttgtggccttggatttgtttttccccttggaaatggttcttaactctgggattttagaaggttagaatattttttcaagagaacagtggtactcaaaagaatgaaaggtggtccctacat

SEQ ID NO: 282538 - DNA, 1000 bp, Homo Sapiens; identical to SEQ ID NO: 206323

SEQ ID NO: 282539 - DNA, 1000 bp, Homo Sapiens
aggcagctatgctcaccactataccactgcactgtgccgcaccgtaccactataagctgcacggccaaagagacctcttaaagaagtaacatttaagataacatgtgattgacattttagaatgggctatccttgtgagattcaaggaaagaacatcctaggtggagtgaatagcaaacataaagcctcttttgtatgtttgaggaacaaaaaggacaatgcagctagagtgtcaagaatggcatttctgtatataagacctcgttgtatagagccacataaataaggctataataaggaatttggatcttactttaaatatgataagaatcgatgagaagatctaagcaaaggaatgacatgatcagatttggttttagaaacatcactatctccttagtgtgtaaaatctcaccaggctggagatagggaagccagtccaattaggagcctgatgcagtgatccagacaaaaaaataatagtgattctaactagagtccaggtaatagtagtggagatatgtggagagacatgataggtatatacttaatagtcttatcagacgataaattgatattttcctggtgtgtagtcacttaattcaaatacttttttcagtaagttctgggttttctaggaaaaacttcagtatcatcagtgaataatgatagtgtttcttctgatagttttatttcacttttattgcatgttttgttatctgaaatgtttaggacaatgttaacaataatgatgttagacatttttttttcttattttaatgggaatgtccatagttttaagtttgctgttgggagttagatagtctttatctgaaagacagtgtctctcttttagtttttaaagagtttgaattagaaatggctctggaactttaaacagtataccatttgggcatctattaaagcattcatataattgttctcatttgatgttttgatgaggtatattaatagattttcccacattaaatcatctttg

SEQ ID NO: 282540 - DNA, 1000 bp, Homo Sapiens
tttgaagaccagcctgggcaatatggcaaaaccccgtctctacaaaaatacaaaaaaattagccaggcgtgctggtgtgtgcctgaggtcccagctactcaggaagctgaagtgggaggattgctggagcccaggaggtggaggttgcattgagccaagatagagccactgcactccagcctgggtcacagagtgagactctgtctcaaaaaaaaaaagaaggaaagagaagaaaattcaagtattcgaagtaccatttgttacaaaaggtatttgattattcatgaaattattcactcactaattattattaatgctaagcgctaaagaataaacaaggaaaatgtggttcctacacataaagcatgtgtacactagttaagagaaaagactaatatttaggaaaacaagagagcaaatgattatataattaattcataagcagtgtaatcttggattgacccttaaagaaaaagtaaaattctgctgggtgcggtagctcacgccagtaatcccagcactttgagaggccgaggtgggtggatcacttgaggtcaggaattcgagaccagcctggccaacacagtgaaaccccatctctactaaaaatatgaaattaactgggcgcgatgacgcacgtctgtaatcccagctactcaggaggctgaggcaggaaaatctcatgaacccaggaggcggaggttgcagtgagctgagatcatgccactgcactccagcctgggtgacagagcgagactccgtctcaaaaaaaaaaaaaaaagtaaaattccaaaaatgggaggggaaaggttaagctgagagactgcaaaggtataggagctgggatatggaaagaaaacagagactaactcggcaagtagaaattgttcacaatgcaggatactgggaaataggagctttttttcttccttttaccttttgaaaaccacagaagctgcttccctgaataagcagaaataaagtcatctaggagcagatt

SEQ ID NO: 282541 - DNA, 1000 bp, Homo Sapiens
accttgcctgggtaatttttgtatttttggtagagacggggtttcaccatgttggccaggctggtcttgaactcctgatctcaagcgatccgcccgccttggcctcccaaagtgctgggattacaggcgtgagccatcacacccagccccctattacctagttattacgtccaggatgcattaggtcttttccctaatgttctccctgctcccaatgttaccaatattttcatctgaatctttacctgctcactcctctgcaccctcagctgaatccatgtatgggtttttgttgttgttgttttgtttttgtgggtttttctgtttttttttttttttttttttttttgagatggagtttcactcttgtcgcccaggctggagtgcaatggcgcgatctcggctcactgtgacccctcctcctgggttcaagcgattctcctgcctcagcctcccgagtagctgtggttacaggcacacggccaccacacctggctaatttttgtatttttattagagacggggtttcaccatgtcggccagaccggtctcgaactcctgacctcaggtgatctgcccgcctcggcctcccaaagtgctgggattgcaggcgtgagcctccgtgccccgccagggttttttgtttttgttttttagcatcctcacctggccccaacacctacatctctatcttaagcttacctgtatctttaccttaacagcattgttacctatattctcacctttttccacctacatcctctccggtgagtgtattttctctgcatcttcatctgggtcctcacctgcatctttacctgcatgcttttctaggtattttcttgtgttcttgcccacattctcacctacattctcacctgcagatttacctatcttcttactgtaactgcccaatgggttcaccttgcccgctgcctagacagaaccgatttatcagacgggggatgcagtggagaaagagtaattcgtgcagaacaag

SEQ ID NO: 282542 - DNA, 1000 bp, Homo Sapiens
aatttaagttgaccgacttgccctctaaagaaaacaagaaggagatgttcccattatctctagggccccatctcaactataataatagacgccgagcatttgccatatgctgggcactgttttaagcactttacatatgtattatactcatttaatcctcacaatcaccctatgggcaagggactgctattaagctcattttatagatggagaaaaagtgaggtgcagggaagtgaatagtccaaggtcacatgcctagtgaatggaaatgcagagattcaaaccagagctcccccgagtaaccacctgcactgcctctgaagctgaccttggggctaagcactgaaaggtcatgatgacattggaatggtctcaggaaagccacagttcctccgcaaatgtcagtggttgtaaggatccaggagccatgcacaggggacaggcagcctgctccccttcctgagagtcacacctgatttcttctactcctcgaaggtgtgaccccagcaaaagagatggaccaaattttgtacttctagaagggcgggtggaggcagagggcaagaggctggctctgtggaagccagcatgcaggaggaagcggcgtgctcaccccaaacaccttcttggcccctgccttggcagcgaacatggaaaggatcccagtaccactccccacatccagtaccactttgtccttgaacacgtgcttgttgtggtacatggagttccggtaagtgagagtccgcacctcatccttcagcatttcctgtgatggagggaaaagaaaggaaatgtcagtgaattcaagacacctgggtgtacaccatggctatgagcccctggaccaccccaggtgacccttcaggagacccgataatatcatcaggcagagccacagaggacaaaactggggtagctgggccatgtgctaacagcatcattccaaacttcccctgccttaaaactctactcagaaagatagctattcaccatcaga

SEQ ID NO: 282543 - DNA, 1000 bp, Homo Sapiens; identical to SEQ ID NO: 195693

SEQ ID NO: 282544 - DNA, 1000 bp, Homo Sapiens
gagtctcactatgttgaccaggctggtctggaacttctgagctcaagtgatcctcctgccttcgcctcccaaagtgcagagattataggtgtaaactatcacgcctggcctgtttacatagtttaataatgtaaatcttcaataccgatctaataaaaattgaaatatgccttttagaatggctttcaaagataacaaatgctggagaggatgtagaacaactggaacctctcggttattgctggtgagacagccgctttgaaaaagtttgagtttcttacaaaattaaacttacacttacacttaccatatgacccaaaaattccactgcttgctctttactcaagtataaggaaaatctatgtacacacaaaacttgtacgtgaatatttattaatagtcattttatgccccaaactagaaatagtccaaatgttctggaacatccatacaacggaccaccactcaataaaaggaacaaactacggatacacgtgactagatgaatctcaaatgctttgtgctaagtaaaataaaccagactgaaaaggctaccatacgtttccatttatatgacaatcttgcaaagtcaaaaccacaggaacaggaaactgttcactgattgccagggtgtgggagtaggaggaagggctgactacaggtgactatggaggatttttttttttctgagacggagtctctgtcgcccaggctggagtgtactggcacgatctcggctcactgcaacatccacctcctgggtttaaggtatttttagtagagacggggtttcactatgttggccaggctggtctcaaactcctgacctcaggtgatccacccgcttcggcctcccaaagtgctgggattataggcgtgagccaccgaggccagccgcttttttttttttaaagacagagtcttgctgtgtcactcaggctggagtgcagtggcgtgatcccagctcactgcagccttaacatcctgcactcaagtgatc

SEQ ID NO: 282545 - DNA, 1000 bp, Homo Sapiens
ctgttcccctgacccccggctcccctcggccttgacccttggccttgaccggacttttcctttgtacccggacactctgttttccaggatccctgggcagggacacctcctctttcctctaggcctcccctaaaccggcccttagggtatgcagaggcagctgccaggcccacatacccccggcaggcccaaggagggccacaatcttcaacttcatcttggaggaccagggagagccccatttgtcacccagagaggccggggactccgcgtggacaggcagcgcgtgtgcagggccgaggtctgcccagggctgggcaactccagcgtttgtgctgctcctgctccggcaagtggaggagctgggcgggccagagcggctgtgggagccaagctcagagggcgtggccccactgtgagccgcaggcctgaggacagtgagaagtaaagcggcgttcccctccaggggctgctgctgctgggtctggcagagagagtcctgggggagggcatcgggcagcgcccgcccagtaaggtgggcaatgcctggtataggcaggtgggagggcggggccccccagggttggggtccttgaggagggggtgacccaggagggggctcatccacatgggcacttgtatcagcccacagctccaaggggtgaataattgaagggcaggtcacacgagcctgcccggcacaggatgccttccctgccggatctggttacgccccagatcacattctgacatcccgagttggtgaataattaagctgccactcctctgaggcaggcctccatctccaggtccctctccgaggcttcctcgctgccagctgagtcgtgggcacctgagggactacctaccactgctcccggctgtgccatcgccaccagctcccagcctcctgctcagacccgggacagcccctccatggcccccgagatggaccagttttacaggtccaccatggccatctacaaggtgagcacatggg

SEQ ID NO: 282546 - DNA, 1000 bp, Homo Sapiens
tcagtattgattgatggaatggaagacaaagacagaataaggaagccaagaatctatttaaattctgaatatcacacatttgaaatgttcactataaaacaaaacaaaaaacatctttctttagtctttttaatttaggagtttaaagcttttcttgtttttgtgggtggggtcatgattgaaggatctggtttataggttttctccttataatatagtatggccaactttgtgttagacttcagtcgtagtatttgtatcttaatgctttgacattcattttgaaatctaacagggtatgtcagttatcaaatggcagtagataatataagcttatctgatgatctttatctgggtcagccaccacaatcagtattcacaaaagatccggaagaaccacagtaatgccaattgaccacagctagtcaatattttattgaggaaaattttcactgtagtccttcgggagaaaatgtgatgcactcagctctgttaataacctttttaaaatctttccttaaacagtcaaaatcattaagcatgatttttattctctgaaaccaaagtactcttttaaattacaatagaaataatgggagaatgatgtgaggtaatgttacatgtaaaatgttatacacaattcttttactacgtttactgtcatagttttatgacgccttcaagagtcattgtgctacttaaagtgaggatctgctggtttgtttatattttcagctaatagcaccatcgtggaggtgtttatccacttactacatgtatcatgtctggggggtatatttagggggatagtcatgctggcactcagattacaagtttttcctatgaaccaaaatgttgttttatttacaaaataagtaagtattattttgtaaataattaaaacttaaaaattccaacccccacttgtactttcattagataatatttttgcatacctgaaaaaatactgttctctagtgaaagaaagagcaagtggggg

SEQ ID NO: 282547 - DNA, 1000 bp, Homo Sapiens
cttctcccatgggggtcaggtgggaggcagggcagtgttttgctggtaagttctgcaggagggggtgtgggcaggcccttctcattggcacatcccagctcagagtcccagcatccacacaggagcaggatgctatgaggttatgaaggcaacactacaggctggtgtgggattgagttggaaggaaccatggagaaccttcatttatctaccaagaaattgaggcccagaaagttttaggagactgtccaaaagtcacacagcacatcaacagcagaagtaggattcgatctcagatcctagctttaaactctgggctctggccactatcccacattgccttcaaccccagcccacaaaaggagcagttcagggagtcacccacattaggggttcgtcaggggaacccctggattccagctgagggccagctccatgtcttccctgctgcaactgcctcttttggattctggaggctgtccccgggtggtcagtcagtctggggctctgggcttcatcctcagtggaggagatcccattgctgtcttccaccttggctgctgtgaacagctctggggaaattatgagagcaaagggagcctcgaaacttggggaaaggcgttctcctcaattgttgcatttgctgatcccttggctggcaggagaaccatcagggaggtcatcccattttaagaaagctagtgaaacatacagaccagatcgcaatgcctccctagctagatctttatacatccttaatggacagactgccctgtacatacagatcctttactgtcatctgaattgggcttcaggcacaaatgtgagcctccaaacataagtaaaatgatctctataagcatatctacagaggggttgggcagcggggagcccccttgtagttgttaccaaactgaaaaagcctcaagtaaagcccactgatcaggatggaagggaggaggacagagctaaggtgggctgatgaggtaggaggtgtatg

SEQ ID NO: 282548 - DNA, 1000 bp, Homo Sapiens; identical to SEQ ID NO: 195623

SEQ ID NO: 282549 - DNA, 1000 bp, Homo Sapiens
tgcccctgtaataacttggcagtaaagtgactaataaaagcaaggtatcgtaaaaatgaacagacaacaatgttgaaaggcagtggaatataaaatttggtgatatatttttcatttgaatctagcaaaatctaaaatagctttaatattaacctacattactttagaaactgtactggctggttttgtgtgtcaacttgacacaagctggagttatcacagagagatgcgcctcccttgaggaaatgcttccatgagatccagctataaggcattttctcaattagtaatcaagggtgggagggtccagcccattgtgggtggtgccatccctgggctggtagtcctgggttctataagaaagcaagctgagcaagcctgggaaagcaatccagtaagaaacatctttccatgacctctgcatctgctcctgctttttgacctgcttgagttccagtcctgacttcctttggttatgaacagcaatgtggaagtataaactgaataaacccttttctcctcaacttgcttcttggtcatgatgtctttgcaaggatagaaaccctaacttagacagtaatatcttccaaaaatactctcaatattttacactttaagccacaaaattaaattgttaatattttgataaaattttgaagttaaacacaaaaactaagtaaactatgttatttgttatacttaaaaagtcaaggatgtctttaagaaattaagttctagtcaatcttttgctaaggaagtccagcttgcctttaatcacttgtttacgagttcaaaggttagaacagtgaaatgagaccttctgacacaggcttttctaatggtgtagaagaagcagagtaaactcgcacacactgctctcagatacaaaaaggagaaaggaaaggtaagtgcttacatacttaaggcctagctgttgttaactttgtcagatctgtagagcaatccttgccgttagtgctaaagagcagaggccatgatc

SEQ ID NO: 282550 - DNA, 969 bp, Homo Sapiens
ggcgccgggagtcgcgggtgcggcaggccgtgagtgtgcgcttttgagagtcgcggcggaaggagcccggccgccgcccgccggcatgagctacgaccgcgccatcaccgtcttctcgcccgacggccacctcttccaagtggagtacgcgcaggaggccgtcaagaagggctcgaccgcggttggtgttcgaggaagagacattgttgttcttggtgtggagaagaagtcagtggccaaactgcaggatgaaagaacagtgcggaagatctgtgctttggatgacaacgtctgcatggcctttgcaggcctcaccgccgatgcaaggatagtcatcaacagggcccgggtggagtgccagagccaccggctgactgtggaggacccggtcactgtggagtacatcacccgctacatcgccagtctgaagcagcgttatacgcagagcaatgggcgcaggccgtttggcatctctgccctcatcgtgggtttcgactttgatggcactcctaggctctatcagactgacccctcgggcacataccatgcctggaaggccaattccataggccggggtgccaagtcagtgcgtgagttcctggagaagaactatactgacgaagccattgaaacagatgatctgaccattaagctggtgatcaaggcactcctggaagtggttcagtcaggtggcaaaaacattgaacttgctgtcatgaggcgagatcaatccctcaagattttaaatcctgaagaaattgagaagtatgttgctgaaattgaaaaagaaaaagaagaaaacgaaaagaagaaacaaaagaaagcatcatgatgaataaaatgtctttgcttgtaatttttaaattcatatcaatcatggatgagtctcgatgtgtaggcctttccattccatttattcacactgagtgtcctacaataaacttccgtatttttaaaaaaaaaaaaaaa

SEQ ID NO: 282551 - DNA, 1000 bp, Homo Sapiens
actgatgtgcatttggattatttctaactcttggctattgtgaataatgttgcagtgaatgtggaagtgtataagtacctttttgagatcctgatttcaatgcttttggatgaatacccagaagtgggattactgggtcatatgctaatactagttttaattttttgaggaaccttcttactgttttctgtagtcgcgacaccactttacattcctaccatcaatgcacaagggtttcaatttcttcacattcttgttaacacgtggtatttcctggtgtgtgtgtgtgtgtgtgtgtgtgtgtgtgtgtgtgtgtttgataatggccattctagcacgtatgaggtgatacctcattatggttttgatttgcatttccctgatgatcagtaatgttggatattttttcatataattgagtttttggatgtctctttggaggaatgtcttttcaagtcctttgctcatttttaaattgggttatttgcatttttttttttttttgctattgagttgtatgagttcctaatatattttggatattaaccctttatcaaatgtatggtttgcaaatattttcttccattctgtaggctgcctttttattctgttgattgtttctttggctgcacagaagctttttggtttgatgtagtcccacttgtctatttttgcttttgttgccttgtttttggcaatgatatccaagaaatcgtcgccaagaccaatgttgcaaagttcttgtgttttcttttaggagttttataatttcaggttttacgtatcagtgtttaagtttgattttgggttaactttgtgtatgatataaggtaagggtccaatttcattctttttcatgtggacaggttcattgttagtgtattgaaacaaatggttttgtatgttgattttgtattctgcaactgaatttgttttaacttcgctgaatttgctaacaaatttttggtgaaatctttagagttttctatgcatatgatcc

SEQ ID NO: 282552 - DNA, 1000 bp, Homo Sapiens
gaaatatatagccataaactcacctcatataacctcacacttttttcttccattactctaatgtgttgctggtttttaaatattttaggtaaatcttttataatctttggatgtttcagagttataaggctctagaaaaatgtaaacttctacttgtgatggatcatcacagtgggcaaaaatactacaaatgacagcaaaaataaggaattcacacttacgtggtataatcctttagactccttaataatgagtcaaatatgtattacaagacattttgattcataagaaaaaaacattttatttgcactacattgaattattcaacattttgtcttatgttgagaatttctttaaccctgaaaattgtttcttcgtgtaattccaagtaaacaatgaagtttataaatatataaagtacatgtcacatagtacagtccacaacacaacccctaagatcctttgtcactattcgactaatccttattatattcttatttttcatatattcaaaaggaatatttgacaatgaaatgtctaatatttatagaatattctctggaatcctttctataataattatgcaaaaccattataaaattatatatacaggcaagggtaattactcaaatctaaagtgccatcacacatttaaaaagccctgacaattactatgacattccagatcataagatgcttcacaatttaagacatggtaggatgtgaagaagtgaatccatgaaataaaaaataacttatcactgatgcttttaccactttcactgcattcataaaatctctgtatggagcaaattctgctcctatatttaaaagcttgtgatgtttaatgctatctaatcctccacagaaattatttcctgtgaccagaaccattgcttttaggtaaatgtatgactctgctgaagcagaatagatatggctccattaggattttatacctgcattgaacctaaatattattgccttcgagaataggatc

SEQ ID NO: 282553 - DNA, 1000 bp, Homo Sapiens
caggcaagatagaagattataatggacttgaagaattgtgggaagaagaaaatagatgaactatgtacgcctaagggatcacatgcgtattatgagactgcttgagtgagtgagtccagcagttacctggtgagtgatctgttcttacactttagaaccttgaaagaagagccattctttcattgtaatagatcagatttggggacaaaagactgggaaagtgatgtacaaagccatttgacgccacacaataatagtactttgagagggccagtgtgtggcttagtgcccacgaggagatcagaatgcacctcaagctcccaaggcccagagggctgtggagatgctaactcagcttagaggctggggcaggggtcggggggcagtggaatagaggggagtggacaggacattttacaaaatttttttcttgagaggatttttttcttaacaattagtaaaagccatagaatcatggctggtgaattaggcccagccttcttcacttactagtatgggaatagatggcattctgcccctgacggctaaaacccaggaggaaataatgggtgaaaatctgaactaggcccctggtgggctgctcctatgtttgaagaaagggttgtgggtttttttgtttgttttcttcctggaaatataccctctctcttcctccttccctcctttctttctctctttcatgcacacatatatagacacacactgactttggtattgaagcaaagaaatatgcaccaatcttaaatttctttcaattcttttaaggacagttattccattacatgggaaaggagcaaaatttattatatttaaaatataagaactaaggtaaacaactttaaagggatcactctcccctttaaaattatgctatgtctcttgtgtaccacagacttcactttggtggatggtggggccaccaccaagtctctatctaacaggaagttttttaaacttgtttttttttacttgaaggatc

SEQ ID NO: 282554 - DNA, 1000 bp, Homo Sapiens
ggaaatggattttgattctttaaaatgaggcagtggttacttatatttctgtgtgtttcagggcccaggctatctcttctgcttttctgttttactaatcttagtgttggcttatggccttgtagttgcaaaatggcttttgaaatttcagacatcatattcatacctaaagcaagaagaaagaagaaagagcagagtgtagtgttagttctctttttttaggaaaacaacagcttactcagaaactgacttcttagggtcattagccagaaccagatagcatggctacccatagaagagatgctataaaagtgggtaacaagatggtcacatttggcttaagccagtcatgaaccatcacctgcagctgagaatgttgccgttggaatgaaataggttcagtgaaccaagcagaagggggcagtggatgttgaatgggcaggtagaggtaactgccagataacgtacttgtccatcagtggggactacagggttgcttaaattgtgatgcatccctactatgtaatactttctggccattgaaatgaataagatagaactgtgtataccctagtgtagaagaatatctcacaaagcagattgtagcaaagtatatatggcataatcccatttttatttttaaattacaaaggtgtgtattgagttgctgataacccagagtgagcagactttcacattttattatttctatatttgaacttttaaaaagtaaacaggtgtgtggttaatgtgtatgtatatacacacttgtggtaagaatttacccagaagtggttaaatttgtggttaagccttcatggctcaaacccaggcatttttctcacatatatacccagtttcacttaccatctataaactcatgacttctaggctgtcttaggttattgattctgagcttatgacttacatatccatctcagagtcactttaaatgcaactccaagactaactccataatcttctccaaacctagtctctt

SEQ ID NO: 282555 - DNA, 1000 bp, Homo Sapiens; identical to SEQ ID NO: 195698

SEQ ID NO: 282556 - DNA, 1000 bp, Homo Sapiens
aagaactccaaatgtccctttcaataactttccactctaccagtcatctcctccttccagaaattctcaggaggcagcgcttggtggctcttctgcagatgccaggatggtgacggtgacagcaggccacgctcttgtgtttagaataggaggtccccaaggacacagagtcacagacgggtcaggtaagttgcctgggcgcccacacgaataggaggtgcttctggatttgaaacaagtcttctagtgctaggagccccagaacacacctagtgccaccccctccccacgacaaagcccaccagaagggctggctgcctaaagaggtagtggacaagacctcacagactcacagactagtgggagaagacagaagagcgtagccctgaacgcagtgtgggggcacacggtgattggaacctggcacccacatcaacggtcaaagtctagatggttttgtttggttgtactcccgcctccctctgaccccatgcccacgagtaagaggagctccgtccacatttatggacacttaatgttcctgcacacccataaataaggtgaagccgagtctgcatgtgtgcgaaagggcacagagctttgcacatacatggtgccagggtccatttcctggttttgtactatggttacgtaagatgtcaccactgggggaaactgtgaagatacatgtgatgttttttgctctgtgtgatttttgcaacttcctctgaatctgtaatgatttcaaaataaaggttgttttttttttttaataagtggagacacatttaggtgtaactgggacacagcctgccacctactttccaaatgcctcctttctcccaataacccccaccctctccccaaagacctggcagtactcctgcaagaggaagggatggacgccagaaaaagggagtgaaggtcctgctgattcggtcctggctgaggccgaacgcaggcccccccttccctttgccaccaagaggagtctaagatc

SEQ ID NO: 282557 - DNA, 1000 bp, Homo Sapiens
ggaccagcccctccatccactgtgaccccttctgcatccgccaaggcctctggtaggtgcctgagctgaagcagatgaacccttgagtgtgggaggaaaggatgggccagcggatgggtgggggcaggaggaggcccttccaccaccaacttctgacgcctcagcagaaaggccccgggcccatgagcttgagtcgggggctggtgggcagtggacaggaccagcttcccttccactccgcggtcgtttgctcccacatgtgaccccatgcccacggggggctggagggtgggcaagcacgcattcgttgaacacctgctgtgtgccaggccctgaaccgtccccctgccaattgtggcacagtaggagctggttccaatgcccacccacattcaccctgatgcacccccagagacccagtccagtggtcccacagtcaacgtttgttgattgaccaaatgacagtattttgcaatagcagtaaatacaaaccacttagactggacttcacttgggtctcaatgacccttcctgccccatcgtccctgaaaacctctatccttccatcgttcctaacattatggagcaccgactgtatgccccaactaccttcttcatcctctcagcagcctgtgaggcaggaaatatgactggcctagtctacagagggggaaactgaggatctggggggtggagggccttgtctgaggccgcagagcccagaagatgagattgtaaacccagacccaactgtgtctttttttttttttttctcagacagagtcttggtctgttgcccaggctggagtgcagtggcatgatctcagctctctgcaacctccatctcctgggttcaagcgattctcctgcctcagcctcctgagtagctgggactacaggcacccgcctccacacccggctagtttttgtatttttagtagagagggggggtttcaccatgttggccaggcttgtctcgaactcctgacctcaggtgatc

SEQ ID NO: 282558 - DNA, 1000 bp, Homo Sapiens
tactgtgaaagccaggcctccacccctgtccccccaggtgataactaagtcatgaacgtttcagcaaacacctgctctagcctgggcactctgcttgttgacatgcaaggtgatgagagtcacactgtgacatgaattagcatcacgacaccctggcaaaccttttgtgatgcctcccgtgaaagcacgtcatagttctccttaaatgggatgtcctttcctctgcaggagcagcgtcttccccagaacagttagcatcacttctccgatacagaggataatgctgtccggggtggagagaggagttcaggcggctatcgtgaaaccacaggctgcctcgtgtctgccatgagccctttcctcccccacgtcacctgcaggaggacaggggcagacgtgggcagcagaggcccaggtccacaccggctggagccacgtgcctgctgggtacaagtcaggccattaatccgcacacctgaccctcatcaaagggcaagaagcgctagggggctgagtgagcaaccgaagcggacgaacacgggacagaaggcacctgtggcattcagatgctctcctacctctcgggagcagttcagtctgtgagaaacttcaatgagctctgcttctgtttcagagcagatgccacagccatccccgttcagcgccacgctgttgaccatcacaaagctgaagcgagggaaacgcaggtgaggccgctgggggtatcagtgctttcttttccctactgttcccatgaaaagaaagctaagcatccagtgcaaagaaacaagcccagagcagctttcaatccacccagaataatttggtgtatttttaaatatgagtcaatattaacaaaaatagcattactgggagttctgtcttaagacacgatcgaagggtttttgaccctaaacttgtgagaaatcccagattacagaagctctgcagttagactatgtctaagcctcatcctccaaccagaacctcatctgttaca

SEQ ID NO: 282559 - DNA, 1000 bp, Homo Sapiens
cctgccctgacatgtgaggcaagctaagcctggagggtcagatgggagaccaggtccaagggagcaagacctggcaagcgcagcagccccgggccttcccccgttttgaacatgtgtaaccgacagtctgcgcaccacagcctctcgcctggtactgcatgcacgcaatgctagctgcccctttcccgtcctgggcaccccgagtctcccccgaccccgggtcccaggtatgctcccacctccacctggcccactcaccacctctgttagttccagacaactccacggccacctggtcctctcccatcgcccacaaaagggggggacgagggacgaacttagctgagctgggaggagcagggttgggtgggcgacccaggaatcccctcccccttcccaaataaagatgagggtactaaaattttcctgggttttaaattaataataattttttccttttccagaaaactaacttttccttttaaaagggggaaatttaaaaaaaaaaaagaccaaagtgtttttaaaaaaaagcaacacccacacctgtgtctgtatatagtcagcttatctcgtgttcaatcgtctgatctctacagagagaagtggaaaatgctgtatcaagggtgggcttagctgtgcctttccaataaagatgtgagaagcttcggtgctgtgtccctgcctctgtgttgtggctgcccccgggggaggacggggttccttccaatgtgagacatcctcctagaacatcaggagttcctagctgtggcccggtgcggtgtggctcacccctgtcatcccaacactttgggaggctgagacaggcagatcacttgagcccagaagatcgagaccaccctgcccaacatggtgaaaccctgtctgtactaaaaatccaaaaaaccgggccgtggtggtggccacctgtgatcccacctacttaagaggctgaggcagaagaatcacttgaacccgggaggcgcacgttgcgaattcc

SEQ ID NO: 282560 - DNA, 1000 bp, Homo Sapiens
attcagggcagatggaagagatcaataccaaagaggtggcgcagcgtatcaccaccgagctcaagcgctacagcatcccacaggccatcttcgcgcagagggtgctctgccgctcccaggggaccctctcggacctgctgcgcaaccccaaaccctggagcaaactcaaatccggccgggagaccttccggaggatgtggaagtggctgcaggagccggagttccagcgcatgtccgcgctccgcttagcaggtgagccggccaaggagctgggcgcgcgggagataaggtacacgaaagccgaagggaccaaaggaggaagggtaggagagagggctgggtgcgcttcatcccgcccgcccctacccctagaagggggactccctgtgcctggaagggccagcacagggctgtgggagcaaattgcctactccagggctcagggtgttgggctgtggaaggctccgagagctaagcggccgggcctcggcgactgaagaggctcatttgcgctcagggacagcgagggaagctcgtacggcctgaggcggagagaaatccccgcacctggtgagacactctgcgccacctctcagttcagcgatccgggtttgggaagagggatgcaacgcgtgcgtggaatcgcacgcaaatgttcctcgcaggtacctctgacacatcccaggcgctgggctggagcgtgccggagcagcgtcgatgtttggccgaactggctgctgtgaccccctcccgcgctcattcttttggcgctggctggggtgacctcaatctaagagtatgggcaaaaagtttcagagccattgggcggtgggtgtgtagcacagacgagttgtaagggttaggacgctctctgcgcatggaattggctgtggaaaggagagggaggctgaccgtcccaaggtcccagtgagagctgcaaagcaatagccatgtcctgggaccgactccgctgccgactccctgaggactttgcattttg

SEQ ID NO: 282561 - DNA, 1000 bp, Homo Sapiens
tgattttaataaccaaagctatttttacacaagatactatgaaaagttatacgtatgaactgatctagctgtaatacacatgccacatagaatcatgactattatttatgactcttgaagcatttgaaatatgagttttcagaactggcaagaaagaatgtagcttcagggaagcaattaatatcatggcagagaggtcgatgcagtacacgtgtacatccagatggcacactccttttcaggatccataaatgtcacttaagtagagagatagacatggttccataatctgttcctagctgagaaaacctgaggatctttccaaagtagtaccccatttttacactagaaaactaaatttaacagggagggtaactaaattagaaaatttgttcaaagtaatgctttttagtaaaaggtcactaaataaagaactatccttagattaattgacttatatttgctttatgcatctggcacaaaaacctcttttaaatactttacaaatacaaataaagtttaaaaaacaacattattattcaaatgagctattcagtacttataactatcctaaaaagttatcaaattaacttattgccaatcccagaaattttatgacttggacgtcaacaaaacagcaggtgcaactgagaaatggtggaattggtggaactgtatagaaaaaagccagtgttctggtggacgacaagacttttgatctattggtattaatcaatttatggaactaagaatagcctccaaagcattctgccttctttcttgctactgcatttagctggaaattttataatatagattttgctctctaacagggacagattaaaaactagacctgagcttacaaatacaaaattttaaatttctatttgtccaaatcacttaaccagagctgtagaagtcaaagtcaaaaaaaaaatgaagtcgtattagtggtaccccagtgaatcacttgattcccagaaaaattctctctgaattc

SEQ ID NO: 282562 - DNA, 1000 bp, Homo Sapiens
tgcgtagcacatgggtatttgtggacgcttccccttctgtctcaccacccggatggcacagaatcggttgtaagtgtggactcaaaagtggccgcgcggcggcagtgcaggctcacacatcacagcccaagccctccctggatggggttcgcccgcggaaacgtcctgggtcacccaagccaggtgccgcagggttctcggaggtcttctgggaataggacgctcatgggagccacaccacgtcttcgtatcgggccatatccacggccgcgtggccccaggtcacactctgagggcttcagtgtcatggcctgggactcaagtcacgcctacccgcgtgatgagcacagcaaattccgccaaaagcttatactttccacatccatcccagagcacagatccgactaaggacagcccccaaatcccgactttttctgaactgacaattgcctccccagtgaacactctgagcttgtcaatcttaagtggccagacattaacattcccattcagtgcaggtttgagatgctaatttaggagcttgagatgctaaagagctgggagtgccactgctgctttattctggggtctaggatccttgtgttggctgagataatctgctaatgtgggtgcagcagacatcccgcggtttgtggaatcgataaaggatggggatcaatggtatttgtgcactgtggggtcgtgtggaatctgtactcctggccaacatgtgcttgtgtgagcctgacagtgcattttccagaccctcacctcggctctgcctggaggctctgtgctgctggaatcagactcaaggacctcatcagagaccatggcccgtatcacctgggtcagcactgaagctgggacaggagagcagagacttccaaaatgagggatccctgtgttctgaggtgatcatgactgggacccaaggactcaagcgcatggtccagagggaatcgtttcccataaggcctttcgagggaacagggatccg

SEQ ID NO: 282563 - DNA, 1000 bp, Homo Sapiens; identical to SEQ ID NO: 117442

SEQ ID NO: 282564 - DNA, 1000 bp, Homo Sapiens
agtgttgggattacaggcgtgagccaccatgcctggccagtttcaggtctcttggagagtgttttcacaggataacacagcaatgattgtcttgaagtcgtagaatcttaataagactcctttgttcaaagcacattttcaaggatagccttatgttatcagagaacagagtatgtctgtaatggatacagatattaacacatactttactgcccataaaacaagtgttcctgaagaacttctgttttaacagctgaccaaattattacatttgaatttgcagaattcctctgcctccctgagagcagaggaaattaggcattgccttcctatctttcttgtgcttctttttgttaattaaaagcaaataaaaaattttaaagttggccctggagtttcattagggtttataaaaaaaaaataaaaaaataaaaaaaaaagaagggctggtgtgatggctcatgcctgtaatcccagcactttgggaggctgaggttgggagaaaatattgaagccaggagtttgagaccagcctgggcaacacaacgagaccccatctatacagaaaataaaaacattagttgtgtggtggtgtgtgcctgtagtcccagctacttggggacgctaaggtgggaaaatcacttgagcccaggagtttgaggctgcaatgagctatgatcagaccactgcactccagcccaggtgacagcaagactctgtctctttaaaacaaaacaaacaaaaaaacaggtttggaagctactgggctagagagtgacagggatgccagacaagggtatggggaaggcctctgtgaggaggggcaacatttgttatccatcttctcgagggccaggatttttgtctgtcctattctctgctctaatgctaagaaccgcatctggcatccagtaggtgctcaataaatgttgaataaatttatcaaacacagagcacctactatatgccaggcactgttctaaagactttccaaaagctt

SEQ ID NO: 282565 - DNA, 302 bp, Homo Sapiens
aagcccagcagggacagaactggcccagtccctatgacgtgtcaccccatttcctttcccaccccattcccacaaaaggtaactggctcttcctatgttgactatacctgccttttttctgcctaaagtgaccgtctggttcctgagcttgacacaattgtccctttggaatcaaccaaagcctacaacatggtggacatcatacactctgtaagtgccacatctgtttgtcttgcctgtcctagtcagccacattcatgggcattgtgcttcggcttagtgaggaagcactggaccacttg

SEQ ID NO: 282566 - DNA, 1000 bp, Homo Sapiens; identical to SEQ ID NO: 114915

SEQ ID NO: 282567 - DNA, 444 bp, Homo Sapiens
tattcttgtaattctcgtgtaaatttgaaattatttcaaaataaaaactcagcaaatttagctcttcatctaagtcttttctattcaatgctaagtacaccccttatcattgttacattaagagcaattggtttcctagaatattagaactagaaggtcagctgtcaagcagccatttgttcactccacaaagatttcctgagcacctttagcggggcaggcactgtgccaggtacagagaataaactagacaccctctctgctgttgaaggggcctgagatcagcagcttaataagacaaatgaggatcctgaggtcctaggggttaagagtgtgtattatagttctattattcaaattatgaatgttatgcatctctcgtagttttacttctgagaaaaccaaagtcatagtattacacagactacagacaggctaggcgca

SEQ ID NO: 282568 - DNA, 1000 bp, Homo Sapiens
aatctggtaatcccattctgcttgctcagccatataggaattaatactaaagagatcccagttattctatacaccagggggtcatgagaaaatatcattctccaccatagcccttcagaatagaagaaagggatgcatattgtagtctcttggccttatttttccatcgatttctctttcccaattgagcctagaaattagactcatatagccacaaaaataagactttattgaaaaaagtacataattcaatataaatacaataaataatcctccccaaactgtccccaggaggataaataatccccaaatttcccttcccatctaataaatactcaaccttatcataggtcagcatcacatgtcagtcagtattggtaattttcaacatatgcaggtcccactaaaattaatggactaattaacctgttggctcacaggtgcctggggtggtagatttatcttggccttgctgggccatggagatctgagtgccatccttgagctgctgcctttagggactcagggttgctgctccatgggcaaagacccgggcggctacagccacaaaggcctggaggctgcgaaggattttgaagcggagaaggagacgctgccatggctggctgggactgaggcttggaatctgctgagtctcccagtggtgaccctcaggctgaaaggacataggacacagtcagagaagactctaaacccttaacccccaaccctctgtctctgacacctgcaagcccccatcctccacgcccctacttcatacctgcaggagttggctgaggcccagtagggaggcatgaagctggcccacagggctatcagggagcagagaaggctcccctgtgaaaatatccgatcctagcagcttctcataaaaaatcagaccctggtggatcctttgcaagcagaactagggagaaaagaaagcaatgaaagaggacaccctcttcctactccattcactgaagactcacccagtttc

SEQ ID NO: 282569 - DNA, 1000 bp, Homo Sapiens
cagaaagatggctgagacctgatgggagggaggagactgggtggcaggggccaacggggatgctgtacagaagcagggcaggaggccagcaagtgactgaagatttcctccctccgaactggctggatccttttgatggagagtctaagacatcagcttagacacagacccaacagagagaaaagcttgtctgatttctcgctcatttctaggtaactcatagcagttcaccccacctcctgacttctccaggttcctccataaagtggttctcagatctgaatcccccagccctagaaacaggaagaataacttcctcccagtttatttaacaagaacacacccatagcacttgctgtatgccaggcactgttacacgtgttttaaagtattaatttaatacttattttaaaattctacgatgcgggctcaattattatgctcattttacaagtgagaaaactgaggcattgcaaggtttagtgatttatcccaaggtcatataatcagtgaccaagctgggattggagcccagtcagcctggctctagaatccatgctcttgcccagtaaactatgctgcaaaagatgccatctgctacccaggattaaccatttctgaaggtaactggcagtgaagacatttattctcttctgggtaaagccctatctttgcctaccaaggtaaagtcttggaccctagaccatccctagggggcccctagaccccacatccaatgtggggaagtttttaaagttttggattattcagactaatctgtggtcaatacagagcatctttatttaaatacatattcaagttagtgtcaaaaagagtgcacaaagtgctgctggcactggaattagatgtttccttactgacctctggtatctcctgataacaggcccctcctgcttagtgttgggaaagtcccagattgatctagacacaactaacagctgatatgaaagatttgtcctggaatcacatgtctcctctc

SEQ ID NO: 282570 - DNA, 1000 bp, Homo Sapiens; identical to SEQ ID NO: 206325

SEQ ID NO: 282571 - DNA, 1000 bp, Homo Sapiens; identical to SEQ ID NO: 206324

SEQ ID NO: 282572 - DNA, 1000 bp, Homo Sapiens
gattgaatacctggtattagcacaagaaaaatgtgctaataagccttatgagaatttggagctgaagaaagactatataactcaggaaagttacagtccagtagtaggtataaattacagtgcctgataaataggcattttaatatttgtacactcaacatatactaggtaggtgcaaaacatttacatataattttactgatacccatgcagcacaaaggtactaactttaaatattaaataacacctttatgtgtcagtaattcatttgcattaaatcttattgaaaaggctttcaatatattttccccacaaatgtcatcccaagaaaaaagtatttttaacatctcccaaatataatagttacaggaaatctacctctgtgagagtgacacctctcagaatgaactgtgtgacacaagaaaatgaatgtaggtctatccaaaaaaaaccccaagaaacaaaaacaatattattagccctttatgcttaagtgatggactcagggaacagttgatgttgtgatcattttattatctgattcttgttactttgaattaaaccaatattttgatgatataaatcatttccaccagcatatatttaatttccataataactttaaaattttctaatttcactcaactatgagggaatagaatgtggtggccacaggtttggcttttgttaaaatgtttgatatcttcgatgttgatctctgtctgcaatgtagatgtctaaacactaggatttaatatttaaggctaagctttaaaaataaagtacctttttaaaaagaatatggcttcaccaaatggaaaatacctaatttctaaatctttttctctacaaagtcctatctactaatgtctccattactatttagtcatcataaccattatcttcattttacatgtcgtgttctttctggtagctctaaaatgacactaaatcataagaagacaggttacatatcaggaaatacttgaaggttactgaa

SEQ ID NO: 282573 - DNA, 1000 bp, Homo Sapiens; identical to SEQ ID NO: 114916

SEQ ID NO: 282574 - DNA, 1000 bp, Homo Sapiens
ttgtgagcacttgataaatatttgctgaatgttgtttttttgaatgaacataagatagaaacaaaaacttctcatccagttaactagagtgaatgtagggagaattgttttgcttgtaacatggagagtttattttcaagtgaggaaagagaaaaaaattactcagacttgttcctggtgaagtgcattctctgtttgtatactttttgatggagaaattgatctatagaactgcttaattttttgaggcatttagacagcaatgaaaggtagttctccacaggacaccgaatcaaaaggagagaccagactctggcctcatacccagcctatttgaaacaagctatctagtttctcctgcagacaccttgtcaacaacatgcaacagtgtcaggtgccttgcaggaaaataatctgagtcccaagctagcctgtgctcatccacaatcacaatgaacatgtcaaggaagaatttgcagagactcaagggaagcacaatgggataaggtaatcactttcagtgaaaaactgttttcttgaaaacaggcttggacacaattgaaagctggcttcctgcaaacacaccaagagtctgtaatctagcctatccattatatgtcctttattattcatgatatcctattcttctaccttgttgcctggtaactttttctgaggactgagtttctgcagcgatgtggtgcactcttcctgtgatgaggaaacatctgggcccccttctgcaggctttggaagatgatgtgtcttgtcaaggggtaaagggcaaatggatttaatttctgcttaaaactatcatagacgttccaaatagaatatgtaaaatttctctgtattagaaaaagaaacgtgataccaattgtatattttcttttctttatttattctctgtaagtctgtcagatgataaattgtaaataacaatgattaaagagtcatgctactggaaaaaaaaaaaaaaaaaaaaaaaaaaaaaaaaaaa

SEQ ID NO: 282575 - DNA, 1000 bp, Homo Sapiens
ccaaacccacatgttatttggctctgaccggatggagctgctggcgcacctgctgggtaagtaagttaaagaatcaaccctgagccaggtgcagtggctcacgcctgtaatcccagcactttggtaggctgaggcgagcagagcacgagttcaggagattaagaccatcctggccaacatggtgaaaccccgtctctactaaaaatataaaaattagctgggactacagctgcctcagtgggaggctgaggcaggagaatcacttgaacctgggaggcggaggttgcagtgagccgagatcgcgccactgcactccagcctgggtgacaaagcaagactccgtctcaaaaaataaaaagattcaaccctgagctgcctttgaccccagctccacacccactatatcagttgaccagaaggaggggctcagagcaaaaaaatattcttggcacttccagtaacaaagcgttatgcagtcagtgctgttcaaggttgagtgggcaggggctgtcttcaaccccataaaagaaaaggaagccttctataccttgaagccaagcaaaagtctttctagaaaacccctgggaccttgtgggaccaactcctgctgccagaacacctgagaacagtgtgcagagtctgttgttttcttcatccaggagagaagtggatgggccctatacctccagccgtgaatgccagactttaagattgcccggaggaagcaaactcttcgtataaaaaaagcaggccatctgcttaacccttggctccaccataaggcactgggactcggatttctctatctgatagaggtattttctgtggccctgggagctgtctgtctttcccctacccccaaggatgccaggaagacgtccaccattagccatgtggcaacctttacttctatgcctcacaagtgcctttcagagagccccaattctgctttcccacaaaataaacctaatgccatcaggcaaaacatttctgtgtctgt

SEQ ID NO: 282576 - DNA, 1000 bp, Homo Sapiens
ccggcagattcaggtgtcctggctgcgcgaggggaagcaggtggggtctggcgtcaccacggaccaggtgcaggctgaggccaaagagtctgggcccacgacctacaaggtgaccagcacactgaccatcaaagagagcgactggctcagccagagcatgttcacctgccgcgtggatcacaggggcctgaccttccagcagaatgcgtcctccatgtgtgtccccgatcaagacacagccatccgggtcttcgccatccccccatcctttgccagcatcttcctcaccaagtccaccaagttgacctgcctggtcacagacctgaccacctatgacagcgtgaccatctcctggacccgccagaatggcgaagctgtgaaaacccacaccaacatctccgagagccaccccaatgccactttcagcgccgtgggtgaggccagcatctgcgaggatgactggaattccggggagaggttcacgtgcaccgtgacccacacagacctgccctcgccactgaagcagaccatctcccggcccaagggggtggccctgcacaggcccgatgtctacttgctgccaccagcccgggagcagctgaacctgcgggagtcggccaccatcacgtgcctggtgacgggcttctctcccgcggacgtcttcgtgcagtggatgcagagggggcagcccttgtccccggagaagtatgtgaccagcgccccaatgcctgagccccaggccccaggccggtacttcgcccacagcatcctgaccgtgtccgaagaggaatggaacacgggggagacctacacctgcgtggtggcccatgaggccctgcccaacagggtcaccgagaggaccgtggacaagtccaccggtaaacccaccctgtacaacgtgtccctggtcatgtccgacacagctggcacctgctactgaccctgctggcctgcccacaggctcggggcggctggccgctctgtgtgtgcattctagagc

SEQ ID NO: 282577 - DNA, 1000 bp, Homo Sapiens; identical to SEQ ID NO: 114917

SEQ ID NO: 282578 - DNA, 1000 bp, Homo Sapiens; identical to SEQ ID NO: 114918

SEQ ID NO: 282579 - DNA, 1000 bp, Homo Sapiens
tcagtcttcaaatactgccagaatgctgcatctagtatcttcatcaagacatacatgctcatgtctctggattctacatgtctatagaaatagattttacaataaaattttttgccactattgttagtcaattaaccttaaactcatgaggtgaatagtaatgtctgtcaccttgacttttgtgtctgttaactgctattaaccatgaagctaatgctacacatatatatgtatatatatgtgatcaatttatttgtttccttaaggctatataaagtatcaatgtattagcattagcttgttttagtctgtttttacactgctataaagaactgcccgagactgggtaatttataaagaaaagaggtttaatcgactcagagttcggcatggctggggaggcctcaagaaacgtacaattatggcagaagaggaagcaggtacatcttacatggcagcaggcaagagagagcatatgaaggaggaactgtcaaaccatcagatcttgtgagaactcactcattgtcacgagaacagcatggggaaaaccactcccatgatccaagcacctccctccctcaacatgtggggattacaaatccctcctttgacatgtggggattataatttgacatgagatttgggtgggaacgcagagccaaaccatatcaatgccacatttaggaaagaactaacatttacaaatatgttttaaaattatattcattatattttggtatcattttatttgcatctgtattctttttagatttgatctttttgctaaaacaatacatgcacacagtttaaaaaatcagataatgctaaatgacttataatcagtaatccctgcctcaccattcacctattttaaactcattttcctatttcttctgatacttactttcactttttatttccttctttttagagatgggtccttgtgctctgtcacccaagctggaatacagtggcgcaatgatagctcactgtagccttg

SEQ ID NO: 282580 - DNA, 1000 bp, Homo Sapiens
ggctgcagtgagctgtgatcacaccactgcactctagcctgggaaagagtgagaccctgtctcaaagaaaaaaaggaaattgcctttatgcaaatagtttctttttcaaccgattgatagttttaccccttaaactcaccattgagtttgcttttatgctttacatctaagaactgtttaacatttttcctactaaagtatttcagtagacatgttaaatctgtattctgttatttcaaggtattgttgaacagtataataattgttccaaagtagggaatcaaagttaagaaaatgtgcatatgtgcttatacagaatcagtctctggcacaacttccttaaccaccactacatcctagaaaaacaagttctcaaatcagtaacacatagtctgggtttgggttcagtgcagggaatccctaggattaaggattcattttttccaaataacgttttcagatcattagttataagcactgatactgtcgttagctattattaaaagggacatgtcacaacataaattagtatttacggagtactgggtatatactaagcactttacatggattatgtaagcaacctggtaaacattctgccattttacagcagggaaataggcttaaagagttcaggtaacttactctaggtcacatggctaggtagtagagctgggattcacacttgaggcagaccatttcaagaggccaaaccagtagccactggtctttactgcaggactagcatcttgttaacctgcatcagggcccaaatatttgaacagttaaaaatctctgcctgactagcatcttgttaacctgaatcagggcccaaatttttgaacagttaaaaatttctgcttaactcttaagcgtttccatcattgcacttctctggtatcaaacgcttctgagaggatcttaagaatcttcacagccttcctgggatagctcaaaagactgaggcagaatcacctattaagatgtataatccaagctt

SEQ ID NO: 282581 - DNA, 1000 bp, Homo Sapiens
ccccatccccgtttgtctgcatcctccatggactgcaagctccatgagggcagggaccgggccagccttgcttcctcggtgcctgcctctgtgcttggtagatctacgagtattgaataaatgaatgatggtaagaacccaaagagcaaatgtctgtagtgcttcaatgtactcgtactggagttcaatgtactccagttaccctgggggcctttggaatctacagactgcagaagaacccatcttattacaggaagttcctcttggtttgggctgttgcattcctctaccaggatttcttttttttttttttttaggactaaggataaagatgagaagacttggggataagataagggtcttcaaaacacttcaaaagctgtcacatggaaagacttacatgtggccttatcatggctttgggggcagaacaaaggctagtcactaggcatgattagaaggcagatttttaatttaccaagaattagagctgtcccacaatcatatgagccacctgaggtccaccctggcaggtgttcacacagcgccaactggggcttgatcatgcactgactcagaccaggtgacctctaagagctttcaaaaccccaaggccaattttaacagcactgaagagtctgtctttctctgcccttcacaatgaactggcttgatcaaatgtcagtggtttggagagagactcaagtagccctccgtgtgtgcatttgggaaatcgatgcaaactcaaggtcatggggagaaagtgcagcctgcacatttggaaagggaaggaggatcatgaatgtgcagtctatccctttcagaccctgcctgggttcctgaacacatccagcctttctggccttcagggcatactgctgtctgcagacaaagtccacctgctcccaacaaccatctctcccagctacctctaaatagtcaaaagatagttcctggttatgtgtggagactgtcagtgtatgactgacagcactctcgc

SEQ ID NO: 282582 - DNA, 1000 bp, Homo Sapiens; identical to SEQ ID NO: 195165

SEQ ID NO: 282583 - DNA, 1000 bp, Homo Sapiens; identical to SEQ ID NO: 195663

SEQ ID NO: 282584 - DNA, 1000 bp, Homo Sapiens
ttcagttttcttatctgccaaagaaaaaaacaaagcctagcctacctacttcatttcactgctgcaggatgataataacagctgacattgtacatttaaacactgtacatacattaattcatttaatcctcaaaacaaccctatcagattggtactattattatcctccatttgacagagaaagaaactgaggccacagaactgtttcataacttgccccatgttacccagcaaaggagggatttgagccgcgacgatcaggctccagcaactatgctcttaaaccctttgttaaatcgcacgatgtctgaaagcactgaacgtgtttgacaatgttctgtaaatgaatagcaccattcttattcttgctaggactattcccagtgggaaggatgcaacgcaaggtcaggattccctaggtgaggataaatcctgcaacctcagatctgcagccccactagccaggtgccacgcttccagtggcaagtcctccccgcccctcccagctgcaggactgtcttcctatgttctttttcaaagcagtgtctctgctgccaagagcaggtttgtctgtctcctggagacagcggttgtcaagccctgagagaacagcaagcatgtcaaaaatagcagcgccagcagactgcgtggctgcaatttccttttgaaatgtcgcctttgctctcaccaaagagccagggtctgtctgcgctccttgcagcctgcagcagaagctgcttaagattccaaaatgttttccaggaggaggtaaagtgtatctgctgaggctcgtgaccgaggagtgaggaattctctttagagtaacaatgatgaggttggagttggattaaaaaaaaaattgtaataaatcccatcaggactagtccccaaacaggtcaagtgatagccaaggttagaccagtgcgaatgatacttcctgtagggtaggaacctttcctcttttgttctgaaaatgagggagtccctctcctattgttaa

SEQ ID NO: 282585 - DNA, 1000 bp, Homo Sapiens
actcgtcaagggttttgtagggtgccttattcagttttcattgcaatataagaatctgcgtggatataaggtatccattttattctgttgatggacttttttttctaactttttgtttcaaactgcttctgctatgtattttatttttacagaaatatataatgtacaaatcaacatgctcacctgcagcactttgttccatttcctcactaactgggtattatcaatctttaattttctccaatacactgtgtgtgagatgacatagttactgtaatttagattttcctgttttgtaataatattgaacaatattttatatatttagtaacgattttgcagaggaatgatttcctcttctctgaaattcctgttgttttgcctacttttctgttggattatcttgttctcattaattcatagtcattctttgtatattctagatacaatttcgaacatgagttggcaatatcttcttccagtttatggcttgtcattctctgtggtatcttttggttaacagagggtcttaattttaatatagttgaatctttttctttatggttgtgctttacaattctttttctttttgagatggagtcttactctgtcccccaggctggagtgcagtggcgcgatctctgcccactgcaacctcagcctcccgagtagctgggactacaggtgtgtgccaccaagcctggctaattttttttttttttttttttttttttttttagtagagacggggtttcactgtgttagccaggatggtcttgatctcctgatctcgtgatccactcacctcggcctcccaaagtgctgggattacaagcgtgagccaccgtgcccggcccgtgttttacaattcttaagaaatccttccttactcaaggtcaaaatgtactctctatggtgtgatgtagggatccaattttattggtttttagtattattttttgagacagagtctcgctgtgttgcccaggctggagtacag

SEQ ID NO: 282586 - DNA, 1000 bp, Homo Sapiens; identical to SEQ ID NO: 195668

SEQ ID NO: 282587 - DNA, 1000 bp, Homo Sapiens
tttcacactcctccaggcggtctatgagtgttccagttgctccacatggtgagttctcagaggagtcccaagggctggcaccatatccttacctgggccttgagggcctggtcctggctaggtcagcacatggagctccagcctgggaggctgtggcagcgtctcctgcagggcaaccacagcaatgcatgggctgagggattccagagcaggagcccgctgcagcagccttgtgatgtgagggcagtgcaaggcaaagacattgccagtaccatggagatggtgagcccaccacagcgagtgctcaggagtctcctgccatcattggcatcagcagtagtctgccaggaatgcaggaacacatcaagatgtgtgaagggggattaggcgatgcattttggacactcaggatgggcaccaaagggaagtaatggccccagaagagtgccagcaatgcctccctcgcaaatccccacatattctaagcagccaggctgcaggactgcttctcatttggagtggaagtaatttgcaagagtggtgggagctgtttctcccagctgcagaaaatattaacgtcttgtggaagactctttcagcagaatcttaggtccatgggtcacgaagtctggaaagttgacaaggctttggggtggtgtgatgaagaagcatctctctttgtattttttctgattttgctgtcttccttcttcatcagaaaacacgtactctgccatgggctgtagctagtgacagcaacatgggagccgaccaaaacacccactggtgttagatgtggtatagccaagcagttatacaagagagctctgaagccgacttactgggttcaaatcccagctctgccttacattatctgcatgatgttggacaagttgctgagcctctatgtgcctcagtttccccacctagaaaatgaggataacagggtatgttttgcaggcttttctgaggaataaatgaattaatagatgtaaagatc

SEQ ID NO: 282588 - DNA, 1000 bp, Homo Sapiens
gactccccagactcaccagcgctctcccctggggcagtatcaaaatgagatgcccctttggcccttctgcaccccaccctaccacaccaggacaaagaggggcactggtgtgagaactgaccagccatttgtcaaagaaaaatcacaccagacagagttaaataggcaaggaagattttactcaagactactgcaaaggggacaaagactgaactcaactttgacacgtcagggacagttgcagatttatagccgatgggcagagtgaggagtttccttagatgggaaattactaagaggagcctaggtatcaagggtgggggacgagcaacttgatcaaatatcaagggcagggcgatattcacactggtttataagattctttgctaaaactgccttggcaaaccaaggacaggtcgagtgtgaggcctcattgaagagacggccagaggatcctgactgaagtacggtcaaggagggcgtctttgccacgtcccaagccaagatctgtacccaccaggcttgcccaccccaggaaatgggtgagaagggctttgcgtggaatgtgaagtttaccacaaacagggctgcgtctgaacacacaagagactgttgtaataactgttgtattaactgaggatcactgcaagcttagggaactggaccgcaatgttgttgttagaatagaaccaggggacaccgaaggttggtcagagcgcatgtgggagagggcatggctggacacagggagcactccaaaaacgagactgagggaaaatctgagcgcgggctgaccagactcctcatgaaagcttttcccccacggagcaggcaaaacagtgcccccacccccacccccacccccaaaatgtccagtgactgctacaagctattagacgctgagtggaaaaaacagattttaagagtcctaaaactgagccccaacctggaggcgtgcccacctcgggagaaagaacacctgaccacagacacctagacc

SEQ ID NO: 282589 - DNA, 1000 bp, Homo Sapiens
catcaggatgttgaccacttttagtaatatttaatatatatcttatttgttccatttatcccccgagtattgtagccacatttaaagtgaaaatttcctgtgtcaaattaacttttccaatattttttgtccattttttccatgtctgcttgaattgaattcgctccaggtttccattaactttggaccatgcttcaagtatcctccgaaggatctcacttaccgccctgtgagtaacattacaaatggctgcatgtgtcctcagcatctccgtggctgctgtagtcaccgtgttctgtttctcattcctcctgcagatgagtgacatgggctggggcgccgtggtagagcacaccctggctgacgtcttgtatcacgtggagacagaagtggatgggaggcgcagtcccccatgggaaccctgaccaggtccctcttttctgtcaaggactttctgggaataatactgggggttttgtttttgtttttgaactgtctcaaatgttctcccaaagatgctaaaaacacagcctctccttttagcaagttaaaaggctgggtaggactgcgggagactgcctgcctttcaccattttctccccacttccagtgactgctcttattttgtgtaccataagccaacaaccgctgactccaggattgcataagccccctgtgaaatcggtgctgtactgcataccctgccagctgtgacttgttatcctactatattttctaaggagtgaataatattgtccgagtaactaacttatttaaaagacatttccttctgtgggcattgactgtatcccacctgttttccaaggaaatggtaacctgtttctgagaacacctgaaatcaatggctatacattccaaaccaatctaaacgctatttccttttggtgtgggtttggttttgttcattttgaaatacacttttgaacactgagatccgtaaaactactagatctctggaagtgtaattgtgaaagaaact

SEQ ID NO: 282590 - DNA, 1000 bp, Homo Sapiens
cgatgatgccaatgatgcaggtatatatttaataatgtttccaaacttttaagtcttatagttgttattttattcattaatggcataccacggatatttatttttccttgcacagaataactatattcaacagaataacttgttaaaaatcggcccgtttcctattatggaagatttaggtcatttccatgttataaataatattgaggtgattattttggagtataaaacaagaatgtttatattatgatctattacctaacaaataattttgctcattatatagtaaattgtgttttatcacaaggctataaacagcatgttcaagttagtatatttgaggttgaactaatgtgctaatattaatatgtatatttttatttagggggccgaaactccactgagtgtacgcttatcctgactgagggagattcagccaaaactttggctgtttcaggccttggtgtggttgggagagacaaatatggggttttccctcttagaggaaaaatactcaatgttcgagaagcttctcataagcaggtagaatataagacgatcttcagaatctaaatctaatttataatacaagactttatgcttatatttaattcccactaatggcattttaaaatatattttagacaatttgtgcttattttgagaaataaggtacattgtagcctattttaacagacctttctgatgtagtaaattataagctaatagctcaaaatactggagctcaagaaaatccaagcaacatatactgttaaatttctttgttcttttcaaatttataaacgatgctttttttggtatatgtccatttcagatcatggaaaatgctgagattaacaatatcatcaagattgtgggtcttcagtacaagaaaaactatgaagatgaagattcattgaagacgcttcgttatgggaagataatgattatgacagatcaggtcagattgtattaaataattacttaataggagcttatc

SEQ ID NO: 282591 - DNA, 1000 bp, Homo Sapiens
aaatgccggggtcgggttgagggctggagaaaggtcccaccccgcagcatctacctcccgggctcctcaccatgtgcatcgcctcctccatccacttttcggtctcctctgccgacaccgagcacgcgccgcttgcagctggcttgggtgccgccttcgcctccatacccagccaccactcagctacagagcccgcggcagaggaggagcgcgggcagcggaacgcggcgggcccgggaccccgtttccgggggtagtctaatgaaaaggcactcgggagctatttctgaacggacctgggcttgtcggaccagtgagcggcggcggctgcgcggcggcagcggcagaaagcgtagctgctttgctgtagtccacgcccccttgccgctccggtgacagtctctgcggaaagtcacgtttgtgatttcgggagagcacagaacgggacgacggcgctcttgctgggtcatctgggccaggtgacgaagaaacagtttcctggtgaagcagtccctcacccctagtcagcccacacccctagggcctaaagatgctgaggtctgtatggaattttctgaaacgccacaaaaagaaatgcatcttcctgggcacggtccttggaggtgggtgacaacgtgcttgaaagggggcattgggagaagggggtgggagaggtgacttcttctaaaataaggacaggccgggcgatcctagtctgggatatgtagagggagttcgatcaaccatgggatgaaaagggaggtggccaacctccagggttctcccatctctgcagttgagaaatgcctctgtgccctttgccctgtcaccgactcttaactctgtttctcacctatccttttttctcacggacctttggagaactcatcacagtttaagtttctgtttcaaggcaccattctcttacaggaactttttaaaaaaaattctgctttcctgtgagattctgcatttctccttggcactcttgatactttgg

SEQ ID NO: 282592 - DNA, 1000 bp, Homo Sapiens
agtcactctgtggtcgcacagagctctgcttcgagtccagcagtctgtgttttgtgcggtctcactctaggctatgttcccaagtggagcaccatgatttcctgtgaagggtccatgagatagatctttggtgatgaggccagcttggagaaaatggcgcttgagaatttcttatgatgctattcaatgacagtgtgattcgtggcgtccccccagccctgtcccctgcccaacttaaccacacttggcaagatctctgaggagtcctgagaagaagagtcctcaggcaacagcaagactttcccaccctggtctaggaaaaaagttctggaaaagacaagaagtccatcagacacaaaagaagacatgtaaggggaatcaaaacaaacaaaaaagctatgaaaatgcagagactcaagaggtcgccaagcgaatgaaatgacttaaggagtgatatgtttgcttcatctttctggttgctctctgaatggtctctgataacacattttagctgtagaaatggggaaagggggcaaagacaaagttccgggaaggttgcaagagataactggttatctaactggtatcccgggggccagtgtggactcgcttctatgtctaaaaatgattttgttagtatgtaggtcacattactgtgctgtctggttattggacgttgcctcagataactgtttgtggagtattaaatggttctgctgcctcagcacactttttcactggtatttttcacacagttgtgcggctgaaaaggcgcactgctgcagcaaaaatcaatttatctttccctctgctacttgtgtgctgtgagttcttgtagtgttttaccatttgattaattgatattctttgtgtcggacatcatttgtaacactgctgtccaactttgggtgtcttaaaaactttcgtaagaacacattatttatgtgagacctcctcatgacaaagtacaatagtgagatgcagaaagaaaaattagatc

SEQ ID NO: 282593 - DNA, 1000 bp, Homo Sapiens
gcaaaggccgggagatgggagcgtgcagggcccgtgggagggtggagagatccggggcagggaaagggcgcggctgggtcctccctcgcacgcgcagaaccggagccggcagggcccgggcgccgcgtcttcctgccctgccgcctccactctgctggagggagggaggaatcccggaggccctcccggaggccggggactcggctgaggtgggtgtcgccgcccacaggggaccggaagctgttcgtggggatgctgaacaagcagcagtcggaggaggacgtgctgcggctgttccagcccttcggggtcattgacgagtgcaccgtgctccgggggcctgacggcagcagcaaaggtgactggcgggggccggggcgggactgcgagaggggccgggctagctctgggggcggggcctgtggggagggtggggcctgcagcatggggaggagctggctctggggtgggaccctggggaggggcggggcttctccaggggtggagtctgtgggtgaggctgcaggggcggggccttggagaggggcggaattgcaggggcggggcctggggaggggatggggctgcagggtggggaggagctgcctctgagggcggggcctgtggggcagggccctggggaggggtggggcttctccaaaggtgggcccttggggagaggtgtggctgcaggggtggggaggagctggctctgaggatgtagccctggagaggcccgaggcttctccagagctgaagtctgtgggtgaggctgcaagggtggggtcttgggtaggggaggtactgcagggaggggtgaaatacgtagagttaggagggactggctccagggggagaggccctgggaagggtcggggctgagcatatagggggtggggctggccaggtggggcggggccaggccaataggaggctggggctggctgggagaagctggttcacaggggttgggtggagcagagactggtcccgcttgatc

SEQ ID NO: 282594 - DNA, 1000 bp, Homo Sapiens
gtctagctggcgtggtatgtttataggcgaatttcagcagaaggaagccaaaatagttttttccttttgaaagttttttaaaaattatttcatgggtcttttttttaattaatatgtgtgcattgttacaatgtatgttggatgtcttttgaccctaaatgctttttttgttatcagagattgtgtactatttttatttttaataaatgtatcttccctttccttgttttagatttactttgctcttcgttaatcttattcctgatgatctagaacattagtcatcaacattacatgtttcatgcttcagatattttactgcttgtgtccttattgttggacagctttaaacagagttgatgtacttcaaatatagctcattgatacttaaggcatcttcttggaatgtggcttttgaagaaaaaaattactcaaagcaaatcaagagttaacaaacctaacgtaacctgaggtttaatattctactatcatattttttagagctataacttttgattatattaaactgcctccagctgtactatgtaaaacagatttacttttaaaaattacagtatacctgctttgttctatatgtatatgtttaactcatgaagtggactcttagaaggatttgaaatggactctggccacagaatttgtgagcagacagtagtagtgataataataaaagaaggcaatcaaaatttaattttatcatgccctctcacaggtttgtgttataattgtaagcccatattacttgtgttagtagttttgtctctataggtaacataatgacagtggtgtaaagtttctgttcaagaaacatatgttgtaaagttactttatacaagatacctgccaaaggaaatggtcttactttcaaatgactttgaaagcatgtataattgcaaacagagcaggagaagactttaatcagaatttccttgtgtccttttcctttactaagtgttttgaataaagaaaaaaaaaatgt

SEQ ID NO: 282595 - DNA, 1000 bp, Homo Sapiens
agacttgtaaaaagcttagatcatcaagtgttttggattgggggcctcccaaagggatataagaggggcaggccactcttaagaagaatgcgagctttctacattgggactagcataagatcaaagccaatcaagatggagcacagtaacagaaaactgcggtttctgtgggagaacagaaggggaaagggtcttaactgggaaagggctctgtgtggtaacacctcagttgtgttctcctgacaccaggaaaagagagggatcagcttcaataactagaaaattctggctgtttaatggactctttggtggcctctttaaggcaaagcagagaaagcaaattatgtattaagtgtattttgcatttttaaaacttgacgtgctgtattgtactaaattaagtgtaatctattaaggcaaggtatacacaatttgctttgaaacttactatgtttattctattataaagtgtattcaggtgcaacacagagactgctttcggtgacattaatgaagaaaatttctcatgccaggctttattatagaatcttcagctaaaatcctaactttctccttatttcttggcacttgtatacaagtggtgttgcctcttagggcaggcatgagctattcttttctgtaaaatattttgaatctataggctgtgggtttcatttttgaaaagtattttgtctggatgtctttcaaactagcttcagatattatttaatactatgtaactgggtcccctatggctcaatcaatattgcttatttttcttctgtagtggatgtgaaatttcctttagttggataagatacactgtaataattttaatgctaattaatgatatttcatactgtgcaatgaacagataatttaacactgtattttgaaatgtttttttcttcctgtcaccgcagtgtgtggtattgcataatgtgaatacctgtaaaaatataaattacttaaaaataaaaatatgaccaattggtatcag

SEQ ID NO: 282596 - DNA, 1000 bp, Homo Sapiens
ggggcctgtgctgggaaccatctggacctttgcagaagttagagattcagtgcccccctttcttaaaggggttccttaacaaccacaaaaatccttatttctgcagtggcatagaatctgttaaaatttaattagaatcacaaatttatctcagaagctttttaacagttggtgaaatgtgcttgtccaacaaagcatcctaacagggtcgttcccatacacatttgacctggtcagccttttccaggtgaatagccccagttctgacataaagaaagttttatttgtattttactactgtttggtcaattttgatatataactggttacaaacagagccttactatttattagtggggaaatgattttaagaccgtccttttcagtatttaattctgacagatctgcatccctgttttgttttggattatttctgttttggaaaatgctgtctcatttaaaactgttggatatagctggatcctggataggaaaatgaaattattttttcattgtgttttttaattggggtgatccaaagctggcaccttcaggcacattggtctcatagccattactgtttttattgcccttctaagatcctgtcttcagctgggtcagagaaaacttcttgactaaaactggtcagaactcatcacagaaatgaaatacagtggtctctctctcccagaactggttgcagctaaaacagagagatctgactgctggctataggattttggacttaatgactgaaattgcaaattgtcctttttcttggcattacagattttgccaaaataactttttgtatcaaatattgatgtgtgaaagtgaaggagctagtctgctgaaccaggaatagtttgagatattgaactgtcatttttgcacatttgaatactttgcaggctggctttgtataaacttatcctctggtttcctatatgttgtaaatatttagaccataatttcattataaataaatctataaatattc

SEQ ID NO: 282597 - DNA, 1000 bp, Homo Sapiens
cttctttgccaacaaagtgaagtagtgtaacgtaagcttcttttaatcattggcttaagaaagtgtcttccaagatagaattttggagttggaaagacactagaaatcctgaggtccaatagcctcattagcagaaacgttaagggatgtgcccaaagtcactagatattttgtcacatagcctagactagaactaggttttgataaaattaagtacaaaatagcccatttgaaaatctccgatccaaaatttcagacaggactctccctaaaatgggcatccttgtttggtgttctgggtcataggtctaatagtcaagagattttttttcttcattttatgactgataaaagggagcttattaattttaaaatttgaatctataacatagtgggaaaataaatacatcggtgcatttgtaccgcacatagaacctgggtaggacacttttaggttattcttataaaatgctgcctaacgaaccaaaggaagcacctgtgaggccacccgcatttccatcgctaaaggttacccttgtggtctgacagctccctgctctctcaggctggctcttgacctttgcatgagccctgggcctaagtgggggcttcacttccttactgtctcaccagagtccccataggatgcaggcccttgtcctggaaatggcagggttctttcttgaccactgaattcaggaaagtatgtaactcagcaatgcaacctatcagactgccgggatgagaaggtaggagctgcagcagtctttctggctggcattttaaaatacactttaagcctaccaaatagtcaaaaggcctagctctcaatatccttttatcgttttcaaaaaatattttccatgcaccgtgtttgggaccaggaaggaattttgaacatccttcctttagacatgggaggtgagggagtagctttttctttcccaactccatgtctctgcgttctcaggtgaacgtagctgcttgccacggagagctc

SEQ ID NO: 282598 - DNA, 1000 bp, Homo Sapiens; identical to SEQ ID NO: 114922

SEQ ID NO: 282599 - DNA, 1000 bp, Homo Sapiens
caacccgtaatagcatttttgcctgcctcgaggcagagtttcccgtgagcaataaactcagcttttttgtggggcacagtactggatttgacagtgattccccacgtgtgttcatctgcacccaccgagccaggcagaggccagccctccgtggtgcacacagcacgcgcctcagtccatcccattttagtctttaaaccctcaggaagtcacagtctccggacaccacaccacatgagcccaacaggtccacgatggatccaccagtcccaccccagccttttcctttcatctgaacagaatgtgcatttttggaagcctccctcactctccatgctggcagagcaggagggagactgaagtaagagatggcagagggagatggtggcaaaaaggtttagatgcaggagaacagtaagatggatggttccggccagagtcgatgtggggaggaacagagggctgaagggagagggggctgactgttccattctagctttggcacaaagcagcagaaagggggaaaagccaatagaaatttccttagcttccccaccatatgtattttctaggatttgagaggaaagagaggaaaatgggggaatgggttgcaaaatagaaatgagcttaatccaggccgcagagccagggaaggtgagtaactttaggagggtgctagactttagaagccagataggaagaatcagtctaaactggccatgctttggaagggacaagactatgtgctccgctgcccaccttcagcctgcaatgagggactgaggcccacgagtctttccagctcttcctccattctggccagtccctgcatcctccctggggtggaggatggaaggaaagctgggacaagcagggaacgcatgattcagggatgctgtcactcggcagccagattccgaaactcccattctccaatgacttcctcaaccaatgggtggccttgtgactgttctttaaggctgaagatatccaggaaagg

SEQ ID NO: 282600 - DNA, 1000 bp, Homo Sapiens
agtcccagctactcgggaggcttgaggcaggagaatggcatgaacccgggaggcagagcttgcagtgagctgagatggcaccactgcactccagcctgggcaacagagcaagactccatctcaaaaaaaaaaaaatgtggtaaagtggactgtgatcagaggtcgtaactcctaggctctgtcgtcttcacccagacacctccgtagtggggacacctttctccccattcagccacaggtggagcttctttcttgctcaccctgggccgaatggctagtatggccgcagagtgtgacaaggctcccaattgcatcttggaggcaagttaagattttatgattaagtacttacattctgttggagttgtggctcagattctcctctgagcaggacatacaacacagggttggacacagatggccagagttgaagctaggccaggaaacatcgctgtgtctttggaaacaaaagtcaccttccttcctccaggagcaagggcgggtgagaggaagagggcttatagagagccttttcaagcccctagcttgtttatgggttattttgtttttgtcattttagggtgaggcaactccaaggttcctactctctttctgtgcctgttacccaccccgtcctcctagggtgcccttgagccgcaaaactgctgtccacgtggaccgggggtgacatcgcacgtccatctgccaggacccctgcgtccaaattccgagacatggcgaccaacggcagcaaggtggccgacgggcagatctccaccgaggtcagcgaggcccctgtggccaatgacaagcccaaaaccttggtggtcaaggtgcagaagaaggcggcagacctccccgaccgggacacgtggaagggccgcttcgacttcctcatgtcctgtgtgggctatgccatcggcctgggcaacgtctggaggttcccctatctctgcgggaaaaatggtgggggaggtgcctggcccggggactctggctg

SEQ ID NO: 282601 - DNA, 1000 bp, Homo Sapiens
ggaaacagccagtagagaatacaagaaaatgttcaaacaggcaagtaaataagtgtcttgtaccttaatgataaatggtagtagtatagccatttataatggcattaatgattggtttaatttaacataatttataagctattgaagtatggaaaattataagcatatatattaggttattaggactcataaatttatgttatttacttccagtttgtgagatgacttgaatttttcatgtttccttattctttacttccatagacatggatggataatatgggaagagctggtgagatggaactcaagcccttcaatggagaagattatacatgtatcacctttcagcctgatttgtctaagtttaaaatgcaaagcctggacaaagatattgttgcactaatggtcagaagagcatatgatattgctggatccaccaaagatgtcaaagtctttcttaatggaaataaactgccagtgagtattttcctggatgttaaggataataagggattttgtaatcattgtcaagtgcaaaattgaattttttcccctcccatatgtttttgtttgtttgtttgtttgtttgtttgagacagagtctcacactgttgcccgggctggagtgcagtggcacgatctcggctcaccgcaacctccacctcccaggttcacgcaattctcctgcctcagcctcccaagtagctgggattacaggtgcctgccaccacacctggctaattttttgtattttcagtagagacaggttcactatgttggccaggctggtctcgaacaccagacctcatgatccacccgtcttggcctcccaaagtgctgggattacaggcatgagccactgcacctggccaaccatgtgtatttcttaccacttctcacatatgttcttgaaaagagaatggtatgccacattttttaatccgctcattttaaacttaccgatggatttccttctcaaagaaacaccaaaaataaatat

SEQ ID NO: 282602 - DNA, 1000 bp, Homo Sapiens
ggaacacctgaggtcaggagtttgagatcagcctggccaacgtggtgaaaccccatttctactaaaaatacaaaaattagctgggtgtggtggcatgtgcgtgtaatcccagctactcgtgaggctgaggtgggagaatcgcttgaacccaggaggtggaggttgcagtgagccaagattgcgccactgcactttttattgggaaaggtgagaacttctggagatggttggtggtgatggttgcacaacagtgtgaatgtatttaatgctactgaactgtacacctaaaaatggctaaatggtaagttttgtgtatattttaccccacaaaaaaatccaatggtccattcttagtccttgtcttacatgacctctcagcggtgtttgacacagttggtcgttcacactgccttcttcattgtttatttattttagagacggcatatcattatgttgcccagggtggcctctgcctcctgagtaactgggactacaggcacacatcaccatgcccagctttcctcctcgtccctttctcctcctcctcatttttcttcctcctcctcctctctcttcttcttgtccttgccctcatcctcctcctttttttttcttccttcttccttttttcttctctctcttttttaaaataagagctttattgagatataattcacataccgtaaaaaccacccatttaaagtgtacgagtaaattttttttgtatattcacagaattgcgcaaccatcaccacaatcaattttggagcattttcatcaccccaaagggaaacctgtacctatcagcagccactctccatttctttcttaacctagtccccagccctaggccatcatgaatctaagatttgcctactctgcatgtttcatttaaatggaataatatagtatgtggtcttttgtgactggcttctttcacttagcataatattttcaagattcttacatattgtagcatctatgagtgcttcattttttt

SEQ ID NO: 282603 - DNA, 1000 bp, Homo Sapiens
gtcctgttgaacacttcccggattcaagactcacttgagcagagggaataaccctatcatgttagaaaggaagtatgtatgatcagaaaaacaacgaaagtccaaaaagtgtgatatccttgattgtgtctgcaatttagttgacctcaaacaagtcagttaacatatcagagcttcagtttaattatctataaaatataaatattaatatatttactaattcttacatccaatcaatacatgttagtatatgtactatataaaataccaccaatgtataagtatacaaaaatgcaaaaggcatagctactgccctctggaaactcacaatctaatagagaacacagacacataaacaaataaaggcagttaatacattttaggtacccaaatatagatatgtgcatagtaagaatcccggagtttaggagaactcatccaagaagatggtactcaagttgagccttaaaggaagtttgctaagctaagaagggtttaatggcattactggaaaaattactatcatccaagaaatgtgaaaggggtaaaggaacatggccagttcaggtgaagggttgacccgtaacatgctggagaggggttgtgagaggcagggctggagatgcaggcaggtcaggaagaactcacattcttggatgagttctcctcaactccaggattcttaccatctacatatctatatttgaatatctaaaacacattaactccctttatttgtttatgtgtctatcttctctattagattgtgagttcccagatggcaagagctatgctttttacatttttgtatgcttacacattggtgggtaaactataatcatatagctgtttgctctttaccatgggctagtgtttctcaagtatctgaagaccatatatcacagagtcattttggatgatttattaaaaatgcgaattcctggctcccaactctgaactatacaatcagaactcccaggatgggacccagaaatattta

SEQ ID NO: 282604 - DNA, 1000 bp, Homo Sapiens
aaaaatgtatgatctttcagtcaggcttccagtgtcaaaactgagtcttcacaagtttcttgacgtttttctaagtctcaaatgctgctatatcttttaatacatcaactgttctcctaaagaagcctaaagagtactaaaagtactaaaaggtgatgagattattaaaactggatgattggttcatggaaattcattacactatttcctctatccttgtatatattgtatataaatcagagagctgagaggatagttccaaatccttgccctgcatcaggcaagttgagcaccagagaagagaagcactgaagtcaaacaaagccttagggctgctcctctacacacacacacacacacacacacacacacacacacacacacagaggaactcctgaagaatattttcataataaaaagatttctcaaaagttttttaaaaaatggtaatttaagcaagcttttacaaggttatacatttggggaagtacaatataaatataatatcaaattggtttgcacgatgaagttgaattgacagctttgcatgattaaaacctaaatatttgcaccaaagcactttattattcaaggtaaaaatttataactgaaacaattatttatatagtcctatggagaaacaactgccttgtctcctatatttaagtttttttcctctaaaataattataaataaatgtaagaaagtagtccttcccattagtaacaaaccaccagtaatgcatgaaaatatgatacctttgattgccatttgactttcataattttaaataacaaaaattattattattattatagtcttctccttatgagatacactctgaaaatgatccattgtaccccaaggtattttcactggttgaatgtctctagtaaatttcattgtaggtgttctaacaatgatgtcagaatgtctttggacaaagagtgatccctaagaaagtgaccttgttgacaggttgagacactgggcttgtgca

SEQ ID NO: 282605 - DNA, 1000 bp, Homo Sapiens
cggcctgcactgaggaaagatatggtgaactgaaccagcatgattcaatagcaaataaatttttatcaggaatacccacaccaaatgtcttgggttcatgttctaagagctgcctaacaatttagatagcaagcacataatcacatagtgactccctttgtgactgtgatagaaactggatatatgggcagtattgatcagaatataggcaataggtctagagtttacgactaggcaaaacttgcttttctccctttataaactaatttttttaatttaattgtaaaaatatatcccattcttatattctctaaaaatttcagccacagaaaatacttctagactcctcttttacaaagctctgctatgtccttttaaacaatgctaaaagtactatgaagaagaattaatggtttaattcaatcttaaaatatctttggtccagctgcataaaataaacacgatgaagatgaccatccatgtatcctagataatcttgtgttctgatcacttattacatacttacagagagagagagagagagactcctaaatataccacagtcatagaagatcaaattgtaaatgttcaatttactttggaacttttcacttagaagaaaataaaaagcagcaatgggaagttagactcataaaattttagggtgagaattacaagagtcagaaaaatcacatcattcaacaatcttgcttttcagatgagaacactaagagccagggagagagggatggcccccacaaacaggtcacgcagacacggttcatcaggatcccccggcccctggctagctccccacacactgcaggagtcacgcagattgcgaaagtcttctctgcagacttcatcttgcactactcacttcctcttagcacttggaacagcttgggtgttctatggattctctctgattacataagaaattccaaaatttttctaatggcctatttagaaaaagaaaaacaacaaagcctgatgggaa

SEQ ID NO: 282606 - DNA, 1000 bp, Homo Sapiens
tttaacatatatattttaatttttcctaattttactgaaagtaaactgacagagagggtaataaatacccaagcacacacgtaaaatattcagtaaaagcatggagaaagaatagtttgattttttattttatttttttaagagacaaggtctcactatgttgcccaagctggagtgcagtggctattcacaggcatgataattttgccactgcgcctggcctttcttcataatgggttaagagtctcagtttctcactcttattcccctaaacccttagtaggtatcctgtctcttttatgttctcatatatctgccattgcaggttaatcagatcttctaatttatagctaattcagatgtgactacatttacaaagacagctgaaaatccttcctgacatgaaaatagcagatctcatatcttctatgggactgtttactgctctaatctagcaatctcccaatcttctgaattattcaccattgcaataaaaagttttgagtactctccaaaaatatacacacattcatttcttggaaattacacatatgtatgttgtatgaatatattaatcatattgcggaatgcacataaataaaaataaaaagaacataaaaaaagaataatctagaatatatttttattaactataaaaagtacatttattctcactaaaatattttaattgttatactttagaatgagaaaaatgtgattaaaatgtctttattaatttaaaaaatcttggtttgacaccttgatttggaattatggttctaaattcaaattatttcagcactttgttgcagtgaatataaaaataaaaaaaggcataaatgaaagaattgcaaattttcctatgcctactaaaacttatttgccttttcagaaaaggtttttgctgaaatatggtaaattcctttctatctttgttctgtctttatgcaacatatcattcatgttgcgttttttttttttgtttctaacaaggaagatc

SEQ ID NO: 282607 - DNA, 1000 bp, Homo Sapiens
tgtataattgcttaggaaatattggattagtcgatgatttgctatggatgacatagaaaaggaaagcccttcctttgccttttcttgaaaccaccttttccctcaggttttctctcagtatcatctcttcaatacaaatttctttatattttactgataactttgtatatatgcccagatttcttctatctatggtaagtgatgtagcaatatattttttctttttttctttttttttttttgagatggagtttcattcttgtcacccaggctggagtgcaatggcacagtcttggctcactgcaacctatgcctcctgggttcaagcaattttcctgctttagcctcccaggtagctgggattacaggcaggtgacaccatgccccgctaattttgtgtttttagtagagacagggttacaccacattggccaggctggtctctaacttctgacctcaggtgacatgcccgccttggcctcccaaagtgctgggattacaggcatgagccattgcacctggccgatgttgcaataatttttaaagcacatttattccttctgtaaacttatattctaggtcaggagttaagaaagttactcgtggtagtaaataagaatgtgattaatagtagttatatcaacctacatatcattataaaattcatttcttcaaaaggggaaatggtaaaaccctgttaagcagtggcttaaggtgctgggtgcagtggctcacacctgtaatcctagctactcaagagaaggtgggaagattgcttaagcccaggagttagtgagccatgatcatgccactgcactccagcccggacaactgagtgaaaccctcttttttttttttttttataaaaaggtggtctaagaggtgataattttaccaggctgttgaaagtaagatgaaagggaaaatctcttaatatgcagattaaagttcagggaactctgagaattggagagtttgctgtattgaaacatgtagatga

SEQ ID NO: 282608 - DNA, 1000 bp, Homo Sapiens
atgtggaatatgggatacaaatgaaattcatctgtgatacaaatgaagtatagaattctaagctgagcacacagaatcctaagagagcactttcggaaggaaatacattaaattttacactttaatctttgactatcgttgaatcacattgaaaaatctcagtgattaggaggattaatatagtgacctttatatgtcatctaccacctgcagagttttcaatttccagagattccttagtttctgatcaaatgaagattccccatattgttttggcatatcattatgaataattttttattttatttgtagtaattcctaagttcttaaacaaaaggggaagttttaatgtgtgagcaatgcactgtcttgaaatagaaaccttgtcgatttttacaaactgcttatgacctgttcgtcatattcaagattttaatacttatgtaataacgttatttttatgtaatcacatttcatagcttctagggtctatattttactttggagggttggtaccccacaatattcatatatgttgtatattttttatttggatattattctaatgttgtgagaaagctatttaattacttttacagatagataacaaattgacccaacatcatttattgaatagtacatcattttctcactgcttaaaatagacatgatcatgttctaaagaattgtgtgtacatgagttgactctatacattgttctgtggatgtacttaacacttcttctatcaagacaatgatgtttaaatttctaaaataattttataaactctcatagaggaaaaaaagtgtgtattttgctgctgttggatgggatgttttgcatatgtgtattaggtctatggtgctgttcaagtttgctgtttaactattgattttctttccagatgatctgtacattgttaaaagtaggatattgaagtctactattattgtattgctatttctcccttcaattctgttaatattggctttatatagt

SEQ ID NO: 282609 - DNA, 1000 bp, Homo Sapiens
cggctcactgcaacctccacctcccaggttcaagtgattatcctgcctcggcctcctgagtagctgggtttacaggcacgcaccaccacgcctggctaatttttgtatttttagtagaggcagggtttctcccatgttggccaggatggtcttgacctcctgacctcaggtgatccacttgccttggcctcccaaagtgttgggattataggcatgagccacgacgcccggcccatcaagactttttctaccacagagcctcaagtaggcatgtggaactaacaagacagaaaatgttctaaaaagaaagaatcctggctgggcgaggtggctcatgcctgtatcccagcactttgggaggctgaggcgggcagatcacttgacatcaggagttcaagaccagcctggcaaatatggggaaatcccatctctactaaaaatacaaaaactagctggatgtggtggtgtgcacctgtaatcccagctactggggagactgagacaggagaatcgtttaaactcaggaggcagaggttgcagtgagctgagatcatgccactgcactccagcctgggcaacagagcaagactttgtcaaaaaaaaaaagggaggaaggaaggaggggagaaaaaagaaagaaagaaagagagagagagaggaaggaaggaagggagggagggagggaggaaggaagggagggagggagggaggaaggaagggagggaggaagggagaaagagagagaaagagggaaagagagagaggaaggaaggaaggaaggagagaaaatgctaaataaaaggttaatatctagagtatataaagaacaactaatatcaatagatgaaataaaatatagcctaataggaaaaaaaaaatgtagacaggtgctgtggctcatgcctgtaatctcagtgctttgggaggctgaggagggagaatcacttaaggccaggagttcaagaccagctggagcaacataggaagacctcatctctac

SEQ ID NO: 282610 - DNA, 1000 bp, Homo Sapiens; identical to SEQ ID NO: 114923

SEQ ID NO: 282611 - DNA, 1000 bp, Homo Sapiens
ttgcaggatcccaggatctaggggcacaaaagtagaaaaaacggaccgaagtgcctgcctaaggaccttgcattctggtggagatgaccaaagatgataaacatgacacagacatatgttgaatgttagagagtgataagtgctaagaagaaaaagcaggaaaaagaggagatgggatgtgttagaggtgtgtaattttacagggggtcctagagaaggccataatatgaaggtgacatcgcagcaaagaggtgaagagctgagggagcaagacctgaggctatccaacggagaagcactgcgggcagaggaaataacaaatcaaagttccctgaggtagagcaccaagcatattccggaaacagagaagggaccaacgtgcctaaggcagagtgggaggtgtacaattaattttctcttatttgttcaaactttggcaatattgtttgcatttgatttatccttccaaatacctctgtaaagaaacaagaccagagaggttaagaaatatgtccaagatgactaaattctgaaccaggtccctatgctgttgaccctatggcctgtatatcaccatctatggtgccctctagaaacaaattagatgaacacttcagtgacagtcattataaagctgggaccaactaggacacttgctttccctttgttcacatgcttttagtttcttaactacaataacagaggcttttcatctaattcagctttgccattttttcatttatgaatttactagaattctgattttataaaaacacacattgggtggccagttaaatctgtacattttttttttattatttctttgttccaaagaatgactgacaagtgagatgtccccttagtcttccccaaaatgatcaacgtgccctagtaatttcggcttggctctttgcctttttcacgcaagcacaagtgttctagtttgttcattgttcacgccatgacagggctgctactttacctcatccatgaacaagct

SEQ ID NO: 282612 - DNA, 1000 bp, Homo Sapiens
caagcaatcctctcacctcagcctcccgagtagctgggaccacaggcatgtgccaccacacctggctaatttttttctttttggagagatggggactcactatgttccccagtctggtctcgaactcctggcctcaagtaatcctcccatcttacaggtataagccaccaagccccaccagtatttctgaaaacacacaattatgcaaacatgtatacatatagaaaaccatacacacaaacacagagatccacaggcacattcaaaacacaaccacacatacaccagactaaaactcaagcatgaagccggaaacggtggctcacgcctgtaatctcagcactttgggagcctgaggcgagtggatcacctgaggtcaggagtttgagactagcctggccaacatggggaaaccccatctctactaaaaatacaaaaattagccgggtgtgctggcgagctcctgtaatcccagctactcgggaggctaaggcaggagaatcgcttgaactcaggaggcggaggttgcagtgagccaagatcacgccactgcactccagcctgggcgacagagcgagactctctcaaaacaaatcaacaaaaagtcatgcatgtaatctcacatagtcacaggaagggaggggcccccaacccacaacactatacccacacgtatggtcacaaagacacacctccagccagctctttgcatgccaaatggatactgtcgcatccactctcatgcagacaaacacacccacaggtaaccacagcctgccccgagtcccctcacccaggagggaaacgcccatggcacataggccaggaagctgggggatgctggcatacaccatgcatctgataaggagttaataaccaaaatatgtaaggaattaatgcaactcaatacccaaaaaacaacctagttttaaaaatgggggcaggctcggtggctcacgcctgtaatcccaccactttgggaggccaaggcgggtggatc

SEQ ID NO: 282613 - DNA, 1000 bp, Homo Sapiens
aacaaacaaacaaacaaaaaaaccccaaattctccatgtctttaaagttttgcttaatttatgagagagataaacaaatattcccctccaacggtaaacttgtagatttcccccccttgaatttctatcatttttgctttgtatattgtaagtgtaaaggtttatgtctgatgtatcttttggtagttgggctttttatcaatatgaaatactactcttttaatgtcttttaccttgactttaattttatgatattaacacgttttatttttgtttacaattttcttgaattatcttttgtatttctttattttaaacactcccacttaagagagccatataaactagtgagtaggattcaacgcccatctttgtcattacctggttcagaagcctttagcaagttacttgaaccctttgtgccttagttcctcccctataaaatgagaataataatagttctagttcataaacttgtgtggattaaacatagagaacaatgtaaatgcttagtaaatattagaaattattattttatgtgtgtcatcttaaacaacatatagcaggatgtttaaaacccaatctgagaatctcctttttttaagtgatgaatttaacatatttatattttttaaatgtttttaacagttttaaaatttacctactttaagtgtacaattaagtgatgtttagtaaatgcagagttgtacaattgtttcttccttccaattttagaacatttttatcattacaaaaatatatcttgtacccatttgcgcttactttccattcccactctcaggcctagatgactgctaacctactttctgtctctataaacttttcctttctggacattttacaaaaaggaatcatataatataaggcatcttgccgggacaattagggaagattgtgttataaaaaaaaaaaaaaaaagcatccagattgggaaaaaaaaaaagaaacaaaactatctctatttgcagatgacatgatc

SEQ ID NO: 282614 - DNA, 1000 bp, Homo Sapiens
atagggatggaagacagaaggatctggaaagattagacgggtaagtaaaatcttctagtgactctcactttgaataaatctaacgtttgaaaaccatttacagaagagtttctctaaattcaatttttttttttttttttcagagacacagtcttgctctgtcgcccaggttggaatgcagtggcacaatcttgactcactgtgatacccgcctcctgcattcaggtgattctcgtgcctcggccttctgaatagctgggactacaggtgcgtgccaccacgtccagctaatttttgtatttttagtagagacagggtttcatcatgctggccaggccagtattgaactcctgacctcatgtgatccgcctgtcttggcctcccaaagtgctgggattacaggtgtcagccaccgcgcctggccagatttaaacatattctgattggtgatgtgttgaaagagttattatcagtagaaaggaatatcttggttaagataagcggttgtggagatcaagcttttaccatgcagatgaagcctctggatagcaggtttcagagaaaatagattgtaaatgtttcctatcagacttaaggtctgtgttgatgttaacgctggagggatatagtgaggcatgtgcaaccccaacttcccatcatggcctgaaccagtctttcaggttaaattttagagtgccctggccaagaaggaagtccattcagatggtttcaagttttcaacatctgatggttgtcaaattttatttatttattcttttttttttttttttttgagacggagtcttgccagtctgtcaccaggctagagtgcagtggagtgacctcggctcattggttcaagcgattctcctgcctcagcatcccaaatagctgggattacaggcatgagccaccatgcccagctaatttttgtatttttaatagagatggggtttcaccatgttggccaggatggtctcgatctcatgaccttgtgatc

SEQ ID NO: 282615 - DNA, 1000 bp, Homo Sapiens; identical to SEQ ID NO: 195684

SEQ ID NO: 282616 - DNA, 1000 bp, Homo Sapiens
tcctgattctatctgagtgtatctaaccagttagtctcagtacaaaatctgagcagataccactgaaggtatgtgacttattctatgtgactaggtgtatttcagtgtgtgcaacagaccaagggcctctgaccagctgtaactcactaggtcttcctaaccaggggtaccttgctgtgtgactgaggcagagtcagccatcccaatctacatgccttggatatctgagagcatggatcaccaatcctcaacagtgtcctggaccccaggtttctgactaggtgtttcttttctttctttctttttttttttttgagatggtgtctcactctgttgcccaggctggaatgcagtgtcacatcatggctcactgcaacctctgcctcctgggttcaagtgcctcagcctcctgattagctgggattacaggtgcccaccaccacgcccagataaatcttgtatttttagtagggacagggatttcaccatgttggccgggctagtctcaacttcctgacctcaggtgatccacctgcctcggcctcccaaagtgctgggattacaggcgtgagccaccacgcccacactctgactaggtgtttctaactctctctcactgcagtacctttcttggggcatttcagtgtgtgagtgccaaggtgtttggtgacaggagataccaagctcagaggaaggaaagtggcccctgagccccatggaggaggaaggggctgctgtcctacagtcctgggaagggcagggagagacccaaccatgtggaccatgcatggagcagtactcacgacagaagtccggccgcctccactcgccgagctgggccccagcggcctgacaggctgccacgtaggtagccactgcaggacagaggcctccaggatggccctgaacttggcaggcgtccagcaagcagccctggaagtactgcgcgggcggcacaaggccgtggcagggtgccagcgggccgtcggtggcggagatc

SEQ ID NO: 282617 - DNA, 1000 bp, Homo Sapiens
tggtgtccttgggagcggcgagcggtgctcggcgcaggatagaaagggagtgcgcgcccgagtcccccagatccctgggaacccgcgccaccctcccgcccctgcccatccccggccgcgctgtcagtctccattagcgctaacaggctccagacggagcgggccgggcgctgggttaatgcaatcggcgcgttacctggggcgcaggctacattaccagcccggcccccgccaggcacggccagaaccagtcagcccgcgccctgccggccgccccgcgcctccagctcttccccggccccgcccgaacgccacacggcggagcccagccccagcccgcgccctagagcctgccaaggcgccgccggtcgggggccggcagggcgcaaggcaccagggatcccctcgccgccggacacgtgagtgcgccctgagcgcgggacagggctaggtctgcctgggaggcccgggccgagacgcgccagcagagggctagcgagtttgtagtgcagtgacgttaagtgtccgagaaggctcctgtggctgttgaagtgtcgcggacctgagcttggggagggggtcggcacgctgccctcagcctcggtgagttcaatcccagccatttggggcaggcgaaagtgggtgaaacgaggaaaagtgctgcaaggtcttcagccgcccccacaaggctgtcagaagtctccaactcttgagttccggcgtgccccaacctctgtttcccaatttttccagcggacgcgcgctcttttctgggaaccctgcgtccgctcagcgcgcgctcatcccagtgtctaaggcgctcccgggtggtcttgggagttgcaagtagggaggaacggccgggtaaccacctcttttccctttatccaagcagagcctcggcgtgcccccaggaccggtaaagttcctctcgccagccgcatccatgcttctggcgcggatgaacccgcaggtgcagcccgagaacaacggggcggac

SEQ ID NO: 282618 - DNA, 1000 bp, Homo Sapiens
acatcttttggagatgcactcttccctataggagtcactttttcattgttatcaggtgtactcatgataacatctcgagaaaaattagaattattctttgactcctcagtgccccttctagacctcttagccgtttccttctcctcttcgagcttcttttcacactcccgcagcataatgttcctgattataatcatttcatctacctgtaattctttcaacatacattcttctgtagccatttctgcttcttcttttgccatttctgcagaaataaccaaaggatcattcacggtagcatcaagaaggtccttccttgttggaattttctgtttctgtacagctggtatagctccaccagcatctgctgtttccccaaaaccatggattgcagttttatgttcagcaatggaagcgacaagtctttcgatttctacctgtattttgctgcgctcctccaaaagctcatcataccctctttccgaatttcccaaattgtcaaagtgtgatctgacggcataatagtgttcaatgctcgaatttttgagatctctttcacatgcatcgttccaatcattcaattcatcattctctcctgacaggttcttggacaacctttcctgtagttcgtttcttagattttcacgattttccctagcattttcaagttctttttccttctgctgtaatttgatattcatcttttgtacgaactgatcataccgttgtccctcctcggcctttttagcttctttctcctgttgttgttttgaagccatcgctaacaataattgcccgtcgttttgctcttttgcacgttccatagaattcccatcctcatattcctgatcaagaactcttgaccttctctcaatatctttatcaacatcacgttgtctgctggctcgttcatcaatttcgttcaccactggtgatatcaactttttggcgactgcgttaacctcttctggagtcatccacaaaccaccacccaaatata

SEQ ID NO: 282619 - DNA, 1000 bp, Homo Sapiens
ggttttttttttctaagagatggagtctcacttttctgcccaggttggagtgcaatggcaccatcatagctcactgcagccttcaactcttggcctcaggcaatccttgcaccttagcctcgcagtgttgggattacaggcatgagccactgagccttgcctggacttttttttttttttgagatggcgtctcgctctgttgcccaggttggagtgctacggcatgatcttggctcactgcaacttccacctcccaggttcaagcgattctcttgcctcggccccccgagtagctgggattacaggcatgcgccaccgtgcctggctaattttggtatttttagtagagatagggtttcatcatgttgggcaggctggtcttgaactcctgacctcgtgatccacccacctcggcctcccaaagtgctgggattataggcatagccaacgcgcccagcctggacttgtttttaaaagatcactgtggctcctgtgtttaggctggctggtaggagacaggtggcagtggcattgatggtgaagagaaaatagtggcagccatggagatggagagaagtagacaagtttgggatatattatacattccaggggtagaaacaacaggactagatgatggattgatgggtgggagatgtagatactgggagagaagcaggattctgatggatggaaaaactaaaaaattctattttgggtgtggtaagtctaagtctattagacatgcaagtagagatgtcactgggcagatacacatctggatttcaggggcaaggtccaagctagagaaagaaacctgggcatggtcagcatgaggatggtgtttaaagccatggaacttatcttgtgcatccctataagacccctttgaggcacttgtttcccctcacaatggatgcagtgcatcttccattctgaattccagaggcaacaacctcctgctcctagaagctaaactctccagacttagtcttctgaattc

SEQ ID NO: 282620 - DNA, 1000 bp, Homo Sapiens
ctagctggatttcctaggccgactaagaattcctaagcctagctggggaaggtgactgcacctacctttaaacatggggcttgtaactcagctcacacccggccaatcaggtcataaagagagctcactaaaataccaattaggctaaaagcaggaggtaaagaaatagtcaatcatctatcacctgagagcacagggggagggacaaagatccagatataaacccaggcatttgagccggcagtggcaacctgctttgggtcgcctcccgttgtatgagagttctgttttcactctattaaatcttgcaactgcatactcttctggtctgtgtttattctggctcaagctgagcttttgctcaccgtccaccactgctgatctccgccatcgcagacccgctgctgacttccacccctccagatccagcagggtgtctgctctgcttctgatccagcaaggtgcccattgccgctcccaatcgggctagaggctcgccattgttcctgaatggctaagtgcccaggttcgtcctaatccagctgaacactagtcgctgggttccacggttctcttccatgacccatggcttctaatagagctataacactcaccgcatggcccaaggttccattccttggaatccgtgaggccaagaaccccagatcagagaacacaaggctttccaccatcttgggagctgcccgccaccatctaggtagcacctgccactatcttggaagctctaagaacaaagacccgccagtaacaaaggtagagtataaacaaagaaataaaaataaccttttctatctcaatacttattctttctgacatattttttttctgataatgattacgcctaccttagattgtttgcaaaggtagcgacaaagttctccaatatactgaaacacagtcacatcatacttcttgcagtcactccaaaactggcttgctgaaaatttcttctttaacacacaagtggcacctataagaa

SEQ ID NO: 282621 - DNA, 1000 bp, Homo Sapiens
aggctatatgcccacttccacctcccaaagtgctgggattacaggcatgagccactgtgcccagcctggtattgataatttatattcagataatttgttatggctctttaatatcccacaaggggctctaaaaagcaaacattcaagagtatgtagtttttagacattaagttaattattttaaacagtgacagcaaaacacaagtgattaaatatagtttatttgttccaatgactaaattttacctcatttattaatctggtcattaaggaatatatttaataatattatgtaattattctttttatgcatgatacacctagaaaaatgccttttgtttctattgatggctttgttgtttggagctacttttgattacttattgcagtttcccaatttagtctttactttatctaactcacaaagtaaaattaactgatcacatggcaactactgtatttaaatagttctggaaaaatgaaagtgctttttgctgcttggtaaatgggtaatgcccttgattccttgactgtaggacatagctgatctaaagtactctgtcagttttaccttcacccatgactgtcattagttgtcaaagttgaaaagtactttagctgtgagaaatccttgtatgtttttattataagaggtataatcatcctcaaagcctgtttttattacatgatgtggactgattattttttctatcacagtgttaacagatggattttattgtaaatacaaagaaaacatattgattattgtagtattcttatgtcacctggccttttgcgtgaggattatttattatttctagcaaggctttcttcctttcttattgcccagagactgactgatacatcttttgttatttttacacataaattaaacatagcctttttggacaaattcactaaatattaatgtataaaatgtaattgagtaaatttttatcagaattttaaaaataaaagagcttagactcagtaggaactc

SEQ ID NO: 282622 - DNA, 1000 bp, Homo Sapiens
aagttaggtgacttttacaccttttacgatgactacttttggtggagttgaaatgctgttttcattctgcatttgtgtagtttggtgctttgttccaagttaagtgttttcagaaaagtatgttttgcatgtatttttttacagtctaaattttgactgctgagaagtttctattgtacaaaacttcatttaaaaggtttttctactgaatccagggtattctgaagatcgaagcctgtgtaaaatgctaccaaatggcaaaaagcaacaataaacagtttgatttttacttttctttctaacatatcaatgcttagcagaactattcagattgtcagtagtaaatttaaagacaaatgcccgttttcctccagtccatgaaacataccatacttatatacctgcaactaagtgtttaaaattatgctctgtaactctgtactgctagtattagaactaaaaatcttaaaatacagccagtgcttaatgcttatatcaatgtggatttgtcggcttttatgtaatctgtaatatgtatagcaggaaatacgaagagttacacagtgtatgccttaaaaggctgtttcttaaaggtgttacaaggggataatggtatttcaactagttatcagcaagtgacaatacattccaccacaaatacactcttgttcttctagcttttagactatatgaaaaaaccgggtgcttcaaagtacatgataagggaacactatacctgtcatggatgaactgaagactttgcctgttcattttttaaatattattttcaggtcctttgcttaccaaaggaggcccaatttcactcaaatgttttgagaactgtgtttaaataaacgcaaatgaaaagaaaaatgttggtgcagctgttcacaaagaagtgttcttgttctattataattagagttcttctgtagtttaatcgttagggcagtgtgttccttgggctgaggtgtatctttgctattttgggctgggttga

SEQ ID NO: 282623 - DNA, 1000 bp, Homo Sapiens
tgtgccccgtccagagcccgacagatgcaattgttggattagcctcaatttgaggatggtccagaaaaagggatagggctggggcgaattctttttccaatccctcatcatccaattggcccgagaaattgagagctgactgctgagagtcaagggataaaagtggaggtagggtggggagagggtgttgaccagaaaggtgtggtcactggctgagggtccttcttctgaacccaagaaaagggttgtgactgttgtgtgacctctggaaggggtggtgggggtatggaaatttgcatcatctacagcgcaaggtgtctcaacatcagcaccattggcatttggggccagatcattttctggggtggggtccatcctgtgcattgcagaatggtgagcagcatccttggcctccacacctccccagccctcggtcatgacaaccaaaattgtcaccaaacattaccaaagtgtcccctggagggggaggcgaatcacccccatttgagaaccaccaggatacactgatgggcagcagagctgtgcctgggtgcaagggctggttttaggatgggggtgttggagagggcgttcagagttgggaaagaaaggcctggcccagccaagaaacaggggctctagagaacatgtgagtcatagatttgacttttttcaggagagggcagccggttcacatataacctgccctagcatgacctagaggtgtgggtctgagggtcccgggcatcctgcttttgaggttctaggaccccaagctcccaagattccgggcgtcccagatttgatgattctgcgattgctgttgtctaagaattccaagagccaggggaccgcgtggcctctttgtctgagcaattccagcgaggctcctatttttagtggcagtgactttggaggaagcaggccaagcagtgccctgtgtccaagacaccttgggggtgggggcttcacccagaggcctccacagttgatggggatc

SEQ ID NO: 282624 - DNA, 1000 bp, Homo Sapiens
aaagtaagaaaatcagcatagtaaaaatgtaggagagatgatggtgtggaggtggtggtggaggtggaggtgggtacaaggaggccagtaggaaggttgactgatagtttgggtttggtgatgtttgcctatctgagaataatggcagaaggaaaggtagatggacaaaatttaaattggaaccaatggtaatttgactctttctcttgtattcctatttctttttatcactttcactagctcacaatgctatgaattttaagtgatcattttatgaaaaacaagaactagcaataaaatcttcattttccttacatagagaaagagaacgtatggtgataattcatccatttcaacacccgtttcatcaatctatgactatcaccttcaaatagtgtagagaaggtcttagaatgtacatcccaatgtaatgttatctattgaaaatacaagaatgttggctcaaaatacagtgattcagattatacctgtacattgaataagaaattttcttatacatatttaaaatcattgattatatggtttaaaatttctacctccaacaatgaccttaaagagaaagttccagcgggatcaagttaaaattagtcaacaattaaaaaaaaaaatcttagaccatcatggtattttgcaacgacagtgggagagataaactgttgttctcgtcatgactatacctaaatttctaattttagtcataggacgaaataatatttgaaaataaaatttggttgtagccaaattggaagaagacatttagaaacagtaatgactaagaaacaaattatgtattttttaatacttttgtaatgcctttgtttctgtagtcattgcttttctttgctctcacttcaatttccctttaggtcatctcccttttttcttgcttccatttctttttaacttttctatacaacattgtatttatgatgccttattctccaagaagttaccttttaccgtagattcataaactcaa

SEQ ID NO: 282625 - DNA, 1000 bp, Homo Sapiens
tgttgtgccaaaaatagaattccttctagtttttcttgttctcatttgaaaggagaaaattccactttgtttagcatttcaagcttttatgtatccatcccatctaaaaactcttcaaactccacttgttcagtctgaaatgcagctccctgtccaagtgccttggagaactcacagcagcacgccttaatcaaaggttttaccagcccttggacactatgggaggagggcaagagtacaccaatttgttaaaagcaagaaaccacagtgtctcttcactagtcatttagaacatggttatcatccaagactactctaccctgcaacattgaactcccaagagcaaatccacattcctcttgagttctgcagcttctgtgtaaatagggcagctgtcgtctatgccgtagaatcacatgatctgaggaccattcatggaagctgctaaatagcctagtctggggagtcttccataaagttttgcatggagcaaacaaacaggattaaactaggtttggttccttcagccctctaaaagcatagggcttagcctgcaggcttccttgggctttctctgtgtgtgtagttttgtaaacactatagcatctgttaagatccagtgtccatggaaacattcccacatgccgtgactctggactatatcagtttttggaaagcagggttcctctgcctgctaacaagcccacgtggaccagtctgaatgtctttcctttacacctatgtttttaagtagtcaaacttcaagaaacaatctaaacaagtttctgttgcatatgtgtttgtgaacttgtatttgtatttagtaggcttctatattgcatttaacttgtttttgtaactcctgattcttccttttcggatactattgatgaataaagaaattaaagtgatggttttattggtttcctttcccccaattaaggccaaataaagtcgtgagaacattacccatttacttcctaagagtggatttgagttt

SEQ ID NO: 282626 - DNA, 1000 bp, Homo Sapiens
agctgaaggctagttcagagatgcctgttggcagggtttcttttttttttggtttgctgtttatttgtttttgcgatcagcaaagctaatcacttcattcctcatctcgcggccgcgatccacgtgccctgggccctttcccttgcctccaattttcccatcttcccggggagccttgaaatgtacatttgagaagacttttgccatcctcagggaaaaggactgtgtcaagagtgagccacccagtctctaaagctaggaagcccccagtgtgccacgggaaacgcttgcctctcaccctgtttcccagcgccaacctccggggcaggcatccgggtggagagaggacttgtccctcgtgggtggtggttctttatagaaaaaatcgaagcttagcagctcctcgaggcccggtaagtgcacaccccacgaacagcccaagtttgcctcctggtggccactttgatgtcatggccctgacctaaatcaaagaaactggttatgctgggaggtcggtgcgcgtcacagggcaatagcgtggtggcatgggaacgtggggtctttacatcagggaagcccttggccgggcttcagcatcttctcaggtccttgagagccacagcagggttgcggcggcatgggggacaatggcggcgtgggggactgtgcacgatggagtggaggagggggtctgggagccaggcagacctggctcttgcgtgcttgtcggtctgtgagtggggcaggtcgtcattttatctctctgaatcgtggtttcctcacctgtattcattcagctgtttctcttgttttcttttcttttctttttttttcccccagggtttggtaaaggctccagtgtggtggcctatgaaggacaatcctggcacgactactgcttccactgcaaaaaatgctccgtgaatctggccaacaagcgctttgttttccaccaggagcaagtgtattgtcccgactgtgccaaaaagctgtaaactga

SEQ ID NO: 282627 - DNA, 1000 bp, Homo Sapiens
cttgcttgtgggactagcctggcttgggactaaatgccctgctctgaacacgaagcttagtataaactgatggatatccctaccttgaaagaagaaaaggttcttactgcttggtccttgatttatcacacaaagcagaatagtatttttatatttaaatgtaaagacaaaaaactatatgtatggttttgtggattatgtgtgttttgctaaaggaaaaaaccatccaggtcacggggcaccaaatttgagacaaatagtcggattagaaataaagcatctcattttgagtagagagcaagggaagtggttcttagatggtgatctgggattaggccctcaagacccttttgggtttctgccctgcccaccctctggagaaggtgggcactggattagttaacagacaacacgttactagcagtcacttgatctccgtggctttggtttaaaagacacacttgtccacataggtttagagataagagttggctggtcaacttgagcatgttactgacagagggggtattggggttattttctggtaggaatagcatgtcactaaagcaggccttttgatattaaattttttaaaaagcaaaattatagaagtttagattttaatcaaatttgtagggtttctaggtaatttttacagaattgcttgtttgcttcaactgtctcctacctctgctcttggaggagatggggacagggctggagtcaaaacacttgtaattttgtatcttgatgtctttgttaagactgctgaagaattattttttttcttttataataaggaataaaccccacctttattccttcatttcatctaccattttctggttcttgtgttggctgtggcaggccagctgtggttttcttttgccatgacaacttctaattgccatgtacagtatgttcaaagtcaaataactcctcattgtaaacaaactgtgtaactgcccaaagcagcacttataaatcagcctaacataag

SEQ ID NO: 282628 - DNA, 1000 bp, Homo Sapiens
gttgatgttaactgagctactagagatattcttatttcactaaatgtaaaatttggagtaaatatatatgtcaatatttagtaaagcttttcttttttaatttccaggaaaaaataaaaagagtatgagtcttctgtaattcattgagcagttagctcatttgagataaagtcaaatgccaaacactagctctgtattaatccccatcattactggtaaagcctcatttgaatgtgtgaattcaatacaggctatgtaaaatttttactaatgtcattattttgaaaaaataaatttaaaaatacattcaaaattactattgtatacaagcttaattgttaatattccctaaacacaattttatgaagggagaagacattggtttgttgacaataacagtacatcttttcaagttctcagctatttcttctacctctccctatcttacatttgagtatggtaacttatgtcatctatgttgaatgtaagcttataaagcacaaagcatacatttcctgactggtctagagaactgatgtttcaatttacccctctgctaaataaatattaaaactatcatgtgacttcatgtaatcaggctgaacatttctacaattactagatgtattagacgtaagtattttctttagttaaaccacccatgttagaaatgttttctgtagaatttataaacaactatcaatgcagacaatttaataagcctggggatgatttacttacagtaaacatttatcaaattgtacatttgtgctatcaacaattaataagcaaatatgtgaaaatagtttctgtcttctatgaagttagatatttgatggttaaaacccctataaatcatagtttcatatgggaaaaaataattgaaatacagtgtaaatttaaataatttattaagtatagcaaataattgaaatatggtggactaaattttgtcatagaaatatgtgcaagttatagtagtggctcacatgagaggtaa

SEQ ID NO: 282629 - DNA, 1000 bp, Homo Sapiens; identical to SEQ ID NO: 114925

SEQ ID NO: 282630 - DNA, 1000 bp, Homo Sapiens
gccactaaactccaacctaggccacagagtgagactcagcctcaaaaaaagtctgtgttcagcccagacctctacattgacctgcaacctgtatatgcacctgctgtgttgacatctgtattagtcaaggttctccagagagagagaaccaatgtgatatctatatatctacaatatagatctatatctatagatatatgggaggggatttattaggggaactggctcacatagttatggaggctgagaagtcccacaatagaccatctacaagctggagaaccagggaggctggtagactgcttcagttcaagactaccctgtcttagacttggcctcagaaccagggaagctgaatggtgtatctcccagtccaaggccaagccgggagaacctggggaaccactggtacaagtcttggagtccaaaggctcaatacttgctaaatgaataaatggacggactctactacctaatctcctagagttaggagattaggggaacggggaattctgatgccaagggcagaagaggggtgtcccaactccagagtagagaatttgcctttcctctgcctttttgttctattatgtggtgcctgcgcatattagatgaggacagatcttccttactcagtccattgacttaaatgccaatatcttctgggaacaccctcatagacatacccagaagtaatgttcccccagctacctgagtatcccttaacctagtcaggttgacatctaaaactaatcatcgcaaaatcctaaccaagtctcaaaggtgcctcaaattcaacttgtctaagatggagctcaagatcaatcttatctcctcttccagtgttctccatatctgtgaatccctgcaccatccatccatttatccaaggctgaacagtggcatcatccttgaagctgcttcatcgccccttcacatccaactcatcaccaagtcctattgattttgctcctacatttctctgcagccttcttagatc

SEQ ID NO: 282631 - DNA, 1000 bp, Homo Sapiens
ccttccacagacttctattctggccccttcaacgtaattcttaagcttatttatatatttggctccccctagtggactgtaagcatattgacaataaaggatcatgtcattacaatcaatatccccacagtacctggaatgtagtaaatagccagtaaatgtttactgaattaataaacgaagaatgaatgaatgaatgcctcttaaaggacagtagagtgtacatgatcataaaagtcctcctcaactcaaaaagtcacaacatatcctctatttgtggtaccagtagctggatgtacagcacagaaacttgcctaatttgtacactagcctttcttgtatttcaattgtaaatcaagatccaagcaaatttttataaattctctagaaattttgtttcaaagaatattgctgtgcggttatatattttcttattccagaattcctagagatatattaaatcatgtatgaagaaaaaaacaccacagttttatcatgactttaacagtgagaaaatacaatggtgcatgcatgagatctggaggatttctggacatcctcctctcatgtacagcctggagatgtgtgtggccttgtaatccaggacatctgatctcctacatcaaaaactccaatggggccaggtgtggtggcacttgcctgtggtcccaagcactttgggaggccaaggcaggcagatcacttgaggccaggagttcaagaccagcctggccaacgtggcgaaacccatctctactaaaaatacaaaaattagccaggtgtggtgccacttgcctgtagtcccagctatttgggaggttgaggtgggagaatcacttgagctggggaggcagaggctgcagtgagcagagattgcaccactgtactccagcctgggcaatgagagtgaggctggtgaaaggaggcagcaacccacaccatgcccacccctggggcagcctccctgttgtcggctgtgcaagcccaagaacgcagtatg

SEQ ID NO: 282632 - DNA, 1000 bp, Homo Sapiens
gcactgagagcaacaggagtttatatttttgcacgcccttcctttatgggttgcagggtattgagtttctctgttcccaacctaataaacagggacaaatctacaggaactttactggcttacaatttctgttatgttaactacaggaacgcacctgcaatcttgaagtccttgtaaaaactgctcttaaagagtaaacattaatagacattccaataacattttcttcattcaagggattttttttaaaccattataagtaacattttagtaagatgctctttttaaagaactcattgcacttaactgattttgtgatcaattcagagatagtagtttttttttttcttttcttaaaatagacatacttaagtaaaactgagtcactcagaagaattccagactcttcagcatgggaaagatcttgatgtgtctagtaaacactaccccagccccgtgcaaggttatacctagatcagtgcagatctagagagatgatctggtgagatcattttgagatttaaagacctggtctactgaatagcccatcctatcagcaaatgtttcttttatagcaaacccagatccctcatcctgttttaactcatgattgatctcagggaaatctgaaaaactgaggactgagccactattgtttataaaaatccttttgatggccaggcacagtggctcacacctgtaatcacagcactttgggaggctgaagcgggtggatcgcttgagcccaggagtttgagaccagcctcggcaacatagcgaaacctcatctctaccaaaaatacaagttagccaggcatggtggcatgtgtctataatcccagctactcaggaggctgaggtgggaggatcacttgagcccaggaagtcaaggctgcaataagccctgatcatgccaccgtagtccagcctcggtgacagagtgagaccttgtctcaaaaacaaacaaacaaacaaaaaaccctcttgatgatatacatgt

SEQ ID NO: 282633 - DNA, 1000 bp, Homo Sapiens
cctaaatccctaaagattagatacaaattttttaccacagtatcacttgtcagaatttatttttaaatatgattttttaaaactgccagtaagaaattttaaattaaacccatttgttaaaggatatagtgcccaagttatatggtgacctacctttgtcaatacttagcattatgtatttcaaattatccaatatacatgtcatatatatttttatatgtcacatatataaaagatatgtatgatctatgtgaatcctaagtaaatattttgttccagaaaagtacaaaataataaaggtaaaaataatctataattttcaggaccacagactaagctgtcgaaattaacgctgatttttttagggccagaataccaaaatggctcctctcttcccccaaaattggacaatttcaaatgcaaaataattcattatttaatatatgagttgcttcctctatttggtttccttaaaaaaaaaaaaaactctcataggacatgtttcattttgttcctttcaggagtagtaaattagacgttttccccatataaagcttttttctaccagaaagatacttctggtagaagaagagaaaggagctctttatggttcacacgactgtctcctgtcctaactactttgcttaaagtgctcaaattccatcactactcacagttgtctaatctaagtctaatcccctttgatctctcagactaccttcccttttatctctctactacttaataatacgaatatctttttttcaaacttgaccttcattttgctttcacaatactatactctccatggattatcccttatctgaatccatctttataaccctattcctttctcatatttagtactgtgggccaatggacaaccttcaatcatcttttctacactgaccctcagacattctatctgctctcacggactcctttatttaccatgaataaagttccaaaatctacatattcatcccaagtctctttccag

SEQ ID NO: 282634 - DNA, 1000 bp, Homo Sapiens; identical to SEQ ID NO: 114927

SEQ ID NO: 282635 - DNA, 1000 bp, Homo Sapiens
ggtcacaggcagagagaactgagtattggccagagctctttcaggatgagagtgttgactccttgagggcaaaaatggacttaataaccctttagagtgataactagcctagtcctgcacaggaatatcaacgataaatgacttaaaagttgttagattgttttcctaatcatcacagaggattagaacatacagaaaagtataaagagcataatgtggctaatttaatattttggtatggttccttgcagtcttttattttggaattataaacatttatataatttacaaagttcaaatcaatatgcatatattttttgtcttgaatatttttatatctcattaactatttgaaaaagtgacttttatagctgagcagttttttgttttatgaatgtattataatgtatttaagctatctcttattatacatttagatagattctaatgtttctctattataaatgcagattctcaatccttcttgttcaaatccgaagtccagaaagctctgaaaactgaaagttttttcataatttatttcactgtaaaacctgaattgaactgatatttatctcactaaaaatgagtattcatatattttactgtaagaatagtaaaattaccaagtaatatcccagacctagttagataaatgcactattttcttttaatttcaaaaaaatcttaattctgaggcacatttggctgacagcatttcagataagggattttgaacctctaattcaatgatgtagataaatatcaccacttctactaccattgtctattactgaacacttaccatgggccaggtacagagtaggtatgaccttattatctctttggatccctagagagctctaaaaggcaggtacttttattgacgtcattttattgctggtcacccaagtggcaaggctgggctgatccattggtcaagttatgactgccgtgctcctcccccaaacttaaggcagaaatctcagtgcagatgatc

SEQ ID NO: 282636 - DNA, 1000 bp, Homo Sapiens
ggtcagggagcaaggagaccctagcccgggcccctacccctgaagatcccttccctttggagtttccctagctgtgagcctccaacctctaacctctgctccagggagccccccggccctggagtactgcctgaccttacagccctgccaggtgagggtggtaggtgggtggattcagcctccatccctctccccagcctgaggtgaaccatgtgccactggaaggccccatgctggaggcccctggccgctcgctgattggtctgtcgggggtcctgacggtgggctcaagtcgctgcctgcatagccacgctgaggccctgcgggtgagaggctggggccacaggaaggccggcacgggagttcagagctgggagggcctagctgacctgactagtggggaggggcgcatggtcagtctgtcctggaggaagggcagggatccaggcctggactgcctgatgccccaccctttttccctctaggagaaatgtgtaaactgcaccaggagattccgctgcactcagggcttccagctgcaggtgagactgggcttagcgcagctctgtccctgtgttgcctgccctcacttcttccaaggtgcccaatcccctcaccctccagcccagttttgcttggcccaggcatccaggctcagggaactgggtggctgacgtccccatagaggtctggagggctggcctggctctgctgaggggagactctctcagacttgcggcccgaggcttggatcctgtccgccctctcccatcagtctgcctgtcttggtccctctctgacccttctgctgttctgctcagctgcctgacacctgtagtccatctgtctgtctccccattcactgccctgcccctgcccaagccactggctgacccctcctgcctgtccccgtttccaggacacacccaggaagagctgtgtctaccgatctggcttctccttctcccggggctgctcttacacatgtgccaagaagatc

SEQ ID NO: 282637 - DNA, 1000 bp, Homo Sapiens
cacacagtaggtgctcaataagtcttagatggatgaatatctaggaagaaccattaaattttaagttttaagaggaagttctgtagttcatatatcacagacattgcactttgtcaataagtagaaagaagattacaaacaatgtatctggaaagctgccattctgagaaatatagacatatacatatgtaatatgtgccaagaaataagtccggagacatacacattaaaaagttaacagtgattatctttacatggtgatattataaatgatttaaaaattttcctttgcatgttgtctgaatttttcttttaacaataagcatagactacttttctaatcaggaaaaaattgaaaaagcaataaagctatttccatgtagaaaataaattccttttattatctataattcaattctgaagactattaattgggcatgctagatgctttcactgatctgctttggttgttctgagttctaaatccatttagttctctaaaataaacaacttactcaaagaaatccaaacctgctcagaaaataccaacattagtaatgtccagccacaccacaagcactggtgggccactgttggtccaattattaagaatctgtctgttttgggtgcaataagcaataggctcactcagtacctatgaggcaccaatagtacctgctactgactaactggccaaagcccccagagtgtcatgagaggggagaaaccatccagtcagtcaataatcacaggttaatgaaagaacactccaccagcttgctatccccgaagaccagaaagctgctatgctcttcagaactcttaacaaaaacgacaatgacaaaaattgttttccttgactctcaccttgagaacaaaagactaaacccaagtacaatgacacaatagagtttcttgtatactgttttcatttctcagtgtcacttctgttttctgtgactcttactttgggagtaaataagtcatttcctccaggatc

SEQ ID NO: 282638 - DNA, 462 bp, Homo Sapiens
atggcagccgggagcatcaccacagcagttccactagaaagagctagagattggtggaggctgggagaagtgattctccagtcaggattgggtgagaacgtgagcaagatcacacacagagcacaagcctttgcactcttagtccagacatggttacatttcacttggctaggatgagaccgagtctcaggggaccaaaggccacatgagggcccaaggagaagatgtagcagcagcagtgttaacctgaaccagtagttctcagccaggagtaattttgcccttgggggaactttggtaatgtctggaggcattttgggctgtcacaaatgaaggtgctactggcatcacacaggtggaagccagggaagctgccaaacatcctacaaggcataggacagtccccttccgccacatcaggaattatccatctccaatttccaatgtctgctaagagcatga

SEQ ID NO: 282639 - DNA, 1000 bp, Homo Sapiens
agtataaattcttaaaaatagaattgtacatttttaagacttttagtacatattgacaaactgcctttccaaatattgtaccaattttctttctgagagtcttcatactgactttcataaatgtgatgccaaagcttgtaagcctatgtaattcttatttttaattagactatcaggaaactaacaatgcacaaactaaccattcgttttgtagctgcctgaacacacagtaaaactctgtgacaatttatccacaaagaattctaagtttgaagactgttgtcaagaaaaaacagccatggacgtttttgtgtgcacttacttcatgccagctgcccaactccccgagcttccagatgtagagttgcccacaaacaaagatgtgtgtgatccaggaaacaccaaagtcatggataagtaagtagaggtgatgtgaaaacgtgttcccattttaagttcatctggacaaaaagtgggggccagccagatggagggaaggtatgctatcacctcatttcaaacataggcaaagtactacctttatgcttttcatggactttaagtatttgttaattaattgtaaatgactaaaatttttaaaacaccataatcgagtgtgatagaaagattttgggtagggagaaaggagcttagagttcctaattgtgccttctctgtttcctgtgcatggccaaaagaagtgacttgataattctgaacttcagcctattgttaattaatttggaaatgttaactcttgccttacttagcacacagactgctaatgagaaatgcatgtagaaatgtaagtgaaagtaaatgtgaaaacacatatttgcatacaatgctgaacacatgtaaaatatatcatgcaaccagaaatgtttataatattattaactagttttatcatattacttctggttcaaagtcacaaatcaaaagcctaaagtatactaaacttttggacaataagcatttgatacaaataaaagagata

SEQ ID NO: 282640 - DNA, 1000 bp, Homo Sapiens
ttacctcccattgcccccgctgggctggcaagcatttcctgaagaaagtcataaaaccaggctgagttgttcatgggagtggacacacgccgagatcatcgattgtacaaattgaaagaatcaggagatctcaagtcttatcaccatcctgaaagagaaatggagagttcgtttttagtagagctaaaaataagagcgaaaatttccttactcctgtattggtgttttccaacatagtgagttgagaagtagataaattgagggtgaaattatataaattatgagaggaaaaaaaggcattaagctggtatgaggtcctgtaaaggaaatattctttaaggaatttgaaatttaaaactgaagagaaggtgaaaggttaggataaaatagaagaggtactcttccattttgaaataatgagcaaatgaaagaagactggacttccaattcagcagcgatttgtatgtttatttttatgatctcgaagaggcatgtttcactttctgatctcaaattgactattctataccacaggtatagaattttcttgagacaggcaagtatttctattttcatttttattgtaaaagatctgaaatggctattattttgcattagaaatttgtataaaataaatacatgtagtaagaccttacatttaaatggtttttcagactggcagagcgactaaaagcaaaattgcctgaggccacacccacggaactggcaaagctggttaacaagcgctcagactttgcctccaactgctgttccataaactcacctcctctttactgtgattcagaggtaggaaaatgtaaccctccacttaacatggcagaatcttttaagaacgtatgcactccaatctactcatttctttcctgttattgagatgccattatgtgacaggcttttcctggtgttattgtaacttggctgtctttgcaatgaaagtaagaaacataactgatttcatgctatgctcatttaaaagcaa

SEQ ID NO: 282641 - DNA, 1000 bp, Homo Sapiens
tgcagtgtctgcagggaagtggttgctggatagaggcatgggctgaaccaagcagctggactgagactgggggacagaactccaaagcccactgagatgtgggaaaacatggagaagcacacggagcattcacaacttattgccgtcagagtcaatacatgggtgaggtggggattgggcaagagggaaagcgtcagccttccctgatattctggaaagtctcccggggctgggggtgggcaggtacagagcttcgagctctgctgatcgctgacatccaggggtgggggtaggaagagacctgggccgggagaagtccacctcaagcctgcagtgtcacactctatccctccacagatcctccctctgtggtggtcaccagccaccaggccccaggagaaaagaagaaactgaagtgcctggcctacgacttctacccagggaaaattgatgtgcactggactcgggccggcgaggtgcaggagcctgagttacggggagatgttcttcacaatggaaatggcacttaccagtcctgggtggtggtggcagtgcccccgcaggacacagccccctactcctgccacgtgcagcacagcagcctggcccagcccctcgtggtgccctgggaggccagctaggaagcaagggttggaggcaatgtgggatctcagacccagtagctgcccttcctgcctgatgtgggagctgaaccacagaaatcacagtcaatggatccacaaggcctgaggagcagtgtggggggacagacaggaggtggatttggagaccgaagactgggatgcctgtcttgagtagacttggacccaaaaaatcatctcaccttgagcccacccccaccccattgtctaatctgtagaagctaataaataatcatccctccttgcctagcataacagagaatcctttttttaacggtgatgcgctgtagaaatgtgactagattttctcattggttctgccctcaagcactgaattc

SEQ ID NO: 282642 - DNA, 1000 bp, Homo Sapiens
ccatggagtttgccttccagaacatcctccacatgtaggagtggataatggtcacccacattggtagagctctttaggatttttcaaaaccattttatgttggtgaattcatttcattgacaaccctagagggtggggagtggcagtggttagggaaacagggcaggaggttaccatccctgcctacagagagggaaactgcagtccaaagaggtcctgtgacctggtcctcatggctcagcttgtaagtaacaagaggcggaattagagcacagatccccagacaccaatttagagatcttttcatgatgtggctcttctccaactctgtggcttggcagttctccaactataggaaacacaactgaccaagatcccagctgcaccctcaaatccactgctgtgattgcactgaagctgccctacccaatggctgagcacagcagaaatactaaggcaggccaattccagggagtcatgggactcctctgatgactgactttggctccagaaccccttagggccttgctgaaacttccttaggctccatggcacccagggtgcttccacccaaccttccctccctccctcgttcacgtggggttatacttgcaacacagtctgctggttcacccagccttccctggctccctccccatttcctctcatgggcatttctcctaataaaatctgcagaccggattgggtctaatcccatctccagtctgcttcttggagaaccagactaacatgactctgcctatataataccaaataattatttcatatatctgatttagctttgcatttactttaaatcatgcttcaattaaagacacaccttctttaatcattttattgtatttctaaggtatgatggaaaggttcagagctcaggggaggatatggagatccagggaggcttcctgtaggaagtggcctgtgtagtgcttcaagggccaggctgccaggccatgttgcagctgaccacccacctgca

SEQ ID NO: 282643 - DNA, 1000 bp, Homo Sapiens; identical to SEQ ID NO: 195826

SEQ ID NO: 282644 - DNA, 1000 bp, Homo Sapiens; identical to SEQ ID NO: 201497

SEQ ID NO: 282645 - DNA, 1000 bp, Homo Sapiens
gagaggcagtctggccacagttgctttgcagcactgcagtaagttccacacagtttgaacttcccaatggcttccttaacactgtgaggggaaaactgcctacacaagcctcagtaatggtggacattcctctcccaccaaggttgatcatcccagttcgacctcagactgatgtgctggcagtgagaatttcaagccagtggttcttagcttgctgggctccatgggagtgggacctgctgagcgagaccacttggctttctggcatcagccccttctccaggagagtgaatggttctgtctccccctggtagcattggcacacaagggaatctcctggtctgcgtgttgcaaaaactatgggaaaagcataatttctgggctggatagcacagtccctatggcttccttgggtaggtgaggaagttccctggccctttggacttcctgggtgaggtgatgccccaccctgcttcagcttaccctccgtgggctgcacccacccactgtctaaccagtcccagtgagatgaaccgggtacctcagttggaaatgcagaaatcactcaccttccgcattgctctcgctgggagctgcagaccagagctcttcctattcggccatcttgccagctgtctctatcgactacctcttattccaaaaaataaaaccataatgaagttagacaccattaaatatacataatataaaaataggttttcttattctaatctagatttgctacacaagaccatctacagaatgaatgccatgaatatacaatctgtacccaataagttgtacattttagtaaacattcctgattgtaagggtggcaaatgggaattttggcttcttagatctttactgtgagtttgactgatatcagtacatttttatttttaattgtatattttcattactgtgaatttttttgcagtgatttttgatgccatgtggctacattggttttagaatactaataaaatccattgctttt

SEQ ID NO: 282646 - DNA, 1000 bp, Homo Sapiens
agtgtgcttatcaaagcccacaaatctaaagatcccctgcccaacttctgaagcagcctgtgcaggcagccctctacatggtgaacgcaagggcattttctttctgtgcctcaagataaaactcaacctttgttctgaaaatactaaccatgccctacagggggtgagagcttaaaaagaaaaaaaaggaagaacaaacaattctagcacatttcttgcgtgaggcagcagcctttccctagacaatagcagcaaaagagaaggaaggttcacagtttccaagaagaaggaaggtggaatggctatttaggttttgtggaaagagctgagcacattaaatctagtaattttagaagtttctaaaagaaaaacagactttgacgtcaaggagagccccaaggaagactgtttctattaggaactccatcaaacaacacaaagggaaaattaaaatttacagttctggaagcgagccccaggcttttgatgtgctgtttgctttggtcctgatttctttgtctggaatccacatgagttgtttcacagacaaatgtaggaacagctgtaactgactctccccccaccttcctttccagctgcaatctcagaacagcagtaccaaagctgacttctctggcatgggcttctcaggttttagaatcctcttccttgccttctgcccatgatatccttgataagatcccggaggggcttagagaaaaagacagagtgaaatcaggctgggacttgtacactgcatctctcctttgctgtcagccgccatctgctttaagtggtcctttcgtggtcacctgtgctcaaataagagcctctgaggaagagaaagtctccgctctttcactgatgccaaaacggaggcccatgaaagctggctagtagcaaaaataacaagcttgtttaactggtgggccttgattgttaggattttaagacagtagtatcagtaaacaagggacggtaacgtttccacatataggat

SEQ ID NO: 282647 - DNA, 1000 bp, Homo Sapiens
tggaggggaggagagctgcagggtggtaatgagggctgaccacagtcccagaaagattgtgcaggctggacctgggtctgctctccattcggaggccaccgctgcccccaatacctctcccagtgtaagacacgtggtagacaatcagccctgcacgaagaatgactgaacgtgccgtgcatgtgtcctggagaggggacaacgcaattccatggacctgccacacgaggattccttgccgtccaggggtgctctgggaagtggttgaagtcatgggctctgttcccaatcctgggctttctctccttgggatggaaggggagggccggcgtgtcagcatcacaggtcacaccatgtcatgcagagccttcatttgaacttccaggccaatggcaacattttgttacctccctgagaagctccacttgaagacgacaatctacatttgcttgtgttcaaataatgcattccagatcagggccagcagcagctctgaggcagacactggtatttactgcatagataaaaacccccttcctgacagaatggagatttctcaagaactaaaaataaaactaccgttccatccagcaatcccactactgggtatctaccccaagggaaatcattgtgtaaaaaaatacctgcactcatgtttactgcagcatattcgcaataacaaagttaaggaatcaagctaagtgttcatcaatgaaggactggatacagaaaatggaatactgtacagccataaaaaagaatacagttggccaggcacagtggctcacacctgtaatccgagcactttgggaggccgaggcaggtggatcacctgaggtcaggagttcgagaccagcctggccaacatggtgaaacctcgtctcttctaaaaatacaaaaattagcagggtgtggtggtacgtgcctgtaatcccagctacgtgggaggctgaggcaggagaatcgcttgaacctgggaggcggaggttgcagtgagctg

SEQ ID NO: 282648 - DNA, 1000 bp, Homo Sapiens
tctcttggatccctaatcagagcagaagcagctagcctgccgcagcagtgacgcgggcctcctagagggttttcttcaacattatgaagatgaacagggctctgagaattccctttggacctgagctccatgctaattgcctccatatttatgggatgatgggaggaccacagtggcagcctctgaagtagagtctggggatgattcagcaaagcggccctggctctggtgattgttgggcaccggtagatctgagcctccaggggcccagaggctcagctccctgttgccaggcaggcacggtgctattattattgttattattattattattctctttttctaaaagagaagctgaaacagaaatccagaagggtgaagtgcccaggtaatactatgggaaccacagagtcaaggtaaacaggagcaggagagtctgtatctcctgccttccagctcatggttcctccactgccaaggggaaggggcagggaattgagtagtgctgatcctgtctttttcataaaagatgatgttcggtgtctcacaagcagctgcttttcccctgaggttaaactggtggtattagggctgaaggaggctgatagagaagcaaggaactagggaatactgcctggttccatatctatccctagttggactgtgggctagctacctcgccttgccgagcctcggtttccctatctgtaaagtgaggataacagggttaactatttcatgggaatgttatgggcagtggatgaaatgaaatatacaaggagattcagatcatgcttggaacagaagttagggactaataaataggtgctgagatagggaggcagtctggtggtgaagcgtgcacactcagagcctggctgcctgagcccagagagttcaagtgacttgccaggtcacgcagctagtgaggggcggagttgtggtgagttcctagtgcagcagtctttccagatctttccatgctggatcctttgatcag

SEQ ID NO: 282649 - DNA, 1000 bp, Homo Sapiens
atctctacaaacgtaaaaccaaaacaacaaaaaaaaattctctctccaaggtttgagctgtgccctgtggagaagcaggtggtaagtgtactttcttttctctaggtaattgacaaccgttatatggcccctaagccttctctttttttcaggctaaacatgcccagttcctctaacaattacatatgtgacatgtctccttctttttgggaaataaatgcaaataaaaatactccaaacctatataggtggcttgattcatattcagaaagtggacacccagggatggctaaaatgggtggttttacctggagctatgacccgaatcagaacacccactccctccaaagtaaccactcttctgatttctgtgcaaatcattccattgcttttcctcatagatttctaatttatatattcatttccaaaccatatggtttgcccattttaaatctatacatgggtgacatcatcctatatgtacacttttgtgccttttttttttttttgctcaatgttatgttaatgtgatttatccatgtttttgcttactggtgtagctagttcattttttactgatccataaagttctgtacattttatatgtatatgtagatgtacttttattgacctgtgcttctttattgattattccatgatataaatgtaccataatttatgtaatgtgttctatcactgatgaacttttgagctgtttccagtttggggcccttatggacagtactgtgatgaatatttatctcagtgtacatgggcttgcatttcactaggatgcatacctaggagcagaatgctgagtaataggtcacatgcatcctcacctttaccaaactggggtccaaaatgcttgtgttacattacaatgccatcagcagagtaggcatgtttccgtggtacacccaaaggtgtgctgtgcagatttcccttccagaaagacttgctgcccaactcagctcctgcagagcctacctccactgca

SEQ ID NO: 282650 - DNA, 1000 bp, Homo Sapiens
caggttttaaaaaaatctggcatttggggccgggcgcggtggctcacgcctgtaatcccagcactttgggaggccgaggcgggcggatcacgaggtcaggagatcgagaccatcccggctaacacggtgaaaccctgtctctactaaaaatgcaaaaaattagccgggcgtggtggcgggcacctgtagtcccagctacttgggaggctgaggcaggagaatggcgtgaacccgggaggcggagcttgcagtgagccgagatcccgccactgcactccagcctggggcgaccagaagacaactccatctcaaaaaaaaaaaaaaaaaaaaaaaaaatctggcatttggagagattctggcttttccagagggaaaagaaagtcagaatgcctgggatagagagagggatgggtgctgtgggtgatggaggagaggtagagagggttagacattcagcatcttggagttcacattgaggattttgatatttatcttggaaatattaggaaagctttagagctttttaaatttttgaatgttaattgcatatgtttattttgaaatcaactttgctgaggcataatataatttgcataccataaaacgtacccattttaaacgtacagtttgaggagatttgaaatgtatatactgccatgtaaccaccaccaccatcacaatcaagataactaatttctctatcatccccaacatttctcttgcacctctgatattgtttggttctgtgtccacgtccaaatctcatgttctgttgtgatcctcagtgttagacagagaagtgtcctggtgggaggtgattggatcatgggggcggtttctaacggtttagcaccatcacccaagtgccacttgtttaaaagtgtttagcacttccccctttgctctttctttctctcctgatggccatgtgaagatgtgtttgcttcccctttgccttccaccatggttgtaagtttcctgagssctcccaagaggcgga

SEQ ID NO: 282651 - DNA, 1000 bp, Homo Sapiens
atattggcttctcaatattttttgcttggtaatgctgttactccaacctctgctttgatcatcataacttctgtgcctctgcttctcatgcttccttcttttacttacaaagactcttgtgattacactgggctctcctggataaagcaggcttatctccccatctcaagacctttaatttaatcacacctgcaaagttctttttgccatgtaaggttgtggagattagaacatgaacatcttcaggatgtgggccattattcagcctaccccaaggactatggacagcttgatctttcagtgactggagcagatcccttgctatcactcccatgttcaagttcatgtagcaagtcatcctcccagcccagggcttcttcgctttacagaggaggaaacagatgcctggggagagaaagtagcttaacttggattgcatagctagtggtcgacagaactgagcctagaaagaggctctctaatctattcaatgccaagattcagagatttcgtgattgaccagagaaagagggacaggagaagtagaaattgggaaagggccgttaccccaatcttctttctctagatatacaacatctcagccattcacaagtgaatgaacttattttcagagagtcaggagaaatttacctccctcagtcaaggagggacaaatctatctggtaatttgtgtgtgtcttattactagctttggagattatgttttttcttattactagctttggagattatgtttttccccttccatattccattccatgagaacatcacatcagttactccagacttcacaaagtttgaacccacctggattttcttctaaacacccagaggtcccttcaggggtcttggaaggtaccagggctcaggaaaccccgactccccagcttactcaaaccgacagattgcatttcccgttagctcagccattagctcctgccttctgttactctgtgcccacacacggtctccccacaga

SEQ ID NO: 282652 - DNA, 1000 bp, Homo Sapiens
aatccatattatcttacttgtgttttagttcagacttgaggaaatgctcttagggcgggttaaacaaaaatccctctgacttcataggcgactcacttgcctcgtggagctttgcaatttggacattgcccatctctctgcaagcattaacagcaggcaagagccctgtgaactcgatgtgtctacaagcctcgaggagatttaatgagccagtcaattcaaggcccctttgctagcctggccttatatgtctgcccattttaaattcagccttcttctcctttctcaacacttcagatccttttattttaattttcccttaatacatataaaacaatgcaaagaaattcctggaaaccatgtgcctctcctccaaccagacttggagagagtgagtcactcagcctcgttccttgcctgcctgccggcaagacacactgctcaggcagggcttttgtttcctctggttatgatttacgcgggtggaccctgggcagggaagagtcgagtatcaatttcactgggttaccgtgttaaatgaccgatgcatggatggttattgctgcctcgggagcaaatgaaagcccttcgcttccctgacaccgccgtcccccctctgctgatgatcagttaaaaatgtaaataaaaagactgcactttggagagagtcagctccgaaggggtggaggggaaattgcagaagcgaagtttattgatcctccagtcaagattgatggcacaataagagcaggaggcgaagagtgattttgcttttgaaaacgttgatgaataagcactcaggggcaacaaatagctgggctcaccgagtgatggacggtggtgggggaacaagatgcatttttataaatgggtgaaaagagaggaggacttattaaaaaaatgaatgaccacatgtggcagggatatgccagtagggagaagaaagccattgatttatgtgtactactggcatttgaaaattcaataataacattgacaa

SEQ ID NO: 282653 - DNA, 1000 bp, Homo Sapiens
acaaaggaatcataaagttcatctggaaagtttttgaaacatttaaaaaaagaacaatacatatggagacatgtatttctagactttaaaggatttttataaaaccactataattaagtgtggatgataatagaatagaataaaaagattctgaaatagaccataatttgtaattaatcaaaggataaagatagtactttaaatcaatgaacagagatgattattgaataagttgttctgtaacaattggataactattaaagaaaacagctagatacctgcctcatatcacccaccaaagtaaattctagatgaaagaaaaagataaccataaaatatgaaattactaatgagctataagaaaatgtaggtaggtatccatctgacatcacataaaagcaaaataagaaattatagatgaacacattgaaagattttaaaacataaaaaactcaaaacccatattcatccaaaaactgtaagcaaacttaaaagatttattattgtgtatttggggattatttgcaccaccaagatagagctataaatgtataaatacaaagctatcaatatattgtgaaaaatcaagaagaaaaaacaaattttcataatagaaaaatggagcaagaaatgtaatgaatagacattttaaacacaggaagaaatacagtagtcaatacatatgtgaagataagttaaacctgtactagtttgctatagatgctgtaacaaatttcacaaacttggtagcttaaaacaacaaagcccatattttcttatagttctatagttcagaagtttgaaagtagtttcactgggtcaacagcaaggccatgcttcccctgcaggatctagagaaaaatcccttttgcagcttctagtgaccacaggcattccggcttgtgttcatatcacttcaatctctgctttctattcagtgtgtctaattttctgcttcctttctcttttaagaatatttgtgattgcatgtcagacccag

SEQ ID NO: 282654 - DNA, 1000 bp, Homo Sapiens; identical to SEQ ID NO: 114931

SEQ ID NO: 282655 - DNA, 1000 bp, Homo Sapiens
aagtatcatcacccagactcttgccatttccttttttgagacactcctgagtttcttttattaagtatcctccctccaatttatgctgtttcaatgccaaatttagtttcctaaaaccagtttgtgtataatacctgttagcattcagcccactcccacctatcagcacctattttcattcttctcttcttcaaatcccaagattcctctgctctctaaagccctctatgtgtgcgttcgtgattcttcccaccattatggtctctttcacatgtatggtctattccactacatttgcaagtggctttgctatgctatattgtcttctttctatgcatatgtcctgttcatctgaattgataatgtgatagcggtagtggtggtgagcctgcagggtcaggtttatatttgaaagtcaaagtcattgtgcagacttggctgatggcagcctttactgagggccattggaaagacaaatgtggcacctctgaggctggagacattgtctttgatagaacagttcctttgatttcctcttctattcacccaaaaaactacctccacagatatttcttgcatggcaaccagttcctaactgtttaggaaagggaaaaaatttcattaggataaactaatgtaatatatgatatgatataataaatataatacaacaaaaatacccttaagcagagagatgatttagtagctcatgcagaaatcagaagagtattcaggcactgctctgtgaagaactgtagctgggcagaacaatgaatggctaaagtaacttttactctccttagaaggaagactaaggctttgtgtaaaaaatcataccctgacttttaaaggctggaagtgggcaaagaatttctatatgggggcacccaaatctcaaagttttgactcacttttttcccttctattacccttttccttcttggtttcctcccagtggctactaatgccatagtgagctcaaacaagttcaaaattcatt

SEQ ID NO: 282656 - DNA, 1000 bp, Homo Sapiens
tgagtgccttttatttcaagagaaattgtatacctactgtgtaaatttctgcagggagtcctttaatgtagactgttgcaattttctccaggaatatgctaataattacaacggctagggatttggactttgtatctacagagaaggaattgtgtgagaaaaagagaaaaaaataataactctaactctacaacactgaaaagaaaataaaaaagaaaaaataaataaaggagagagaaaaacaaagtatttgttaaagtacctgctaaaagtagacagatggatagaagtggcaactgcagacacgtctttgtgcaggctattgggaacagccatgcacgaagagagaatcatgatctttggtaccatgggcagcaggctgagttctgaccttcatagtcatggcaacagagcatcccgttgtgctcctggggtgtagaaatgggacccccttgagtcctctgtcacctctgtcagaggtatgggtgtctgcttggcaactttacaatcctgaattgctcattacagttggcttaagggaactctggtttgtgtttcttatttttgtttaaaagacaacttttaaagataaatgcatagttgtacttcagagaagagtttcaaggaaataaatatggttatcttagaacccaatttacattgaagtgatgttgcattcccgcagagtttgttcaaaaccacagtcctatcctgaggttattttccaagtggattatttaaggtgacctgatatgttgcgtaggctgtcctcaaactctgggtcttaagtaatcctaccacttcagtctcccaaaatgctagaattacaggcatgagccactgcacccagccagtaattgaaatattatcaagaataatcaactaacatttattgctaaaatttattgacacacacgcacacacacatatatatatgtctatatatgctctatgcactttacatctattatctcattatttgtttttactttactaatga

SEQ ID NO: 282657 - DNA, 1000 bp, Homo Sapiens
tggaattgctggatcatatggcaattctatgtttaacattttgggagaccaacaaactgctttctacagctgtaccattttacattcctaccagcaatgtgcagagattctaaatttgtcacaatatttccaacatatattattattattattattattgctattctaatgggtgtgaagttgtatttcattatggtttgaatttttgtaatgattagtgatgccaaatatcctttaatgtgtttattgaccatttgtaaaccttctttaaagagatgtctattcaagttctttgtgtattttttaactgggttgcctttttgttgtaagagtttaaaaaattccttaatattctgcataataaactcttattaaatatatgatttgcaaatatattttccaattctatggattgttacttcattttcttgataatgccttttaatgcgcaaaaggttttcattttaatgaagcccactttttttttaatcctgtgtttttgttgtcatattgcttaatctaagatcatgagaatttatccatttcctcctaagagttttatagttttggcttgatatggtttggttctgtttccccacccatatctcaccttgaattgtaatcccataatctccacatgtcatgggagggaccacatgagaggtaattgaatcatgacagccattacccccattgggagcgattacccccatgctattctcatgatagtgagttagttctcatgagatctaatggtttataaggggcttttcgcactttgcttggcacttctcttcatgctgccatgtgaagaagaacatgtctgcttccccttctgccatgattgtaagtttcctggggtctccccagctctggagaactgtgagtcaattaaaccttttttctttataaattacccaggcttgggtatttcttcatagcagcatgagaatgggctaatacatggatcttatatctaggtctttgaaccatttttagt

SEQ ID NO: 282658 - DNA, 1000 bp, Homo Sapiens
gcagatgagtgaaattggaccactgcacttaagtgtgggctacaaagtgatactctgtctcaaaaaaagcaaaaacaaaaacaaaaaacccaaaacatataaaaagctcaaacaactcaataggaaaacaggtaaatcccaaataaaacccaattataaaatgtgcaaagtacctggatatacatttatccaaaaaaggcatacaaattgccaacaggtacattaacaggttgtcagcatcactaatcatcagggaaatgcaaatcaaagccattatgagtcattgcctcacatctgttaggatagctactatcaaaaagacaaaaagataacatgtgttggcaaggatgtggagaaaagggaacccatatacattgttggttggagtgtaaattggcacagccatcatggaagacagtacagaggttccataaaaactccagcaatccctcttctatatccaaaggaactgaaatcggtgtctttgaagagataaccacacttccattgttacctgcagcatgtttcacaatagtgaagatatgggaacaacctaaatgtccatcaaagtacgaatggatatgagtaaagaaaatctgccctatctgtctatcatctatctgtctatctacctatctatctatctatctgtctgtctgtgtgtatagtgacatattattgagcttaaaaaaaaaaaaaaagaaccatgtcagatgtgacaacatggatgagcctgaagggcattatgctaagtgaaataagccaggtgcaaaaaaaaataaatactgcatgatctgattcatatgtgggatctgagatagtcaaatgagtagaagcagagagtagaatgctgaattgccagggtctgagggataagggaaagagggagatgttggtcaatgaggtgcaaattttaagttacgcaacatgaataagttctggagatctaatgtagagcatggtgactatgcttaacaatactgtattgtatacttgatat

SEQ ID NO: 282659 - DNA, 1000 bp, Homo Sapiens
acaaaaaagacatattccaatgattatgttatatttcatgacatagatgagagatttagcagatgtaatcaaggcccctaatcagttaactttaagttaatcaataaggagattattctgggtaagcttgaccttgtctggtgagccactaaaagggtatcaaggtcagagatggaagaaagtcaaagaaatactatcctgctggccttaagaaagcaacagccatgttgaaaatttccaagagatttggaaatcttcaaaactcctatggggtggcataggagctgagagctccactcctacaaccacatgagcttggaagagcacccccagaccacaataagaccccatccctggctgacaccttgattgcagatttgtgagatcctgagcagaggacccaactgagccacacccagactcctgacccatggaaactgtgagatagtaatgtaaatttttatgtagcaagggagcactaatagactacattaaatataccacctgatgttaaagactaaagtgttttcagaaatcttatttatcattcttttaaaaatgttttcaaaaaaaatttttgccttcaacttttattcacagacacaaatatgagatggtttctaaattaagaatgtagattaaagcatgagaagcaagctgtgcagtagatggatatagaacaatgggacagatctcagtcataattctcatcactcctacttctctttagtcaacttgtctgcatggagcagaaacaaaaggaacaagtgcttccagtctgaggggctggatctgctgacaatcaacaccttaggaaaggatgctgggctcggagagaggtaaaagaagatgtgaagtttgctgaattgctaagactgagaatggaatagaagttgggagcaagggaaacagagataaaggaaagagaagagataatcaactgagcagctgctttaatagacacacatgatttcttgatggctagtgatatttaccctac

SEQ ID NO: 282660 - DNA, 1000 bp, Homo Sapiens
tgctttttgttttcagcatcactcatggttggattgcacctataggcttgtaaatcgatgcttttattctaaagtcttttgttgtgtcacatcttggagtgacctcagctgggggtctgatactgcttttcagagattacaaggtcatgatttgaatttcaatgctaataatataaaaaacagtcaaacaagtcagcttttattgggtcccaattttgtgctggtcggtgcttggtgctttgcaagtaggaagagcatgggccagagaacatcaaggccaagcaagcactgtacatgctcccgacaggagatgttcctctttagcactctttctgcaagcatcacttacacctgagtcaacttcctatctgtcatttgtctgcactcctcacacctaacacataatgactaccttgcaaagtgtaatccactttacaaagtccatgtacacgtatactctttcttgatgcagtaaccctggaaagtacataagataacattttttctactttcctcccactgcactcactttttatcaatactaacagaccattacttctctttcccttttaaaaatcacatcatttggggtcagaaataaactcttctgtggcttgtgtttgtgttttatgctttggtttttgatcttgcacctggaggaggacaagcaaagggtgcgccttatgcacttgctcaatacacactagcaagctgtagagatgcaaagtttgtgagatggatctaatttcaagggaacaatcttggaggagctgccgggttcccatgtgccagctttctgtgttatttgttttcattatttggctaaaattacccaagtatccctgcacccactcccattttttgttactattgttatatgtttgttcattatagctgttatcaaagtacagagcataaataaactacttagtaaatactttctgaacaaaatacgacaaattgttcagcagtgcagaaacagatgctcatttactcactg

SEQ ID NO: 282661 - DNA, 1000 bp, Homo Sapiens
ggccgataccagcaagggcgcaaagcaaggagaactaagtgacagccagaaaggagtgcaggcttggagggggcgcggagccagaggggcaggtcctgggcgtgggagctggtggcgggcgccgtgggaagacccccccagcgccctgtctccgtctccctaggtctcctgggccgccgtgacgctactgctgctgctgctgctgctgccgcccgcgctgttgtcgtccggggcggctgcacagcccctgcccgactgctgtcgtcaaaagacttgctcttgccgcctctacgagctgctgcacggcgcgggcaatcacgcggccggcatcctcacgctgggcaagcggaggtccgggcccccgggcctccagggtcggctgcagcgcctcctgcaggccagcggcaaccacgccgcgggcatcctgaccatgggccgccgcgcaggcgcagagccagcgccgcgcccctgcctcgggcgccgctgttccgccccggccgccgcctccgtcgcgcccggaggacagtccgggatctgagtcgttcttcgggccctgtcctggcccaggcctctgccctctgcccacccagcgtcagcccccagaaaaaaggcaataaagacgagtctccattcgtgtgactggtctctgttcctgtgcggtcgcgtcctgcccatccggggtggcaaagcgtcttgcggaggacagctgggcctggaagcccggctgtcgggcaccagccttagcttttgcgtggttgaatcggaaacactcttggttggggagttcccagtgcaaggccctggggcacagagagaactgcacaggtgcatgcttggatcgggccatgcgggactcctacgatgctctgctaggcattctgtagcggggactttacccagagacgcggaaggggaaggaaagcaagaaaggttgcagcggtcgggcgcggtgctcacgcctgtaatcccagcactttgggaggccaaagcaggaggatcc

SEQ ID NO: 282662 - DNA, 1000 bp, Homo Sapiens
gcgcagctggagggcgtaaccagcccgtaccaggagaagccgtgtttgtgaggtcagcgcgcggcgccttcggtagctgggaggaggaacggtgatgtcatgccttccgggctcctcaggttccttattttcgtcatggtggtcgccacgctcattgtcatgaattgcgtcatcgtgctcaacgtgtcccagcggacgcccaccacccacgccatgtccccgcggctgcgccacgtaagcgcggagggggcggtgcagcccgggtcggggtggggcttcgtactaacctcgtcccctaagccccgcccctgccccaggttctcctggagctgctgccgcgcctcctgggctccccgccgccgcccgaggccccccgggccgcctcgcccccaaggcgggcgtcgtcggtgggcttattgctccgcgcggaggagctgatactgaaaaagccacggagcgagctcgtgtttgaggggcagaggcaccggcaggggacctggacgggtgagcacagtggccctggcccggggggccgcgcggggtgcctgccaggggggaggctcctaaggcccaccccggtgttttccccgccagctgccttctgccagagcctgggcgccgccgcccccgaggtccgctgctgtgtggatgccgtgaacttcgtggccgagagcacgagagatcaggaggccaccggcgaggtgggacaggagccagaggcgggtggagcgaggcagaggcccaccactgtctcccatgccgctggctcctgcagctgcctctttactgactgtgccgacccttccccaggaagtgtccgactgggtgcgcatggggaatgcccttgacaacatctgcttctgggccgctctggtgctcttcagcgtgggctccagcctcatcttcctcggggcctacttcaaccgagtgcctgatctcccctacgcgccgtgtatccagccttagctcgcaccgacttcaatttcccacccatctccag

SEQ ID NO: 282663 - DNA, 1000 bp, Homo Sapiens
cattgaggtcagaagccctgaggtgggaatgaattagtgagagaacctggaaacattaacaccttattagcaatgagctcacctagcacccagaccttggcttctaaatacccattctccattaaaaggaatcaaagttccttggaaatggctaattccaaggcaaagtataagatgagcctgaaacatcttgttccaggaagcagacaagtgatcaaagaatcttgaggaggacatgtccaaaggacacagaagcctgcttgaaggggctcccattggccaaatcagagacaatttcaacatcaaaataaataataatggattataactcatttgataagccatgggtcaatgctaatataaataaatgaacagtctaggcatgatggctcacgcatgtgatcccaacgctttgggaggccaaggtgggcagatcacttgagcccaggagtttgagaccagcttggccaacatggggaaaccctgtctactaaaaatacaaaaattagccaggcacagtggcaggtgccttaatctcagctactcaggaggctgaggcacaagaatcatttgaacctgggaagtggaggttgcagtgagctgagatgactccagctgagtgatggagcgagactctgtctcaagcaaaatgaataaataaacaaataatttgaagcagaatgtgatgttgacatggtctttaaatacctccttacaaaaatacttatttacaaaggaggaaaaaagtaactacagtggagaagcctggcagatacaaccttaaacaagaaatcaaaggtaaaatcatcagtgccacgacaaactgaaatcatgtgccttctgatagaagacaatgagaagactgtaataccactttcataatattcttgccaaagattcataacctgactcaaatcattaggaaacatgagacaagaggaattattggcagcatctttgtagacaatctgctacaaaaatgctaagtttgaggagcttc

SEQ ID NO: 282664 - DNA, 1000 bp, Homo Sapiens
gaaccctgccagctgagccctgtgcatctactaccttgacacagagtgttttcccactagaagctctgctctgctctcctggcccaagtaggggattccatgccttccctttcatggtcttagcaccagcagcctagtttctcccttccagagtctccagggatgacaaattggattggagacaaacctcgtcagatgctcatcccctaaaaggttaattgtgtatttgtggctgcgtgtgcctttgtgttttcattctcttcccatttttgtacattttggtcttctctgtggttttatacttggtcaaaagtactcgtcttggtattgcactgttgtgtgcatgagaaaactgggggaaggctcactggtacaagaaaggacccctgacccctttccttctctgtggtccccggcattagattgggggttctgggagaggcaggtgaatgtcctaagtgaattgttctgtttgtaactggaatgtttttgaagtctttggtgttgctccgtgaaaggacatcgccacctggtgctcatgaggtgtctttgcagaacaataaatggcaaatgaacaaccacaaaattgttactcttgttggccttctgctgtttgtagattagtgcacctatctgtgagggatttgggttacctccctgagtctgtaagcaaccacaagccctgccactgggtgggggaagtccctccccaaccacttaaaaacaaattttccacatattacccacccacacatttgacctggctagactctttgtttgcctaaaggaacagaccacattgctgggaaaatgagtaagtgaacgtgtgggagaaaaacacttttagaatcacgaatattcacttttaaaggtctctttgcctggctgcaatatagtgtgtgtttaaattatttacaggctgttgtttctcaaataaatgtttaatattaatcattcccaaactgacaagaacacaaaaataaaatgcaaatacagagcc

SEQ ID NO: 282665 - DNA, 1000 bp, Homo Sapiens; identical to SEQ ID NO: 114932

SEQ ID NO: 282666 - DNA, 1000 bp, Homo Sapiens
aatgcaaataatatattttcatatttaagatacacaaaaccatatttaatttccaggttatcttgaacaagggaaggaaagatgttaaagctttgttttcatggcctgtgtgaagctgttacaggatgtttgttgccagaaaaggctggatggttttaagaagatgggtctttctcttccctcttatgcttcaattttattttgtaccccacagcttctcttgaacagcctcttctgatgtttctaggtagtaggaaccttacaaatacatttatatatatgttgctgttggaatctatctaaatgccactcatttggtcctgcgcataatgtaagatgtaaacattccaagtcttctattattatactttagtattggaaatggattacgtgtggactattgagattaagatgactcctttctcttagtgggctactatttaagactttgttttttatattgctgattatatatattctaaggaagattttctcaagaaagcagtttttgcaccatttagaggacctttaaaatttgtataattttcacagttaaagctttcttaaaccctagcatgtagtcttattatgcctttaaaatatgagtagttataaggtcacatttgctttcaaaaagctattgtcctcatgttactttactatgtttggatctctaaactagctcttttgttagtatcgtctcacaaactgattattttcctctttctttggtaaggtcaataactgggagatggacaaactagagatggaagatgcagtcacatttttgaagactaaaatctattcagtagaagctcttcctgttgctgctgtaaatgtgcaaagcacacaataaagtgaaaatcaaccttttcatattaggagacatgcatttgtaaaaattaataaagatgacaagtcagttgtcaatggaattgagctatctgctaagacaaaaaatgttacctcagttcactattaaaattaattttaggagtgg

SEQ ID NO: 282667 - DNA, 1000 bp, Homo Sapiens
ggggaaagggactgtcacagaagaagcaagggcagggtggagggggttgaaggatcctgacagaccatggacagaggcaggaagtaaggaaactgatgttaaactggaacctaagacagtgatgaagatggaaacacagatacctacactggcattggactccttcttgctcccctgccatgggtcctctctttttccctggttgaccccccttgcatcactcttcttcccatcctcttctttttttttttttttttttttttgagacggagtttcgctcttgtcaccccagctggagtgcagtagcacgatcttggctaactgcaacctccagctcctgggttcaggtgattctcctgcctcagcctcccaagtagctggcactacagacacgcgccaccatgcccggctaatttttgtatttttagtagagacggagtttcaccatgttggccaggctggcctcaaactcctgacctcaggtgatccacctgccttggccttccagagtgctgggattacaggcgtgagccactgtgcctggcttccatcctcttctatcatttttttaaatctcttctcctatcataaaattaatttctcattttttggtcaggtagaattgggaaagtcccacactgtcctcctattaccttaacatcccaagcttcctttccttttttggtctttatgaatatatttatatggacagaattaagataaacaaaattgattgccccattctctcacttccccatcttgtcttcctagaccccacagagttaaaacttgggattcccctggcccccccagaacacttgtatattgtttgtttgaggttcgtgccgcagtaacagacacagtatttaattgcacatacagatgtttgctgggtatattcactgtaaattttatttaatctgtttttttgtttgtttgggggttatttggggggaggttggttttgtttttaaatataaaaaaaaaaatctgtcactgg

SEQ ID NO: 282668 - DNA, 1000 bp, Homo Sapiens
acttccttcttgctcatcctcatctcacatacgcgctgtgcctggatgcagcagaatgggcaccgtgacctccagagtttgtgctctcttcctccctgcagtagaagaggagtgataatcccacagagtcaagcagccaagctgaagcagctccttgctgcacagtgccttctgcctcctgtcctttgagaatatttaaagcagaggttccccaagtgactataaatgttgtctgcccggagccttcagattcctgaaccattggaatgttcctaaatctgaaaccagagagagccatatcagagtgcaaatatttttggcatatgtgaaccatggagttacaaaatgacctgatgacctctgcgactcttgggggccccggcctgcaagacaatccttcatctgttgcaaataccttcatcttcaacatacctcgctatttgcagttgcatccatctatagatagatctgggttgagggattctgagctgaagatgggaggttggcaatcgaagggggagacaccttacctgccacctcctctgccctgcaaatgtcagggaggacatgtgctgggtgaggaagaaaaggccacacccaggtacatgaagatggaagagactgtagaagcctcggaacacgtgtgcacatggccaacccttggatgttgtagaaaagggagaaaactggtccatcttgattccgtggaatgttgaagtgtgggtctgcttggaggcggggataaagctctccactgttttttagggagtcttgtccagtgcaatcagtctcttgaacagggtccatcagaaatgcaggcactccaaacctgaggtgcatatcagttcctagtggagcttggaatgtgggatggctggcggacggcgtgactgtgatccagagaaaaaaggagaaggaagttttaggtcccatagcatgctttccttttttccaagatctttcagctcacgtggcaggaaaggagccatcttcaagagag

SEQ ID NO: 282669 - DNA, 1000 bp, Homo Sapiens
cctgccttccctctgctagaagctgtgattgacaccagcagagaatgaaggaagaaaagggggtgaggatcccttgcagggatgccgtttaccccaaacaccacctggtgcatagcagttgttctggaaatgatccggtccccccaggaggcctggactctcaactgtgcacagtggcctactggcagagaggaaggtggtacccttcctcctgtgttatcttggaggtcccctgaagggctctctggggtggttctagctcttttggtctgatttctgcagtggtgagccctgggccaccttgggccacttaatcattcaacccccattcattgagtgaccactctacggtgggggaggctactgagatgacctggacaaggaccctgccctggaggagctgtcagtctggaagtgaggatttaattcatttgcccattcattcattcattcattcattcattgaggacttaattcatttgctcattcattcattcatttgctcattcatccattcattcactcattcatccattcattcatccatccatccatccatccatccaatcactatttgtgccagatagtgcgggtatagaggagaaccaaccagatgtgttccgtgtcctcaccaggcacccagtttaatggggaagacatcacaagcacgaaggcaaacaaatgagtgtacagtgacatgctgtgatcataggaagagagagcagagactttgatgaacacgagcatcgggtgatgttcattatgtcgattgtggtggtggtcttgcaggtgtagacatacttcaaaccttatctaattgggcctgctgtggtgacgcatgcttgtaatcccagcattttgggaagctgaggtgggaggatcacttgagcccaggagctcaaggctgcagtgagctatgattgcaccactgcactccagcctgggtgacagaacaagaacctgactcttaaaaattaaaataggccaggcaggcgtggtg

SEQ ID NO: 282670 - DNA, 1000 bp, Homo Sapiens
gtccaaactccatcctgtccctcaggaacggggggaaaattctccgaatgtttttggttttttggctgcttggaatttacttctgccacctgctggtcatcactgtcctcactaagtggattctggctcccccgtacctcatggctcaaactaccactcctcagtcgctatattaaagcttatattttgctggattactgctaaatacaaaagaaagttcaatatgttttcatttctgtagggaaaatgggattgctgctttaaatttctgagctagggattttttggcagctgcagtgttggcgactattgtaaaattctctttgtttctctctgtaaatagcacctgctaacattacaatttgtatttatgtttaaagaaggcatcatttggtgaacagaactaggaaatgaatttttagctcttaaaagcatttgctttgagaccgcacaggagtgtctttccttgtaaaacagtgatgataatttctgccttggccctaccttgaagcaatgttgtgtgaagggatgaagaatctaaaagtcttcataagtccttgggagaggtgctagaaaaatataaggcactatcataattacagtgatgtccttgctgttactactcaaatcacccacaaatttccccaaagactgcgctagctgtcaaataaaagacagtgaaattgacctgagagaaaatgaaatggccgttttacttagaggaccaaattgggtctcctgaggaaaggaatccagtttatctaatgaagatgttgtgccatgaaggcactgagtctgtctggtttcctgagggttaaaagattagggctgggatcaccacagcattaatcaatactgcctttccgtctcttctaattgccataggctggagatcatcggtcccttggccctgctaatgtaatgtattgatctcaggtaagtaagattgagcatcaaatgaggcaagaaatctgtctcattgttaatgaggttgctgtgc

SEQ ID NO: 282671 - DNA, 1000 bp, Homo Sapiens
ttatgtaatttcagccctgcacgtcactgaaaagttatttatcttaacaaactggccaaatttggcgggtaatgctgtctgccagtatctgcagatgtattgtttccgcctacatttgtgcatgttgtctgtggtctttaaagaacactaacaccagatagaaatgtcaactctgttcagattttttcctatgttcgaagaactgatgttgctgattcctaattttgtcaaattatgtgtctgaactgtcttcctttcttgaaaggtagatattaccaaacgtataccagataagtaatcagaagtagttaatattgtgtcaagttacagcacagttttcaacaaagtaaccacaaaggtcagtgctaaggcaaatatttagtaaacgatgttttagctatctaaagtaaaaaggcatgatcttaggaaagtgattgcaaattaaaagagagaaaattaaaaaactgaagtttggaaaacaagtaattgcaacagtttcaagagtttaatctgacctgattttttcttctgtagaagacaatgaactaaaaggacacaattgttctcgatctctgttttgagtgctttaaaaaattaatatatggaagagttcaaaatgggcaaaataaaaacttatttggagagcatacgcatagtttttttataaagcaagaacgatgaccagaaaacagatgtaaatggtttagaatttctatttaagcataaaccatgtgcaaaattactcttccgaatttaacacatcatgtgttagccattagctgattccatcttggaccctactgaagcaattctttaaggaaaataacaggcttagcactagaaaacaacatatgaaggaaaatagggaataaatactttatagatacatctctctagttctagatttagagaatgccagtgttactccagcaggcaaccaagaagatggatcaaggaatgggcttctgacagacatcctgaagaaactgaacactgtcag

SEQ ID NO: 282672 - DNA, 173 bp, Homo Sapiens
  misc_feature (45)..(45): n is a, c, g, or t
  misc_feature (146)..(146): n is a, c, g, or t
  misc_feature (161)..(161): n is a, c, g, or t
cctctgcacattgtttaaaaattggaaaaaatcctacttctgtgntctgatattcaatgcaagtcattagagtaaggtgagactcttcctgtggattcagattgaaatcagggacggtgtagggaggccatggtcaacttttgagntacgcttgagggaanaaattaattgat

SEQ ID NO: 282673 - DNA, 1000 bp, Homo Sapiens
cacaaatatgtgccagatatacaaaagcaatgtttctagaaaacagctatcatggatcagaataactgaatttactctcagatctattggctatagttatgtggactcaacccacgtatccagtagatgggaaaaaacaaaagccagaataagttttttagtgtttccttctgatgaagtttcatgtttgcttgtaataatctccatttctcaaatattatgttccataatagacatacattatgtttaattttttatattttctgacaaaagtaactaaaactaggaccttaaaaagatttagaatgttaaataagtgtactagggtgtatatatttacatatatacactactagagcttccaaaagtaaaatggataattcaaacagaacacaatgtaatatttgtatgtaaataactgaggaggaaaatccatgcttttcatgggctaggatggtttctcccaagagatgacatagtattgcttttgctcatcaggctgtttctcagcaatcattgtttctgcttaataccagctcctagtacgaattatctggcatgttgagagcaactttgtcttcaagtaggacctgatctatctttttccacaaatgtcatgtgtgtgaacaagtttcttccatgtcatctttgagactctacacagaatacacaataaagggagttatttttaaaataagacattctaaagtaaataataaataaggtcattgtcaacgtttttcattcaaaaccattttttaacataaatttgctagaaccaccttccaattccaaggcaaggagagacattacaaccctgactcaactggatgggctaaggtttctgataaaatctgaagataaagaaaatggaatattctgcttttttcttccttctaatttcacccttgcctaaggatgagatttcttcccaggttggtatcccagaaatgcagactgtagctatggggcggaagctttgtttctttacctgatcact

SEQ ID NO: 282674 - DNA, 1000 bp, Homo Sapiens; identical to SEQ ID NO: 206329

SEQ ID NO: 282675 - DNA, 1000 bp, Homo Sapiens; identical to SEQ ID NO: 114933

SEQ ID NO: 282676 - DNA, 1000 bp, Homo Sapiens
ggacctgccgttttctatatgtctgttatatctacatgtttacatgtgccatgtggaagtgatatttcactaacaagtggtacaaaagagctctaatcaattggcttggagaatgttaatgcttatcagactgatggaacctagctcagatgccttttagctcacatgactagtaatctttggtaagattaatttggtaaatttaatctcaattctttccagtaatttaaaatcttaaagtcatgttatgtttaaattaagtaaacctaggttacttttttcccccactggggatttgggttaataagtcatgtaatgtttaaattaagtaaacctatgagttttttttccactgggaatttgagttaataagacttaaactagtaggtgaataaaaggtgtttttggtgaggtttctgaaaacacaaggatctagtttttgctaaagaaaatgtaatttttttctagagactatttatgagtcactctaaaataaaggaaaaaattatatagataaaactaaatggataaagaaaaaaataaaagggtgtgaaatgagaaatcctgactcttgagtagccatgtggttgcccatcttaaggagctgcagctgggctatagtcagttactaaaagtaaaagttaccagtggaattagagatggatcctactcatactcccagggagttagttccctgaatgcataagggaaggcaagctaataaggaagaaaaatgtttcatcctttggttattatctgtaaaagctgaaatgagagtaaaagagtgttgggttggtccttaagagtggaccaagaccagaagtgggtctgtctcagctcaagcctctagcatccaagctactcacaaaaatataaattaaaccggggcaacaaagtttacctctgagacctgtggttaccaagaagatagtaaatgtaggggcagggcaaaacaactattaaaaccagaggctataatgtaaaggaattgttccatttt

SEQ ID NO: 282677 - DNA, 1000 bp, Homo Sapiens; identical to SEQ ID NO: 114934

SEQ ID NO: 282678 - DNA, 1000 bp, Homo Sapiens; identical to SEQ ID NO: 206331

SEQ ID NO: 282679 - DNA, 1000 bp, Homo Sapiens
aggttggaaaacccaacaaatgccatttctctccaaattaattatatgtttaatgaaagcccaataaatcaacaggttgtgtgtgtaacttgataagcagattcaatgtacatggaactacaaaaggtagaaagccgcctactcaacgccaaagttcattttcaagctgtaataactaagacagaatggtactagtgcagggagccaactggggccaaaagaacagaaaagagcccagaaacagacccattcacatatactcaatttatgacagaggtagcactgtgaacaaagggaaaagatagacttttcaataaaaggtgctgggacaattggatattcatgtgagaaaatacgaaatggtcctttactcatatcacattaaaaaatcaatcaactccaggtatattagactgtgtaaagcaaaactatacagctgtaagataatataggagaataatttcacaacttgtgactaaggcaagatttcataacacgcaaagagcactaactaaaagaccacacatctctccgtgaaaattaggtacttctgttcataaaaataaactataggctggtgcggtggcacacacttttagtcccaactacttggaaggccgaggtgggagggaccacttgagcccaggtgttcaaaggccagcctgggcaacacagtgagatcccatctttttttttttgagatggagtctcgctctgtcacccaggctggagtgcagtggcatgatctcggctcactgcaacctctgcttcctgggttcgggtgattctcctgcctcggcctcctcagtggctgggactgcgggcgcgtgccaccatgccaggctaattttttgtatttttagcagagacggggtttcgctgtgttagccaggatggtctcgatctcctgacctcgtgatctgcccgcctcggcctcgcaaagtgctgggattgcaggcgtgagccaccacgcccggccgagatcccatctctctaaaaa

SEQ ID NO: 282680 - DNA, 1000 bp, Homo Sapiens
tcaggaagcatccagcaggggaaaacgtgagctgtgattccccctgaaggatcccagactccattcccaagcactttctccagtgccagcaaagtcctcattggtggcaacaggaatacagtctgcacttgcagccctggcaggcagccagcaccgtcagtggaaaactttaagacgctggggcatcttagagcatccacagtgggtgctgtcggctgcacactgcctccagaaatgctgtgattgccatccagtcccagactgtgggaggctgggagtgtgagaagctttcccaaccctggcagggttgtaccatttcggcaacttccagtgcaaggacgtcctgctgcatcctcactgggtgctcactactgctcactgcatcacccggaacactgtgatcaactagccagcaccatagttctccgaagtcagactatcatgattactgtgttgactgtgctgtctattgtactaaccatgccgatgtttaggtgaaattagcgtcacttggcctcaaccatcttggtatccagttatcctcactgaattgagatttcctgcttcagtgtcagccattcccacataatttctgacctacagaggtgagggatcatatagctcttcaaggatgctggtactcccctcacaaattcatttctcctgttgtagtgaaaggtgcgccctctggagcctcccagggtgggtgtgcaggtcacaatgatgaatgtatgatcgtgttcccattacccaaagcctttaaatccctcatgctcagtacaccagggcaggtctagcatttcttcatttagtgtatgctgtccattcatgcaaccacctcaggactcctggattctctgcctagttgagctcctgcatgctgcctccttggggaggtgagggagagggcccatggttcaatgggatctgtgcagttgtaacacattaggtgcttaataaacagaagctgtgatgttaaaaaaaaaaaaaaaaaaaaaaa

SEQ ID NO: 282681 - DNA, 1000 bp, Homo Sapiens
gagtgagcaagttgataatggcctcatctctgacctgagaaaaaacaactttgacccttgttcttaaaatgctttaaccttgaagttgcttgagacttaagaggtcatgttgctttaggtttaataaatagccttaactatttggaggggaaaaaatgggtcaacttttttttttttttttggcgtttgcatgtacaactttctatttttagcctatatttggaaagaaagcacttaacattttaggaattctttttaaagctgcttgcaaagtgttggtgattttactgaaaacttttgagatcttcattttacaggcagacctgtctaactacaagccagacttgggttttctcctgtagtttgaagacacactgactcctgacaaaatgcagcctgcaacttcctggagaacaactcagtgtcacattaaagtttattatgtatttaatgatacactgtttaattgacagttttgcatagtttgtctaactttagagaattaagagcctctcaactgagcagtaaaggtaaggagagctcaatctgcacagagccagtttttagtgtttgatggaaataagatcatcatgcccacttgagacttcagattattctttagcttagtggttgtatgagttacatcttattaaagtcgaaattaatgtagttttctgccttgataacatttcatatgtggtattagttttaaagggtcattaggaaaatgcacatattccatgaattttaagacccatagaaaagttgaagaatgcttaattttcttatccagtaatgtaaacacagagacagaacattgagatgtgcctagttctgtatttacagtttggtctggctgtttgagttctagcgcatttaatgttaataaataaaatactgcattttaaagctgttaagaaattgtccagaacgagaatattgaaataaaaacttcaaggttattatcgcagtttttatggcgtttttgttttgtcactac

SEQ ID NO: 282682 - DNA, 1000 bp, Homo Sapiens
attttgagcgatcccagcatggttctggaatgagcaacaggtcaacagcgaaaagatttatttctgctctcaacaacgttgctgaaagaacttataataatatatttcaatttcatcaacttcggcagattgccaaagaactaaacattcaggttgctgattttgaaaattttattggatcactaaatgaccagggttacctcttgaaaaaaggcccaaaagtttaccagcttcaaactatgtaaaaggacttcaccaagttagggcctcctgggtttattgcagattaaagccatctcagtgaagatatgcgtgcacgcacagacagacagacacacacacacacacacacacacacacacacacacacacacacacagtcaaatactgttctctgaaaaatgatgtcccaaaagtattataataggaaaaaagcattaaatataataaactaatttaagaagtgataaagtctccagatgcagtagctcacactgtaatcacagtgactcaggaggctgaggtgagaggattccttgaggccagggttcgagaccaaccttgggcaacatagcaagaccccatttcttaaaaaaaaaaaaaaaaaaatttaaacttagctgggtatggtggcacatgcctatagtctcagctacttgtgaggctgaggcaggaggattctttgagcccaggagtttgaggttacagtgagccacaatcacaccaatcactgcactccagcctgggcaataaagtaactcttgactcaaaaaaataaaaaaaattgtagtggtagccatgtgttaattgttaaataaattctccaaagggctaaaagtaaattacttataaattttttatagttgtatttttgacctgccttttatatgtatgaatatttcatagttttgcatatcagatgtaggcatacagacaaatacataaaccaatgaatatattacatattctgtgttccaataaaactttatttatggacact

SEQ ID NO: 282683 - DNA, 1000 bp, Homo Sapiens; identical to SEQ ID NO: 114935

SEQ ID NO: 282684 - DNA, 1000 bp, Homo Sapiens; identical to SEQ ID NO: 195692

SEQ ID NO: 282685 - DNA, 1000 bp, Homo Sapiens
ctaaaaaaacaaagtcaaaaaacataaggaaaacaaataacatcattttatctttccctttctcattcctactttctggataatacctcttcctggtgattgccttcctttctgtggtgattgccttcctttctcatctaattcttctaattgcatgaggaaatgaatataaaagccttagcacaacctctaccccgataagtgctcaaaaatggcagctattattcattatataaataatttccaggcaccaggacttctgttaaggaactcatggataatatagaggttttaatttaatcaatgggggaaaggaaaactagaaaaatccataggaaaattcactaaaaacataaaatccataatttgctatatccatcctaacacaatgtttaaatcttttttctttttagtaagttttaaaatgcctaaaaaaagctatttgtgttacaggttagatatttaaactaaccctttcatttctattgtgtgacctactaaaactgcaaaactcagtgacacattgagatgtgtccagcatttatattatgtatatatattatgaccagcatttatattatgtgaagtgacacataacagagcacgagttattttgaaataatttattgttaatatgttgaatgttaaggcgcttggtatgaaaaaaatagccactggaagcattaagtataaaagaaccataactagctaattttgtattagtctatggctgtgtaataaattactgtaaatcataacagctcaaaatagcaataaatatgtattaactcccagtttctgcaggtcaggaatttgggaacagttagctgagtggttctggctcagagtctctcatgaggttgtagtcaagatgctgtccaggaccacagtcacctgaagggttggacgaagcttaggattgttcccaagaaagctcactcacctgctgctgtttcccagcaggaggcttcagatcctcctcttctgggcttccccatgg

SEQ ID NO: 282686 - DNA, 1000 bp, Homo Sapiens; identical to SEQ ID NO: 195614

SEQ ID NO: 282687 - DNA, 1000 bp, Homo Sapiens; identical to SEQ ID NO: 195538

SEQ ID NO: 282688 - DNA, 1000 bp, Homo Sapiens; identical to SEQ ID NO: 195662

SEQ ID NO: 282689 - DNA, 1000 bp, Homo Sapiens
actgcttgaccctgtgtctggaatgtggggaggcaaacagctgtgcccttcccagaccctgcacagcccctggtgggggcagggccctggtgggagcagggcccagaggtacagcctggggaggcaccggccattgtggttggagcgcggcagccaggctctgggctctgttccgggcctcactgtgtccccagtggggtgccgccaccacccccccagcctgggccccgccggtcagacacccgcagggacagcttgtcttggctagctggctacagcacctcgctggagtccagcagacacgcgctcccgtgcgcacgctgcgccccaggccagccctaacgccgctgctcgggtcaggccccccgcctgccgtgggctgctggctgccttggcccgccccagctctctccgcgcccctgcctccagggagccctcctcgaggactccagccacccaagctcagcagggccagcccgagcccctgccccacccagcctgtgtggagggtcctcagccccctgatcccccagaccctcccggcagaagctgggtccctggggcttggggaaagccggctccatggcccctggcctggatgatttcccagaggccggtcccctgccaagtgcctggtgacccttgttcctacctggctgcccatggtcctttgtgcgacccccgcccacagcccaggagctgggcaggagactctgattgggtggcagcagagccatcctaggggtgcccctgaccctggccctgaccctgccctggagcctcgtttccaaatcttgcctcatgctttcgccagacccctgtggccccttcccgaccctggagtgcccctggggcttcctggaaagggcctctcctttgctcacagttgggtgccgaacttcaccagcattgaccacccgaaggcgcagggacacccccgcagtccctctcctgggggtcccatcaccaactccccatgggcgggatatcagaagaattc

SEQ ID NO: 282690 - DNA, 1000 bp, Homo Sapiens
gggttggtggtttctaggcctcccctttttagcagttgccagcttgctttgcagaggggctgcatccggtccttccaccagcaccagggggagggttcccatcactcccatccctcccatccctcccatccctgcccgtgcttcgtgttgttggaattgagatgctgcagcgtgctgtgtgtgaagtgaagtggcatcgctgtcacgtgcgtttctctgatgactcggcggagtcaggcgtctttaccacgtttacctctcccttggattctctcccgtgcgaattgcctgttgatgtctttttctcatttttcttctggttgttggtctgggtcttattctgctggttggtaggagttcctgatattcctgattacggattctcggttgtgtctttgaactgcgtttctgttgctcctgatgtgcagaagcttaagccttacacatgatcagctgatcttatcctttatgaatggtgctatttccgactgactcagaacatcctgaccttccctgaggctggaaaccactgtcatgttttcgtctaatgattgtgaagttttgtctttaacatactgggcttctatatttggggatttgtttgtatgtgacaggttttgctgggtcactgcagtttgttaaaacagattgattgaggtcatctcttctcacttaaaacgaaatggaactgtgaaatgagaggaatggaccaaaaaaaaatcctcccccagggacaaagatggggaagaagccaacatcccacaaaggatttgaacccattttggaaggtgggaagtgggttggtgggtggctgctgagcagaagagggctgagggggaagctggccacaccgggaggccctggcatggagcagagtctaaaagtggatcaactgaaagacggggcagagcagctaccttggaggtcctttgccagagcagccggatggtcctcctggccctcacctccctgcagtggagatggaggtctggagaacctg

SEQ ID NO: 282691 - DNA, 1000 bp, Homo Sapiens
tgatcctttaccacaaagcaggagatattctttggttcgttaggacaaagggatttttttcttaaagggagtagtacaaaattattggggaattctgttttatctgggatttttttttccccctcactgatgcgagcgagatctaagtcctactggaagtggtctagagagcacagtttcaaaagagagtgcagtggtaccagaaggaagaatttgccatttgttgagcattggcaataagtcagaagttgtgctaggtatagcagtgggtgcaaaagtggcgctttctgctctgaggcttctaggctggggatatgtcaatatgttggtgaaaatttcaaaatataaagtgtacagctgggcacggtggctcatgcctgtaatctcagcactttgggaggctgaggcaggcggattgcttgagtccaggagtttaaggccagcctgggcaacatggcgagaccctgtctttattaaaaaaaaattaagtatgattatataccaaatgagggcacacacagagatataggaatccagggaggaccatgaggatgtcaggtgctactgatggggtacagctatgaagaacagttctaggagttcttagggatctcctcaagtgatttgttctagaaaggcaaacattctgtcaatgggactcttagtctgtccttcacctctgaggaaactgaggcacagagtggggggatatgtgcacctaccattgtgataatagctgtaatatcaggttgactttgctgaccatttcatcactcttcaagctagtcaaaagaatagtaggtagaagactatatagcagccacaatagatactaattgtattaaaatagcatgattcaacctttacattgagttttaagaaacttgtttatgtagttcccagcttacaagaacagaaaagagctggtaagcttttccaggataggttcttgcttgttgacaggtgatccactgcaggacctactgtggggacctgaaag

SEQ ID NO: 282692 - DNA, 1000 bp, Homo Sapiens
tctctctaggcatccgggtaagacaagacatggggagtaaaaggcacagaaatggagaaataggtgaccataaggagctttggatggggctggggctggcctctccctcccaggcagccacacattccccagccaaggtcggcagctccactgcccatgtggagggtccaaccaggaggtcggccatgggaggaatggcaggaaagggaaaggctgggctgggccccctgtcctgctgcagagggattagtgtcaaagaggtgccttaaggctgttctgagcactcacttctgggcaccaggaactcacaggctgctgggcatggcacggtgcccagggagagtctagggtggggtatgtggggaggacccctgcaggccagggcttgggggggccctcggaaactgggctctacccggcagacacacccatctccgcctgccaccggccgctggccagcccgcagtgagcacccactgtttacttgggtgagggggaaccacaggccccgccctgcccacccacgtgaagcacggggctggagccagctctggggctacaaaaagctcctgccaccttgggtccctcctcagaggctgctgagggacagggcactcttccccgccgtccacacaatgagtgttggccggaggaagctggccctgctctgggccctggctctcgctctggcctgcacccggcatacaggtacggcttggccctgggccctctactggtcctgggtggtgcggtactgagtgggcctcagcagctcagtctttgccctgggcaggctgcattgtgccatgaacggctcccagcagcatagcccctgactgtggcctggcagaacgagcagtttcccttgtggttgggaagggatctctgggcttcgcgacctctgagctggcattcctgagcaggaagtagagctcagatctcggctttcctctgccgatcctgcactgtcccagaagcgaagactgccacagtatctcag

SEQ ID NO: 282693 - DNA, 1000 bp, Homo Sapiens
catcaacattaccagggagtttgatagattcgcacagtcccaaatactgcaccagaattatggactcagaatctccattttgacaggatccccaggctgtgtctatgcataatggtgtttgtgaggctaggagctggtgtcagatctggtagtgcaaggcaccttcctcctccttgaatatttatagctaaatggtcagtttctctaaaccagcatataggtagggcaaagaagcattttggatgatagctacaattgagtgaaatgttaaacacatgtgattatattaaataattatatccaagtctcttactcagcaatttaattcttagtggcattttatcttgcaaacatttgccacacgttagtatgtgatttgtttacacctgtctcacttgaatatttggtaaaacattacttttactctaatcctgttgaagtaatagaaggaaatctattttcatgtactcactcattgaataagcatttaatgagcagaaaggtcaattaagagtctgttacattcttgctggcaaaagatggcaagggccaaaggtggggccagaagttctcgagcttttagatggagtcagcttcatacccaggcaggagggcaagggtacagagaatccacagaatctgaaggctcctacatactttatctacaatgttcttcatgtcattccactttgcgtacaatattgcaattattgctttaaatgaacaaatttctaagatatcctcgtctatccattcattacactgtaaaaaatgaattaaatcctttattatacaagcatcttagacagaaatcaaatgtaattcatcgcacatgctgtcagctaattaaagtatttgtaccacagattcctcagccttttatataaacttggaggagcactggggtcttattccaggagaaaagcaaatgaatctgcattttcctcttatttaatttatgccacaataacagtagcttcagtgcagagctgcagcttca

SEQ ID NO: 282694 - DNA, 1000 bp, Homo Sapiens; identical to SEQ ID NO: 114937

SEQ ID NO: 282695 - DNA, 1000 bp, Homo Sapiens
tgctgatggtcacaggcacggtggcatcagggagccgggccagcaggcggcgtgaggcggggccagcagctcactgcaagggcattttccacctgatcctggtgtgccccacatgcggtggcagggcagacgtgtgaagcctcggccgtctcggggctggcaggtgtgcgggtgaggaggccccggtggccaagcagagcctgcgtttcatttctcctgctgcactgtgtctagtctgtcttgtgaactctcaccgtgaaaagaggctagaagtccaggatcgctgtaccgctcctgtaattaggtgatgactggatttgacaacttagtcccctcagacaagtaagataccctccaacagcaaattcaatgacttaattggaaaacacacaagctggcatgatgtccggtgatttctgtaagaaatgcctgtaggagaaggtctgtgaagtgtggagggcagtgtcgacgctgcacagcatctgcagattcgcagcctcttctctgccggtgcctctgttcggttctgttacccaaaaacaaagaccaaagaaggccaatctctcatttgaccctgtctttttaatctgcctgttttaaaagttgcgtctgtagtagccgcttgctgtgaagacacatcttgacagtccaagtgattttgtgaccagtgatttgggtcctgttttccgctcttctaagaaaaaacaaaaagaccgtgagttattgcccagcaataatcatgttgttactgtgagttagcaacatgcctgacttcctgatagcattactgttttctagttttgtttattgtatattatgtgtggttttatttggtatttatttgtgttttgaggtcttgcaatgtttttgtgtttctgatgctaataactaaagtttgtaagactgtagaatgcaaaactcggagatgctaaactgtcttattagaggaaaataaatctgattatggagtctcaaaaaaaaaaaaaaaaaaaaaaaaaaa

SEQ ID NO: 282696 - DNA, 1000 bp, Homo Sapiens
tcacctttttatgatctaatagctactaatttctccacgctgacgtttaccacagaacctggacataggtgttgcacacactatgatctctaataaataaataaaataaataaaacagaaaaaaaacgatacaaagggtatgaaggattgagtgaatatgttatatgctacggcaccagtggtctttctgtgtattgtacacttgccccattctaggacaatggttccttctgattagttaccttttccagtctgagagacatgcctggctcacacctgatttgtaaggcaatggagatggagacactcttatatccaaaagtacatagctccggtagcttagataataaacctttgtcacctctagagaattctaaaaatccacagatttagaaattctaggaatccaagaaattacaattttagatctactacaatttcacaatataacaataaccaataaacacggacattttatttacataaataaaagatgggtttgtcacacaacttaaaaatctagggtcgaaagccacagcaaaggcaacctcctggcactatatcacaatagatgacacctgcatagagaaagcaaagtggtcatgttagtcactgattgcctcaaataatccctgtggggatgtctactcttttgtattccatcagcttttttcccagtaacaacacatcctagcaataatatcctgacgagtttctataaaaaaaaaaaaactcccctcctaagatacagtatcttctgtggttgcatccccagccatccctcatttggttgaggttggaatttcaatgggtgggttgaatttttccctaaacaaacttgccatggtaaaatcaaggctagcattactgttcacacaaggcactgtgctaagatccccatccttatagcaatgggagggctcataggcaagtcatgtcatgcagaggccatttcatcatcccttcttgtctttggggacttgggtctctccggttgtat

SEQ ID NO: 282697 - DNA, 984 bp, Homo Sapiens
tgcaaatttaaaagatgatagttcatcttgctcccgccccgcccaggtaatcattctcaattggatatatttgagtgtatccttttttccatgatatactaacacatacacacacacacacacacacacacgcatattactaaactatacatatagtatatattaataaagacattttgagtttgatgaacgaaggaatggctgagtgagaaccagacaatatcagatcatgaatgagttgtgttaaaagcagtaagacaggttttcctaggaaatcatacaaggagctgggatttggggagctttatctaaatctctttataactaaatgttttccatgtaaaagttggtgtttttaaaattcaatttaattttttttttgagatagggtcttgatatgtcatccaggctgaaacacagtggcataatcatggctcactgcagtcttgtcctggtagactcaagcaattctcccacctcaccctccccctcagctgggactacaagcatgcaccaccatgcccagctaattaaaaaaaaatttttttgcagagacagggtctcactatattgcctaggctggtcttgaactcctggcctcaagtgatcctcccgcctgagcctcccaaagagctgggattataggcatgagccactgggctcagacaagggctcttcttgatggcttactgtatccactttgtccccaagaccatagggaaatgactagaggtgactgtactagctagattttaaatgaaactgaaatgaaagttcacttcctcattttgagtacctcatgtgacaagttccaatttctttttcaagtcaattgaactgaaatctccttgttgctttgaaatcttagaagagagcccactaattcaaggactcttactgtaggagcaactgctggttctatcacgtatgtctctttgttctttttctcccatttggtcttcaaacactctgtgtttgtaactt

SEQ ID NO: 282698 - DNA, 1000 bp, Homo Sapiens; identical to SEQ ID NO: 206332

SEQ ID NO: 282699 - DNA, 1000 bp, Homo Sapiens
aggacgctcgcacctttcagctgggtcagtgaactctgtggcaggaaaagtgctgggctgcctacaagggctgaacctgcctgcagcctaactagtgcctcccaccgtccccatcgtcacataggatgtcccttaccctcaggggtggctacaccccgcctgctacaggtgccgccctaacagctcacacctggagcccccaggtgtgatccctgctgaccactcaggtctggggtccaggcagatactgtgtgggtggccataagtcactatgtgggctgagacttgaaggactccgacagcctcatgggcgactgtattaagccccagcaatcggagaggtgggctccggggctgggtgggtctcctctgccaggtgggtctcctctgcctgtggtcccagcagctcggcagcaggggccggcccagatggccgttggtcacagagacagctgggctttgctgagtgcgtcgtggtccagcctaggcccatgccactgaagcctttctcagaggtgtggggtctgcagggaccggtcacatgtgagcccaggatcagggcattgggggaagaaccagctgaggacattccccagccccaaaacaaaggcacggcagtcctcgagcagggaggagtgaggagccacatgtgggatcccgcctctctggcgtgtgagctgtggatggcatctggtaccagccccatgcccgctggccgctggcgagcttgcaggctctgcaggcaaccggaacagcatactgcaggtgcacgcggggtcctcgtgccgagtgatttactcagggagtgcctgagggagcaggtgagggaggggcacttacaccctgaatgtagaaggaactccacaagtccatagggaagaggcagacaccccatcagaaaagtggacagagaccttgaatgactgccagcaagggaaagtgcccaagtggccaacaaacctatgaaaagaggcccaacctcaccagttgtcatggaaat

SEQ ID NO: 282700 - DNA, 1000 bp, Homo Sapiens
cagtgtggtcagtgccttgagtgtttcaagatctctattctggattttagtttagcttttattgactttctaggttgtggccattgcctgaaatacatgacagtgagctcacagaaaccttatactttgaatttcacaaaaatcatataatgttaggttcttgcttgctttccctttattttttttactgtcaataaaatactgatcctgatcagtgttttgggtcctgcttagtcatttatgactactgatgactattgtgtgattgatcaccagttccttttgaaaaagaatgccatttttcctaaatgagaaattatagaaatcagttagaagaaacctcacacctgttggatctatgccctgaaaagccagtttgggaggaagaagctacactatttattggagatattttatatagtaaactggatctctttgggttatgatgtttctgaggtttttttttccttaaattttttttttttttttttttagaatgcaaaggaaagtttgtgggtgagaaggtagttttacatttggaattgggatctgcaaatagctgtcctaacaacactgcatgaaacaattggggtaccaaggttttcataggaccacatcttaaagaaggagatttcttatgaattaatgaacctgtttcacagggcagaaggaaatctttttttgtacagattgggtttttatgaaaaagaaagtaaaaaaaacaaatcaattagctggtttcagcagatttctcacctattgagtttacctgtttcttttttatccttagatgtaaaatgatttataaatctcaaaacacacctgggaaaactatctatgtgattcaaatatagcaggaacatgaatttaccaactatacacaaatgtattttgaaaattgtttttacttctatgctttcttcagtgacatgttaaaccattaatatgttgagtctaattaaaccagttgttagtatataagctgaacaggactccgtgg

SEQ ID NO: 282701 - DNA, 1000 bp, Homo Sapiens; identical to SEQ ID NO: 206333

SEQ ID NO: 282702 - DNA, 1000 bp, Homo Sapiens
tatctctgtaaagaccctaactccagatagagtcacattctgaggaccgggggtaaagagtcctccgtatcttttttagggaggaaacaattcaccctggatacgtggccacactgagagtctcggcaggaagcactggggggcgccctctccagcttcccgctctaggccgtgccagggtcgttcactgatgggatcacatctgtgctttccatccatgacccatacctgcctttcacaaagttcttgacctgaaataaattagtttaatcaggtacaaagggcagttgcacttgaatttctgcaagtatgattgatttcattccagctcttctgctcttctgtcgggtccagtcagtctgtgtgggacggtcatggtgacttgaggcttaggccaacatgagagagattcccctcagccgggcactgccagaagaccgggtctgcaggcatgtttgttgtactctgttcttgagacccgtagctgctgtttcgcatctcatcacagatttgctggctgccctcagtctgatctgggtgtttgcccaggcctggggcacgagcagcctcatgtgaacatgactgggacggccactcttgctgcctctgctccccacgtacaggcagctccagttgggcaaaaaaggcaagaaaaagaggcatcaagtatggagaggaagaaggtgaacaaaggattcagaggtgacacgactgtgtgtcttggaaatccagacgaacttacaaacacaacactgagcacggcgcgtgaactcccaaagagggccagaggcgaggccggtagctggaggtgtctgtagttccgtgtactcgcaaccaacaaccagaaggttaaaaacatgccgtcaacaatagcacggagaacacacgcccaggaatacaccgaatgaaagatgtatgagatcttacactggaactgagaaatcaaagccctcagcggaggccgacaccacagtgctagtagggaagactctgtgttgct

SEQ ID NO: 282703 - DNA, 1000 bp, Homo Sapiens
ctgttgtgtaattaatcagttatgtcttggctgcaggaaaggagggtccgagttacactcagaaagtaatgacatttagaggtgatgaatgcaacagggatagaatcatggaggattgggaaggagtggcaaactggcaccagggtgttggattcaggacagggttggtaagcctaagcctgggggaatcctagcgcttgctttcacagaagacctcaggagaaattaatcttcagtatctttataccatgggtgattggcacattcctgcaaccacagtaagatgcaatacatgaagctggaaattgcaaattcttgccactcaaggtactatttgggcatcttcagcccacagcagacatgaccaatcgggcacaagcactcttttttgtggaagtcaaagtgtttttagaagtttttctcaatatagcactccagggggccactaccagtcagttggagttggtattcaaggtggagtctggttgccgtctctgccctgttcccattatgtagtgagttcaggtacttaatacctaactgaggaccctaggactgcagtttgagatcatctggggccaggcacagtggctcacacctataatggtagcactttgggagcctgaggcgggaggatcacttgagcccaggagtttaacagtttaaaatcagcctgggcaacatgatgagacatcgtttctacaaaaaaattttttaaattagctaggcattgtgatgtgcacctgtggtccctgctacttgggagcctgaggcaggagaatcgcttgaaccttggaggttgtggctgcagtgagccctgatcgcaccactacaccccagcctgggtaacagagcaagaccctgtctcaaggaaaaaaaaaatcatctggcccatcctgttacttaacagagaaggtacctgaggctcaaaaaggatgactgacagtcctagtggcagaatggaggtgggatctggaacccacaacttgattcctaggac

SEQ ID NO: 282704 - DNA, 1000 bp, Homo Sapiens; identical to SEQ ID NO: 206335

SEQ ID NO: 282705 - DNA, 1000 bp, Homo Sapiens
tgggcggatcacctgaggttgggagttccagaccagcctggccaacatggtgaaaccccctctctactaaaaatacaagaatttttagtgggcatggtggtgggcgcctgtagttccagctactccggaggctgaggcagcagaattactcgaacccgggaggcagagcttgcagtgagccgagatcgcgccattgcactccagcctgggcaacagagcgaggctccgtttcaaaacaaacaacaacaacaacaacaacaacaaatgttgctagtctgatttgagatgtgctataactgaaaaacacactggatttcaaaggcttagtacaacataaaacaaaatatctcaatatttttaatatagatcacatgtaaaaatggcagcattttggatatattgagcagataaaacattaaaattaattgcacctattcttattaatttattttaattttacttcaagctctgggatacatgtgccgaacgtgcaggtttgttacataggtatacatgtgccatggtggtttgytgcacccatcaacccatcatctaggttgtaagccctgcatgcattaggtatttgtcctaatgctctccttcccctttcctcccatcccctgacaggccccggagtgtgatgttctcctttctgtgtctatatgttctcattgttcaactcccacttatgagtgagaacatgcggtgtttggttttctgttcctttgtcagtttgctgaggatgatggtttccagctttatccatttccctgcaaaggacatgaactcattcttttttatggctgcataatattccacggtgtatatgaattgcacctattcttacaaatgttttgaaatgtgactgccaaaaattttaaaactatacatgacttgcatctgtgtctcacattatagttctattacacagaactagactagaacattcctttttttggtctcacacgtcattattatcacacaggtatcttggtgtaat

SEQ ID NO: 282706 - DNA, 1000 bp, Homo Sapiens
ttaaaccaataatcactgaaatatatgggcacaagttgggaaaagtgctctgaggaaaagcagatggtgttgagcgctaaggagggcctcctgagcaagtgatgtttttaggtgcatcttagctgaggagaagggaacaggcatgtgaagagtggaaagaacattccatacagtgaaaaggctctgaggcagaatgagtggagagaagaccaggctgtccagaatgtggtgaacgaggggagagaggaggggcaggcagacccttccccatcatatgtcgaggttacccgacctattccatgaaaggcacaaccacaaagagaaagacaagctgggtcctgctggagacaagcctgcacttgccatttttttgttttgttttgtaattttattgaggtacaatctatatgacataaaaatcatccattttaagtgtccaattcattgatttttcataaatgtactgaattgtgcaaccatcactataatccagttttagaacagtttgccaccccagtgagatccttcgtggtgtttttggttaacgtcttcacttgcaacatgcactaatgtgaagtgacctttcccttctaggtcttgcaggtggaacagatgtgcccttttcagaggttgtgaagttagctccaaatcccagactagctgctaccccaagcccgggagcttctcaggtgagagaccatcagaatttgtttgtagcatttgcattatgaaagcccgctagggttttttcccccaccaaaaggtcacctacattgaacgtgatgtgctcaactaaaggagaaattctgctttattgaaattatcaagaaaatggagctaaagggccatgttgtcagctgcaagtcacagatactgctgattttacagccagggtcagatggattgctgggcatatttgtattgcttcttatgcctcacggtgggcccttccatgtcactgggctataaaagctactgaaaggatccatcactgaaattc

SEQ ID NO: 282707 - DNA, 1000 bp, Homo Sapiens; identical to SEQ ID NO: 195903

SEQ ID NO: 282708 - DNA, 1000 bp, Homo Sapiens
tgagattccatttcctcctcagtaaaataagtggtaagattttaggatccccagcactaaaaagaaacgaaatactgatacaggctccaacatggatgaattttgaaagcattactatactaagtgaaagaagccagtcacaaacaagcacatattggatgattccatttctaggaagtgttcagaacaggcaaatttatagagacagaaagtagattgattagtggttgcctgaggctggggagcgggggaagggaggtgactaccaatgtgtatggagtttttccagggtgagagggtgatgaaaatgttctaaaatagattgtgttgatggttgtgccactcagaatatactaaaaaccatttgaattgtgcacttgaaacagatgaattgtacggtatgtgaattctatatcaataaatctgtaatttaaaaaaaaaaaattaggtcgggtgcagtggctcacacctataatcccagcactttgccagactgaggcaggaggatcacttaagcccaggagttcaagaccagcctggggaacacagcaagacctcgtctctactaaaaaattttaaattacaaaaaaaaaaagtaaaaaaaatagaatcctaatagtacctatctcataggattgtggaaaatagtagtaatgtatgtaaaatatttagcacatagtaggcacaaagaaatgacattattattaagagacctgggagagctgtgcccagcctatcgtgggaggccttgacctttggactcaaaagtggcagcaggtccacccccccatacacccttgtcaccaaggaagcgtccacagcttaaaggagctatattaaagcaccccaagtcaagaggactgaaccagatctggaactcactcacctcccctctcacctcactgccctcaccagccagcctcttgtcaagtgatcaggctgtcaaccaacttctctaggataaggtttcaggtcagcccgtgtgtataagaccagtgcc

SEQ ID NO: 282709 - DNA, 352 bp, Homo Sapiens
aagacctgcagccattatgagtgtgcatttctaggtggactaaaaaccgaaaactgtattgagaacctagaatattttcaacccatctatgtctacaaccctggtgagaaaaaccagaagcttgaagaccatagtgagaaaaactggaagcttgaagaccatggtgagaaaaaccagaagcttgaagaccatggtgtgaaaatccttgaacccacccaaatacctggaatgaaaattccagaaccttttccactacctggaataaaaatgatacaactgaatgaaaaacctgaagataaaagtcaaggaaatatcaacaatcctactccaggtccagttcctgttccaggtc

SEQ ID NO: 282710 - DNA, 1000 bp, Homo Sapiens
aagagaccctgtctcaaaaatataaaagttataagggggatttgcagaaggcacattagcacttcatttatatgtgacaagtcacactgtgttgaccaaggcagggatttgtgggcaataaagagaattaactgattaatcaatagtaatgttatctactgagcacgcaagtcatctgattgtgtcagtactgtcgggctctgttgttcaaaggatatgtatttaaaatccatttataggctgggcacggtggctcacacctgtaatcccagcactttgggaggccgaggcaggcagatcacctgaggtcaggagttcgagaccagcctggccaacatggtgaaagcctgtctccactaaaagcacaaaaattagctgagtgtggtggcaggcacctataatcccagctacatgggaggcagttggggccctgtactgctggtaagaaagtggctttttttttttcttttgagacagagtctcactctgtcgcccaggctggagcgcagtggcgcgatctcagctcgctgcaacctccacctcccaggttcaagcaattctcctgcctcagcctcccgaatagctgggattacaggcgtgcaccactatgcctggctaatttttgtatttttagtagagatggggtttcaccatgttggccaggctggtctcgaactcctgacctcatgatccacccaccttggtctcccaaagggttgagatcacaggcgtgagccaccgtgtccggcaaaagtggctaactctcttaagtattgtgtaccatgctgtctgcagtggcaagagttagaaaaacaaggcccactcccaccccatgcacacaagtctccctgtgaagcatctgttgtatgcattaggtgcaccttaagtagacaagtttggaggaagaagttgtagataggagttgtaaagacttaccttagaccgttcaggaaatcggagacagaagagcttcttctgttgggcagcaggatggtggcca

SEQ ID NO: 282711 - DNA, 1000 bp, Homo Sapiens
gctttatccaatttcaccttttcattgcactggtgatcacagattatcatatgctcacagtgatggtgtatgaccactacatggccatctgcaagcctttgttatatggaagcaaaatgtccaggtgtgtctgcctctgtctcactgctgctccctatatttatggctctgcaaatggtctggtacaggtcatcctgatgctttgtctgttcttctgtgaacccaatgagatcaaccacttttttttttttggagaaaatgcattatatgcacatttaattccactataaatttttgaatggacggttggagaggaagggagaaatacatattaacggagagaataccacccagaaagtatatacaatgggagaaaggaacctgttgatccaagtttccatattcttattatggcatataaggtcatgattattttctcagtatgaagcatctcccagggctgactctgatgtaaaattggagatcaaccacttttattatgcagaaccacccctcttagtcctcgcctgcttggatacttatgtcaaagaaactgccatgttcatggtggctggttccaacctcatctgccctctcactatcatctttatttcctacactttcatcttcacagacattctgcatatctgcactgctgagggaaggtacaatgccttctccacctgcgggtcccttgtgactgccgtcactgtctttcaaggaacgctgtttcacatgtgcctgaggcccccttctgaggcatctgtagaacaggggaaaattgtagctgctttttatatctttgtgagtcctacgttaaacccattgatctaccgtctgaggaataaaaatgttaaaagaacaataagggaagttatccaaaagaaactgtttgctaagtaaggtagatattttagttgcaggttatgtaatacattatttttatcttaccaattaacgagcattataaattaacaaatcactttctgtcattgagtgt

SEQ ID NO: 282712 - DNA, 1000 bp, Homo Sapiens
tttcctcttgacggggatccctggacttgaatgggcccatgtctggatctccatccccatctgctgcctctatttaactgccctttctgggaataccctgatcctttttgtcatcctcactgagccaaccctccatgagaccatgtactatttcctctccatgttgtccaccactgacattggcttacgtatttctacactggtgacagtgctgggaatattctggctcaatgctcgggagatcagctttaacacttgtttatcacagatgttcttcattcacctcttcactttcatggaatcttcagtgctcctggctatggcctttgatcattttgtggccatttctaaccctttaagatatgctaccattctaactcatgcaagaatagcacagattggtttggcagtcattaccagggggactgtcattttgacaccactaatcctacttcttaagtgactgtcattatgccgcagccacgtgctctgccactcctactgtttccaccctgatgtgatgaaactctcatgttcagacacaaagatcaacagtgcactacgattaagtgcaatcatctctactgccggagtggactccatctttatcttgctctcctatctgctgatcattcgctcaggtctcagcattgcatccccagaggagaggaagaaggccttcagcacctgcatttctcatatcactgctgttggcatattctacatccctttgatcagcctgtcctttgttcacagatttggaaaacatgccccaccctatgtgcccacccccattgctaacgtatacttgctcatcccctctgtgatgaatcccccatcatctacagtgtgaaaacaaagcagattcagaaagctgtgctcaaatttgtatgttccaagggaattcatatttaacatgtactactcctataaaggcttatttcaaagtctagaaaatttaccacaaattggaattataaacccatgcatgcaattttag

SEQ ID NO: 282713 - DNA, 1000 bp, Homo Sapiens
agtgcggctctgtctggcacccgctcccaaggtgggaggagtgggtgtcccctgtgtgtcagtgggcagctcctgctgaacccgcagctcactagggagcctgacagtggggccatgcgcctgacactcctctctgcttgtggacctggcaaggcagggagcagaaaacagccacttgaaggctttctgtctgcgtctgtgtgcagtgtggatttagttgtgcttttttcttgctgggagagcacagccaccatttacaagcagtgtcaccgtcgtgggtggcgaggacagaacaggagcctctgctctctgtacctatctgggcccggtgggctcccttgtcctggcttccatctctgtctcagcgaccattcagccctgcgcaggaacacgtgttgcttagaaaagccaaatccagccttgtctctgcctcctctggtctcatgatgtgcatctgttaccttgaaactggaaaccagtctatcaatgtctgtgccaattttttattccctccccaacctccttccccatacgactttttatttatgtaggatgtgtgctgtctaatgatgggatgaccacacttttccatgttctaaaagtgctcctctcccgcagggtcccagggctggtggttgctttgggtctacagctacgtcttacccacctcctgcctcaacagcctgtgtggtggcaaagccggtgtggggctggggaacgcagcgttctccaggagggggacctggctctccttctgcaatgcaggcgaaggcctagatgccagtgtgacctcccacaaggcgtggcttccagactccccggccggaagtgatgcttttttgccttgggccctgggtttgaagcagcctggctttctcttggtaagtggctggtgtcttagcagctgcaatctgagctcagccacctacacaccaccgtggccgacactttcattaaaaagtttcctgagacgacttgcgtgcatgttgacttcatgatc

SEQ ID NO: 282714 - DNA, 1000 bp, Homo Sapiens; identical to SEQ ID NO: 206223

SEQ ID NO: 282715 - DNA, 1000 bp, Homo Sapiens
ccgacggcctcctgagcgcgcccgagaaagcccgggccttcttgccgccggcctcggcgccctactccctgctggaccccgcgcagtttagctcgagcgccatccagaagatgggcgaagtgccccacaccttggctaccggcgctctgccctacgcgtccaccctgggctaccagaacggcgccttcggcagcctcagctgccccagccagcacacgcacacgcacccgtcccccaccaaccctggctacgtggtgccctgtaactgtaccgcctggtctgcctccaccctgcagccccccgtcgcctacatcctcttcccaggcatgaccaagactggcatagacccttattcgtcagcccacgctacggccatgtaacccccagcccggcccggacctgaggcgtggtctgaaagccgggtctgcaccctgtcctctgagcctagccccggcctgcagacgcctccggggtcagccctgccgctgtcccttacaccacccagacttttcctctctcttccagggggaagggtggggcgtcctcccggacccaaggcgcagacaggtaccggaaacttgcaaacgttatgtcagctacacagctgcccctatcccgactctcccaaaacaaatctccgactgtaccccctttggacaaaaaagtaggcagttttgctttatttatatccccttcactctcctcggataggctttggactctgaactcccagagttctgatattatatctacaatatgcatatattttttccttttgtcccctgaagaaaagagttagctgtgtctctgtgttttgccatcagacacaactaggagccatttgctcttcatgtatgggggggaaaggcttcaaagttttaaattacagaaagggaaacatttctatttaaaaccatgctatgatagtgtttgcttctttaaagggaaaacaaaaaggacctacatggttatttactttgtgtaaagcagtgcttctaga

SEQ ID NO: 282716 - DNA, 1000 bp, Homo Sapiens
ttggccaggctggtctcgaattcctgacctcaagtgatcctgcctcggcctcccaaagtactgggatcaggggtgagccactatgcctggccaagggcttagtcttaaatataacctctagtcaaaatgtttaaacaaatttgtacataaatgtgatttaaaaaaatttttttaatagtaccaaaggatattcagtgaaagtgagtttcctgcccactccctgatccacccagttctttaggcaaccactgatagcattttcttaagtattcttccagatatcgtctatgcatatgtaaaagtatctgtctttctccttttaaaaacacaattggtaatatatcatacttgctggtttgcaccttgctttttttgcttaatatatctagtttataatgacctaatgtgcaaatttttgcatctgccctaaatatctactggtttatttttataatttttgtgtctatactatttgcaagcagtatgtgtcagtagactttattattaataaataaaaagccaatttggatagaatcactttataaattggtagtgctggttttttactaaaaatatttttaagttcttcaaaagaagttttatgagtgcatcttacagatctggtgaagatcttggcacattattgtatgctgtttgttgacttgtgtccgcatcggtgtccctgaggctctagcaattatgtcttgactgataaggctctaatttcttctactgtgttaacttgcttctggcaagattgaacagatctactgaaaccttgaaaggttttctgggtactcttaataaaattgcaaaaaaaaaaaaaaaaaaaggcacaggagatgtcaaacatttattgtttataaatttgccacagtgctgaatttattgtgcaaggactgctaaattagttctcacagtagtccagaaactggactttcttagcattgtttgttattttaatacatgatcacttcactcatataaaagatcagtggag

SEQ ID NO: 282717 - DNA, 1000 bp, Homo Sapiens; identical to SEQ ID NO: 114938

SEQ ID NO: 282718 - DNA, 1000 bp, Homo Sapiens; identical to SEQ ID NO: 217089

SEQ ID NO: 282719 - DNA, 1000 bp, Homo Sapiens
cagataaggtcccagacattcctagataataaaaatcaaatgaatgatacaggtaagtgtatttattgaagggtgtgggtagagtggtctgggaagtcttgctttaatgaagacggattgattctatttacctcttcttacttccactactaagtaaccctgggcctgcagtttcctaaccacttgacttccttgccaacagtctgtctccactttcagccgttttatagattcattggccctaaagcactgctttcccatacttccctacccaagagggcaggggtccccaagccctgggccgcggaccggaaccagacagtggcctgttaggaaccaagccggatagcaggaggtgagcggcgggcgagtgagcattatcgccttgagctctgcctgctgtcagattagcgagtggcatcagattctcataggcacgcgaaccctattgtgaactgcacatgtgaggtttgccggctccctgtgagaatctaatgcctgatgatctgaagtggaacagtttcatccccaacccacacacacccccaccccgtccgctgggttagaggactttacaaccctagtccaccttgtccagttatagttccacctctagcctttcaaggcttaaaccattaatgtccttaatttctcttgtattcatctatctcccaactatacctttttccttcccttttttatttttggcaatatgtgcccatggttttttaatttaaaacgaacagaatatgtagtgacgcctaccatagcactccttcccatcacacaagccttcaaggaaactgaagtacttactttggtctccctggaggattccctccgcctcccgccccatgtgcttagcaattctgttcctgtagtctggatggccttcataaagccctcactggaccagcattctggcacataataggaacacttaaaaaacgagagaatgatgccgttatatctaatatcttcctcttctgaactttcacag

SEQ ID NO: 282720 - DNA, 1000 bp, Homo Sapiens; identical to SEQ ID NO: 195726

SEQ ID NO: 282721 - DNA, 848 bp, Homo Sapiens
cttttgtttgtttgttaagagaaaataggatgaaaagatagatcatgaattagtggcgtttgttgtagagcctcttcatggtgaggcagatacagtaattttggaaatatgtaacatgcaaagtgtgtgggcctgggtgagatcagaggccaggctggctcaaggtgaatcctgtactgagtccccagtagggtcacgcagtccaaccgggacaatttccttttcttaataaaacagtggcttggtaaagctaacagaaacttgaagatttcaagatctaatacattgaactttcggaataaaatcacagtgtactaatttcatgcaggaatggacagaccacaagttacgctggaatcctgatgattatggtgggatccattccattaaagttccatcagaatctctgtggcttcctgacatagttctctttgaaaagtaagtatcacattgtttcttacttatggggaaaaaaataaattttttaaaaagtgaaaaaaaggctgggcgcggtggctcacgcctgtaatcccagcactttgggaggccgaggcgggtggatcatgaggtcaggagatcgagaccatcctggctaacaaggtgaaaccccgtctctactaaaaatacaaaaaattagccgggcgcggtggcgggcgcctgtagtcccagctactcgggaggctgaggcaggagaatggcgtgaacccgggaagcggagcttgcagtgagccgagattgcgccactgcaagtccgcagtccggcctgggcgacagagcgagactccgtctcaaaaaattaaattaaattaaattaaattaaattaaattaaaaaataaaagtgaaaaaa

SEQ ID NO: 282722 - DNA, 1000 bp, Homo Sapiens
ttccatggagatagaatgaagcattctgtggtcaagtaagtttagggagctattcatgtttcacttgctttgtggagattcacactatgcactgggaaagtatctgaaaagtcttataataaagaaacaggcttaactttgtgtaagaacactgtttatcaatgtcatttggctatagaaacattttctcctgctgattgtgtgtgtgaaacatgtattaacattccaatgaactagcatttaataaagcacaattttggaaaccctggtaaatgacagtgggaaataacacccgaaaggcaaggacgggcagattggggagggaaaggatgttgggctaagggctgtgagcttatgttacaggcaactgagccactgaagaattttgacgaagaaaatgccaaccaaagcagtcattttaaaagtttatggctgttcagttacaggacaagttgtgaaaagaaagaaaaaaaatggaaaaaaaaaaagtttatggctgaaacagtgtaattgattaaaaagtgaaaatccaggccgggcgcggtggctcacgcctgtaattccaacactttgggaggctgaggcaggcagatcacctgaggtcgggagttcgagaccagcctgaccaatatggagaaaccccgtctctactaaaaatacaaaagccaggcgtggtgggacatgcctgtaatcccagctactcgggaggctgaggcaggagaatcgcttgaacctaggaggcagaggttgcagtgagcagagattgtgccattgcactccagcctgggcaaaaagagcgaaactttgtctcaaaaaaaaaaaaaaaaagtgaaaatccaggagttagtatgtctgcttccaaaaagattagatagatacattttttcctctcagtaagtacagctaaactccttggtcacataaacaaacacaagactctgaaaggtagagataagacggaagactatccctggaccttgggatctgaggaaggactctg

SEQ ID NO: 282723 - DNA, 1000 bp, Homo Sapiens
agccggcaacggcaaccccctttgggtcccctccctttgtatgggagctctgttttcatgctatttcactctattaaatcttgcaactgcactcttctggtccatgtttcttacggcttgagctgagctttcgctcgccatccaccactgctgtttgccgccaccgcagacccgccgctgactcccatccctctggatcatgcagggtgtccgctgtgctcctgatccagcgaggcacccattgccgctcccaatcgggctaaaggcttgccattgttcctgcatggctaagtgcctgggttcatcctaattgagctgaacactagtcactgggttccatggttctcttctgtgacccacagcttctaatagagctataacactcaccgcatggcccaaggttccattccttgaatccataaggccaagaaccccaggtcagagaacacgaggcttgccaccatcttgggagctctgtgagcaaggacccccaagtaacacaaccatgagggtgcaaatgcatgggccactaatggtagagcaagaaaacagaagggccctggttcctcgaaggcatcagtgagctgaaatgcctgccctggatgtcctattcctaggtgtttttctgcctgaagcagattaaaccctttgttcacttctccaagtagggcttctattacagcccaaatcaatccccaccccagatgacatcatcctattaatacttttcaaagtcttcctgtccttaaacttccagcttccccaaaaccccacagaagatcagcagtctgctctcctaagggagcctgggcctgactggcatagctctcccttacaatagtaagcaattaattcagctttgcgacttgatcagtccaaagtggctgccagtttgaaaatctcagaaaggtaccatatgtactaagagaagccctgacatgagggcctaagccaaaagttggcccacatccttcctcttccaaatttaggatgggcactg

SEQ ID NO: 282724 - DNA, 1000 bp, Homo Sapiens
catggaccatggtcaggcagaggaagatgcctaccacaggcaagggataaagccagatgacctcaaaggtcccatgggattctaatctgtctgctccttgttctacagattccaaaccaaaagaggcaagcaagtctgcgctgaccccagtgagtcctgggtccaggagtacgtgtatgacctggaactgaactgagctgctcagagacaggaagtcttcagggaaggtcacctgagcctggatgcttctccatgagccgcatctcctccatactcaggactcctctccgcagttcctgtctcttctcttaatgtaatctcttttatgtgctgtattattgtattaggtgttatttccattatttatattagtttagccaaaggataagtgtcccctatggggatggtccactctcactctttctctgctgttgcaaatacatggataacaccgttaattccatgtgttttcataataaaactttaaaataaaatgcaaacagtttctttgtgattttaatttgatttgggggtaaaaggaattgcctggtaccattgggcggtggggcaagctacagtttccaaaagcagtaagaatgcgcaattgctgagtccttaatatgagctctgggctgaacactcttaatacatgatctcactgcgtactttcaacaagggttttaacacccttatgaagtagggactgttgcccccagtttcacagttaaggaaagagaggcacagagaggtgaagtgacttgctgaggctagtaggtctgcttggggagtgtcatgaaaaaatgcctttaaaaaggaggttatcatttcaacatcttgtggggggagttgtaaagaggggaagcagcacagcaaaggcggaagaagagtgagaaaagtgacttcatcatattattatcagcataacattgggaaagtcatcttgctttattagacctcagtgttcacaagtgtgaaatgtagataatattaacatttatct

SEQ ID NO: 282725 - DNA, 1000 bp, Homo Sapiens
cttgaacaaacctgtggaggtgtgaaaaagcctagtacattccaagaacccagtctggtagtgtggaacctgagtcctctggtactttttaaaggatggggtgaccttagtcctcaggtttaaaaacttaatcaataaatgatgacgttattgaaatatatcaccacataatgctaaatagaacaggtgagcactaccattctctgtgcctttctattgcttaaaatccttccatttgtcatacttcttaaaagtatgccaattggagaacaagacacttgcttccaaaatgagaatacctttgtgaaaattgacaaatttgtgtgaattagcttaatcagattgctttcttccacaacacctgaccaagaccagccactctgatgacgaggagaatagggggatgtggaatgcaaaagaaggtaggagcatggggtactgagggtggagagggctcctcttgcagtggaattacaggcagctagggagcagcacaaaggccctgcatggctgagaattagtttaggggaaaggaaagagaggatagcagaaataaattttacctgacttgcaatttggctccatgtcggctctcatttggtttatttctgtgctgtctagacatcaacagattgagctgctcccatccctggggacccccttccccactacactgaccagtgcagccccctgcagggccattataagaagctatggcacagctgaaagactgagtctcttgattagacctgataagaccactcatattaagatgacttaattttgtcccttgagaaatgcctttttaagagctcccacattggccaagagagactgcctccatattaagctgttcatagttattcactaacaggaggcttttgcataaggctctctgctataaattcctcctgggataatgagaggctcccctatgtgaatcccaggatcactttcttctaccaggtttaccccctgctacatcccatcgacaggtgct

SEQ ID NO: 282726 - DNA, 1000 bp, Homo Sapiens
ctctcaaagataagaatgctctcggataaaatgagcctgtgctcatgacagctgctctgttactcagggaccagtgcagggctgtcttacgacacttagatgagaaagtagacaaggaaagaggacagcagtgggcatctgccttgtggtcttgctgacagcgagaagcagtgggactgcttccttgacgccttagcttggagccccgttatgaggtcctctcagattgcagcgggatgtttcatgaaagcctagacccggaagaataggaggataggagactgcagcagctgacctctggaagccagagctggatgagggacctgagcgagaggagacttgggcagccggagctgaaagctgagcagcagatgccactggagcctgtgagggcacgattgagtgtggggctggcttgctgctgctcccacaccactgcagaggcgtcctctctggaacatggagacaaggtttttggacaggggtttcccagtcccctggaagagattaagagactactgaagatctccagggcactgcaagccagatctgtaccctccacccaggagaaggcaaaatgtctttctggagagcctgggcagccagaggggaaaggtcaagaaacctatcctggccctgggaaagtggagggtaaggcagagccagccatgagaaaggatgatgtttgcccaggcatgaaatgtatcagcggatgatctctcacatggaagaagccaaagcagctacacccaatggcttagcaataagaaacaccaaaccagacaaacaccactgctgctgggaaagggacctggcagaaggaaaaggctgttcagagagcagaggtatttcgtgtgagccttttagggcttcttgtctctttagaccacatgcacatattacttgtataaaataatgcaccagatacaaacaatgaaatacaagtgctgagttcgatagactcatacaaaaaaaaaaaaaaaaaaaaaaaaaaaaaaaa

SEQ ID NO: 282727 - DNA, 1000 bp, Homo Sapiens
cgttagtgaaataagctgttttcccactgcttactgtgagttctacttaggggttttccctcagcacctatcccttttcctgcagatgatgggagaggaatataagataaagctataagatgtagcttggtcgagaactaccttgtagtgacagggtcatgtgcacataatttgccttttccaaagtgagacgatatgctacgggtgcggtcaatgtaaatctgctcaggagagtcgagggaaaaagtgttaactgcatattgagctcgcaaaattgtgtagtaacctgaaaatattcctaatagttttgcgaccaagcctcaccatataaactttccttccgcacctgtagacctccattctgtggttgaagcaatttttggtttatatagctctcttgtctcaatttggtattcctttcaggtactgtgagtctataggtatttatttctgggtttcaagacgttaaatgccatcagaattgagtaatgcaaaggctgctgtcatggatagtaaagctttttagtcaagtgctgatagacaattccccattgttatcgttgggtattttacaattttctgggcaagaaatgtaatgaaaaattaagtaagttttaaaggccttcgtctttgagactggatacctaaaacaatagtgtttcctaaacagttaaaacttatttaaccctgaagctttcgagacacacaaatatatacaaatatatattgtatatttcttaaaccccacatagttccactgatctaaatcactgggggcgagaggcaaggatagacaatctatgacacaacaccaggtgattcataagtttggtaaccactgacatttgattatgcagttgccatattccttagtaagaacctggtcacaattttcactcactaccccaggcaattccccctccccacaccccccttttttctgagaatttcagtgagatatacaaaagtttcatttaatcctttattaattccagacttt

SEQ ID NO: 282728 - DNA, 1000 bp, Homo Sapiens; identical to SEQ ID NO: 114939

SEQ ID NO: 282729 - DNA, 1000 bp, Homo Sapiens; identical to SEQ ID NO: 206969

SEQ ID NO: 282730 - DNA, 1000 bp, Homo Sapiens
gaggttcacccctcatgcttaccctggagtttacacaaaatccccccaccacaggcacagacttagtgaactccccccatgcaaggcctgactgtggtcctctctctgcagtccacatcactctggatccagacacagccaatccgtggctgatactttcagaagatcggagacaagtgaggcttggagacacccagcagagcatacctggaaatgaagagagatttgatagttatcctatggtcctgggtgcccagcactttcactctggaaaacattactgggaggtagatgtgacaggaaaggaggcctgggacctgggtgtctgcagagactctgtgcgcaggaaggggcactttttgcttagttccaagagtggcttctggacaatttggttgtggaacaaacaaaaatatgaggctggcacctacccccagactcccctccaccttcaggtgcctccatgccaagttgggattttcctggactatgaggctggcatggtctccttctacaacatcactgaccatggctccctcatctactccttctctgaatgtgcctttacaggacctctgcggcccttcttcagtcctggtttcaatgatggaggaaaaaacacagcccctctaaccctctgtccactgaatattggatcacaaggatccactgactattgatggctttctctggacactgccactctccccattggcaccgcttctcagccacaaaccctgcctcttttccccatgaactctgaaccacctttgtctctgcagaggcatccggatcccagcaagcgagctttagcagggaagtcacttcaccatcaacattcctgccccagatggctttgtgattccctccagtgaagcagcctccttatatttggcccaaactcatcttgatcaaccaaaaacatgtttctgccttctttatgggacttaagttttttttttctcctctccatctctaggatgtcgtctttggtgagatc

SEQ ID NO: 282731 - DNA, 1000 bp, Homo Sapiens
taacatcatcatgggacactacctgttgctgggtgctctgcggcttttacactgatgctgattgtgtgagatccagaaaaagaaaatggagttctacatgcccatctcacagcagggtcatcaaatcctgctagtgacacagaagctgacatccagctcccacccgccttcctcccaggttcggggagcaggtagagtgggagccattaggtgggctctgccagtgttgtcatagagtggcaagtcctccatgggatgggagtggcatgtgggagccttctgcatcatgcactatgaaaaaagaaaatttactatggggcaagtggttcatatagttaagtgattgtatatatatatatatatatatatatatatatatacactatggggcaagtggttcatatagttaagttgattgtatatatatatatatatatatatgtattccagtgtagaaagtattggctgggtctgtaatcaagtattccacagaagtgccttcataggtgctgaaacaggattatgagagtgacagacacaggactgaagacagggagaaaatgtgcatggctgtgagaatatattgctttgattctttgacttctcatgatatatgaaaacaaataaagtgggggggggtgacttcaataatatcacgaacatatttaaaatgaaattctgagcatggagaaaaatttcaaattctggtataaacaaataatctaaaaatatagataaggaaaaaatgttttcatttttttggtcatattgatttgggtcatatatgattgaccaaaaaaaaagatatttctaaaatcctggtgctttttcatttaaaaatagacaaccaaagaggaaaatgaacaatgatggaaattcgtggaagaggaaactaaaatggcaaaatagcatattaaatggcactgagccttggtgtgatcaaaaaaaaaaaaataaagcaaaatgagatattactgcttaaaaaaaaaaaaattaaaaa

SEQ ID NO: 282732 - DNA, 1000 bp, Homo Sapiens
agttggtgcgtctgttcccaaagggccttcacatccatcatgcattgagttgtcacaagcacaggtgagacaggccacatggcttgtgtccattttgctgaatagggaatcagggtccaaggagtttgtcttgattcagtgagtcagggcatgagccatgctcgacaggaatgagcatgccaatctgcagaagaaaaatggcatcatgtaatacatgcccaaagacaggaggggcagggcttcgaaccggctgctgtttcggatcccctatgccatctcccctcctgttcccacaggtcggtgatggctggcttggctctcagagctcagggctggcagcaggaccctcttttcaagggcaccttggcctattgctgcattcaaatcatgctgtccacattcacttggaagcatgtattgggcacctgctgtatgctgggagaaataacaggaataagactcactctccatccagcaggcactcaggggctagtggggctggaggtgaagaacagacaagtaaacagaaccttctagcacagcggcttcttaccagtgcgagccccctgctcctgtgtttgagaaacaatgggcatgtcctctctgcccaagagctcttgtcagaattgtttaaaaaaagaaaagatagaggtggtcagagggaagaacaattgacagcttctctaatctgattttgattgttgctctgtttaaaaaataatactagcctaaatcctcacgccttgactcaggtttctgcaaatgcaagtaggaaattcacatgtgtcagtggaagttcaaacacattgcaccgactcatggagagttattatgttttgttacacagttactgaggccagtctttcgccctgacacatgtacttagtgataagagagaggctgtgtgagccgaggttgctctgggagggcagtggacagtgtctgaccccacagcaagccccacacagttttgtgtcatttggttgctgtttctcccttt

SEQ ID NO: 282733 - DNA, 1000 bp, Homo Sapiens
cgtctctactaaaaatacaaaaattagctgggcttggtggcaggtgcctgtaatcccagctacttgggaggctgaggcaggataatcgcttgaacctgggaggcggaggttttcagtgagctgagattgtgccactgcgctccagcctgggcaaccgagtaagactccatctcaaaaaaaaaaaaaaagaaaaagaaaagaaaggagtcttctgcggggaactagatggccaggtgtctaggagggcttttcctggtgggagggttggcttgagtaagtgaagcctcatcgcccgggtgctgttgagcttaaagaaccagtagatggatcccattctcagccttggctgtgttattttgggctgaattattctttattgtggggccgtcctgtgcattgtaggatgtttagcaagcattcttggcctctacccactagtgctagtgacaaccaaaatgacctccagagattgcccagggtcccctggggtgcaaagtaccctccctgccctgggtgagaaccactgggctctacagactgcccaagataaagcaggaagtgaaaaccaaggtgcaaaccaggactcaagtgtgactgtgtttagaagaaggacttctgtgagggagctgagtgcaggcgaggctcctggcgcactccctccctgccacgctacttctaacagggttaggacgtgttccactcacagggagggcctggtgagagacactgagggacgcccgtgctttgtggccattaggaaatgattctgctgcctgggcatggtggctcacgcctgtgatcccagcactttgggaggccgaggcaggtggatcacttgagcccaggagttcaagaccaacttggccaacatggcgaaaccccatctctacaaacaatacaaaaattagccaggcatggtgatgtgtacctgtagtccccgctacctggagggctgagtgagttgggaggatcacctaagcctgggaggttgaggctgcag

SEQ ID NO: 282734 - DNA, 1000 bp, Homo Sapiens
aaaaacaaagttggagcactcacaattcccattttcaaagcttaacacaaagctagattaatcaagacagcatggtttgacatatagatcaaatgaatagaattgagagtccagaaataaacccatacatttatggtcaattgatttttaacaaggatgccaagacaatttaaagaattgtcaaagaatagtctttttaacaaatggtgtttggacaactagatatcaaaatgaaaagaatgagtttagacccctacagcatgccatataaaaatgaactcaaatttacatgtaagaagtaaaactatgaaattcttaggaggaaacatagttgcaaactttttacctttgatttggcaatggtttcttagatatgacacctaaattaaagcacaagcaagcaaagaaaaaaaaatagattagacttcatcaaaatttttttaaatggtgtgtcaaaggatgactctaccaagaatataaaaaagacaactcatcaaatgggagaaaatattaagcaaatgatatatattcccctctcccaagtgggcacaatatcagaagacaaaaatccccctgtgcccatggtgtctacatgaggaaaaaagaactagaggaggtcattcagcttccctggcacttgaatcctttctaggaagaccactgtggtcttacctcactggaggtaacagcatggctagacacccaagagtcaggtaaaaacaaagaaaggaaacagagttcatagtgaccagtgtgtagatattcgtcataactctgtgtttctcctagctttggtgccccattgaagataccagccaactgcatagcccactcacaaagctgaactggtcactttcagaagcatggtggaaagtttaacttggcctgagtccctagatgggtagactttacacccagattcaatgccaaccccaatactcccacccacgccaggagatgcctacctttccccattttagagaagcaaaggaactagatc

SEQ ID NO: 282735 - DNA, 1000 bp, Homo Sapiens
atgatgggtcctctctcttggggccccatggtcaggcactccttctttatcaggtcttggtggctacactgggaggtatttttccaaaggcacattctctgctgtggaaggtatggccttgatccaaaaccctaggggtctacattgtgagtcttcctttgggatttgttttaaaactccacatgacatcatttccttcactgacaatttttatgctttggggtctgccagatcataggtccatctgcatcacaggctggacctgctacagagctcttttctcttctgggcctcatacaaaaccagcagcttttcatattacctggcgtataggtgacaacagtatttccacatgtggaaaatgctgcctctagaatccagagtctagaaccagatgtcatgctccatcctttatgatgggagctcataatttatcttttactatggaagggatgtactgtcatgcctttgaccactgaactcctaagaatgttagtgatgtagccgactcctttgaatctttgaaggagttcttttctcaccctctgcaatgcatgtgtcttgtcaaagcctctgtcttagtgagttcaggctgctataacaaaagtaccacagacggggtgactaaagcaacagaaatttattactcatagttatggaggcttggaagtccaagatccaggtgctgactaatatggtttttagtgaggtcccttttcctggtttgcaggtggatgcctttttgctatttcttcccatggtggagagagagtgagcagtctctaatctctttatttctttataaggacaccaatccccctcatggggactctactttcatgacctcatctaaacctaatagccttccaaaagtctttcaagatgtcctcatggctcaggtcactttaaccatattatgacagagggagggaacgctaacatagttcttgggaaatcctgtgaatgtacacctttgctcatcccagaactgtttctgatc

SEQ ID NO: 282736 - DNA, 1000 bp, Homo Sapiens; identical to SEQ ID NO: 114940
  misc_feature (83)..(83): n is a, c, g, or t

SEQ ID NO: 282737 - DNA, 1000 bp, Homo Sapiens
tttcagtgtcctatcttccagttttctgattctctcttcttcctgctcaaatctattgttgtgctcctctagtgaatttttcatttcagttattcttttcaactccagaatttttattcttctttgtaatttttgtctctgttgatattctgattttgttaatcattgtttttctgatttcctttacttaattgttcatcttttcctttagctctttgagtatatttaatacagttgttttaaagtctttgttgagtaaatccaatgtcttggctttctcagggatgggtctatcattttttcttgatactttgaatgggccaagttttctttctttcctttttttttttttttagtatgccttgtaatttttgttgttgaaaaatgggcatttgactgttataagaggtaactccagtaatcagattctcctactccagagcttactgttttttgtttcattgctatgttgaagactgtagtactccatttgagacatttccaaactttttttttttttaagacagtgtctcgctgtgtcaccccaggccagaatgcagtggtgtgatcttggctcaccgcatgctctgcctctggattcaggcaattctcatgccttagccccctgagtagctgagattacaggtgtgtgccaccatgcctggctatattttgtggtgttagtagaaatgtggttttgccatgttggccaggctggtgttgaactcctggcctcaactgatccacccacctcagccccccaaagtgctggcattacaagtgtgaaccaccacgtccagcccaaactaatttttcagactattctttgtcacgtatgattgccaaagtctttgttcctttagtgcatgttcagttattgttttgacagagatatatgataccttcaaactttttgtcacactaataagattggctggttgcttttaattgcactggacaaattggagaaagaaaaggatgactttagtgatttgaattc

SEQ ID NO: 282738 - DNA, 1000 bp, Homo Sapiens
aggttgtgactcttggtaaacgagaggaaattaaataaagcagaccttatgtttctcagaatctcagggccctaccactaagggcttgccgtctgtaaacaggggcacagttcccaagcgtcccagaggtattcagcactgcagcccccgtcagttccagcaaccggtgcggaatgcgtccccacgtgggacggttatgttcaagtcatgccacgacaggacggtctgtctgacagtttgttcttggggtgattccactgtttcacagatgatcccactgtttcctagagtttttatggagacgtaaccaaaataggatattgaaagctctgtttttctttcataaataatttttttcacatgtaaacatgggagctatttatacaaaatccaaaacgaccctggaattttctttatatggactatatatattctaaaggaagtttaaacaaaatgcataaattaattgttaagtagcatgatgatgccattacatcacaatgcttacatggcagggaatgtgattatctaaagctatgtaaagtcttttaaaagttggtgagcctcatttgacgcatgaccctagaaaaagcacaattattttctcactctttcatttcaccataaaccttttgttaggacaccttatctgaatctcagaacggatcttggagcctaatcggtgctcctcattacctcccctaccttcagagaggaaacgactaagttattatttgagtcatgagcttaaatgaatgaatgtgaatgaatgttcccagcaccactggttactgtgtcaagaggagtcatttaaaacaacaaaaacttaccaaaatgacctatcaaatgtagatttcatgtgacataaaactcactagcaatgtctttttaagctcctggctaagcgctccagtaagtttccctcctttcccaggtcactgtggtttgcttttaaacatcttctaaaattcatagctgtgtgaataattacgctaagctt

SEQ ID NO: 282739 - DNA, 1000 bp, Homo Sapiens
cacagttctttaaatagggatcctgtggggcggctgcaggggacgggggttgaggggtggcagggacctcattcagttttagtttagttgaagtaactaagttcagatactaaaatttcaaaaataagtatttgtttgccagaactatgaactcatgtatactagaaataactagttagctaaaatcatgtttaagtcctttacttattttaaaataacgcatttgaattttattatagatactcccttaacaatgtgaaactagtacacaaactttctggcgtttctgattgatagaccccaggaattttgaagacgacgtaaattacttggaaatcctaatttaaacaacctgcgttttggtattatatacttaacagacaaatagcttaaaattaaaaaatccctaaagtagaattgtcgttccttttatctgtatattaactttaacttcttttaacatagggtgtttaatgactgtgatgattttcacctagtatggagtacataaatatatagttgtgacattctgtgttgaaatattggcatgttaacccatttgtcctgtttaattaggaaataaagacggtagagctagtcggaaaatgaatagttaatcgtggaggaggagaaaacatagctcagtactttgactagaggcagctgggaaagtgacgtcctgtagcatttgctgttctagaaagtacagagacacgtagtgaaaatgggaggatctagaaggaggctgtctcctgtgtagtgtatatttatctgtaagtgagccgttggggaaggattgaatacagagacgctgtctgcttgctgccttaagacagctagctgaattgctgattaacttttaaaatacccagcttggtttatttttcttagaatctgttgctaagactggggacgctgttttcttttacaaagggaaatctaagttaatttcaaggcattcgaaatggggaaagactattattgcattttgggaattgag

SEQ ID NO: 282740 - DNA, 1000 bp, Homo Sapiens
accccctgtggcaatgagggtggctgaagggctcggcttgtcggtggggcagcgagagccgggtgcacgcgccggggaggtagccaacagccgttgggacgcgacgctggttcccaggggagagccagccgctgccgcggcactggttcagacggccaggccctagggacccaccatggatcctgaacacgccaaacctgagtcatccgaggcaccttcagggaacttgaaacaaccggagactgccgcagccctggcaagtagcggcagcgtagtgagttctgtacccaaggcacagcgcaacatctcagcgaagaccgcaccccggaagcaccccgcagtctcaattcgcagtgcgcagtccgcagccgccgcacgtccccaaggcagtgagggcaccgcaccctcaaggaaagccaccacacgcccacccccaaagcccacactcccaccccccacgccctctgcacacactgaatccaaactcttaaatgagatggcgatcaaagagcgcgtggagggccgagccaaagtcccgtacaaattcagggacagcctcaaacgtttctccttctcgcccactggaatgttgaagatcctgagactggtgagcggagagctggtgagacctagctgggcggatgtggccggcagtggcctcggggaaatgcccacggggtgccagctccagaaaccttccataattcactttgccactcacctttgttttgcctcacctttcctccccaccaccccctgctccccacacactaaacctttcctactaaacttgcctctttttttccctattttttcttttttttttttttttattatactttaacttacggggtacatgtgtagaacgtgcagttttgttacataggtatatacgcgccatggtggtttgctgcacccatcaactcgtcacctacattaggtatttctcctaatgctatccctcccctagtcccccactccctacaggccccagtgtgtg

SEQ ID NO: 282741 - DNA, 1000 bp, Homo Sapiens
atctttgtcctaaagcaatgcttgacatgatatggctctagaagtagtcattggatgggtatattattttataaatgagtaagtgaaataaagcaggtcatacagttgtgtcaacgaattatccgtgtatcagaagaacaaggatgatggggattgattgaagctaatgttttcttaaatattttcagattgatttctgcatgtcagaagaacttgggtagcaagtggatgcagcttaggttttccatttaaatattgttttctatttgacgtaacaaacttgcttatagtcgtggcttagaaggtgagtgatattctccagggagtatgatttagaggctggaaagggttattgaaaatagtccttacaggcttagtttgtgtcagaatttatagtatttaatacgatgttaatatattattgctatttataagtgttttactgaacatcctagaaatagatttttttttttttttttttttgagacggagtctcgctctgtcgcccaggctggagtgcagtggcgcgatctcggctcactgcaagctccgcctcccgggttcacgccattctcctgcctcagcctcccgagtagctgggactacaggcgcccgctaccacgcccggctaattttttgtatttttagtagagacggggtttcaccgtgttagccagaatggtctcgatctcctgacctcgtgatccgcccgcctcggcctcccaaagtgctgggattacaggcgtgagccaccgcgcccggccagaaatagattttatagttaaagcgatgttcttcaagctggactttatgccacaaggggagtgtattctaaaggggaagaaaaggattgtggtttaaaagaacaattgtaatatttccttcattctgaggtgtatttttctcacattttcatattgtaattaggatacctgttaacattggtgtacatttaatgtagtagtactttttctccttttgccctgcaagttgtcactaa

SEQ ID NO: 282742 - DNA, 1000 bp, Homo Sapiens
ttaaaatatttaacgtagacttaccctatgacacagcaatttcactcctaagtatatacctatgagaaattaaaacatgtctacacaaaaaacttgcacataaatgttcatagcatcgttatttataatagccaaagagtggaaaaatgtccattgagtaatgaatgaatacgtaaaatgtggcaaattcagacaacagaatgttatttgacaataagcagaaatgaagtcctaacacatgctgtaacatggatgaagcttgaaaacatcatgctaaatgaaagaagccagacagaaaaggtcacatattgtatgattctatttatatgaaatgttcacaataaaaaaatctatggagacataaagcggaccagtgcttgtcagtagttgggggagggggttataaggagtgactactaatgggtatggggttcttttttttgggataatgaaaatgttctaaaactgatgatggtgatggttgcacaactctgtgaatatattaaaagccattaaattgtacactttacatgagtgaattatatgttatgttaactatatcttgataaagctgttacattaaaaaaaagaaggagatcaaagtagtgtgatgatccatggaggtcatgcattctggcaactgtgtcagggaccacatgacaatgaagcaccagcctgaggacatccagtgctgcacgcaaccagccagatgtcctcctcatgtccagcactagcccagaatcgtgcatacagaagacacttcactagtcaatgaattcactgaaagcaataaagcatatgctctcaggtctgactgatggattcaaactccagatcttctattttcaactgtgtgatgttgaccaaattccctcatcctcattctctgtctcagtgtcttcctttataaaattggaataatggcagtttttatctcctaaggatatttagagccttaaatatatgagtcaaaatatgcaaagtagtccctggcactcta

SEQ ID NO: 282743 - DNA, 1000 bp, Homo Sapiens
ttctatacaaacaccaatgggttccatctttctgggctcctgattgctcaagcacagtttggcctgatgaagaggatttcaactacacaatactatcattgtcaggactatgacctcaggcactctaaacatatgttttgtttggtcagcacagcgtttcaaaaagtgaagccactttataaatatttggagattttgcaggaaaatctggatccccaggtaaggatagcagatggttttcagttatctccagtccacgttcacaaaatgtgaaggtgtggagacacttacaaagctgcctcacttctcactgtaaacattagctctttccactgcctacctggaccccagtctaggaattaaatctgcacctaaccaaggtcccttgtaagaaatgtccattcaagcagtcattctctgggtatataatatgattttgactaccttatctggtgttaagatttgaagttggccttttattggactaaaggggaactcctttaagggtctcagttagcccaagtttcttttgcttatatgttaatagttttaccctctgcattggagagaggagtgctttactccaagaagctttcctcatggttaccgttctctccatcatgccagccttctcaacctttgcagaaattactagagaggatttgaatgtgggacacaaaggtcccatttgcagttagaaaatttgtgtccacaaggacaagaacaaagtatgagctttaaaactccataggaaacttgttaatcaacaaagaagtgttaatgctgcaagtaatctcttttttaaaactttttgaagctacttattttcagccaaataggaatattagagagggactggtagtgagaatatcagctctgtttggatggtggaaggtctcattttattgagatttttaagatacatgcaaaggtttggaaatagaacctctaggcaccctcctcagtgtgggtgggctgagagttaaagacagtgtggctg

SEQ ID NO: 282744 - DNA, 1000 bp, Homo Sapiens
gcaatgggccagaggcctaggccccaggctgtaatcttaatttgattatagaacctgaaacttcataagtgtcattctgtatctgggtctaaaagtgaaagtcgagtcccaccgatttccaagagttgtgaaaaccctatgagctaattaaaagcagtttgaaaagcagctaacatttgtatgatgaagataacattggctttcattcaggccgcttaggtgcacgcacttgggcaaggttttaaacttggattctaattctaaagtacgtcgtgaggtggacatctctacttggaggaactacatacactttaacttagtttctctaaaactgaattaattctactttactactttagaccttcctaatgcttcatctttggtgagtggctccttcaccttcgatgtcctctcgacctggtgcttcagtgttctatatttcaaataaccattcctgtgctcacactattgaagacttgcagagatgacttcaacagctccagctactcaaaatttagactgttacctccaaatacattagagtcaactggcaagtcagcagagggacttttaaacaggtaggacaggaaggtttttatttcaagaccatgccctagcagccatctgccctgctttctgtattcccccagctgtcttcccagctgtgctctaggtcatgtgtgcaaacgcttagtggccaggcaggtcatggaaatgagtgaagcagccaggtgactagcagtggagggtgaggaggaacagtgctgaactggatgaaacggcaggggctccctttgagctgagcacagtgtctgctcaaatgtcactaactgctggttcagaaaaggagacagaatattgcctcattgcctcaggaaaggccagaggtccagattcttctcactcctgattttaaaacgtgataaatgattcaaaactgtttcaataccatgcgggccacccataccttggcagacagatccagctcataaacctcagg

SEQ ID NO: 282745 - DNA, 1000 bp, Homo Sapiens; identical to SEQ ID NO: 114941

SEQ ID NO: 282746 - DNA, 1000 bp, Homo Sapiens; identical to SEQ ID NO: 114942

SEQ ID NO: 282747 - DNA, 1000 bp, Homo Sapiens
ccgggccggggtcactcaccggcctcgctctggttgtagtagccgcgcaggttccgcaggctctctcggtcagtctgtgcctgggccttgtagatctgtgtgttccggtcccaatactccggcccctcctgctctatccacggcgcccgcggctcctctctcggactcgcggcgtcgctgtcgaacctcacgaactgggtgtcgtccacgtagcccactgagatgaagcggggctccccgcggccgggccgggacacggaggtgtagaaatacctcatggagtgggagcctgggggtgaggaggggctgagacccgcccgaccctcctcccggcgcggctcctcaggtcctgcgcccccgcctgcggtcccctcgctcctcccggcagaggccatttccctcccgacccgcactcaccggcccaggtctcggtcagggccagggccgccgagagcagcaggaggacggttcggggcgccatgaccagcatctcggcgtctgaggagactctgagtccgggtgggtgcgtggggactttagaactgggaccgcggcgacgctgattggcttctctagatatccaatacccaatgggagtgggaagtggggacgcgtcacgagtatcctggaagaaggacccgacacaagttgggagaagaagtgaaactcaggggagtggggaatccccaacgctgcgcctccccattgcagacgcggccctcggagcctgagaccctgagagccccgtccgggacctgggacttcgtcctgatccctcttctcctacaccaagcctctttgtcacactgtctgcctgagtcctggacaaggatctgtctgtggaaaccagggagagacccccaggctgcgcccagccccttccccttcacttctcgtcctggaatccctgtccctgaactggactccctgcctcccactccttacctctcctcttggactcttgtgtagggaaactgagcacggggaacttgatgccaga

SEQ ID NO: 282748 - DNA, 1000 bp, Homo Sapiens; identical to SEQ ID NO: 114943

SEQ ID NO: 282749 - DNA, 1000 bp, Homo Sapiens; identical to SEQ ID NO: 195944

SEQ ID NO: 282750 - DNA, 1000 bp, Homo Sapiens; identical to SEQ ID NO: 195946

SEQ ID NO: 282751 - DNA, 1000 bp, Homo Sapiens; identical to SEQ ID NO: 206338

SEQ ID NO: 282752 - DNA, 1000 bp, Homo Sapiens; identical to SEQ ID NO: 206339

SEQ ID NO: 282753 - DNA, 1000 bp, Homo Sapiens
tctcctgtctgcacctgtccggttactacttggccaccacgcagccttggctcctacagcccaaaagggagaatggagggaggctccaggctttgctggaggggcctgggtgagttctgtttgctccttgtaccaccatccaaatggtgttatcaaatctcttagattccaaagaggttgaataattaatgttcaaaggcaagagggcaaggcattttttaacactttttaaaataaaaatttataccacaactttaggctattgatgtgatgtgtcactgggacagatgcggattctccatggtgcctctgccactgaggccgcatttcctgagcataatccccttttaccctcccgctgccaagcaggagacgggatgctgatggtaagaacacctccctgccagtgcattttggcgctcaggatgagaggcctgcagcactgctgtccccgcgcctggctctggggccttcccttcacccccactctctcagcaccatggtgagaagaaccaagtttgcctgtgaggagttaggtacaaggcccaagctccacaagaacactgctgttaatgggcagagccaatgacgacacagaccagcaaagcagaaccgagactgtccgcacttggttcggaaacaaatactcacaccctaggttattgctggtaacggagacctccttccagctcccacagtcctgcttggtagattttctacttgttgctacaatcatcatctttgctttgggtctgtcacgtgaggttagggtttcaggaataaaatgtttaataaatcacaaaatattttaggcagtattttgatgtacattttaatgtgtggtatttatgaaagggaaagggttttctaattataataaaggcataaatagtgtaaatattcaagattttagaagcagctgatttcagagaaatcactgaaaggttaatgctactacagtgatttttacaatatgcaataatccaagtatacgaccagg

SEQ ID NO: 282754 - DNA, 1000 bp, Homo Sapiens; identical to SEQ ID NO: 114944

SEQ ID NO: 282755 - DNA, 1000 bp, Homo Sapiens; identical to SEQ ID NO: 114945

SEQ ID NO: 282756 - DNA, 1000 bp, Homo Sapiens
tctatatatagtactaatggatttggtgtgcttcccccttagcgtccccctccctctgctcctcctccttcagcctggtctccccctcttctctgccctccacccccgtctctgcactgagatacataagaaacaagggtagtttactgtctgttttgttttctgggttttcagtgtcctagcggaatgcaagtaggcagccagcccgtctgttccctctccgccccgccccgccccgcccccgtcactgcgcttctgttataccatctttgcctgactctctccggcttctccattgaatggctaatgtgtatgtgaaataaagaaataaagaaaaacaaacgcgagagcgcctgacccttcgctaacgcgaccgtgcgggactgggtcggggtcggtagggtgcgtccccgacttggattctgcgcctctgtccaagcgccgggagcgcagcagacgccgtcgacgagcgtctgcccctgggtctcccggaggggccgacggtgagaaaagcgaagcctccccagcccctcctggcctccccccgcgaccccagcccggaaaaaatgaggcaccacttgggtcctatgactgctctgccatgttgctttgccgacctcgcccctgggaaggggaccgggcaaggccacttccagagggttgtgggtgatttttttaagggtctgcgggtcccttgggggtcgatgatcacccttccggacccccgagaccttgcccctgacgtcttcactggtccttcttcgggggagttcgctcccgaacatgcgcagcacgtccactgccctttccttgacggccctgggccgagtccctggtgccctccggctcagaggtgctgccgcgtgcggtcaccgcacctctgggctcaaagcggtttgctccatcttgatgggccgggccgctccaccggggctgccgtcggggtcggccgggggcgcgggctgcgagcgcgctgccgcctcggccctgcgtccggatc

SEQ ID NO: 282757 - DNA, 243 bp, Homo Sapiens
gattcaaaagttttggttgttaagtaacagagttgaattatctcttccagtttcatagagtaatagcaatgaacactccaaagcagtgcaagagaggaaattcccttctgtggggcgaggaaatcctgctgacagtaaagccagtggtaggctttcacacagatatttgaatccctgaccctctgtttgaagggtaggaattttaaagtttcagtttttatcattttacataatcaaatttat

SEQ ID NO: 282758 - DNA, 1000 bp, Homo Sapiens
aatcagaagacaagtccagtcggagccttggttttttggccacgggcagaggttggcttcctaaggccagagagaagctctggaggataatcacatggggtctctaatctggcatcttctgctgggggcgaggtgggttgtagagtaagagcaggacctgaaggggtcctcagaggctgctggagggctgagaaggggatgcagacactcctgtcctcagacttcacttccttccccaggattcttgagacgcccctgaggcacatggctcccgtgcaggagggcagcagccgtacccctcccagcaactacagagaaggcctgggcactgaaatggtgcctaccttctggaatgtctgtgccccaggtccttagaatgtctgcttcccgccgtggccaggaccactattctcactgagggaggaggatgtcccaactgcagccatgctgcttagagacaagaaagcagctgatgtcacccacaaacgatgttgttgaaaagttttgatgtgtaagtaaatacccactttctgtacctgctgtgccttgttgaggctatgtcatctgccacctttcccttgaggataaacaaggggtcctgaagacttaaatttagcggcctgacgttcctttgcacacaatcaatgctcgccagaatgttgttgacacagtaatgcccagcagaggcctttactagagcatcctttggacggcgaaggccacggcctttcaagatggaaagcagcagcttttccacttccccagagacattctggatgcatttgcattgagtctgaaagggggcttgagggacgtttgtgacttctggcgactgccttttgtgtgtggaagagacttggaaaggtctcagactgaaatgtgaccaattaaccagcttgtttgatgatgggggaggggctgagtgtgcaatgggcccaggtctggaggggccacgtaaaatcgttctgagtcgtgagcagtgtccacctgaagggtcttc

SEQ ID NO: 282759 - DNA, 1000 bp, Homo Sapiens
agagtgctgtgactttaaactgtaaaatcaaaataagtagcaaaccagtggtttgtgggtaggatgtgagtctctggcgagtttctttttaactgcatggagttcctaaggcattttacacagattgcatttgaaatgccagagttgttgcatagaaagttggacctcgggctttcaaaaaatagaaagagcaggtcttggaaggctacagtcccagcaagggtgatggctcctttcgtaattctcagttcctgctggccaaccttattcattagaccatgggcttggctcttggagacagtcaatgttttccgtagagaatattaccccgcagtggccaggaagcaaatgccaatagatctccaaaatatttgatcataccaatggattgcctagaatatcctgtggtctttctgttgcctttgagagaacgtcatggaataccaggtgggggtggggcaggtgagctcagggtagcaaggattctgacatagcaaagggaaattctgtatgggacagactcaaaggtcccagatgccctctcaaatgaagatggcaatattccaaatattcattgatccataagcatctcacggcaggtataagatctgggagaactcatcttattccatccccaggaaacaaacatcccttcttgggcaatgtctccaggccacgcttctcatccgcagagcaggtgcctgttctccccgggccatctgacaggggagatagaaaatctgcaagagaaagctcacagcacggggctgagccctggaggggaagcacagaggcctgtattctaattcactgatgatcaatttgcaagttctttttctcttagttcccttagtttccttccaggtaatgcagaattccttgaagcttctctaggttgttttactttgcaatctttggtcagaaggtctttctcatgttaacaggtgagttaaggtaagagccccagactcctgggcttcccccagcccactccatgatc

SEQ ID NO: 282760 - DNA, 1000 bp, Homo Sapiens
gatagatggtgttgtgtgggctgtgctcctgttacgcacctgccatttgtgccctcaggaataggtggcgttgtgtaggcagtgctcctggtttctgctggagaataactggtccattttgaccttctccaaccccacagtttttacctctcttggactggtgcaggggagcatggctggaggccagccaagtagacattaattcttggtctgtccaacccttgggaaatgctcctttcagcagcgcctccaggagaatgtcccctaattcatagggtcccaccctttaggctttcttactacctactcctggacacaatggctgatccacacgtgagcactggagccatttgggacaatcatggaatcacccggggattttttgaatggagttgatggtgaaatatacagtctctgtgctatcaataaatatcctcctgttctggccggagtcatcctgggagaatggggctgtcatgcggggaggcagatagtgggctcctggtgatacctgaaccttgagcccttctccactgccatttgcttctgtcggcacatccacgtccctcttgaaccacagcaaccaggaggaggccaggcaaagaccctgagagggaggtgaagtggggcacagttgaaaaaacaacacgatttggtaacacacttcaacattgatcccaagggaaggtggattttaaaaaaacatataagaacaagacctttgccactgctcttgtagaagtggaagaacaggacagtggggccaagtgagaggccacctaatccatgggtagtgcctgcgaggcgtctgcaacattgacctggggctctccccactgtgggtgtgtttcctgtgagttcaagggttagtggaaaagaaaacagcaaagcaaggtcatgttaactggaaaatgtgattatcttcaaagaggtaagacaccgtgtgggcttctccagctcacctccaaagaagacacattcattcagatttgcctggatc

SEQ ID NO: 282761 - DNA, 1000 bp, Homo Sapiens
taccacaaaccagccaaaaggagagttactggcacttgtaactatacttggagaaatgggtaaattcctgggtcttctctagataatgtcataaaggattacttttctttcacattttatataaagtctttggatggtacagagagtgtcatcacaagaccaagcacacaggtgagactgtgtttctcatatgcacaacctaccaaatgttagcattgtcaccctgacccatggacagtgcccactggagagatcctgaatttcacaggtgcatgcagtccacagtaaaaattctgttacatgtgatcatgccactacagttaacatggtgactaatttcaaaatccagctcataggcaggtgaagagtctcttcttgggacccagccatttggagagatgttgactcaaatacatggacttaggttcacaggtatgattatgaatccataccaggaagaaagtttcagagaaaattgtgactttcatgaatactgtataaagacctcagatggtacagagagttttataatgaggcccagaacacaggtgacattgtgacacatgcacacccagccgacagtaaagattgtcatctttccacatgaatacagctcactgttgaagttctgattctcatatttggaggtagccaaaagctggaaaattgactctcatacatggatttgggctatatgtgggttgatgactctcagaccaagattcaacataccgctgaggctgtgactccactaaggggacacagtccacagcatagattgaggctcttatgcatgtattcagtccacctttgagattgtaactgatgtactcagactcaacatacaaaaagtgttgactctaatacctagaaatgggacatgtgcaggattgttaattttatccctacattttcctgcaactgtattgcaacatacacctctgaccagcacctgagtaatttgattctcctccctggtgcccagcccacagattagatc

SEQ ID NO: 282762 - DNA, 1000 bp, Homo Sapiens
ctagcggaaaatggccgctgcggagaggggcggagagcgcgccgcggccgccgccgggcgccttgaacttggagccgggcgggcggccgcgctcggcgccgcgcaggagcagccgccccgcctgccctcgcaccgcccccgccccgcccctcggcagacccccggccccgctgccgcgcgcgcggggtccccagctgggagggacccccgggtctcggcccggcgcgccccaggccctggagcggcggtggctgcacttggggttccggtgtccggtcgactggcgtcggtgtcgtgcgcacctcgaggggtgcgtgggagcccctgcgctccgtaacgggccggcattggcatctgggggagcgtctggggtgtgcgcggcggggtggtagtgtacctgccttggggccgcgggtcccggcgcgtcggctccgccgctttctgtgtccgcgtgtgtctgcacatccacgtgctggcgcgtgttgtgttgtgagcgccgcccgcattgtgcggctgcgggacacttgtgtctttggataactgggcgactgtgcgcgcgtccctgcgggacggtgttgtgaaactatggctgggctgcgtgtccgcggagccgcgtgtccctgggtgaccgtggggtgtccccgtgtgggtgtgtggcggttggggggggtcgccagggagtggagaactgtcgagtggccgcgttccaggggacagttgggtgccgcttgctgtgtgcgagtgactggcgctgagcctccccctagggaagggtctgccttccactcccggcctcgcctcccccagttccttttttcctgtaactggggactgcctgggcggcggaggaagagcgctccctccaccttttcaaaactctgtccctttatctttcccctacgtcccctccacttcccccagccttcggggtcccccatccgcttggcccgagggggtcctggctggaggttcgggcgcgaggtggcgccgggacgcgatc

SEQ ID NO: 282763 - DNA, 1000 bp, Homo Sapiens
attttttccttttgtgttctgtcaccaactgaagtggctaaagagctttgtgatatactggttcacatcctacccctttgcacttgtggcaacagataagtttgcagttggctaagagaggtttccgaaaggttttgctaccattctaatgcatgtattcgggttagggcaatggaggggaatgctcagaaaggaaataattttatgctggactctggaccatataccatctccagctatttacacacacctttctttagcatgctacagttattaatctggacattcgaggaattggccgctgtcactgcttgttgtttgcgcatttttttttaaagcatattggtgctagaaaaggcagctaaaggaagtgaatctgtattggggtacaggaatgaaccttctgcaacatcttaagatccacaaatgaagggatataaaaataatgtcataggtaagaaacacagcaacaatgacttaaccatataaatgtggaggctatcaacaaagaatgggcttgaaacattataaaaattgacaatgatttattaaatatgttttctcaattgtaacgacttctccatctcctgtgtaatcaaggccagtgctaaaattcagatgctggtagtacctacatcagtcaacaacttacacttattttactagttttcaatcataatacctgctgtggatgcttcatgtgctgcctgcaagcttcttttttctcattaaatataaaatattttgtaatgctgcacagaaattttcaatttgagattctacagtaagcgttttttttccttgaagatttatgatgcacttattcaatagctgtcagccgttccacccttttgaccttacacattctattacaatgaattttgcagttttgcacattttttaaatgtcattaactgttagggaattttacttgaatactgaatacatataaatggttatataaaaaaagacattttgggttaaaaaggaaattagagtt

SEQ ID NO: 282764 - DNA, 1000 bp, Homo Sapiens; identical to SEQ ID NO: 206970

SEQ ID NO: 282765 - DNA, 1000 bp, Homo Sapiens
tgcgcgctgctgcccaagccgggcttcctgggcgcgggcggcggcggcggcggcacgggcggcgggcacggggggccccaccaccacgcgcatccgggcgcagcggccgctgccgccgccgccgccgccgccgccgccgccgccgctgggggcctggcgctggggctgcaccctgggggcgcgcagggcggcgcgggcctcccggcgcaggcggcgctctacggccacccggtctacggctactccgcggcggcggcggcggctgcgctggcgggccagcacccggcgctctcctactcgtacccgcaggtgcaaggcgcgcaccccgcgcaccccgccgaccccatcaagctgggcgccggcaccttccagctggaccagtggctgcgcgcgtccaccgcgggcatgatcctgcctaagatgcccgacttcaactgtgagtaccctgcggcccccgtggatgcgcgtggcgggagggcctcgcgcatcctccaccggcaccgcctgcccctctctgcgcttggctcccagcgagcgggggaagagctgcgaagccgcctcggctctgcccggggcctgcgaggactcgcccggacccccaggcatgagacgggcagcgaattattaaaatggccatgcgcaggccttgccttctcttcctctcttaacgggaaggggcagttggaggtgtgagactgagatctaatgattaacccgaaggctgcaggagaaggaagtcgccgggggaaggcgagccgagagcgccctgaattaggcaggcccgggaatgggggtcagggcttatcaccggggaaaggaacttgggccaggtcccccactggggcgttagagagacccgcggcccctccagggagagggagtgcttcaggagcagcaaacaagagaaatgggcttcggaggcccggggaggcaaggccaaggcccagggaacccccggctcttaccagggcgctgccctcctctggaagggcgttggatc

SEQ ID NO: 282766 - DNA, 1000 bp, Homo Sapiens
taatgtctgttattaatgtagtgataacatatttgaaattactgatcttgggtattagagccttcttcatttttccttgataaatttcaccagaaattatctggcttcaataagcagtttaagggattttacttaatttatttcccttatttaatatttgtttttcttcattgcttttcttgcccttattatttgcttcattctgctttcattgcttttacctacttaattataatttaatttgttgacttgggtgattataaatattcagatatgtttccactttacagatttaggcaacaaaatttcctcaaagaaacttatagaaaaaaatccaataatatataaaatgatatatcacgacagaagggcttcttattagaaacaaattggttagttaaatatttgaaactcatagctgcaaataatcacattaagagaataaagggaaaaacaaaattgtctcaaaaaatgtataaaactacataacagaattcagtatgcagtcatgatacgtactctcagcaaagtaggaatacaaaaaaatgattaatctactacatttatctgcaaaaatgacaaaacgctcatacatggaaattaaagaccatcctttgtggataatatggcacaggatatgttatgaaaggctgtcctgccacaacacagcacagatggggttgaaagaaaggaagggaaacaaagggctgccatgaattaaaccagtagagaaaataaaagcctgggtcatgcaggggacagtgtcttattaggccagcatcaggactggttgaagtctggcgcttctaacacagtgggaaaatgagcatagtaatcacaataaagaaagacatctgaaaggtgctaacttagcctcggatcagaagtgctctctgctaatgccttgctggtgaaaagcgtatccagtgtaagccctcagaaatcccagaaaacaaagaccaaaagaaacggcgccttgtcaaccgaacgaattgaaaaa

SEQ ID NO: 282767 - DNA, 1000 bp, Homo Sapiens; identical to SEQ ID NO: 206340

SEQ ID NO: 282768 - DNA, 1000 bp, Homo Sapiens
atatgtaatagcactagtacccagatactaggaccccgattaggattggttgttggtattagaacgagttttcctttctagaaactactcagtttttctaactcaagatcttagtttctcattacgatgatattctcaaatgcccaatgtacaattctctactgctgggtatgaaatagcttcttttggaaatgatgccacagctgacctaactctgtggattaaataagtattaattcattcaatgttaaacatgtatatttcagaactgtccttgagttcatattcattattttaattaatctcctgtagtaggttcccacagtggatctcataaaaatggaaatttaattaaaattaaatatcaacagaaaagcattaatctttttaaataaatttcccaatctatcaattaaataacattattgagcacctgctatatcccagggaacatgctgggtagtacaggattcaaaatgattaaaattcacctcgttatttcaaagaactcacaaagtaaaaaactacttacttagtaaaagagataaacttgtactagtgattgcagactcaaaatgggtgatgattgtggcttatctagtgatatttctagtgaactggagatggcatgcactgtttaacctggacaactacttcgctcaaggtgaataattgtcatgggggaatattgtatccagtattgccatatgttctgatttgttaattgtgaaatgcactgatttttatatgttgcgaggagataaaaaattatttaggcagtgcagctcaaagtaaactccacatgctaaagaaataaaaattttgaaaagtgcaacagtggaagcatgtacgaagtaaagtggtggcacaaagtaggtagtatttaacctttttttttttttgtatgaatgtggtataggaagcttcttggaaaaaagttaaagtaaatctgaggtttacaaaactagaaaacacacttcaagtagaaggaatggcattt

SEQ ID NO: 282769 - DNA, 1000 bp, Homo Sapiens; identical to SEQ ID NO: 114946

SEQ ID NO: 282770 - DNA, 1000 bp, Homo Sapiens; identical to SEQ ID NO: 282237

SEQ ID NO: 282771 - DNA, 1000 bp, Homo Sapiens
  misc_feature (249)..(249): n is a, c, g, or t
  misc_feature (736)..(736): n is a, c, g, or t
  misc_feature (940)..(940): n is a, c, g, or t
ctgagttcctgtgacagacaaccaacctgcaaagacgaaaggaggagctgttaggaagagcaaggcaacagaaaaggaagaaccagcatgctgattatgttcaggagagtgtttctacgctgaatttaattgccaagattaccaattctaaagaagaggaggactcttggacaagtttttagaagttggtttggagctggggtgagagcctggcctaatggagacagctctggattgggagtcacttanacctacattctggtctaggtttggctcccaaaaactgggaaggttagttaggtggccactcctctctcttcatggtctctctcagcttgaagacaatttacagtctttgactaagcatccacactggaagaacaagatttggtttctgaacattgggtcttagtccttaaaataacttgcaacctgttacctcttcacttactcccatcgccaccacaagaatcctgtgtgtttttgttttgtgcatccagtctaaaacgggtctgcttttattcataggcttttgttttcagtggtttttgttgttgcatttttccctagataaaatgttttttctataagacactgcttaaaagagtccaatgcagtatgaatttgtatttgtgtttaacttttgtgcttaacagatctgccatggctgaactctcagttgcttaagcaaaattgctggggcttattctaggttcctttatttgtcattgtcacntcccattccagttatcggcaaattccatcagctgtctccgagacatcttaaatctgtttacctccctccatgtccactgctaccactctgtccaagctattatcatctttcacctgaactcctgcactaatgtttgctgtccttgcatccactcctgccctcctacaatcactgacggcagccgcagggatctttataaaacgnaaatcagataatgtcacttccctgcttaaagccctttgagtggcttcccattgcacttag

SEQ ID NO: 282772 - DNA, 1000 bp, Homo Sapiens
agttgtgaccagtatgtctggacgtggcaagcaaggcggtaaagctcgcgccaaggccaagacccgctcttctcgggctgggcttcagttccccgtgggccgagtgcaccgcctgctccgcaagggtaattatgccgagcgggttggagccggcgcgccagtgtacctggctgcggtgctggagtacctgaccgctgagatcctggagctggctggcaatgcggcccgcgacaacaagaagacccgtatcatcccgcgtcacctccaactggccatccgcaacgacgaggagctcaacaagctgctgggcaaagtcaccatcgcgcagggtggtgtcttgcccaatatccaggccgtgctgctgcctaagaagactgagagccaccataaggccaaataaggagcgaggttgtgaaaactggaaaacaaaggctcttttcagagccattctacactgtcttagagaaagctggacacagtcatgtttgtttcacttcatgtttgcttcgctagataacattgtaaagcgcttctttcgcggttgggctggagcaactctttacaatgtttctaaattaacccactggaaagcaatgaagacccaaaagttgttgtaggatactccggagaagcttattcagcaggggtaataagtgaaatcaaacgtacaaatccctgaaatctatttactaattccagtggtttttttttttttttttttttttttgagatggagtctccaacaggctggagtgcagtggcgcggcgcgatctcggctcactgcaacctccacctcccaggttcaagcgattctcctgtctcggcctcccgaatagctgggattacaggcacacaccaccacgaccggctagtttttttgtatttttagtggagacggggttccaccatggtggccaggctggtctcgaactcctgacctcaggtgatccgcccgcctcggcctcccaaagtgctgggattacaggcgtgagccacagc

SEQ ID NO: 282773 - DNA, 1000 bp, Homo Sapiens
cctgtaccatacgaagttgcagcaagaagatgctatctatgaagcagagagtgagcctcattagacatagaatatggtgtctccttgatcttagacttcctagcctttagaactgtaagaagtaaaatcctgttatttgttagtcacctagtttagtgtattttcttatagcggcccaaagaaactaagatgcaaaactccatattgaacaggagagagaaaatctaacacatcagatcacatcctttgactgtctttgtgaaggagaattgtaattccgtagcttcaaggaagagagaccatgcccttacatctgtgtgtgtgtgtgtgtgtgtgtgtgtgtgtgtgtgtgtgtgtgaatgattttgttaattaggattttatagggccaagcgcggtggctcctgcctgtaatcccagcactttgggaggccgaggtgggcagatcacctgagattaggagtctgagaccagcctgaccaacatggggaaaccccgtctctacttaaaatacaaaattagctgggcgtgggggcgcatgcctgtaatcccagctactcgggaggctaagtcaggaaaatcgcttgaaccagggaggtggaggttgcggtgagccgagatggcgccatcgcactccagcctgggcaacaagagcgaaagtccgtctcaaaaaaaaaaaaatgtatagccaggcgcggtggctcatgcctgtattcccagcactttgggaggccgaggcaggcggatcacttgaggctaggagttcgagaccgccctgctcaacacaacatggtaaaaccccgtctctactaaaagtttttttaaaattaggcaggcatggtggctcgcgcctataatcccggctactcgggaggctgaggcaggagaatcgcttgaatccgggaggtggaggttgcagtgagccgagatcgagccactgtactctagcctgggcgacagagtgagatcctgtctcaaaaaaaaaaaaaaaattatttgc

SEQ ID NO: 282774 - DNA, 1000 bp, Homo Sapiens
agagtttagggatttttctggggctgtcctccaagccttctttctccaagctgtgtttgttctccatgaggctgcctccctgaccataactgggccaatcacaattgctttcctggaaatgggagactgcgatgctacctggacttttcaggtgatctggggtgatgtaaactcagggagtgtctgtgggcagaaaagggcagggaaagatagtgtgcttagaaagaggagtgacatggatccgctaaatgaagtagaggtgaggaatcagtggccccaaagagagtgagcctgacgaagtcaccaccttcctactcctggtgctggtccctcttggaatctcaggaccttggggaccatcagataccctttgatccttctgctaaattcccccttggcttcagccttttcaaagtaggtttctgtcccttgcaacaaaagaaacccagtcaaaggcagacgacatgaggcatcaagggaaaactaaggaatccagaatgaccagagcaaaggccattccagatgtgggatgaaatagataagacatgcgcctggcccagaaggcaaggccaaaccacaaagggttttgagtgctgtgctaaaacgtttgcattttatctcacaggcaacgggagccctggaagagctttcagcagatgcataatgcaatcccatcgctcccctgagcttgtgtgtgaatgcactgaaaggggtaaaggctcaaggcaggagtcctgttaggaggctagagcagaagtagtgaagacctggacaaagtaacaacaatgggggtggagatggggggcgagttcaagagatctttaagggaagtccagacttggctagcaactggaaggagaatggggcagtgagaaaaactgagggattcaaaaaggattcttcagcccacagcttggatgaatggcttgaaggggcaggtttggggggaagatgctggcttcaattctggtcttgtggtgagggtacaagtagatgtgtc

SEQ ID NO: 282775 - DNA, 1000 bp, Homo Sapiens; identical to SEQ ID NO: 114947

SEQ ID NO: 282776 - DNA, 1000 bp, Homo Sapiens; identical to SEQ ID NO: 207035

SEQ ID NO: 282777 - DNA, 1000 bp, Homo Sapiens
tattcgcctacacaattctccgatccgtccctaacaaactaggaggcgtccttgccctattactatccatcctcatcctagcaataatccccatcctccatatatccaaacaacaaagcataatatttcgcccactaagccaatcactttattgactcctagccgcagacctcctcattctaacctgaatcggaggacaaccagtaagctacccttttaccatcattggacaagtagcatccgtactatacttcacaacaatcctaatcctaataccaactatctccctaattgaaaacaaaatactcaaatgggcctgtccttgtagtataaactaatacaccagtcttgtaaaccggagatgaaaacctttttccaaggacaaatcagagaaaaagtctttaactccaccattagcacccaaagctaagattctaatttaaactattctctgttctttcatggggaagcagatttgggtaccacccaagtattgactcacccatcaacaaccgctatgtatttcgtacattactgccagccaccatgaatattgtacggtaccataaatacttgaccacctgtagtacataaaaacccaatccacatcaaaaccccctccccatgcttacaagcaagtacagcaatcaaccttcaactatcacacatcaactgcaactccaaagccacccctcacccactagaataccaacaaacctacccacccttaatagtacatagtacataaagccatttaccgtacatagcacattacagtcaaatcccctctcgtccccatggatgacccccctcagataggggtcccttgaccaccatcctccgtgaaatcaatatcccgcacaagagtgctactctcctcgctccgggcccataacacttgggggtagctaaagtgaactgtatccgacatctggttcctacttcagggtcataaagcctaaatagcccacacgttccccttaaataagacatcacgatg

SEQ ID NO: 282778 - DNA, 1000 bp, Homo Sapiens
tgttctgccctggctgcctcagccctaccagcactggtcatgtctaaaggtcatcgtattgaggaagttcctgaacttcctttggtagtcgaagataaagttgaaggctacaggaagaccaaggaagctgttttgctccttaagaaacttaaagccaggaacgatatcaaaaaggtctatgcctctcagcgaatgagagctggcaaaggcaaaatgagaaaccgtcgccgtatccagcgcaggggcccgtgcatcatctataatgaggataatggtatcaaggccttcagaaacatccctgcaattactctgcttaatgtaagcaagctgaccatttcgaagcttgctcctggtgggcacgtgggacgtttctgcatttggactggaagtgctttccggaagttggatgaattgtatggcacttggcgtaaagccgcttccctcaagagtaactacaatcttcccatgcacaagatgattaatacagatcttagcagaatcttgaaaagcccagagatccaaagagcctttcgggcaccaagcaagaagattcatcgcagagtcctaaagaagaacccactgaaaaacttgagaatcatgttgaagctaaacccatatgcaaagaccatgcgccggaacaccattcttcgccaggccaggaatcacaagctccggatggataaggcagctgctgctgcagcagcactagaagccaaaccagatgagaaggcggcggttgcaggcaagaagcctgtggtaggtaagaaaggaaagaaggctgctgttggtgtgaagaagcagaagaagcctctggtgggaaaaaaggcagcagctaccaagaaatcagcccctgaaaagaagcctgcagaaaagaaacctactgtagaggaaaagaagcctgctgcattaactcttaaatttgattattccataaaggtcaaatcattgtggacagcttcttttgaataaagacctgattatacaggcagtgagaaacaaa

SEQ ID NO: 282779 - DNA, 1000 bp, Homo Sapiens
gtggtcttaagcaagccccttcccctctctggtgctccaattactaaatgcaaaatgagggtttggccccagtgcttttccagctccgatgctccatggcccagttctaacagagagccctgatcttgaagtggactcactcccctgggctggagcctggtaaagataggaaaagggtacacagtcccatcccggtcactctgccttcctgaagtgctctccttgggtcctctgcaggtgatttgtctacagcaaccaagagcaaaacaagtgaagacatcagccagacctccaagtacagtcccatctactcgccagacccctactatgcttcggagtctgagtactggacctaccatgggtcccccaaagtgccccgagccagaaggttctcgtctggaggagaggaggatgattttgaccgcagcatgcacaagctccaaagtggaattggccggctgattctgaaggaagaaatgaaggcccggtcgagctcctatgcagatccctggacccctccccggagctccaccagcagccgggaagccctgcacacagctggctatgagatgtccctcaatggctcccctcggtcgcactacctggctgacagtgatcctctcatctccaaatctgcctccctgcctgcctaccgaagaaatgggctgcacaggacacccagcgcagacctcttccactacgacagcatgaacgcagtcaactggggcatgcgagagtacaagatctacccttatgaactgctgctggtgactacaagaggaagaaaccgactgcccaaggatgtagacaggacccgtttagagcgccacctgtcccaggaagagttctaccaagtctttggcatgaccatctctgagtttgaccggctggccctctggaagaggaatgaactgaagaagcaagcccggctgttctaggcagaggctctataaatatatatgcatttatataaagatatatgtaaaatctcaaaaaaaaa

SEQ ID NO: 282780 - DNA, 1000 bp, Homo Sapiens
aaaaaaattaacaaatattgcacaaagccagtgttaactattttttcctaccatgatttccttccattaatggtagatgaagggccatttaatacatctttcttggcccttataaaacaacgtccatctaagtacttaagccaataaacatcagtttcttatttttattgactaaagagaatatttgactataagtggttaatttatacaaatgagataactcttagaaaattattaggagaaccagaattgttttaaaagatgcccataactaaagtggtaatattaatgataataaccaatagtcaattgagtgcttactgcaagtacttactgcaattgagtgcttacaaggcactgttctgagtgttcaatatgaattgtatcacataagcctgtcaacaatcctctaaaataaggtcgttaaataaaatatgggatgaccatttgaatttgaacttcagataaatagcaaataattttttagtcccatgcaatatttgggcatcctgtagtttatttgccaaatctggcaaccattctataaagttttgtaaaacttattattcctattttatagatgaagaaattgaggcacaaaaaggttaagcatcttgcccatggtcacacagatggaatggtggagacagaatttgaacccaggtctctcgaccccggatgcctttccctttatcactagacatggtcttttcctgctgtgtgtatataacccagcacatggagctagtctgagatccccctgtaaggtttgctggattagcttgactctgaatcagcaggtggttcccttgcttttcctctgtgatccgagaaaaataaatcctccccaattctgaaaagctgttctcagcagaaagaggaggaaactgtccttggttcttgttctcggactaactgaagtgcctgtgacccatgaaatgctagtttgacaagttgttaacaggtgtacatggggaaaaatcagtttcaatagtcaagt

SEQ ID NO: 282781 - DNA, 390 bp, Homo Sapiens
acctgcaaatctctccgcctgccccagtctcccatttaacacacctaaattggctaaaatctccccataacgtttttccattagtccctcaacttggcatgtaatagtccaagtggaaagaaattcagtggcagttcaacaacacagaactaacagagctctctcctctgcctttgtctgccagggagtactttgtggagatgtactaccggaatgagacgcagcacgagccgtatcccctcatgctacctggctgcagccccagctgtcctctggagaggtttgctgagctggttggccctgtgatccctcaagactggtccacggagtgtatgaccacaaacagccatcaaggtactgaggacagtacagattagtgtgcacagagat

SEQ ID NO: 282782 - DNA, 96 bp, Homo Sapiens
gaggacatttattcataggaaggagggaatgagagggtgtgtgtgtgtgtgtgtgtgtgtgtgtgtgtgtgtgtgtgtgtgtgtgtgtcgtgaatt

SEQ ID NO: 282783 - DNA, 1000 bp, Homo Sapiens
aacagagtgaaaaaccttcttgaagtgttaggaggaacttgagtcataatttgatgttgaatcagagagaacaactgtttgggcttatttgcctcagagtatttgcccagcctctggtaactatcattctattctctacctccatgagagcaactttcttagctcccacatgtgaatgagaacatgcaatatttgtctttctgtgcctggcttatttcagttaacatcgtgacctccagttccatccatgttgctgcaaatgagatgggattttgccatgttggccatgctggtcttaaactcttggcctcaagtgatccgcccacctcagcctcccaaagtgctgggattacagggtttccactgagaagtctgctgaaagctgtattggatgtgggattcagaatgtgttgctggacttcaagataggaagaatctttgccttgatggctgatgacagtaaccaccccatctaccatcatctattaaggatttactgtgtggtcactttacagtcatccaagtaaattttcataatcacctgattacatgggtaccgcttttcagaaaaagaaacagatttctggagggattcagaatccatggctggaagaggtagtaaggccattgggagggcatgcctctcctcagcccacccccaccctgtgtgggtctccattctgaaatttccattcagatgacccggtcctaggcagggaccaaaattccttgtcagctgaggaagtcctgaagaaacatcctgaagatgatgactgcactgccatcgtgggcagatgcagcttccatctacctgagggctgaaggggaaaacctttcacacacgtgaggaaggcgcagctctgtggaaaggtcactagaatggcagcggcagcaaatagggctccaatgcacgtttgcagttaactgggtccaaggagagcatggccctccacagcaagtttgctctatagaataaagtcctgagcttgtttttatcaca

SEQ ID NO: 282784 - DNA, 1000 bp, Homo Sapiens; identical to SEQ ID NO: 114948

SEQ ID NO: 282785 - DNA, 1000 bp, Homo Sapiens
ttgccttcctagcttggaaagactttttaaattctaatttgagactccttattaaaagtcccagcaaagtatactttgaaaaagcttatgtaatgaatcactattcttactatacttatgtaagtaatcaggccaagtgtaacgggactaggcctattttgcaaacaaatcagttttactgtgattatttttggaatgggcatgactataaagagaaaaactatatattagtagaaaactatagcacacccattgttagattctagcctagttcactgtctttgaggttttgttatctacttgtaaactgaactggatcctgaattctaatttcctccagtatctggctatgacttctaccgagctgactacaaatttgagggttcccttgacctcttcctcatgttcaataatttactaggacaattaacgggaactcaggaaaacacatatgattgccagtttataatgaaaaatacaatttaggaatagccaagtggaagagattcatggggcaaggtatgggggctctttcttccatgccttctccaggtgcaccatcatcctagcacctcattgtgttcaccaacccagaagctctctgaaccccaaagtttagaggttagtatggaggttttattacataggtatgattagttaaattgccaaccattggtgcttgaacattatctttactgcctttcttcccccaacccccagaagtggaaaggggtgctaaaagttacaaccctcttatatttgctttcaggtgacaactttcaaagtgagttggagcaaagaccaaacatatatttgcatgaaatcatgacatcctatagtaatatttgattttcaaactctgcatgtataatagttacttaaaatttaaattaaattttaaaatgtaccagttatgcagctgaattttggtactttttcccttggctttgtctggtatctgaatccaccatcatttccctgtacaatatctgccattgga

SEQ ID NO: 282786 - DNA, 1000 bp, Homo Sapiens
acataaattaatgtataactacaaattataaagctgttattagagaaacgacaaagctgtaaagaagagtactgttggaggaagggttatctgttaaagtttggttattagagaaagtctctctgggaaaataatgttaaaaacaaagcatctaaatccaaatggccaggtgggtgaatgggtaggaggatttagactactctaaggaaagaaaatgcaaattagtgttgaggcccagtgggtttaaaaaaataaaagtccttggcatgttcaaggaactgaaagatgagtgcctattggcatgttggagagtaggggtggaataagatattagacaggtagacacaatcaaatcatccaatgtctttacagtatactaaagagttgtatttcacttttagtgcattgtagattcatcgagtgagtcttaaacagataagttatgccagccattatatttttgaatgattactttagctggagagagttggaaggaagtgacgacaaaagttggaacaggttaaaaatgacagggaagggtggtagggacaggggacctctgggtagattgagagacatgactggattttttttatttttatttttattttatttttggccctgtcacccaggctggagtgcagtggtgcaacaaccacagctcactgaagccttgatctcccgggcttaggaaatcctcccacctcagcctcctgagtagctgggactgcaggtgtgcaccaccactcccaactaatttttgtacttttggtagagacaggcttttgccatgttgcccaggatgattgggaactccagggctcaagcaatccatctacctcaacctcccaatgtgctgggactacaggttgagccaccatacccagccctgatatatatttcaacatcattcagatttcatgataaactagatagagttctgagaaaaaaggaaggtattaagaataattcctagattaccggcttgaacaaattcttg

SEQ ID NO: 282787 - DNA, 1000 bp, Homo Sapiens
atgctcagccccccaaaggtgttatttttacttattttatttatttttgtttatttaatatttgatatagtatattgcctagtagtaaagtttctttaagggccttatttgcatttagcttggtaaaatgttgattttcatcagtcatctgtgtgtttgcgtgttttgtgtgacttgggcatgggtcttgtgtgatagtcaactcttggttctttgagctgatttatattttatggctgacaggtgagaaagttaaacctaagtccctttcattctttttttaggtttttatttctttttaaagggagagaagagggtagaagtaggtataaaatagaatttgattacagtaaggtttaggtgcaccttattgagttattaatcactaactcttttactattaaaacaggtccaaaaagaaacacattacctagtggtgtttgccacatttgtctggtttggggcaagaatatgagactggttttctttatctgcctttataatgtatgactcatttgcgtgttagcctttaaacattagaaaaagaaaggaatgaaacagactggtgaaatataactggcagtgaattcttgattaaaaatgtgatgctttctttgaaagagaaagaagccaaaagaggtataattcattgcactgtgtctcaaaaatatttctgctttcaaacaggaattttttccccgatgtctacatctaggatcaatgagaaagggacaaaaacagtccattcttctttttttcagttgagtgtcagtgctatctactagttttgtgtggtgtctgaattcataatcaaaatttgagttttttattttaaactatgcactttttatatgaatactaaaaatgcatgttcataaatgaaatataaagatagaaattaatatcttctatatatttttcctatgattaaatttacttttgtacctacctctaagattaatactgttattttctggcatatagggtgtatttatgtaca

SEQ ID NO: 282788 - DNA, 943 bp, Homo Sapiens
ggcggcggcggcggcactcttgggcgcggtgcgtggtgactgagctacgagcctggcggcgggtgtgcgccgagccccggcccggcccgaccctcgcgtgcctcccaggctccgcacccctgatgctgcgcgggtgctgagccccttcggccgggacgatggtgaagtatttcctgggccagagcgtgctccggagttcctgggaccaagtgttcgccgccttctggcagcggtacccgaatccctatagcaaacatgtcttgacggaagacatagtacaccgggaggtgacccctgaccagaaactgctgtcccggcgactcctgaccaagaccaacaggatgccacgctgggccgagcgactatttcctgccaatgttgctcactcggtgtacgtcctggaggactctattgtggacccacagaatcagaccatgactaccttcacctggaacatcaaccacgcccggctgatggtggtggaggaacgatgtgtttactgtgtgaactctgacaacagtggctggactgaaatccgccgggaagcctgggtctcctctagcttatttggtgtctccagagctgtccaggaatttggtcttgcccggttcaaaagcaacgtgaccaagactatgaagggttttgaatatatcttggctaagctgcaaggcgaggccccttccaaaacacttgttgagacagccaaggaagccaaggagaaggcaaaggagacggcactggcagctacagagaaggccaaggacctcgccagcaaggcggccaccaagaagcagcagcagcagcaacagtttgtgtagccagtctaccaccaccacagcaccccagacagctaggcttagcccctctgccctcccttcattgtactttatcattaaaaatcaacttccagccctgaaaaaaaaaaaaaaaaaaaaaaaaaaaa

SEQ ID NO: 282789 - DNA, 1000 bp, Homo Sapiens; identical to SEQ ID NO: 114949

SEQ ID NO: 282790 - DNA, 1000 bp, Homo Sapiens; identical to SEQ ID NO: 114949

SEQ ID NO: 282791 - DNA, 1000 bp, Homo Sapiens
cttctaaaagatggccagggctataaatgtggcacatcatatctttcaagttcagctgctaaaacatgaaaatttttaatcacttctaccatgacaccagctgaagtgtgtccagtcattcatctaatcatccatctctactccttcccactccccagagctaggggccatcatttaacctggtagaaattctctcttgggtttccttcgttcctgagagtaaagtagttcatgttgcttaaccaaatctaatgcaaggggacaaaatatctgatactaattcagtgtaataacagtattacaatgttataaatatgttcatttggtctctttcacaaaagagaccaaatatcatagggctgtagatatctttttccccaaaataaatgaaatctgtttcaaacttctttccttttgatcctcagagaattagtaaaatatttacaaaatatttcctccctttcactgtttgaggccacgaactgtttaggcctgaacttagaatataaattgtaggaagggaaaaactgaagaccaattcatatatatatatatatatatatatatatatacacacacacacacacacacacacacacacatacacacacacacacgtgtattatatacatatataacatattaagatatacatatataatacatatatacatatatataatacacatatatataaaaaaccatatatatattttttaagagatggggtctcactgttgccaaggctggagtgtagtggtatgatcaagctcacttctgggttcaagtaatctcctcaactcagcctcctgagtagctgctactataggtgcatgccactgcacctggctaaatttttaaaaatttattaatatttttattacgaaaaatatattttcaggtgtgacttggttgatttgagcctatgtctttcttagctccaattcctctttccccatacttttaacaaagtgattgcatctttgaaagaaaagagatc

SEQ ID NO: 282792 - DNA, 1000 bp, Homo Sapiens
ctgtctgcctctagcgcttgtacaccggttctcactgcaggggccactgggcattggtcagattgcctgagcacagtcttgtcctggatgggctaaggggtaaatatttgtcagccacagtgttctcatcagtagaaattacttaaagtatgttaagctgaaaatccacgaagaataaaaatgcttaaaagcatctggatagaaaacttatgtgcacacaaaaacccaagcatgggtgtttatagcagctttattcataattaccgaaaaatgggaagcagctaaatatccttcagcaggtaatggagaaggaaactgcaatacacccagacaatagaatattattcagtgctagaaagaaatgagctatcaagccatgaaaaggcacggaggaaacttgaatggatattgctaagtgaaagaagccaatctgacaaagctacatagtatatgattccaattatataacattctggaaaattatagaaacagtaacattctagaaaattacagagacagtaaaaagatcagcagttgctaggagttgtgtggagggagagataaagaagtgaaacacaggatttttagggcagtgcaactattttgtatgatattgtaatgatagacacatacatttgtcaatatccatagaatacacaacaccaaaaataaaccctaatgtaatctatggattttgtgatgatgacatgtctgtgtaggttcatcattaggtaactaatgtaccactctggtgagggatgttgataatgggggcggctgggggttggggcaggcagggggcatggggtactatctatacatcctgctcaattcagctgtgaaactaaaactgctctaaaaaagtctattaattaaaatttaaaaatggaataatctgaggctcattatcaagctctagagccagaagaagcacctgtctgacccagaaaaagaccccatgatggccgcgcagcagcatcctgcattggcccaggttgca

SEQ ID NO: 282793 - DNA, 1000 bp, Homo Sapiens
aatatttgaatgagtttgatgtctgaacgtcgtaactgttcagtgtaatttgaaatcctttttttctcctgaaatggctagttattttagttcttgtgaggcagctttctgccccattttcaaagctctaaatcttagagtctcaagtaaaaaggttcaatttggaataaacatcactaaacctggcttcctctctcaggagcacggtctgaatctgcacagagcaagatgctgagtggagtcgggggctttgtgctgggcctgctcttccttggggccgggctgttcatctacttcaggaatcagaaaggtgaggagcctttgggagctggctctctccataggcttttctggaggaggaactatggctttgctgaggttagttctcagtatatgagtggccctgaataaagcctttctttccccaaacggctctaatgtcctgctaatccagaaatcatcagtgcatggttactatgtgaaagcataatagcttgtggcctgcagagacgagaggaaggttaacaagtaggggtcctttggtttgagatcctggagcaaattaaggaagagccactaaggctaatggaattacactggatcctgtgacagacacttcaggcttcatgggtcacatggtctgtttctgctcctttctgccctggttggtgtgggttgtggtgttagagaaatctcaggtgggagatctggggctgggacattgtgttggaggacagatttgcttcaataacttttaagtgtatatcttttcctctttttcccaggacactctggacttcagccaacaggtaataccttttaatcctcttttagaaacagacacagtttccctagtgagaggtgaagccagctggacttctgggtggggtggggacttggagaacttttcttacaagaggtttttttttttttttttttttttttttctttgagacggagtctcgctctgtcgcccaggctggagtgcagtggcgggatc

SEQ ID NO: 282794 - DNA, 1000 bp, Homo Sapiens
tattcgttgtagagttcccttcaggtcttgaagtaaagtttacacagatctcatcaaacataactgcaagtgcttttccttttttcaaatatgtttgaagtttgtataaagttagtgttgtttgttccttaaatatttttaaatagttactgaagctagatgaacctggggttttgtcttgggaaagcattatagaatggacttactttctctatgacatgtggaactcttcctgttttatgttatttgtcagcttcagtacattgtacattttgaataatttatttattacatgcacatttatttttgtaaagttgttcataatatttagtattatttcatgctgataaatctgtaagactataacaaaagctatgaaatttgtgtaactggagtcttagagggagatgacaaatgggtgatgcacaaagagtgtttgaagaaagactgactattttccaaattcggacaaagacttaaatgtaaaaattcaagaatctgtgcaaacccaaacgaaaataaatccaaagaaatttatgccaaaaaaaatctcgaaagcaacaagagagaaatgacatctcatgcacaggagaaaataaattaaatgacagtggattgttcaatagaaatcatgcagaccagacaaaagtggcacaagatattttaatggctgaaaagaatgttaacctagaatgtatatccagtaaaaacattattataaaatgttccatcatggcattctttttttttctttttcttttttttctttttttgtttgttttttagatggagtcttgctgtgtcacccaggctggagggcagtggtgcgaccatggctcactgcagcctctgcttcccaggctcctgtaatcctcacacatcagcctcctgaatagctgggattacagacatgcaccaccacgcctggctaattttttgtatttttggcagagacagggttttgccatgttgcccaggcttgtctcgaatccctgagatc

SEQ ID NO: 282795 - DNA, 1000 bp, Homo Sapiens
aattagatatggtactggaatcagtaactactgaagttttggatttgtgagacggctaggaagagatagaatttgtagacttctattttttggcaatatggcagactcaattttagaaagtatttactttgatatgaagcctgttagaatgttaaacaagaacacctttaaaaatatttcatttatttatttgggacggagtttcactcttgttgcccaggctggagtgcaatggcatgatctcggctcactgcaacctccgcttcctgggttcaagcggttctcctgcctcaacctcctgagtagctgggattacaggtgcccacaagcacacctggctaatttttgtatttttagtagagatggggtttcagctatgttggccaggctggtctcaaaactcctgacctcaggtgatccacccacctcggcctcccaaagtgctgggattacagaccactgcacccggccaaaacatattatttagtttgcaaaaagaaatcttctggagccagaccaaagtaagtctgcagctagggaggtaagcaagtgcttagggtatcagttgcccctaagagtatctactaagcccaggtggcccagagttctagtcttcttcttcttattattattattatatatatatttttgagacagagtctcgctctgtcacccaggctggagtgcagtggtgcgatcttggctcactgcaagctccgcctgccaggttcacaccattctcccacctcagcctctggagtagctgggactacaggcgcctgccaccatgcccggctaattttgttttcatatttttagtagagacggggtttcaccgtgtcagccaggatggtcttgatctcctgacctcatgatccgcctgcctcggcctcccaaagtgctaggattacaggcatgagccaccacgcctagccattattatatttttttgagtcagaatcacgctctgttgtccaggttggagtgcagtggcgtgatc

SEQ ID NO: 282796 - DNA, 1000 bp, Homo Sapiens
agctgggggagtgggggacttcagggagaccagccactgggaaggccagcctgatgaggtgggaaaggaagagtttcctttcaaggcatttgagaataactgtctcccccttgctgcatctttgatccacccctgtctcccctatcccttatttcacgtgttgcttctgtgctgggccctttggtcaatgtcaatttctattttcctatctgtctctggtgccatttacttaactttttcactgaccccctcaacttccctgctgctgggtctggctttttgtctcactctttttatgttggtctctgattcttgtggcttctgttcatgtctgcgcatctctcaatccctgtacccctcttgcctccatctctgtttcttttcctgcatcgtctccctctttttttttgagacagagtctcgttctgtcacccaggctggagtgcagtggcatgatctcggctcactgcaacctcagccacccagattcaagagattctcctgcctcagcctcccaagtagctgggactagaggcatgtgccaccatgcccggctaattttttgtatttttagtagagacggggtttcactgtgttagccaggatggtctcaatcttctgacctcatgatcagcccgcctcggcctcccaacgtgctgggattacaggcgtgagccactgcgcccagctattttttctacttctgtcagctttcctcccttattccacagctttcctctctctgcttcatgtgtcacctctctctgtgatccctctccggatctggcctctgcctgccccacagggagggtttgcctctcctgctctcctaatctctgctgcctcaacaggtctcaccatgtcccctgcccggggaaggctccgctgctacatctgtggcttcaccaaaccctgccaccctgttcccaccgagtgtcgggacgatgaagcttaggatcgcggccgcagtactggatcctagtattctatagtgtcacct

SEQ ID NO: 282797 - DNA, 1000 bp, Homo Sapiens
agaaagataataagtactctaaactcatcacttcctacgtattttactcctttttacctttatgttcttgagggcgtttatgtctcctgtatctctgtgctggaaaaaccacatgatgatgtgccagtccgcgcctcttcacagctctggccttgctgacatcacctcagtagcttcagactggccacagggggcgtagtttacacaacagaacttggcaaatgctgtaactcagtacgccctttcccctcaccgccccctccccccagccagtcgttaaacacagaactgcttgaggggcacatctgaggcagctctggggtattgtgaaaggcagagagggaggagggtggggtattgtgcacctctgaagagcattccacatgatctccgggttaacacaacttctcatgggcctgtggtacaaataggagatggtgagaaaacacgaaggttatcattgcctcaagacccagtgggagagaaggggaggccaggagtcaatgaatccacctaaaaggggcagaggcagagataaaccaagaaaccagggcagacctaaagaatgcagaaacctcaggggccctgcgagggtctggcagcacaggtggcctgaggcccctgtgatgtatctgagaaaatctcctttaaggccgtctcaatgttctcatccattcattgacggagcaaacactgattggctatctattgagttctgctgggacagaggatgcagatatgagaaagcactgtatcttggggagctcacacgtgaaaaggggagcagaggactaagcaggtgatgggtatcaaatgggataagtgctgaagaaagtggagcagagtactgtgggatgccagaggactgacctctgccaggaggagtcagtgaaggctacagaggtgggtgcctttggatcttggaagatgagtagacatctgccaggtagagaagagatggtgggagccttctagacagaacaagaatccaaatgaattc

SEQ ID NO: 282798 - DNA, 1000 bp, Homo Sapiens
aaagaagaaaaaaaaatgttgaccgggtgtggtggctcatgcctctaatcctagcactttgggaggccaaggcgggcagatcacctgaggtcaggaggtcgagaccagcctggccaacatggtgaaaccccatctctactacaaatacaaaaattagctgggcatagtggtgtgcgcctgtaatcccagctactcagcaggctgaggcatgagaatcgcttgaacctgggaggcggaagttgtagtgagccgagatcacgccactgcactccagcctagatgacagagtgagactctgtctcaacaacaacaataacaacaaaagttaggaaacgtgttcaaattacacagccaagtcttatgtagaatagtgggaaactggggagatttacctggaggagaggagcaacaaggtttcagttcccggctcttgaaaggctgcgacaaacaagacaaccagaatgtttttgtggcctcagagccagaatcagagattgcactctcagagggagacatgtcaatgggaaaggcctcctgacaacagctacagcctagcatgacggaggcggcttgggaaacattgaactatgtctggacaatccactggcaggaaaatcataggaaactgtaggggccatctgatgcttggcctcttcggcatctatttcccctaccttttttcccttcgaatagggcctcaatttccttttgaggatctgcatggttctaggagtggaacttagagtaactagacttagccgaagtctaccagtgcctctcatccctccattaatgtggttcagggtatgcatgtgattagctggtccaattagaatacatctcaaaacttttggtgggaacacagaacactttctctttctttcttccttccctcccctccctctcttcttcttcttctttttttttttttttttttttttttgtttttgagacggagttttgctctggttgtccaggctggagtgcagtggtgcgatcc

SEQ ID NO: 282799 - DNA, 1000 bp, Homo Sapiens
catccctgcgtgaagcagctttgttagaggaggaagagggagtctgagcatgagttgcagccagggctgtggggaaggggcagggctgggccagtgcatctaacagccctgtgcagcagcttcccttgcctcgtgtaacatgaggcccattcttcactctgtttgaagaaaatagtcagtgttcttagtagtgggtttctattttgttggatgacttggagatttatctctgtttccttttacaattgttgaaatgttccttttaatggatggttgaattaacttcagcatccaagtttatgaatcgtagttaacgtatattgctgttaatatagtttaggagtaagagtcttgttttttattcagattgggaaatccgttctattttgtgaatttgggacataataacagcagtggagtaagtatttagaagtgtgaattcaccgtgaaataggtgagataaattaaaagatacttaattcccgccttatgcctcagtctattctgtaaaatttaaaaatatatatgcatacctggatttccttggcttcgtgaatgtaagagaaattaaatctgaataaataattctttctgttaactggctcatttcttctctatgcactgagcatctgctctgtggaaggcccaggattagtagtggagatactagggtaagccagacacacacctaccgatagggtattaagagtctaggagcgcggtcatataattaaggtgacaagatgtcctctaagatgtaggggaaaagtaacgagtgtgggtatggggctccaggtgagagtggtcgggtgtaaattccctgtgtggggccttttgggctttgggaaactgcattttcttctgagggatctgattctaatgaagcttggtgggtccagggccagattctcagagggagagggaaaagcccagattggaaaagttgctctgagcagttcctttgtgacaatggatgaacagagaggagcctctacctggg

SEQ ID NO: 282800 - DNA, 423 bp, Homo Sapiens
ttttctacttgaagtgcaaagggagaaagactgaaaggaacccaagtatttctttgacatgtataataaaaaattaaatgtgaattgaaaccttgacaataatgatgaaaaaatgaatgaatgttagtataatatcattcatgttttctcaacttagaaatgcctatttggtatttgtgagcttaaactgtattctgtaattttcagcttatgaagatgtttaataacaacttgaaattttgatctgggtgttttctctctttagatcatgaatatctctacaaacaagaaaataatatcttggtattcaatgctgaatatggaaacagctcagttttcttggagaacagtacatttgtatgtttaatcacgtaattaattcatgcatagaattctggggatttttttcatctatcctcttgg

SEQ ID NO: 282801 - DNA, 1000 bp, Homo Sapiens; identical to SEQ ID NO: 114951

SEQ ID NO: 282802 - DNA, 1000 bp, Homo Sapiens; identical to SEQ ID NO: 206350

SEQ ID NO: 282803 - DNA, 1000 bp, Homo Sapiens
ttataaaagcaactactgtcacctccatccagattcttttaaattattgatccatccatagtatatattgctactcattcaagaatcctcaataagtattgagtatttaccatatgttgggatactgtgggctctggagagaggagggggcaatagagctaggaattaagaatcagttgagtaaaatgtgtaatatttattccccattaataactgactaggaaggactaaaagccagaaaggggatgaaaaaaaaatccttaattcagggccaacattatctacttaaacaactttgagatatggtcttaattattttaaagcagaataatataattgaaagtttatagctaaaagagactatataggtcatttagtataattcttcattagtttaagaaccacaaaattgcaaataaataagctatgaactttgatgtacactataaatctccttaattctataaatttgtgtctgtaacctgaatagtttgaaaacttctttaaaaatctcttgtatttcatccgggcgcagtggctcacacctgtaatcccagcactttgggaggccgaggtgggcagatcacgaggtcaggagtttgagaccagcctgaccaacatggtaaaaccccatctctactaaaatacaaaaattggctgggcgtggtggcactcgcctgtaatctcagctacttgggaggctgaggcaggagaatcgcttgaacccgggaggcggaggttacagtgagccgagatcacatcactgcactccagcctgggcgacagagcgagactccatctcaaaaaaaaaaaaaaactcttgtatctcaatatttttaaaccacaggcctaaataaaactaattttgctcaagttttctcaacctagggaaaaagaactatggttccatattcaaaataaatattatagacccttttcctaagtaggattttgtggtttactgattgggtaatttgatcattaaaattatgtgaaatct

SEQ ID NO: 282804 - DNA, 1000 bp, Homo Sapiens
gggattcatgcaggtttctgattgtatcaatagtttcttccagccgggcacagtggctcaggactgtagtcccagcactttgggaggctgaggaggaatgatcatttgcgcccaggagaccagcctgggcaacatagtgacatcttgtctctacataaaaatttttaaaaattagccaggtttggtggtacctgcctgtggtcccagtgacttgggaggctgyggtggaaggatcatctgagcctgggaggttgaggctgcagtgagccatgattgtgtcactgtattccaccttattggacagaggaagaccctgtctcaaacaacaaaaaaaaagaagtttgttcctacttgctgctgagcagtagtatttcatggtgtggctattccagagtgtgtttcaccattcatttcataaagaacagctggttctctccagtttttggatattacaaataaagctgctataaatttttgtgcacaggtttttgtgtgaacatgtcttcatttctctgggataacaaaaccctatttttatttatccatacttttgcttgctgcattttttcttccttactgatgttccatggttctttcatttattacttgctttctgtctggacagattcttcaggcattcttttagcataggtctgctggtgacaaattttcttagtttcccttcatctgagaatgcgaatgagaaggatgacttaactaggtaaaagggtctgggttgacagttcttttctttcagctcttgaaaaatattataccactgcctgctaacctctgtgattctgatgacaaatccactgtcatctgaactgtcttccaagatagctgtctcttgctgttttcaagacttttttttaatgtttcagaaatttaattatgatgtgttttggcatggatttgtctggttttattctgcttggggtttatgaagcttgcatgcctgcaggtcgactctagaggatccccggaaccgagctcgaat

SEQ ID NO: 282805 - DNA, 1000 bp, Homo Sapiens
cgaagttccagccaggaaggagcaaacagttttgagcccgactgagcttgccctgtgatcaaatgcaatcccagtcttacagctgctcaggccaaaagcgttgaggttatctttgtctccccgctttctttcacatcatatatattcaatgcaccaataaattctattgatctacctccaaaatacaacacttctcagaactacctattccaggccaccatcatttctcctctggatggtcactatggttacctcattggtgtccccgctctgcttgcctccctccagttttgtcttaacaaggtggccagcatgagccttggaacataaatcagatcatgtcactttcctgctctaaaaccgccaatagcttcccatctcataagggtaaaaaccaaagtctttataatggcctccaaggcgctgtatgatctgtttcctttcctcataatctcccaggcctcactccctaattctcaccttcctcactcttctccagcacacagaccccttgcttgccctcaaatacaaatgccctaggcttctgggcctttgcacctgttatttgctggaaggctgtacccccaggtttccatagattcacttcctcacctctgtcagatctttgctggaagactgccttatcagtgaggctaacttcactattccatttaaaattgcaacctaccctctgcaatgatctataccactcagtttccttcccagcacttaaatcacctgacatgctgtagttacttgttgaccttgtttattgtttatcttcctcctcttccactagaatgtaaaggcaggtttctggttctttttccacagccatatcttcattatctataacagaacttggtacctagccgacaattagtatttgttggataaattaatgaagcaagagtagaagcactgagagcatgagggggtgggtcaggagatcaggagtgaggcttttctggtaatttcttacaacttgctgcctcatctt

SEQ ID NO: 282806 - DNA, 1000 bp, Homo Sapiens
gaagagcatggggcaataaaccagcacagtctctgaccacttggagcgtctcatccagtgagagagacagccgttaaaagcataaacatccaaataaagatgcctttccaagttgcagtgggtgctatgaagggaaaagaatagtgggaaggaaaaaggatggagtcggtagagggtcatactttgggtggtccgggaaccctcgcctgaggagtatcatctcaactgggatgtaaggatgagtaaagggatgggggcagagcattagggggaaagcctgtgaattagaggaactgagagcaagccagtggggcttcacagcgggcgagtgagtgggcgaggaacgcgggcgaggccatgtagagcctcgaagatcatgggaagtgggacagaattactacccagccaacaaagcaaggagacaccttcatcctgtcagaaaacggggaaactaacacagaggagcggcttgggatgcagagcctcaatgtcctgtccacaagatggcaatggtcaccatgacctctgggacgcttatgaagggcgatgacgaagcacaggggacacgccgggcgggcgcctcttcagggctggggctccccgcgcccaggggcagcccaggtccccggaacccaagccgcgtctgcctccgggccgcgcgggggcgctgtggtccggcggcggcccggggcgctgcgtggtcgcggcaggggcggagggggccgcggggagggaggcgggaagagcgcggcacttccgctggccgctggctcgctggccgctcctggaggcggcggcgggagcgcagggggcgcgcggcccggggactcgcattccccggttccccctccaccccacgcggcctggaccatggacgccaggtgggggctagggcagcagcgagctcacgtgaccgagcccccgggccacgtgactgccgcgcctcagcacgggggccgggtggggtcccggctgctcggccgtcggccagcatatcgct

SEQ ID NO: 282807 - DNA, 1000 bp, Homo Sapiens
tcagatcctaacttgggatacaactgattgttacttaacctgctgctaacctaaagactagttttctgctcatctagtcccctgtgtgaataagaggtttcctcctggtcccaggatgcctctgctgctcagctcatctctgaggctgtctgtgagccttcagttcagaaattgagggaaaatccattgccttggatgtctccttccaaatcaccacccaaaacaaaaattaggagacgtagaaatccaggatgtgttgtgggttaggccatattctgaggagttggaaggtttcttggggacctgaagtctcgtgaagagaaaatgtggaaataagtgtccttcaagccattgtagtgcttgacatgggggaaagaggccagggggagggggacctgtggtgccagggcctttcagagcttggctagatgagggggtccttctcagaactgtaaataagctgctcagttgcatgattttcagaggccctgctaatgagcttttttgtttgggttaagcctcccctgctttccctgaagataagccactgagttctatcagctgctgtcttctctccattatgctttcgtataaatatttaacatttcctataaacaattctggaagtacatgccaagtgatacttatggaagtgtaagaagatgtttcagttcaggctgctataactaccacagactgagtgacttacacaactgacatttgttactgttagggaggctggaagtgcaagagcaaggcactggcggattcagctcctggtgagcgctcttcatggtttgcagatggttgtcttgctgcgtcccatgtgttggagagatcatttctcttgtatctctccttatctaaggacactaatcccattcatgagggttccaccctcatgacctaattacctcccaatggccccaactccaaataccctcatactaggggttaggcttcaacacagggatctgggggagacattcagtccataaca

SEQ ID NO: 282808 - DNA, 1000 bp, Homo Sapiens
ctatgcaccccagtgtgtcagctctggggccacactgtatagccttgatgagtacgccccttgaacaagacccagtttgtgaactctccttaaagagaaatatttagggataattatttatagcaagaaagaattcttttacacttgagagctcttttaaaaatattttcttattggaaaatttatatggtgggcagggtgaaaaagaaacagtaaaaatattagttcttattccaagtggaacataaataggacatgaagaagggcacctctgaaatgacaactttaactcaccttttaaaagatgtgaaatttccagttttggatacacggtgaatatgtaaaatgagtaacagcatactatggaagccagcaattaaataatcatgtttcattattgcagtaacgttttaaacaattaccttgtgatatgatattaaatatattttctttttgaaaatatgttcactttgggtagcacatcctgtatttactaagtcattaggaagactgcattcagtgttaccaagactggtttttgctagtaagacctcgaataatccataattttgatattggtgcaattttactataagttgagcttagctgtttcagaaatgcttggacaagtacctagagaacacactgatgtctgtgttctgaggcagtctgaagttattcttagagactcagttacagctttagtaagatttagtacaggcaggataagcttggtttcataggaaccagggaaccagtgttagtgtcagcttctttcctcctggtcagcctagaatcccccactcccaatagaggggtttggaagctggagagtaggaagtaagaggcaaagaaggcagccttcagcaactcattatctgccagtgaaattctattaaatgtatttttaaaagagattaccaggtaacaaaaacataaaaaaccaaaacaaggccagatgtggtggctcacgcctgtaatcccagcactttgggaggcc

SEQ ID NO: 282809 - DNA, 1000 bp, Homo Sapiens
ttctgtgttgggtacattcagccgtcgcacctcttagctggctttaaaaatactattaaatgtttctattccgaggtaaaaattcaatcaagagtaaaggacaaggagcgaaagaacaggcactcgtgcactgaaaagatgatttttaaaatctggaaacataaacaacttactggtgagctccaatcccagaaggaagcgctttaattctattgtaccggaggtccagccaagtcaggttcggaagcaactgaaagaaatcttgaggaatcacacacagggcattcctttgcagatgcaattgcttccatggaaaagagaatcagagaatgttttgtcaaccaactaatttgtaaaacatgatatatccaaaatctatttccaaaagaactactaacaaccagaaccgtatatactaagttaaaaaacaaaaacccaatctcttacccttaaaagatgtaaacagtagacaaaagaatcagaaagaaaagaaccaggactccttccggcggcctttggagccggaactgacttcctgaagagccggcactctgctgctgacccagcacaccactgtttctatcccaaagcctttgacatggtctgaattccggggccccacactcagtgtctcggccgtttctccagtgcctgccgcagcacctggccctcggcagcccccgaaatcgcctgcttactgagcaaatagccagagccatgtctggtctgggggactcagcccaactcaatcattaaaatgaaactaaaagacagggacagagatgtctgccgtggtgttctctacgatcagcagcaaacaaagcctcagcgagcagcatttcagaagcagattgacacatcaactcggtggcgttgtaaagtcgtgacaaataagggaaggtggaagatgaacgtatacacgctgattttagctgtgtaaaatgcatataacattcacacaattttacagtcacagtgtggaaggatcctaagcttgggt

SEQ ID NO: 282810 - DNA, 202 bp, Homo Sapiens
gtgagctgtgttgggggtaggtggggatttcagcactcataggactttaatttctcttccctaggggggctttgccccgtgttttctaggctgctttctcccactggtaggggcacttaatggactgtcagcccaggacaactgggccaaactacagcgggtgagctgggcaggtgtggagaatgtctctggctggcgggct

SEQ ID NO: 282811 - DNA, 650 bp, Homo Sapiens
aagctttttgctttctattcattcattcgttcattcattcattcaaacctatacttaccgaatgctcactaaatgccgggggtttattaagagagatttaaataagatgggatctttgactattacaggtttcagcctaggggtaaattaggggaagacaaccatgtattcaaataaatgtaataagagtaatggttgtgtgtgtattttacatgcttgtcctgtgtaaataacacgtccacggttgcacctctggggtggaacatctataaaatttagataatgatacccactttgcatggctattgtaatgagtgcttaactcaataagcatctactgaaatgagttgatctgttgatgtaagtctgctcaataggtcttgctctcagaatatgtttcttgcctttttgatgctttagaaggctttcaaggtaagtcaagcagggaacctggtggggtagatgagggaattttcaaacacacaactgtctgatttaggatcctacatggacttggtatatagtgtcacttacttgtaaatcagatttttaaaattggaagcaactctgtgatcatctagtccatctagtctacacccttccttttacaaatgaagaatccaagagccagaagctcccagacatcctga

SEQ ID NO: 282812 - DNA, 1000 bp, Homo Sapiens
tctgatgtattcttgtcaaaaaatgtttgcctgattctaatcatgaaagaacaattagaaaaaatccaaattgacagatattctgcagaataaatggcctgacctcatcaaaaacatcaatgtcatgaaaaacacaaaacattgcagatagcgtgaaattaaagattacagagatataacttaatgcaagatctctgactggatcctagactgcaggaaaaagtctgctataaagaacatttggatcacttgtagtagctgggaaataaaacaaaacattatttgtaaaaggggggaaatctgaacatgggtcttgcagtatttatgacagtttttgcggggcagagatttctagattgacagctgttttagtactttcaaggtgatgctctgtctgctggtttgcattgtttctgtctgagttaagagactggcagaacacagagttgcagtagccaaacactggagaaagctgggccctacagaaacctaacgctgaagaaacctcaggagccaaactggtggagaaaacaaagagtcctccctctctcccttttcaaataatgatcatacatcttcaagctgtctgaaatggttaaggagttcagtctgtcgtcaggcacacaccagagccagctagcccacacagaccccatcagagcaaaacagacaagagaatttaattcatatccacatagaaaggacttctaggtaggaggtagaccctttagctcccttccaattaaaggagtccccaattctggcacctgagagtcccctgggtctaacagctatgatatttatgtagtgtgttgcttacctaaatgaatacaatttccttccagacacgtgacactgatattaaagtgctaatgagagggatctatttcttcttgtacgctaaaagagaaacagcagttcagatttcccatcagaagtccgaggactttgttcttgataactactaccaataaaaattgagtattcgaaaaaaaaaaaa

SEQ ID NO: 282813 - DNA, 1000 bp, Homo Sapiens
tcatccttatccctgccctttgaaatgctaataggttgttaagctactctttagttactctttattctcataaacctttatacttttagatgccctacttgaaattgggtgtaaaatgaacacttgtaacatgggaagggggactggaaaatattaaccagaacaacaatgaaagtatcccaaggctgctaacaagttttcccaccccaacctagaccatatattctaactataaagattagactagacaaggccccatgcaaaacaaaacaaaaacaaagacaattcaggagaagtaactgcccaaatcttatctctgttataatacatgagctaaattttaaaataatcagtgggttgtagttacgaatggtaagttcaagtatctgttgttacaagcagagttaaacagtccacacctgacacctcaggaatttaagttataaaagtatttgatatttttaaagaataaatacagaaataatgcctatttaggtagaaaaaaaacttttggtgccatctaacaccttaagatgtcaacattctaagcttacatctttctgacttgcccagcactggggagggccatccgcatccagccgagtaccctacctggtgtcactttctggggtcacctgctctactacttccatctgaggagcagcgaaggctgggagagaagctagagaggaggttctcatgagccaggccctcagctgccagttgctcctcagtctgccaagtcctgaagcctcctctggggccccttggtccctgttccctccgagcccacgaagaccttggctcagttgagcacttgctgtgtgacttcaaatatgcccctgcccctctctgggcctcagggtctcctgccccatgtgtcctagacggacgaacctaatggggctcagggcctgagactccctctgataactaattcctggggttggtcctccagaagccacgttacgagatccgatggaaggtgattgagtctgtg

SEQ ID NO: 282814 - DNA, 1000 bp, Homo Sapiens; identical to SEQ ID NO: 201498

SEQ ID NO: 282815 - DNA, 1000 bp, Homo Sapiens; identical to SEQ ID NO: 114953

SEQ ID NO: 282816 - DNA, 1000 bp, Homo Sapiens
gcggacgcgcggctccctcagcaagtcagtctctgtgtttccaactctttctctgccctcaccacccacacactgcaacacgttaaagccatctgcggcttcattctcagttaagaaatgtgaaaatctagaaacactaacaggcggattaactgctgtaatggtttaaaaatgctaaaccaatacctgcagtagtgccgcagtttcacgagtgtgtgtgtgtgtgtgtgtgtgcgcgcgcgcgcatcgcgcgacattccctatgtgttaagcagctcattaaagaaaaagaaaaataaatcaggagaaaggaagatgaattgcagaaagtgccagaaagctagaaagaaattaaaatcttctccatacatcatgcatacacataacctagcctatttatttgtatctaaaattccctagccgcaccatcaccgtaaacaccaagggaaaaaattaaggaggttcctggtgggaaaagggcgagttggggggacagggtgtctgcgaggtgacgggatacagaaaactagggtgtcaaaagggagcaacaacctgttttgggggcaacttaaggatccaagtgtcacggggtctgggcaatgcaggacgggaggggctgcgtgagtgagtacagaagggaaatgagtgagggggcatgggatctcagagaaaatcagggccctctgagcaaagtggaaaggacgaccgccgcagctcctcgggccgtagctcgaccccgccttcccttttgcgcagaatcctcgccttggctgcagcagcgcgctgcccccactggccggcgtgccgtgatcgatcgcaggctgcgtcaggagcctcccggcgtataaataggggtggcagaacggcgccgagccgcacacagccatccatcctcccccttccctctctcccctgtcctctctctccgggctcccacgccgccgcggccggggagccaccggccgccaccatgagttccttcagctacgagccgtactac

SEQ ID NO: 282817 - DNA, 1000 bp, Homo Sapiens
tggtctcgaactcctgacctcggatccacccgccttggcccccctaaatgctggtattacaggtgtgagccactgtgcccggcctcctttagtgattttaaaccataatctctttccatgacctgccactgcatccctgccccgcactcaaggaggcacagccctccgaggatgcctgtttcccaggcaggcaaattgagcacgtccgcccaggcaaggacttgagcaacgctgtccttgcactcatcccccagacacatgggtcctgcactctcaaatgtgaatgaatgggacaccacatggcacggggagacagaattcgtttattgggatcactgggtggaggtggaggaagaactgagtggctgctgtcctggtctggggatggatcaggcaccaaggttaggggagggagcccatcaccatgttagtaaaataataaaacagtggttggacagagggaagacccactgcctgggatgaggctgctctgaggcaagaggtgtacgtatcctacctggcccaacacacgcacttccccactggctccttggcccgtgtcagcgaagggagcgcgggacggtgggggaggcggagcggtagcagcggtacccctccagtgccgctggcaggagcagcaggccgctcagggggtctttgcggcagcggcccatggcctccttgtagctcagccgttccttggagatggggtctgtcaaatccttctcgtagctggactcgtcctgcaggagctgggccagctcttcactgatcatcccggagaggagggcctgctggatggggatgcggcctgtcctcttggggtcgatgagccccccggtcaggtgctgcacctgcaggtgtgggagcacgctctcccggggcatccagcccttctggacggcctcgcccaccgagagcctcttcttggtgacggggtcctcgatgccggtgaaggccttctgggcgttaagcagcctctgtgtggaggtgttctcga

SEQ ID NO: 282818 - DNA, 1000 bp, Homo Sapiens; identical to SEQ ID NO: 206354

SEQ ID NO: 282819 - DNA, 1000 bp, Homo Sapiens
ttgtctatgaagttatctccaacactcagcttgctgagagcctcagcatttcaagattgtgcaggactggccaggcacagtgactcatgcctgtcatcccagcactttgggaggccgaggcgggcggatcacgaggtcaggagattgagaccagcctggctgacacggtgaaacccttgtctctactaaatacacaaaaaaaattaccgggctgtggtggcaggcgcctgtagtcccagctactcaggaggctgaggcagagaatggcgtgaacccgggaggtggagcttgcagtgagctgagattgcgccacagcactccagcctgggtgacagagtgagactctgtctcaaaaacaaaaaaacaaaattagccgggcatggtggcgggcacctgtaatcccagctacgtgggaagctgaggcagaatggcttgaacctcggagatggaagtagagttgagccgttaccacaccattgcagtcctgcctgggtgacaagagactccatctcaaagaaaaaaaaaaatcaaggagtaaacttgttggtctttgaattgtaactttggagaacctccccgccactaccgaattccccaaagtccagtgtaccatgtaggatttcacttgatccgcggaggaaaccatgccccaattactaggttaaaatctattaagtgccgggcgcggtggctcacacctgtaatcccagcactttgggaggctgagggtggatcacctgaggtgaggagttcgagaccagcctgaccaacacagtgaaaccccgtctctactaaaaatacaaaaattagccgggcatggtggcggctgcctgtaatcccagctacttgggaggctgaggcaggagaatcgcttgaacccaggaggcggaggtggcagtgagctgagattgcgccactgcactccagcgtgggggacagagcaagactccgtctcaaaaaaaataaaaaaataaaaataaaaaactattaagtatcagga

SEQ ID NO: 282820 - DNA, 1000 bp, Homo Sapiens; identical to SEQ ID NO: 206355

SEQ ID NO: 282821 - DNA, 1000 bp, Homo Sapiens
tatactaggtccctgtagaggcattttgtagtgttgagctatgctcaggttttgcagaacatgttagtctattttggagccatgtcaagtcgtactgtagcatgctgtgccatgttaggctgtcattgctgcactgtgctgctatagcctggtctagtctcctctctcctcccacatcctctcttcttcctctctctttggccctcttcctgctatgtggggcttggaggggagaagtgcaaacctctagctgggagccttcccccaaccccaaagtccctcctttacccacctccatggcccctgattgtccccattcatgtcagccaccattgcaccaaaggacaaggtcttctacagcttcctgaagccctggctgggtgagtatctgcaggtgaacagggttgggaaataagttgggggaccaggggaggaagatgaccttgcccatggcccttggctgccctgctaagggatgggttcctgctgagtgctggtgacaagtggagctgccaccgtgggatgctgatgcctgccttccatttcaacatcctgaagccctatatgaagattttcgatgagagtgtgaacatcatgcacgtgagttatttgaagccaaggtcctagctgcagacttggggtggagggaccacagacagatctggtgtagaattttggctctgctgggtggcattgggccattgttcttcctctctgatccctagttttgttttgtttttttttaatctgtaaaatgggtataataatccctacttaaaaggtggtcaaggtgatgtaatggagtcatgtccctggtgcatagtaggtgcccagaaggtgtctgtttctatgattctgtcacccaagccctataaaatcaagagggtcatgacgacaattgcacagtagctgttgctgataagaaaccacttgaaaactcattggtttaaaacaataaaggtttatgaatgttaataagtctatgggacagttggcaggt

SEQ ID NO: 282822 - DNA, 1000 bp, Homo Sapiens; identical to SEQ ID NO: 206356

SEQ ID NO: 282823 - DNA, 1000 bp, Homo Sapiens
tctccacttctaagtaaagacagtgggcagcttctgtttctccttctatcaaggcttcaccctatcttaaaggtctgtggtgcctcccacgtgggacctgtctgctggtatgtgttaaacagcagaccggcccttctaccagatcttgatgcctctgattttctcctgcctacaagaaaatacaggcaaggttagtcaggtctggctatatttccactgttgtttcatttaataagatggcatctcctcttgagatatgttcttcttaccttttaagaagatactatttaagaagtgaactattcagtctttgtatactgaatgctttttccctaaaaaatgttaatcaagaatattgaatatttatggcactcttgatgctgcatttgaaagctgaaggaattactttagatagataggaattgctacctttattctggaaaggttttgtttctgcctcaaagcattttgaagtgttttaaccattaaagggtctaatttttttttcttaatgaaatcaagcattttaattcactgtgggaggcatcctgaccacggacatccataacagcaaagcacaaatcgttttcgtctgtagtcatatcctgaaacataggtggacaaatttttaactgagagacaaaaatcacatagttgaattgagcagaacacttaagtgctttctgcatctatttaggagtctatttcttaccaataaacttgacaacgcatttggaaaactagtgaacaccttacagctttcattttgctttaatgtttcaattcaagccggtgtaaaaataatttccaaggcatttctgtttattctttagtaatctcactactggctatgtcagcaatatctttttcaatctggttccttttgtatatgatgtcactgtgacctctttgaaatatagtgatggcttttacctactttgaaaagaattttcacatagagtcagaaaaaaaaggaaatatcaaatcacttgcctttcca

SEQ ID NO: 282824 - DNA, 1000 bp, Homo Sapiens; identical to SEQ ID NO: 114954

SEQ ID NO: 282825 - DNA, 1000 bp, Homo Sapiens
tggtaaggtcttcagtcacagctcaaaccttatcaaacaccagagaacccacactggggagaagccctatgagtgtgatgactgtgggaagaccttcagccagagctgcagcctccttgaacatcacaaaattcatactggggagaagccataccagtgcaatatgtgtggcaaagcctttaggcggaattcacatctcctgagacatcagaggattcatggtgataaaaatgttcagaatcctgagcacggggagtcctgggaaagtcagggtaggacggaaagccagtgggaaaatactgaggctcccgtgtcttataaatgtaatgagtgtgagagaagtttcacacggaatagaagtcttattgaacatcagaaaatccacactggtgagaaaccctatcagtgtgacacatgtggaaaaggtttcactcgaacttcataccttgttcaacatcagagaagccatgtagggaaaaaaactctttcacagtgacccatggtattcatgccaacattggtgctcatttgtcactgaactgaagccaccctggagcccttaatggttacagaaattgtggaccagggctttatttaccactatacatcatcgggtattagaaaatgtagtctggctgagacgatgagttatcttctacattctagaaagtgattggaagaagtcatttgataagaggccatgggagagtggtctggaagttgtaggacctaaaatagtttgttctcacccagtgtatttaaatggccttctggacttgttaattgccctcagccagcactttaggacatctggttggatggctctgatgtggggggctgctgctctgaccattcattttgcctctaatgaatctttcacaaattggtcagatccatgaggtcttttactcttctttgtgccttgtatgataggtgctaataaacatttattaaatgtaccagtaaaatggcctttgtaccaaaaaaaaaaaaaaaaaaa

SEQ ID NO: 282826 - DNA, 1000 bp, Homo Sapiens
  misc_feature (930)..(930): n is a, c, g, or t
ggcaacatagcaagacctcaactctacaaaaaatttaaaaattagctgggtgtggtggtgcacacctgtagtcatagctgcttgggaggctgaagcaggaggattgtttgagcccatgagtttgaggttgcaataagctatgactgtgccatctcactccagcatggatgacagagcaagaccctatctattatgtgtcactggcccattttgagttagtttttgcatatggtatgaggtcaggggtctgacatcatacttttgcatgtgagtatctagttgttgtggggttgggcattgtggctcacacctgtaatcccaacacattgagagcccaaggcaaaaggatcacttgagcccaggagttcaagaccagcctggacaacatagggagaccccatctctacaaaaaagttagctggatgtggtggcactcacctgtggtcccagctactggggaggctgtcgtgggaagatcacttaagcttcggaagtcaaggctgcagtgagccatggtgctgccactgcactccagcctgagtgacagagcaagaccctgtctcaaaaaaaaaaaaaaaaaaaaaaaaaaaaaaaaaagttgtgcaagcaccattttgttgatgaaactattatttcccccatttaatgctctttgctcccttggagaaaatcagttgaccataggtatatgggattatttctgaactctgaaytctctgaattacttctgaactcagaaataatcccatatacctatggccaactgggtatggtataataatcccatatacaactgatatagatatataggtttgtatttctaactttattataccagtaccacattgttttgatttatgttacgttgtagtatgtttatttgtttgatctttttttgagacagagtctctttctgttgcccaggctggnatacagtgacaggatcatggctcactgcatactctacctactgggctcaagcaaacctccmaccttcaga

SEQ ID NO: 282827 - DNA, 1000 bp, Homo Sapiens
ttccaacttagaatgaagtaatgaagtataaatatatgctttcatattgctgctcatgtgttttgtcatgcttctctcttcaaacatgaacaaaatttcttttcttttttcttttttttttgaaatggagtcccacttttgttccccaggctggagtgcaatggtgcgatctcggctcactgcaatctccacctcctggattcaagtggttctcctgcctcagccccccaagtagctgggattacaggtgcctaccaccacaccaggctaatttttgtatttttagtagagacagggtttcactatgtgggccaggctagtcttgaactcctgacctcaagtgatccacccacctcagcctcccaaactgctgggcttacaggcgtgagccactgcacctggctgaacaaaatttctaagaagaattaccagggtttaatctttttcagcttctcctatattgttttagttttaacattagtgggatgataattttatgctattgtcctaatataattagcctcatgtcatctccaaagcatagacaactaagtatcttatgttaaattatgttcaccactcttcctgtcttctacttgaaatgtaagaaataagaagtaacataattgattatgcttttcacagctcatctcctagaacaagctacttacaatttggaatacatttaaagataatatatgggtacagatgtacatgtacatctatgcatgtgtgtgtacattatgtgcattcacacataatatatatatgtataacttatgcacacatacatatagggttaaatgtttatttacaatattgggctcatatcacacatcttgtattaaaacttgctattttcctaccaagtaatatgccagcaaaacctctaaggtgatagaaacataggcaaataattcagagagttaatagaagagaaagtggaaatgggtattacattaatggaaagatacagatggaaattacacattatacattt

SEQ ID NO: 282828 - DNA, 1000 bp, Homo Sapiens
ttgctttgtttctttccttcctttctttctttctgatggagtttctctcttgttgcccaggctggagtgcagtagcgtgatctcggctcactgtaacctccacctcccgggttcaagcgagtctcctgcctcagcctcccaagcagctgggattacaggtgcccgccaccatgcctggctaacttttgtatttttagtagagagagggtttcaccatgttggccaggctggtctagaactcctgacctcaggtgatcagcctgccttggcctcccaaagtgccaggattacaggcatgagccactgcacctggcctatttgggcattttaaaagggctttttcccacgtgtcacctgtgcagccaagtccctgctttctcgggaagtgggggaagggtaagcagctgtaaacactgcatcccattattctgaactctcagcacttaaggctccagctgtgatttggagcctagagacagggactgtgtcccatgtgccaaagccagaatcggggctcccgaacatgcctcggtgtcctctggaggaaagggaaggtgatggtgctccattcactgctggggtcctgtcggtgagggcagtgggcagggcggccagacctgcggatatgggtggtaggctgtgactcagccctcggggtgagagatggagagagctagagaaagggcatgggggaggggagccctgcagatgtggggacacctgaaccctcctatggggtgtaacctgagccctccgacacagggtgcacaggatgtctgcagtcctcacccctggcctgttcctccccctcccagggcccctcccggcctctctacataaagccgggggtactgggcctcaggtcaggcctatggccatggccttcacagacctgctggatgctctgggcagcatgggccgcttccagctcaaccacacagccctgctgctgctgccctgcggcctgctggcctgccacaacttcctgcagaacttcacg

SEQ ID NO: 282829 - DNA, 1000 bp, Homo Sapiens
gttgaatggctttattatttatttatttgagatggagtctcactctgttgcccagcctgaatgaagtgcagtggtgcaggcttggctcactgcaacctctgcttcccaggttcaagcgattcttgtgcctcagcctcctgagtagctgggattacaggtatgcaccaccatgcctgttaatttttatatattttgtagagacagggttttgccatgttggccagcctggtcttgaacttctgacctcaggtgatctgtctgcctcagtctcttaaagtgctgggattacacgcatgagccactgagcctagcctgaatggcttttttatatttaaagttgtgtgcctttcatctggagctacaccttggctatcactaggcaggtttcccaggatgtcaccctggtctcagcctgtgagagctgaatacaaattctaagggccccttggaaagttccagggaagggagcatagcgaggttgggggtggagtttgtagagactggctggctggctgcagacatcttcatgagaacagcaggtaccttggtgcatgataacaggccaggttatattctcatcctcgccctcataaagatacaggtctaccgtctctgaaacctttgggctagataagttgtgaaatttaattatccaattttaggaaggtggtaaggcatatctactatgtgtatgtgtagcaccccagtggagtcctacacatgtggagtcctaccccagtggagaccaaacatgttaatatttccacagcaaatattcacagtaagagggatagagaaagattataggtagttgcatattggttcatatcagtcttttcttccaaatgagctacaatgacttgtttttgagagctgtttgggttttggaagtggagataaggcatgtggttatgtcttgttgacccaataatgaccagggaggccctgtgcaaagacttacccttggctgctcttgtcatcacagtgattctatgagtga

SEQ ID NO: 282830 - DNA, 1000 bp, Homo Sapiens
tgtgatggattcaaaagccctggctacactctgatggtacagttctttgcattctggggtagttggaagaatgaagaggggcctttatttcatatttagggacagctaggtgctattcggggttacttgagtttgaaactcctatttgggattggactcgaggccataggtacagtagccaaatctttcaagggaagatctctcaacaagacaaaataccaactcccctttcccagcatcttccttagagccgaagggatgtgtgaagacttcactcatttgcttatacaacctgccatctaccatcttagggtaggcaaaggggaaaattcttatttttctttctgacatgaaaaagtgcctaaccaggggagggatctccaaaggagtagctcaggagaacagttctcaagtacagccctcactgtctgtccctataacactaacccagaacacactagagatttacatgttgtagatttttgttagacatgaaatatcccatgtggataatgcagtcattccatatggtcaccagatggcactatggtattacaattaagctcaaagatgctactgcttttttttccccccaaggatgacaatttttccccagacaaaaaagggtagaatgccctctttcaccactcatattcaacatagtattggaagttctggccgggacaatcaggcaagagaaagaaataaagggtattcaaacaggaagagaggatgtcaaattgtctctgtttgcagatgacatgattgtatatttagaaaaccccatagtctcagcttaaaatctccttaagctgataagcaacttcagcaaagtctcaggatacaaaatcagtgtgcaaaaatcacaaagcactcctatacaccaataacagacaagcaaagagccaaataataagtgaactcccattcacaattgctacaaagagaataaaatacccaggaatataacttacaagagacgtgaaggacctctttaagg

SEQ ID NO: 282831 - DNA, 1000 bp, Homo Sapiens
gagggattttattaaatctttttttaatggaatgtggtacaaattgttcatgttaccaaagcaatatttccctggaatttaattcaaagtttgtggcatacaacctgagccttttcttatataagacaagaatatgttcacatcttggtatgtggccatatttatagaatgctgaactcaatgtgcaagttgtactgtatgcagttttgtaaataagtgaaaataatttgttgtactttttattcaattctgtatagattataaaattatttttattaaataaatattttacagtatattttctctttttaatcaaaattgttttaaatttatcttctatttcagtaggagctttagattatatctttaaatattttaataatttatcctaggacaaatttcatattaagtcttcccctggtctaacttgcctagttaaccttttgttatctttttaattattccattgctttgtgatttttacctttgactcttcccccttatttcagatgttttcccccttttttttggcaccccgttgcactgtttttttttttttttttggttttcatgttggcactgctcttatctctttttaaagcattcttccttaaaaaaaaaaaaagacactctctttgatgttaactgaatttttacaataaaggaaattaaagcaagagcagaaaataccaccttgttctgaaacttcatagcctctttgttccacctcaaattattctgatacccagggaggaatcttcttgccatgagttgagaatcatttgtccattatatcccagaaacctaatcagtattttcttacagtatccaaatgagtaccattttttaatataccatttcaaaatctacttaaggcattgatttcgctgcttatcaccaaagtcctggaaatttttcatgcaaaaataaattttttttttttgagacagtcttgcactgttgcccaggctgcagtgcagtggcaatctcggctcactgc

SEQ ID NO: 282832 - DNA, 435 bp, Homo Sapiens
cccacctcctacctgggggacaaggtttcttcatatggtggttacctcacttaccaagccaagtcctttggcttgcctggcgacatggttcttctggaaaagaagccggatgtacagctcactggtcagcacatgtccatcatctatgaggagacaaacaccccacggccagaccggctgcatcatggacgagtgcacgtggtcgagggaaacttcagacatgccagcagccgtgccccagtgtctagggaggagctgatgacagtgctgtctggactggcagatgtgcgcatccaaggcctctacttcacagagactcaaaggctcaccctgagcgaggtggggctagaggaagcctctgacacaggaagtgggcgcatagcacttgctgtggaaatctgtgcctgcccccctgcctacgctggtgactcttgt

SEQ ID NO: 282833 - DNA, 1000 bp, Homo Sapiens
cgggggccagctcctcagtcggcagcagctgcccctccagctggcctgggcgatgtccatccacaagagccaaggcatgaccctggattgtgtggagatttctctgggccgtgtgtttgccagtggccaggcctatgtggccctttctcgggcccgcagcctgcagggcctacgtgtgctggactttgaccccatggcggttcgctgtgacccccgtgtgctgcacttctatgccaccctgcggcggggcaggagcctcagtctggagtccccagatgatgatgaggcagcctcagaccaggagaacatggacccaaacctctgagcctcacccacaaagagaagacaaagggtggcctgtggcctccccgtccttctgctccctagtggcccagggccccagggaataactggagtaggcaggcagtgtccccttctgtattttttagggactctcaacctcctggcagggttaaagggagagtactttaaacccatataccagctgtgcttcagtttctctcactttgccctgggtaagctgctgtagggtcagaagtaaccctttctgtgtcagttgagaatgagcctgtgtggtagctgatgtcagaggacaaagctctctgcaagggctggacacagagctgcagagtcctgaacatccctcctttcaggctgcagaagggagaggcaatgaagacaggtgctccggaagcagcatcagggctcttggaggggactggtggggactcaggctgggtgcagcctccaaacagagaacggaacttaggtgtgtctctacagctaggcccagcctagcccagcccagaacaaacacccttcagagcctaaccaaagaacataagctgcaaaatgtgcacccatattttaagctgctttttcaggggataaatagtgtttggggacattgaaatggatgttctcaggttgtatttatttcggacaaataaactagagaattgtgtaaaaaaaaaaaaaa

SEQ ID NO: 282834 - DNA, 1000 bp, Homo Sapiens
ttggttcatggttctgtaggctgtacaggaagcatggtgtcaacatctgctcaggttctggtgaggacctcaggaagcttaaaatcatgggggaaggtgatgggcatcactagcatgtcacatggcaagagagggagtgggggtggggggaggtgctatagtcttttaaacaaccaaatctcacgtgaactcagagcaagagaactcactcattaccatgaggatggcaccaagacaattcagagggatctgccaccatgacccaacacctcctaccctgtcccacctccaccattggggatcacatttcagcatgagatttggaggggacaaacatccaaaccatatcaatatgcctcaaggcatatgaaggggagcctcaaaaggtgaagtttaattcttctcaccttgaatgtaaactggagttagcagtttgcatctaacaaacagaatatgacagaagttaggggatgtcatttcagaagttaggttaataaaagattgtggcatccattttggaggcatgctatctcactctttcagattgctcattctagtgaaagtcagctaccttgttctgttgtagttctgtagagaggcccacgtatcaagggactgaagtatcaagggactgaagtctctaaagagctgtgtgagtaatcttggaggctgatctcacctccttcacccactccagttgagccttcagataagatggcaattcacactgacagctcagctgctaactcatgagagaccttgagccagaggtatctagctgtgccatgcctgaattcctgacccacagaaatgatgagataataaatgtttgttgtttttaatggtgagactttagtataatttgttatgcagcatacgataactaatacaaaatagagcctataggactgactgatctgtttggtgcaagagggtgtgaggaaaagagatggatgaaagaagatatgtagattttggacttgagcaactggatggtagt

SEQ ID NO: 282835 - DNA, 1000 bp, Homo Sapiens
tgatgaagcttaaaaccttagggcagtgtctacatgggaaacaagtatgtggaaattgacaatcatttttaccaaatcgttgagtaataatatgacttacctgatagatatacacattcaataaggaacatttttttttttcaataaggaacattttaactaaaacattactttagggctgagatttccaggctatctacattgatctactgaaaaatttctagatttccatatacaaacgaagaagacatgagtttagagaatttttttcctttaatttttttttaacagaagggtatcagagtggaggacctagattacgctacctgtgtttgaaaatattgcgctttgcctaaccttcggtggaatgtattgtttcagcatattctatgtataaaaaagtttaaagatgtcttcaaagaagactagagtctttaagtcacttatagctatattttactacaaaatttgtgtataaagatatatttaagtgttttagataaatttaagttactccatatgaaatgtttaatttcagctactgtgaattctttcgatcagtcctttgcttttttaaaaaatcttttccatcgtgttaaaaagaaaattagctattaggagatattaaaagattgatgtcttagaaggacagggttaaaaccttctgtaatatatttaaatatatatttttaagagagatgctacattgccaatgattttataaataatttaaaattaatttacaaatttatagatgcaaaccaaaagatctttttaaaagagagagagaggaaaaaaatcaccttttatttgtttgggtctcattgtcagaattattattcagatcaagaaatctgtgtcgataaaacctaatctcatattggagagtgaatgtcgttaagtatttctgaaatgtttctaaaaaatgaacatgaaaaaaataaggtattttctccctagcttctcattacagtatttctaattgcttcacactttacag

SEQ ID NO: 282836 - DNA, 1000 bp, Homo Sapiens; identical to SEQ ID NO: 114955

SEQ ID NO: 282837 - DNA, 1000 bp, Homo Sapiens
gaaattccagtctgattttatgactagggacgtggtgtaatctctctctttcctcttctccttccttcttttcctcttccccctcttctcccctcttctccctccccctttccttcttctgcaacctgcagtcagatgttatcgtcgggcatgatgtaatatctctgccacttagaacttgggttcatagtctcctggacagctctttaaccaatttccaaagaaataaaaactggactgtcaagttattctttcagctgtaggctgcaatctggatctctctgcattttaacctcttcccaatctggctctttttttaggtaatgggactcctgaccaaccacggtggggtacctcatcagccccagactgattacgcgctctcccctctcaccgggggtctggaacctaccaccacggtgtcggccagctgcagtcagagactagaccatatgaagagcttggacagtctgccaacatctcagtcctactgtccacccacctatagcaccacaggctacagtatggaccctgtcacaggctaccaatatgggcagtatggacaaagtaagccttggactttttagggggcaatttctcctggaagggagataaactcaactctccttaagaaaggtgaattagaggcaagattaagccacacatgccggtatcaatttttttttttgcaaagccagctgactgttccagcaggggcttccttgtgtaattattttcttaactgatgtcaacaacatcttgcggttattaattgttgagacgtgaaacctgattgccactaggtaaaacacaagggttggccaaaatgaaataatccctgacattagaaacacatgttcttaatgaggtcagctccaggatcatatgggggataatcccagggacacaaagttgtgtcaaacttgtctcaggaataaaaatattagtctcaagcctttgatagcacggtattaaatatgacattgtcagcctgtagctg

SEQ ID NO: 282838 - DNA, 1000 bp, Homo Sapiens; identical to SEQ ID NO: 114956

SEQ ID NO: 282839 - DNA, 1000 bp, Homo Sapiens
cttcgacccagagagaggccagggcccctgcccagtgggcagcgtggaagtttccatacaaggaggtgggaaggagacccccccgcccttcgctgccctgtgcagagatgagccgggggtgcaggatgggagcccatggcacttcgctacgggatggtccagggctcgcgattgtagtctggggaacctggtgtcggacttcccaggtggcctgagctggtctctccagctcccacggggagagtttggtagcgcaaacggggagatgttctggaggcccctggccttactggttcgatttgaggcctggaaaggaggctctgggcttacaccaatgggaatcccaatggggaagtcgatgctggtgcttctcaccttcttggccttcgcctcgtgctgcattgctgcttaccgccccagtgagaccctgtgcggcggggagctggtggacaccctccagttcgtctgtggggaccgcggcttctacttcaaatttctgctgggggccgtgaggctcctgctgctgaggcaccgcacgcctagggcagggcttcaggctctggaggaagagcctgcctttcttcctgcaccttttggacattttgacaagggacgcaggcccgcaagccgtgtgagccgtcgcagccgtggcatcgttgaggagtgctgtttccgcagctgtgacctggccctcctggagacgtactgtgctacccccgccaagtccgagagggacgtgtcgacccctccgaccgtgcttccggacaacttccccagataccccgtgggcaagttcttccaatatgacacctggaagcagtccacccagcgcctgcgcaggggcctgcctgccctcctgcgtgcccgccggggtcacatgctcgccaaggagctcgaggcgttcagggaggccaaacgtcaccgtcccctgattgctctacccacccaagaccccgcccacgggggcgcccccccagagatggccagcaatcggaagtga

SEQ ID NO: 282840 - DNA, 1000 bp, Homo Sapiens; identical to SEQ ID NO: 201519

SEQ ID NO: 282841 - DNA, 1000 bp, Homo Sapiens
ttcagtgccttgtcaggctgcagagcctgaactagggagatgcaccgggcccacttgcaggcggggcccagatgcacccaagccccatggacaagagcaccatgggcaccaggggcctcccgacctggcagcctgttgctagtgggcgaggcaggaggacaagtgcggctcaggccacgagtcgggctgggcgtgcagagaggttagaattacacccagatggcgaacagtcagtcgttcctttcctgctctggctgggagctaaaccttgtagtcccagaccctttcgccttcgcctgccggctcagacccaacagctctttccgggcgacgggcggctccactgcgatcaaaagccaggggtagcgggaggggattcgtgagaatgcagcagccagagcagtctttcctttctgagcaagatgtgagagagtccgagtggcctggaggaggaaccgggtcaaccaactccacagggcggagcgaaaacgctggaggactaagggggctaagagttgatcccccctttgagtcgtgatacggtccgaagcggggcggggcggggcgaaggaggctccccctggctctccccgcccctcacccgccttccttgctgagcggccgcgggagggggagcgcgagccccgcaggcccctcccccggcgccggcgcccgagctccgcccctcgccgagccgcccctcgccgagccgcccctccgcggctgcagcaagagctcgcccagctctgcgggcgccgccaccttcgccgccaccgctgcctttctcctcctcctgtcggcgtgcgggggccgcgcccggcggcagctctgccctaggtgggcggcggcgcggcccaggctgcagctgagcgctctgcgcggcgcagccgggtctcccgcgtgtaccacgccgtgacaggtgcagagtccgggctgaggacccacctgcagccgccgccgcgatgcccaccatgcggaggaccgtgtcggagatccgctc

SEQ ID NO: 282842 - DNA, 1000 bp, Homo Sapiens
tttccccaatgtggcacaacaaatccccttagtcctgatctatttatttcctcgggaattccttacatattaatttcctttattgtatgcctgtctactctgcccactagaatgtaaactccagtaagtagatcagctcttttgtctgttttattcactaattcatcctcaggacccagagctgtggcttggcacataacaggcacaacaataaaaacttgttgctgttgaatggctggagaaagctcatgacagaagcactacattcaaacaccttcagtatcactggtgtaacaatctttggaaggcaggctcctgatctactgctgtggggactcagatttcgccaactgcctgcaggtgggaagcacacccttggctggttcacagccatctgctgctgttatctctaccactttcgaccacaaaaacttatccccatcttctttagtaagcatgacacaatgacatctcataggtgtcagatgcctaagagattgaaaacatagcacaggaaggaagctgttgcaccatacaaccattgtgtgtgtgtgtgtgtgtgtgtgtgtgtgcacgcgccacaaactaaagtggaaaagtgtcacaggtatatcatttaggagaccttaatcacttctcctgaagcatctgccaacatataatcaacaaagttttgagattgggcgcagtggctcactcctgtaatcccagcactttgggaggccaaggcaggcagatcacttgctctgaggaattcgagaccactttaggcaacatggtgaaccccatctctacaaattaaaacaaaaaacaaaattacccagtagtggtggtgcaagcctagatggagtcttgctctgtcacccaggctggaccgcagtgatgcgaccttcagctcactggcaacctcccactctgggtttcaagcaattctccttgcctcagcctcccgagttgctgggactacaggtacatgccaccacacctggctaatttttgt

SEQ ID NO: 282843 - DNA, 1000 bp, Homo Sapiens; identical to SEQ ID NO: 206353

SEQ ID NO: 282844 - DNA, 1000 bp, Homo Sapiens
actctctctccttcccctccacagaatcaagtatcagctggttagagatccacaccctgacagctctgtgatgttggaacaacttggttcttgcagagggttagcaggtggtcaccagggatcggggaggaaggggtgtggcttgcaggaaggcgaaaatctggactagcaaatagggaaggggacccatgtgagcaacgctggccactaggaatgagactgagacctgtgggatctagcaagaagcccagtgtgaccagcgacacgatctatgctggggaccacttgggagagccaaaagctttggtggagatgaatggagaccatcaacctaagttcagcatcctcctctaagctttgcagatgaatcctgaaatggtcagcccctccagagaaaagaacagcaacaggctcagaggacccacagtcccctttattagtgtaaagtagtactaagaggaatcaacagcatttagcaccaggcacaggctcgtgttcccccgcccactacggctgtgttctgatatatgaagaatggcggcaagactccaactctgtttttgaaaaatttattttatactcttagaagctaagaactttgccacacatgaaccaaatttagaattaaggttcttccctagtgtatctacttccttttgaaattttataaacaagattttatacacaagaggtagcagaggaaaattccagtctgcttgttccaagctcagaaggtaactgcacacacctcgatgttagcagggaaggtggggcaggacagggtaagtctgatgatacggcactctagttcctaaaactgactgtagttgtcagtgaccgtgtgaggactccaggagaagtcgtggtgagatgcccgctgggatgcttgttttctttcccaggatgccttcaacgggcagaatcggccatcttaagatcggcctcactaagggagcttcttgagaacacacagcattattgagttaattgtgcaattcct

SEQ ID NO: 282845 - DNA, 1000 bp, Homo Sapiens; identical to SEQ ID NO: 206365

SEQ ID NO: 282846 - DNA, 353 bp, Homo Sapiens
  misc_feature (278)..(278): n is a, c, g, or t
ctttctgagatctgcttttagtgaagtggatcaatgatgaaactagccaaatctgagcatcagaagtctttccagtctacctgatgcatgatctctacagttctgagaagcaaaactataaaacaatgtaaaacaataagggcatatgtctggtgtgtgtgtgtgtgtgtgtgtgtgtgtgtgtgtgtacgcacatgtgtttataaagataacagctgtaggaatgaatgagattgagggtgggggggtgcgtatgtatgtctatgaaagcctaatcntttctgggcaatgatgaaaaggttttactactgatctttgtaactatgatggtttctacacttgacctgagctca

SEQ ID NO: 282847 - DNA, 1000 bp, Homo Sapiens; identical to SEQ ID NO: 206362

SEQ ID NO: 282848 - DNA, 1000 bp, Homo Sapiens
gagaggttgaggcacaagaattgcttgaatctgggaggtggaggttgtagtgagccaagatcgcaccactgcactccagcctgagtgacagagtgagaccctgtcaaagaaagaaagagagagagagaggaagggaaggagagaggaagggaggggagggaggaaagagatgtaaaaatggtaggttttctttttctttataaggtgtcctggttaaacttttagcaaaatgatagattcagtttttccatagttaaagaagaatattaagaacattaaagaaaggttcaaggatggtaaataatttgaattccagctgtacttgaagactttattggaggacacagaaaggtataagtgatggtcattatcatcaggagctggataattcagtttttaaataacagccttcaggctgggcgcggtggctcacacctgtaatcccagcactttgggtggccgaggtgggtgtattgcttgagttcaggagttcgagaccagcctggacaacatggtgaaaccctatcgctactaaaaattcaaaaaattagctgggtgtggtggtgcacgcctgcaatcccagctactcgaggctgaggcacgagaattgcttgaacccaggggatggaggttccagtgacccgagattgcgccactgcactccaggctgggtaatagggcgagactccgtctcaaaaacaataaatacaaataaataaataaatagccttcaaccaatcaagggttttgataagatgtcaaccagttgccctgggctcagtacaaaaacaaccaggggcatggcatggtccaggggatttcggactaggggtttgagaattttaaggcatgtaaaacattggaatggattccgtaggatagacttctgttttaagaaagctgtttaatatggagaaattctcaaatttttgagtaggttcagctatagagcctaacttactattacagacagaggaaagaactaggtagtattttttta

SEQ ID NO: 282849 - DNA, 1000 bp, Homo Sapiens; identical to SEQ ID NO: 206363

SEQ ID NO: 282850 - DNA, 1000 bp, Homo Sapiens; identical to SEQ ID NO: 114957

SEQ ID NO: 282851 - DNA, 1000 bp, Homo Sapiens; identical to SEQ ID NO: 206366

SEQ ID NO: 282852 - DNA, 1000 bp, Homo Sapiens; identical to SEQ ID NO: 114958

SEQ ID NO: 282853 - DNA, 1000 bp, Homo Sapiens
ttcagtctgatgggaaaatgtcacctttcactactgtgattagctcatgtcattttatcctcaccctggctcagactcgtaactcacagagaggtgcctttttttccccttaaaatcactgaaggcatgaatcatagctatgtaccttcctgatttagggcatatttgtggcagaaacgcatgaatgaatatgatgattatttacttatgaacctaatcagagattcaggcatcagtcttcccaggatgaactcagatggacttggttcagaaggaataaattacagggcgtgtccatttgtgatgcacctgcataatatgtggatgttgttttcacacgattatgactgccatgatacatgaattttgcatggttctactttaaaggatatagttgttaagttgccaaatttataactttagatattattccaatttgtttttgttttcagatagaatttccgtctgtctcccaggctggagtgcagtggcacgatctcgactcactgcaacctccacctcctggattcaagtgattctcctgcctcagccccctgcgtagctgggattacaggtgcccaccaccatgcctggctaatttttgtatttttagtagaaacggggtttcaccatattgaccaggctggtctccaacccctgacctcaagtgatccaacgacctcggcctcccaaaatgttgggatgacaggcatgagccacagtgcccagccagttttccaattggaaacggccacctgaaactttttttaatgactgtgaaatatgacttgtcattaaatgatcagattttaaaagacctagaaaactcaaaagaggtaacaatgaagtaactatttctaacataaaataatttcctcctcacccaccttgctcagatttcctaggtcaccttgaaaggatccgtgctttagaagcaaaccttaacaacgatgttcctgtcatttaacacttaaaaaagcctaccttttgattctaatga

SEQ ID NO: 282854 - DNA, 1000 bp, Homo Sapiens; identical to SEQ ID NO: 206368

SEQ ID NO: 282855 - DNA, 1000 bp, Homo Sapiens
tagaagttttccagagactgagctaggggttgaggacatctcagagagaagggacagtatgcccaaagatcagggtgggtttgctaaatggcaggcatgttgaatgggcacaggggaagcagagatataggtgaggacagatcaaggtggacttgggcagccaggtcaggaacttgagttctgtctcaaggacagtgggactctggaaagatcatagctcggcctgaggactagactcgtggggcaaaacctgtagaagggtaaagaagctgctccatgatccctaatttggggagaggggcctaaagcctgaaccttggcccaggggtaaagaggggccctttgggaattgacaggatggaggtgagctgtctcagctcgtctgctatccacctcttactggactatgtcacctggctggtagaaaggtggcatctgtagccgaccctaggagtttccttcttttttttttttttttagcagagtttcgctcttgttgctcaggctggtgtgcaatggtgtgatctcggctcactgcaactccgcctcctgggttcaagcaattttccacctcttgggttcaagtgattctcctgcctcagcctcctgagcagctgggattacaggcatgcgccaccatgcccggctaattttgtatttttagtagagacggggtttctccatgttggtcagactggtcttgaactcccgacctcaggtgatccgcccacctcggcctcccaaagtgctgggattacaggtgaaagccaccatgcccggctgaccctaggagtttcttaaccccattagcccagttgctttgctcttccctggccccagccctaattctcctgctggctggagatgtttcagagcctgagccctctaggtagggcaggtccacggctcctacctgtctgtctcagattctttctagaagagttgccttcccaagacttccttctccaccctggttttcatactcctccagaagtgcttt

SEQ ID NO: 282856 - DNA, 1000 bp, Homo Sapiens
tgggcctttgtccgccttgtggacaggtggttaggcaggatgtttctcacggcctgaacccccatgggatgtttcactttgaccaaggtctgcaaaatggcaaagaacttacaaaatggtgcactttggactaacaggtgaccctacccatgctcctcttcttcttccccatagatccctaccctatgattcaaccttgttcttctctggcacacaccccttcctccacctgcattccttctcataaagccccccttgctatccagtctctatcctattcacccaaaataatgtctttctggcctctccctgttttcttaacagatgcaggagacaccaaacagggacttagcccccgaaccgagtttgaaaaagatgaaaacgtcagaatattcaacagtattagcgttttgctacaggaaagctaagaaaatacattcaaatcaactggagaatgaccagtcctgagagaactccatcaatccagtccaagaggaggaggacgaaggcctagactcagctgaaggatcttcaaagcaggatgaagacctagacttacctgaaggcctagactcagctgaaggatcttcaaagcaggatgaagacctagacttacctgaaggatcttcaaagcagaatgaagacctaggcttacctgaaggatcttcaaagcaggatgaagacctagacttacctgaaggatcttcacaggaggataaagacgtagaattacctgaaggatcttcacaggaggatgaagacctagagaaaaagcgatcatctaggtcaagaaatgaaatcgaaatttcagaaattacagaaattctccaaggaaggagccagataaataaatattctgatttcattttcctccttctccagtgatctgcagggacctaccattcactaaaactaacccgaagccatagaacaagacagcttattaatacagtccatggtttatatgagtagatttttagcagcacaaagtagagtggag

SEQ ID NO: 282857 - DNA, 1000 bp, Homo Sapiens
gatcaggtggtttggccctttttccagtggaatatcattgtggtgttcctttgcagctgcctggaaaggggaatgaaggaaaaataagatggagagtttaatcaatatctggaggttagcccagggctggagaagatgaaagaataaggggaacaggacttatgatagggatgtttctttagttgagcctttgtccaccttgtggtcaggtggttaggcaggatgttgctcatggcctgaacccccatggaatgtttcactttgaccaaggtctgcaacatagcaaaaacttacaaaatcatgcagtttggactaacaggtgactctacccatgctcctcttcttcttctgcatagatacctaccctatgatttcaccttgttcttctctggcacacaccccttcctccacctgcattccttctcataaagccccccttgctatctagtctctatcctattcacccaaaataatgtctttctggcctctccctattttcttaccagatgcaagaggtaccaaacagagtcttagcccccgaacagagtttgaagaagacaaaaacatcagaatatccaataatatttgtgtattacctcaggaagggtaagaaaataaattcaaatcaactggagaatgaacagtcccaagagaactccatcaatccaatccaaaaggaggaggacgaaggcgtagacttatctgaaggatcttcaaatgaggatgaagacctaggcccatgtgaaggaccttcaaaggaggacaaagatctagactcatctgaaggatcctcacaggaggatgaagacctaggcttatctgaaggatcttcacaggacagtggggaggattagtcacacatggagaaaccaaattggacaaatcatcaccactgatggcgatgattacaataaaatcaagtttaaggagctgatgactgtgtttatctctgcctgttgtctggtgtggggtggggaagggaagggaagggaagaggtag

SEQ ID NO: 282858 - DNA, 1000 bp, Homo Sapiens; identical to SEQ ID NO: 206369

SEQ ID NO: 282859 - DNA, 1000 bp, Homo Sapiens
tcgattttgaggatacacttgcttgtggccattctgtgcttcagataagttaaaaatcatgagcccaatgctgttgacagtgttctcccttcatcctccagaaacagcttcttggaacaactgattgctttaatttccattgaggagtgattgcaaggtccataattcaatgattattttcatcttctataaattataaattttatcttcactctactttttctatatttctctcctcctactagcatgtagacttgtatttcctgccaaataagttgactgaaatgaaagaatccatttattcacattgataacaccatgaaaagaaaataactgcttatatactatgctacagcctgctaacataaaaatcagatggtttacaccaaggtttatgaacctcggcactgttgacattttgagctagacaattctttgttgtgggtggtggccctctacattgtaagatgttaaacagcaaccctggcctcttacatcttactagatgacactagcacctcctacacagtatgacaataaaaaatgtctccagactcctaacgtcatcccatgttgggaactgttggtttatactacatggaacatgaatgttcgcaaacagacataagcttagataaagccacattttgtttattctccatgagctctctgggcgccaattatcctgttataaaaatcagtcagattcatcaggccaagatatctatgtttggtattttacaaatataaggatatttataatcatatcaataacttgggactttgaggagagctaagtgattatttgagaatgactgacctcaccattaaatgggatgacagaaaaaaatgagaaatagtacatagaagtggacagcaccccttatcttggtgtttgaacccatgggacctaattagtctcagaaaaaaagaaaagcttgatcaattaattgggccaggatgggctacatgggttggctatagtgttcagaatgctagc

SEQ ID NO: 282860 - DNA, 1000 bp, Homo Sapiens; identical to SEQ ID NO: 114959

SEQ ID NO: 282861 - DNA, 1000 bp, Homo Sapiens; identical to SEQ ID NO: 201517

SEQ ID NO: 282862 - DNA, 1000 bp, Homo Sapiens; identical to SEQ ID NO: 114960

SEQ ID NO: 282863 - DNA, 1000 bp, Homo Sapiens
actgatgttgactgttgaatctcatggcaacaccagtcgatgggctgtctgacattttggtatctttcatctgaccatccatatccaatgttctcatttaaacattacccagcatcattgtttataatcagaaactctggtccttctgtctggtggcacttagagtcttttgtgccataatgcagcagtatggagggaggattttatggagaaatggggatagtcttcatgaccacaaataaataaaggaaaactaagctgcattgtgggttttgaaaaggttattatacttcttaacaattctttttttcagggacttttctagctgtatgactgttacttgaccttctttgaaaagcattcccaaaatgctctattttagatagattaacattaaccaacataattttttttagatcgagtcagcataaatttctaagtcagcctctagtcgtggttcatctctttcacctgcattttatttggtgtttgtctgaagaaaggaaagaggaaagcaaatacgaattgtactatttgtaccaaatctttgggattcattggcaaataatttcagtgtggtgtattattaaatagaaaaaaaaattttgtttcctaggttgaaggtctaattgatacgtttgacttatgatgaccatttatgcactttcaaatgaatttgctttcaaaataaatgaagagcagctgtccttctttcctcttttaagtgttcagctgtggcatgctcagaggttcctgctggattccagctggagcggtgtgatacccttctttttcagctgttcgtgccttcctttcttgtgtccaccaaagtggagacaaatacatgatctcaaagatacacagtacctacttaattccagctgatgggagaccaaagaatttgcaagtggatggtttggtatcactgtaaataaaaagagggcctgggaattcttgcgattccatctctaaaaaaaaaaaaaaaaaaaaaaaaaaaaaa

SEQ ID NO: 282864 - DNA, 1000 bp, Homo Sapiens
attttgctgactgggcttcttagagtttatgtgacttgaacagcttggcccctgcctcccttctgctactgtgagcagccttccttcttccttcattcttcctggaatgcagttctcttgcttatgatcctatgaataaggcaaaatggctggtctttgtaaggcaggtcttgccctagcttctcagaaacaggagcattttaggatcagtattaggagatgccccagggagtaagaaagtattgggttcagtgataaatctggactctgacacttcttttactctccctctttaatactaaaagctctgcataagcagtggttcagaacctgtcttgggtacagacctgttgaatctgacagaaaccagaaacgcacttttgagaaaaagacatttgtaattcactcagttttccatacacatttagcaggttcaaagcccatctgtggaatccctaaactgccttcaaagaaagggagttccccgatctaaaatggtcattatatatttgtgtcaagaattagaaggcaagggtcactaaatattttaaggattaaggtaccagaggcatcagtggtataaggatggagtctggtctttaattacgacaagggtattgcttacattctactctctggttttcaaaaagatctgacatgctgacaaatccagctcctcacaaatcttgtttgaaggacttgtgggaagtgatattccttactattagatcacgccccttataactacatgttaacatccagccttttatctgtttgagtaattgtagggatagaaagtgaagcccccagagttaggtgcaagtatagcacccagctgaaaggcatcatggagtctaagggccttctacagaaggggcaatcctttgggttatttctggtgtaccactgtcttctctacctcggtccaacaccacctctcttggacaaaaaataaaacaagcaacagccatcaaaaaaaaaaaaaaaaaaaaaaaaaaaa

SEQ ID NO: 282865 - DNA, 1000 bp, Homo Sapiens
  misc_feature (989)..(990): n is a, c, g, or t
cttccagtgagctgagagatgccactacactccagccactacactgcagtcctgggcaacacagcgagatctctgtctcaaaaaaaaaaaaaaaaaaaaaaaacccaacagatctcatgagacttactatcatggggatagcatgcaaaagacctgacccatgattgaattcctgcacagctcttgtttgccaccatgtaagacatgccattgcttctcctttgccttccaccatgattgtgagacctccctagccatgtggaactgcaagtccattaaacctgtttcctttataattatcagtcaccagtatttcttcatagcagtatgaaaatgaaccaataccctgggtgtcaggtaaatgtttggaatgtttcataatctaacaaaaggaggtcagtttacctaatgttaataaaactcaactcataaaatttctaaggtattgcaactcaagcaagaaaacctaaatatggtatcatgctatgtctatcagatgtttttgtttgcatgtttgattccttagctttaaaggtactgaatccctgcaggaagtagcatgaaggattctgcattatagctgagggatttgtaagatgaaaggtcctaaacatgaaatgagatcagtggaagctcatgatttaaattgttatttgaaaaaattgtttgatctgctccctccaggggggaaaaacatggtgatatcctagatacaatgtgacaatacattaattttttttcttccttagtatctagatcaccatggcgactggacagaagttgatgagagctgttagagtttttgaatttggtgggccagaagtcctgaaattgcgatcagatattgcagtaccgattccaaaagaccatcaggtagaaataaaattactttattgaggctttaaaatccactaaataataacctgagtgtgaatgttgaaaatcaaatcaagataaaggtaagttgactgaaaatcacaaatgataannttttctataa

SEQ ID NO: 282866 - DNA, 1000 bp, Homo Sapiens; identical to SEQ ID NO: 114961

SEQ ID NO: 282867 - DNA, 1000 bp, Homo Sapiens; identical to SEQ ID NO: 206370

SEQ ID NO: 282868 - DNA, 867 bp, Homo Sapiens
  misc_feature (669)..(670): n is a, c, g, or t
tgagatttgcttccccagaacagttttatagatagaaaagcacttctggtacagcaacttagaactgttcgtttgtcgggaacagttgtgtgagtggaaattgcaatatcagctgttatcagctctaactagctctaactaggtcttgaaatttgcataatttcagctccagtgttacatgaaagttatgtggtgtttggaaggatgcctttttctttgttttttagcaaaggagtcttttaaatcatttgtatacaaaaggaattaggatccaaatgctgttattgatacaggtttgatgcttcaaatgtggcttttccctcccttaggggtatagaacaggctatgcttacaggcatcctctcattcgagagaagcctaggcacaagagtgatgtggaaatcccagcaactgtgactgctttttcctttgaagacgatacagtgccactctctcctctcaaatacatggcacagaggcaacagcgtgaaaaaacaagatggctgaactcaccaaatacttacatgaaagtgaatgtgcctgaggagtctcggaacggagaaaccagtccccgaaccaaaatcacggtatgccagtattttatgtagtttgcctttactaaatattttgcctagttactcaagaattgaatgttctatattgaaaatnnttggaaagtaaaataatattaaaaatattactgtcacttatctggctttaactttgtgcaagacactcttctaagtgccatacacgaattttctcatttaactctcctaatatgaatgatgctgtttttctattttatagatgagaaaaccaaggcaagaagggttaattaatcatgttttaatggtaaactcggga

SEQ ID NO: 282869 - DNA, 1000 bp, Homo Sapiens
tgctggagaagttatcactcagagagagctggtctccaggcaggtgagcaacgaccttacggagcaagcagccacatttgggctcatcctggacgacgtgtccttgacatatctgacctttggaaaggagttcacagaagcagtggaagccaaacaggtggctcagcaggaagcagagagggccagatttgtgaaggaaaaggctgagcagcagaaaaaggctgagcagcagaaaaaggttgagcagcagaaaaaggcagccgtgatctctgctgagggcgactccaaggcaaccgagctgattgccaactcactggccaccgcgggggacggcctgatggagctgtgcaagttggaagccgcggaggctctcggaacatgacctacctgccggcggggcagtccgctcctccggctgccccatgagggcccaccctgcctgcacctccgcaggctgactgggccacagccccaatgattcttaacactgccttacccccctaccccagaaatcactgaaatttcataattggcttaaagtgaaggaaataaaagtaaaatcacttcagaactcttaaaaaaaaaagaagaagaagaaaagaaaaaaataaccaattagttgggccaggtggctcatgcctgtaattctagcactttgggaggctaagagagaagagcttgagctcaggagttcaagaccagtctgagcaacatgatgagaccccatctctacaaaaaatttaagaattagccagacatggtggtgcatacctgtagtcccagctacttgggaggctgaggctggaggatcccttgaacccaggaattgaaggcagcagtgagctttgatcacgccactgtaccccatcctgggtgacagagtgagaccccctcaaaaaagaaaaaaaaaagaaaagtagctggttggttaacatcaggttacttcaggctactgtttttgtgtgaggattaaagcagagggaacttcattatcatgctg

SEQ ID NO: 282870 - DNA, 1000 bp, Homo Sapiens
cttctcctctggctacagggcgacagtcccggcccagttcagaagaacctgcacaaccctattgtacagtcactagaggatcttgaagaccaaaaacggaaaaagaagaaagagaagatgggattcggctccatctcccgcgtcttcgccagagggaagcagcggaagtccctcgaccccggcctctttgatggtaccgcccctgattattacatagaggaggacgcggactggtgatacgcgctcccctgcgcctgctgcccgcaggcgtgtctgtgcgtgtgggcgtgtgtgcaagcgagcgtgggtgcgcgtgtggccgtgcgtggggtgcgtgtgcacgtgtgcgctggcacacatgggtgctgggtgtggccgagcgcctctaacaagtgaaaacacgagtgtgaacctctctcccctgcgtcgccacctctgtaattgatgtacataccgcaaaccgtgtgtgaacctgtcaactctctgtcgtctttggagcgatacagttgtgttgttaatctggtttattatttttcttcagtgtttggtttttctttttctttttgtttggttcgtcggtttgtttttgtttttgtttttttccccctttctcctcccctcctcctttttatgaaacttgaaaacttgaaggactgctgtgtatttgtaaataacaaaactattgtgcactctgtgcttgtaaatgtccctcgtccaaaccgctactcctggagcccgtctggcagaggatgtggtctgtttttgatgtcccccctcccgcccccctggtgtgaacgtgtgggaccagaccctgtcctgggggtgcgcccaagtcactttaaccacaaaacgccatcgtcgtcagggtaagctctgctctctacaaagactcgcgagccgggccaaggggccttgtcttggctgggtttgtcagaggtcaaaccggctcttttaaacggcctaccagtttttaaattgcattgccgtttctttctttatg

SEQ ID NO: 282871 - DNA, 1000 bp, Homo Sapiens; identical to SEQ ID NO: 195008

SEQ ID NO: 282872 - DNA, 1000 bp, Homo Sapiens
cccctctctcccattcgtttgaagagacactgagggaaacaagggtttcttttgaggtgtccttggctgccttttacgggatgggagccttctccggatcttttgttcttctgcacctcttgtagctactgccggtgcaaggttgtagatgttattccccaggagcctgggcttgggggctgagctgggctgaatgcaaaagcatgcaaccagaaggcgggcaaggggaggaaaagcaggcctggcctcattggtcccctggagatgtctgtagcagtcagctccagcttgggcctggggaagcagcctgaccaaggcgctcaggtgtgcctgttacaagaagaacctgcagaaggataatttgcacatggagctgtgataacactaatgttgattttttttttttttacaagtcatcagagatgtttgcaaagtgagttttatttttttgtaattcctttatctttacttaaaggtgaatgtgtattcctctgggaggaataggaagaaaacaggaatgttaataatgtcgaacagaaaacttcctcccttattaatatataatcctcatgtatttatgcctaatgtaagctgacttttaaaaagctttcttttgttgcatgccctgtgcaggcatctgtattgtacatgcatgcctttcgtcctgttttcctgtataaagttagtgaacaaagaaatatttttgcctagttcatgttgccaagcaatgcatattttttaaatttgtcatatatggaaagagcatgtttgttacatgtaaaagctttactgatatacagatatactaatgtttgaagatgctgttctttgcaagtgtacagttttcaaatgttgttaccagtgaaacacccttgtggtttaaacttgctacaatgtatttattattcatttcctcccatgtaactaagaatcatggctatatttcatatcaacgttatattgaaagtgaagggaaatgattaatacaaggttttgtaac

SEQ ID NO: 282873 - DNA, 1000 bp, Homo Sapiens
aatgagacgttctttgcggaaagtccctggagtttcctggttcaacagtgcttggacggaaccaggcactcgtaccccactccggctggccgcccatagctagccctctgttacctcttcactgggccctctgactgtcccaaggcccccgccgccactccagcgccgtgcagccaccgccgcacagccaccgtggccaccaccatgacgactgcgcgtccccctcgcaggtgcgccagaactaccgccatcaaccgccagatcaacgtggagctctatgcctcctacatctacctgtccatgtcttactactttgaccacaatgatgtggctttgaagaactttgccaaatactttcttcaccaatctcatgaggagagggaacatgccaagaaactgatgaagctgcagaaccaatgaggtggctgaatcttcttccttcgggacttcaagaaaccagaccatgatgactgggagagcaggctgaatgcgatggagcatgcattacatttggaaaaacttgggaatcagtcactactggaactgcacaaactggccaccgacaaaattacccccatttgtgtgacttcactgaaacacattacctgaatgagcaggggaaatccatcaagaattgggtgaccatgtgaccaacttgcgcaagatgagggcacccgaatctggcttggcagaatatttctctgacaagcacaccccggggagacagtgataatgaaagctaagccttaggctaatttccccatagccatggggtgacttccctggtcaccaaggcagtgcatgcatgttggggtctcctttaccttttctataagttgtaccaaaacatccacttaagctgatttgtaccattccttcaaataaagaaatttggtaccccccgcccccaccaaaaaaaaaaaaaaaacaaagaaaaaacttcttgttatggactaggtaaggtacaaaaatgtttacagataattaaggttaaaaattt

SEQ ID NO: 282874 - DNA, 1000 bp, Homo Sapiens
ggaaatgtgcctattttacactttggaccttattcactgttgttaaatttttcagataaagctcaacacagtccagcaactagctatgcttagcctccttatcttcatttttaatgcgacaccgtgaactccagtcaagaaaacacatttaagaccctttacacttgactgatgcacctgaggctttgcagtgttatgcagaggtatcagtaaatatttaatagttgtgaatgaaattaaagtcctggaacccttgtccaactaaataggcccctccaagagactgctctgatgtcatttactcacatagccagtgcttagatgcttcatgattagtaatttttatatcctttctggaggttttttgctctccatttggtggtaaactctggtaatgaatttttcactccaatttttgcctaggttgctactattggtctattagggtgccttttttcagacgaaaagacatcatcttttaggaaaccttgtcaaggtcaacaaaacatgaacttattttaataatccttttgtattaacagtatttacttttagaattatgaagatgtgtttatccttccaagcagcagtctgggttgttgccacttgaaaaaaaaatacggtctattggagttggagaacaggcaggaaccttgatgtcataaaggaaaggaggtaaatggacagtaccttagtgtggttaaggaaagggctgagggaggtttagtctctctcagatgtggtagaaacttccatgtgagaacatttgccacctcagatgagaacactttttccattctccataagtctaactctaagctttttttttcttttttttttttttgtactttattttattctttgagaggtggggaggtgagctgccctttctttgacttaaggttcttacttttttggcttacaattctcagagactctggctgtctgcatacagaggccattcagagctccatttcaacaagcaattgcatatttgatc

SEQ ID NO: 282875 - DNA, 1000 bp, Homo Sapiens
ggttgatggtggtatgttttcaggctagatgtatgtacttcatgctgtctacactaagagagaatgagagacacactgaagaagcaccaatcatgaattagttttatatgcttctgttttataattttgtgaagcaaaattttttctctaggaaatatttattttaataatgtttcaaacatatataacaatgctgtattttaaaagaatgattatgaattacatttgtataaaataatttttatatttgaaatattgactttttatggcactagtatttttatgaaatattatgttaaaactgggacaggggagaacctagggtgatattaaccaggggccatgaatcaccttttggtctggagggaagccttggggctgatgcagttgttgcccacagctgtatgattcccagccagcacagcctcttagatgcagttctgaagaagatggtaccaccagtctgactgtttccatcaagggtacactgccttctcaactccaaactgactcttaagaagactgcattatatttattactgtaagaaaatatcacttgtcaataaaatccatacatttgtgtgaaactttgttgttttcagatgcgttcacttgtcatgtttcatcagtctctcactccaatttctaagcttcatggaacatgaaacacgaatctgtcttttagatatagcctcttttgagaattcacatgaattagaacacacatttttagttatctgtttaaactatggtaaaatatacataacataaaattttccattttaaccattttaaagttcagttcagtgtcattaggtacattcacatggttgtgcaaatatcaccatcatccttccacagaatttttttcttgcaaaactgaaactctttttacccgttagtcaataatcccgcatttatctttcctctaatgcctggcaaccaccattttactttctgtctctgattttgactactcgaaggacctaggagtgggatc

SEQ ID NO: 282876 - DNA, 1000 bp, Homo Sapiens; identical to SEQ ID NO: 114962

SEQ ID NO: 282877 - DNA, 1000 bp, Homo Sapiens; identical to SEQ ID NO: 207011

SEQ ID NO: 282878 - DNA, 1000 bp, Homo Sapiens; identical to SEQ ID NO: 114963

SEQ ID NO: 282879 - DNA, 1000 bp, Homo Sapiens; identical to SEQ ID NO: 114964

SEQ ID NO: 282880 - DNA, 1000 bp, Homo Sapiens; identical to SEQ ID NO: 206371

SEQ ID NO: 282881 - DNA, 1000 bp, Homo Sapiens
gaggggcatagggtggggagggtgtggggggcctgaagagtctctaccaaaccctctggtgaccccgggcctgagccagccttgctgggcccatcactcacctgccacccacaccacacacctgggcccctctccccaccacctggctgcaagccacgggtcctgggagggggacggggccctcggcaggccaggccagggcttcctaacaggctggggcaggcccagtccccagggggtaagaggtgtggggacaggctgctctgtcctctgacgcccctggagcccctgtggtctccgcctctacctcagctgatgtcagagtgaagagctccctttcccaacttctctttctctgcctctggaatttcctctgaggcttagagggacatggaaaccctccctgggtcccacgagggcagaggcccagccacctggccgatgttggggggctctggcctgccccctctggaaccccagcactgccctcaaacccccattgcctccctgtatgccccggatctcacatgtggttcatggcacgcccagcccgtggggccttctccctcctcctgggcaccagctgcccttggctcccagccctgggccccagggggagaaaaatttccagcaggctggcagctccatctcccacccagccctggccagggaaggcactggagggtccaatgagggccaagaccccaacgaggtgcacagatggcctaactgcccctgcaagcctcaagcaggtcctagcttgccctgagcctgagggaagaggtcctcatgataccctactctgggctctgggctcagctccttggcagggaggtcccacctggcactggtatggtgagccctgctcagagaggaccaggaaacctctcaagtcacacagcagtttcaggatgagcacacgttctctctggcaccatccctgaggtcagcccaaggtcctccaccctccctttgcccagcgatcacatcgatggaatga

SEQ ID NO: 282882 - DNA, 1000 bp, Homo Sapiens; identical to SEQ ID NO: 201656

SEQ ID NO: 282883 - DNA, 1000 bp, Homo Sapiens
ctgggcaatttgattcccacgtggacagagcagctgaggtggggtctgcttggtcccacttaccctggggcctttacctctcagcatctcggcaccacacttctgtcagacctgcctaaaatttgctttttcaaaccattgctgagcagcatgtttgaatttctagcagctgctatttttgtgttagtgttctactgaaacttccaggtgttttcatcagaatttgttgtcaagctgtgtttccagtatcctgtccttgagctatttgtaaaaatctaaatgtatgcctttaagtgtatccttacattttatgtgatttgctttgggtccattgtttcagtttgcaaagtaattctgaatcttgcttcatcatttgctttctcaactttctatccctgaaagttttaaaaactgagaagcatgttctctatgtcttcatccaggtaatgacaaatatgttgaataggactaggtgtagaaccttgttagtgaaccaatagtgaggggttccctgtgggagtctagaacccacaggggacttgtataaagatctcgaggcagaatgactgcatgtcatggtgggaataatgaatgggaatgttttgcaaaagagactggagaaagaaatactgtgaattactgttcttaagttaatctgccagtctacttatggaaatgttctggcttcagtcatttagctagctgaaaattcagggagcctccctaatcattctgttttctgaaatatagcagtccttacgatttattatccaagcaagaatacatttttgtttttatttagttttttgagatggagtcttgctctgttacccaggctggagtgcagtggcgcaaacacagctcactgcagccttgaatgcctgggctcaagcaatcctcctgtctcacctcctgagtagctgggaccacaggcatgccaccacgcccagctaatttttcaagtttttttgtatagccagagtctcaccatgttgcccaa

SEQ ID NO: 282884 - DNA, 1000 bp, Homo Sapiens
  misc_feature (779)..(779): n is a, c, g, or t
tccatctacaaaattctagtacaaaaaataccctgaacagtttttattgcaatatgttgtgatggagtttgaccatatttcatgtatccagagattttatccaaccttggatctcagttgattttaaattcaagtttctcttatttggaaatacatggaaataggaattgctagtgatccctttcaccatttacgtgggcatgagaggacagaattactcctgtaatcctttccatggcactatcacagtgaatcacaacattgccattcagctttacatattacccttaatttccctctttgtttaaatggggtagacagcagtcatattttgtaatagataggtactttggcttttttttcttttttttttaaatgacctcctggctaatgagagaagtgatatgtgtactagagcctcagaggagagaaaaagattataaagttgaacctggttggaacactggcatattcaaatagtaatttgtaaaataacttgtgacatggatttgcatttttattagtgggaaaggggcatgaaataatctttggtttatgccatttaaaaattattcttaatctaatctgataatcagatattttacatatcatattgtgattatttttaaatatggaagcactgttttcataaactcttaaattgttagtaaaacatttgttataaaatgtaaagagaagatgaaaatggacttttcttccagttttacagctgttctcttccgttgatccccactggctcttctttcatttcagcctcntggttctttcttaaaagaaaaccatgtctttttccccttagtccagaggtagacatagctgaacagaaagcttagacattcccatttagtgtatttgcttctttgtgagattaatttgtttctctttctctttccctcttctctagtgtggattctttaaacgctctaggtacgatgacagtgttccccgataccatgctgtaaggatccggaaagaagag

SEQ ID NO: 282885 - DNA, 1000 bp, Homo Sapiens
gtgatatgagtgtagtttgcttgttctttattaattttaataagccagctcattgtgtagtgaaaggaatataatgtggccaggctcacgcctgtattcccagcactttgggaggccaaggtgcatgaatcacctgaggtcaggagttcaagaccagcctagcccacaaggtgaaaccctgtctttactaaaaatacaaaataagccgggcatgggggcgcatgcctgtaatcccagctacttggaaggctgaggcaggagaatggcttggacccgggaagcggaggttgcagtgagccgagatcgggccatcgcactgcagcctgggtgacaagaacaaaacttcatctcaaaaaaaaaaaaaaaaaaaatcagtaattctagattggccctagggtgcttttagcattggaaacctaatgcacaaagtgatggttatattggactgatctgtaattcactgttttactgttattattctatctcttaatcttaggctaaagtaaataatgccagcctgattggactgggttatactcagacccttcgaccaggtaagtaaaggaattagtaacagaggggttgaggtggaaggtgatagagaaaacaatgaaaataacctgcagaacaacctgtagtcactgtaagttgatttggaccattttgtaacatttggttgttcagacagaaaacaatacagatcaaatacttttgcattaaaaaagtatgtatttctgactataatgtggtcactttggcctttgagtttggttgatcactcattgcccttaaccctgaacttcagagaaagtttgccatgatcatgctttcctcattacacatcagatagttataaataaccgattgagtaatagctgtttgcttatagctcgtatacccagctacaatccacaccattgattccatctgttgtttctagaaagttcagatctaattgtaatacttgtttcaagtgattgtggtgttttcttcttcctag

SEQ ID NO: 282886 - DNA, 1000 bp, Homo Sapiens; identical to SEQ ID NO: 114965

SEQ ID NO: 282887 - DNA, 1000 bp, Homo Sapiens
ctaccctgattaaatgagcgtcagatcatctgattggaagcaggattgaaatattctccagtactagtacattttttcctgagtgctgcatctccctccgcctctgggcaagctaagcctgagtgttctgttcagcactaagggaaacctccggggtttcagtgtccggttcttgtagcaagctgaggaaagtcagatgccaagtgctacctgcactgcctgggcattccagcagctcgctgaattcatctcggggaggctcagaaaaggggcagcatctggagcctgagagtggcgaggagaggggcaagcccagagcatgagctggttcctggggggttttgcagttaggacaactcaggaaaccaaggcccggcaagagtagcttctggagacagctggcacgtcactgcccaaggactgtgggccgagtccgtatggtttggctgctgcactcacctgtgtcccctgtcctctttccctggacagtcctgtggctacggcaccaaagacgaggactacggctgcgtcccctgcccggcggagaagttttccaaaggaggctaccagatatgcaggcgtcacaaagactgtgagggcttcttccgggccaccgtgctgacaccaggggacatggagaatgacgctgagtgtggcccttgcctccctgggtaagcacaggccctcctggcaaaccctggcatgctttctgcagaaaaccccgaggggctacgggcaaggaccttgggaacaggggtcatggatactgcaggcctcggtgcagccgcacacctggccttggtcccatcccacaaggagcagcatccaggacggagagtcctggcccctccggtggacaggcagcccatcaggctctgcctctgtgtctcctaagtggccattaaccatcataatatcttctgaccaccaaaaggaaacaaattgcttgaatacttacagtgcagtagcccatgtgaaacactttgggaaaaagaaaact

SEQ ID NO: 282888 - DNA, 1000 bp, Homo Sapiens; identical to SEQ ID NO: 114966

SEQ ID NO: 282889 - DNA, 1000 bp, Homo Sapiens
gcccttttccctggccctggcttggagaatctgttttcaatctccactgattgcccccttgctggccagcccaggggcctttaccatgttctctccacatccgtaaataaacttccttcactacactgtaatctgtgagcatgcttcctctgccctggcctctcttgggccaagacctgctcctgggctcccaaatgctggctccagtcaaggcttcagtcgtggtcctctgggagcatccaggctggggtggtttggcaaggggcttactagaccatcatgtgcagagagcagcagagccccttgtacaaaaaccaggacccctgggttccctgtggataggatgagctgccaaggagatgtcactcttggcaccctccaagaatcattacggccgggtgcagtggctcatgcttgaaatcccagcactttgggaggccgaggcgggtgaatcacctgaggtcaggagttcgagaccagcctggccaacatggtgaaatcctgtctctactaaaaatacaaaattagccaggcatggtggcatgtgcctgtaatcccagctactcgggaggctgaggcaggagaatcacttgaacccgggaggcggaggttgcagtcagccaagattgcgccactgtactccagcctgggcaacaagagtgaaactccatctcaaaaaaaaatacagaattagccaggcatggtggcgtgtgcctgtagtcccagctactcaagaggctgaggcaggagaatcacttgaacctgggaggcagaggttgcagtgagccgagatcgcaccattgcactcctgcctgggcgacagagcgagactccgtctcaaaaaaaaagaaccgcgagcactttgtttctcttgcttcttccacttcactcttcttcagccagggcagccaaaggcaggatgggtgcttcccggatccaccagagggggaaaggggttgggcgtgtatgggggcagaacttttccctagtgagagccttg

SEQ ID NO: 282890 - DNA, 1000 bp, Homo Sapiens
gtcagtctgggtgtctcaggttctgtgtgtccttgtgtgcatttctgtctctctctgtcctcgtctctctgcaaggccctctatttctctctttcttggtgtctgtcctttgccccctgtgccctctggattctctgggtctatgtaggcccctggtctgccctgggctcatcagccttcctgacctcctcctgccctccccttcactccctccctggctctgccagtcggttcccacggagccatttttagctctgatcagcatgggaatgtgcctcggcttcaaggggctttgtcctggtgcccccgcccctggtcccaacctgatcccacgagggagttgggacaggaggattgatggggctccccttcctgccagcgtcagaggccctggagaggggctgtccatggcagctggtctttattcctccctcatgagcacagggtcgggggggtccccattcttggaagaggttgagaagactcctgggcttcagcctctcccacccagccctgcccctcccctcccctcccccactctatactagggactggatctcagcctctgatcagtttcacaaagtttgttccctaaggaaatcaaatcccattgtcacctaactctgaagatctaaatagcccttggatcagtacgggaaccccaaatcccacagggccagatgtggagtctgtgtctgcccccgtcttctctccatcctcaaagcccccacttctctccaggctgtttctttttttatggactgtaaacatagatagtgctttattttgttaataataagataatgatgagtaacttaaccagcagatttctcctgtttacactcgggggatttttttgttttctgatgacataataaagacagatcatttcagaatctggcccttgtgcaggggaggagggaggctggcctaagtccagaattcccaaatatgccaccagcctgggcaccactgtcccctggtggcagcctgcaggagc

SEQ ID NO: 282891 - DNA, 1000 bp, Homo Sapiens
aaagataaaggataattaaggggaagtggatggaggacacagaatagtaggaaatggttttgtaatgctccattgcgcacatagcaaacctcattcaacatacagacctgctcccttttccctaggtccaaagaccttaaaaaacctggagctagaaagcagtagactggaggcttctacagactgtaggattcaaggtgatatttgcagactggctttatgagagacaacactgatctactaggggctggaccctagattggttgccagggcttgtgtgtgaatcaaccctaggaggaaaaacctactaccaaaccagaagagcaggcctaagagtactttgagcttctagaagaagtaagcgggaaaggaagagaaagagtagaaagttggtgcatcttctcctccccaagagcctgagtataagaagttggattttaagggtgggggagctgggttggagaaaggtaatataattaaagccaccacaaaacaacctaaacaagccatgttcatgagtaattgtaagtggcttctggatgagacctggcagtgtctctacatacttcctcagggagatagcaattgaaaatgtaattgaataaataaggaaaggaactgctatttggtgtgttcctctgtggacccagtttatttaatccttaaaataatatttttgggaagacattgattttgtccatttatgtggatgggaaaactgagactcattaatttgtccaatgtcgaacagctggtgttagtagagcctagactcaaacccagcttttaaagcccttgttctttactccactaaactgtaacctgtaatcctgtatgcactaacaggagttttcggtgaccttgaaaacacagattactataattactataataaatcccttacattcctgtctctacatggtttagggagtgccaaggctcaatgtagatggggtcaccttgtcagagcatctgtcatacagaaactgggttttcctgc

SEQ ID NO: 282892 - DNA, 611 bp, Homo Sapiens
tctagagtgccaagtcagggtggacaacgaggacctgggggctccgtctctccttgccccttgggctgccttcagggttaagtagagggtcccagctgagctctctggatgcacaggagcacctgggtacataagaaggtgaacagtttgcaaggggaaattactatcccccacagcatttgttccttcaggacactaaccctctggatctgtgtcttctgtgtctccagtggccaacagtgttgcaaacaggaacccgaggttttcacttcactgttgatgggaacaagagggcatctgctaaagtttcagattccgtaagttcatgctttttgttccattataaatgatttttttggcttagggggtaaggatctataccagtttgttttcatatgagtcatagacataagggaaaaatttctcataggtatccaatgcatgctgaaattattttcagtgtaataatacttaattgcaagtacaaatataaacatagatgtttacatttttacttgtatctgttatgtatctataaactagatttaaatttagatcaagtaaagcaataaattaaaataaaatgaacagtgtctgctgtgatagatgaa

SEQ ID NO: 282893 - DNA, 1000 bp, Homo Sapiens
taagagcaaaatgatctatgccagctccaaagacgtcatcaagaagcagctaggggtcagcactgtcgtcttcttggagggcaaactttgtgatcccctccagcgcccttcctggagaatctactagtcccagacctgccctcagggattgcaggctgcccccttcctgccagactggagggcctgggggaatcccagcagagggaaggcactcccttcaccccaattgccaaacagccccccaactccctggattttcctcctctctccatccctgacagttctggccttcccaaactgcttggatcttctgattcctcttgggttgaagcagaccaagttctcccaggaaccccagttggggaaggcctatatatatattttaaaaacaaccccactctccacctgttcctccaccttcccatgctacaacttctaaccacaacagtgactctgtgcctgtctgtttagttctgtgtataaatggaatgttgtgaagatggccccttcccatgccagctggttcctctcccttggttatggccgctaatggaaaccggactagtgagcgacctttaatttttaaaaaaagaaaatacaataaaataatactcaaatgtttaagcagatttcccaaaacagagtagaatagaattcatatgaataagcaaacaatttaattgttactactggcattatgttatggattttgctttcctacagaaaataactccacaactgattttattagtatagaattaatttcttgctaagagtcatttttgcttatctcaccattggatatttgcaaagtcactaatatttcttttatccatcattcatatgtaagtaaatatgtaccttacttcctctttccaggcaagtagaggttccaaatatagccatgtgtcacataacagggatttgttctgataaacgaatccatagacaattttgtctttgtgcaaacatgataaagtgtacttgcacaaacctagat

SEQ ID NO: 282894 - DNA, 1000 bp, Homo Sapiens
cactctgtcacccaggctggagtgcagtggcgcgatctcggctcactgcagccttgaactccggggctcagttgatcctcccacttcagcttcctgaatagctaggatcacaggtgtgcgctaccacacctggttaatttttaaattttttgtagagatggggtctcactatctcaaatggggtctcaaatgcctggactcaagcgatccttttgcctcggcctcccaaaatcctgggattacaggccggagccaacactttctctgtgtcggcactactgagaatacagatagtacagtgaccagctaggatggacagcagcctagagaggaagccaggcattaaagaggcctcagtgtgatgagtggtaccagaggggaagtacaggatgctatgggagtgcaaacgatgggatttcacttagtctaagggtcaaaagacaagaccattgaaacaccagcaaactagttagacaagtcaaagcttaagatgtggagttcctccacacaatcccagccactgtggctatccccagagagacaagccggcatggtcaaggtgaccttactgtcccatccaagcttgactctttaccagccttgaggtctcacatataaaggcttccacccaggcctgcagcatcagtttgcttcttgttgaaccaagaaatagatgcctagatctcatatttccaagtcaagaggcaggtttctcataagcacaaggatcacaagatgggtagatacatggctcagtcacctggccagaggggcccccaaggcttctggatgagtgccatctgatgcatctggcctgctgtaggctctaaagctcgggcccactcttgcaaggtgcatggtgcgctcatgctagccagatggaagcgccgcagtacaaactcctcccccagctttaggggcatggctcgggacatttggccacttgcagagtttactcacctgcctctgttcctccacagctccggctcctgtatgaatg

SEQ ID NO: 282895 - DNA, 1000 bp, Homo Sapiens; identical to SEQ ID NO: 206375

SEQ ID NO: 282896 - DNA, 1000 bp, Homo Sapiens; identical to SEQ ID NO: 206372

SEQ ID NO: 282897 - DNA, 1000 bp, Homo Sapiens; identical to SEQ ID NO: 114967

SEQ ID NO: 282898 - DNA, 1000 bp, Homo Sapiens
atgaggcaagagaataaagcaattactaaagagaaaaagcaagcactgcgtagagggccacctaacaagagcaatgaccttcagctgagtgacaaaggcaggtgcacgatgactacaaaagtagagatctgggggaataaattatctaatcttactctcttcccactctctgatcccttgctagtgctccccaagggccaaaccaaatgaaagtcagaaggcaaggttgccaacagattttatccacagaggtcaggctcctagggcacagagcagagcaaagatgatggagaggatatatggtgaggcacacaaaagggatccagtttgatcatgtcaccctcccatataaaatccttcattctctatcttgattagagataatagtccttggctgggcacagtggcttatgcctgtaatcccaacactttgggaagttgaggcgggcagatcacttgaagtcaggagttcaagaccagcctggccaacatggtgaaacctcatctctactaaaaatacaaaaatcagctgggcgtggtggtgcgtgactgtaatctcagctatttaggaggctgaggcaggagaatcacttgaacccaggagacagaggttgcagtgaggcaagatcacaccactgcactccagcctgggtgacagaaagagactctctcaaaaaaaaaaaaaaaagaagacataatagtcccatattccttagcataacatagaaggcccttcatggtctgagtccctttgcctgggtcagcaggatgcctgttatttcaaaccctcccatccagcactaccaaactatgaactttcataactcctccctttggcatcagctcttgcctctgccaggcacacaaatctataccgtgcctgactgatgagatcctatttatctttcaagagagctcagtgctctcattctgtgcagccttccctaaatccccaaagcagaaatggtcacccctgtgtagcagctgcaccttgtgtatg

SEQ ID NO: 282899 - DNA, 1000 bp, Homo Sapiens
cctgagctcagccagaatctcgcatgtaaagacatccaaatgccgacttcttctccccagagcctggcttttataactgactgccgcctcacgctccattcggatgtctaatgaatctctcagacttgacctgtccaaactgcttgccacctctactcgccaccgcccacccccacaccctccataccgttttccccacgtcactgcccctcccccccttcctcttgccaaatgcctaaaaataaaaattctgaggtggatctgtagcacaatgggcttctagtgacaaatcaaaattctgatctttaaaatgtatgcacaatttacctgttaccgcctggcctaagccatcctgctgttactgctgtgtagcaagttgcagccaaagcgacctcacacggctcctgaaggtcaagaatctgggagcagctcagctgggatggctgtgactcggggtctcatgaagtggccaagatgccagctaaggctgccgtctctgaaggcttgacctggcgaggatttgcttccagactcactcgcgtggctattgacagaaggcctcagttccatgccacatggcccgttccacagagcagctcacagcttggtagtagctggcttccccagagcggtatctgcgagcagcgtccagatggaagccatggtgttcccttaaaacctgatatggagggtgattccccatcatgtctgtattctgtgggtcacacagaccaaggccggtccactgtggaaggcaaggacgaggttgccagtgcccggcggtgggtggccacagccagcctccctgccagtgtcccccacagacaagttgtccctgtaagacaggtcagctcaggtcattccgagctcagaccttccaacggcgtccatgtccctcagtaaaagccagagtcctaaaggcctcttgcctgctctggcctcctctcaccattctctgccatcctccatctgcccctggtgtccctgaagtcttgaacat

SEQ ID NO: 282900 - DNA, 1000 bp, Homo Sapiens
ttgctgaagctttcacggaagaggcgttttcctgccaaccttgaagaaaatgttgagttttgtttgtttttcagaatttagacttaaagagctgaagcagacctcagacatcagctattcctaccacttcacattataggtagtgacactgagacccacagagttaaaaggcctcctcacagctggtacagagctggtcagagcagccatctcattttgtccctttgagggtcagatgtatgcttcttctgcttaaggcacagcctttagggctgccatctggatttctacagagctcatgcaggagaaaaatagccagagcttaagtgctgttgcatagttcagtttatacacctattgtcccatgcctgtttgtgtgtgaggcttccctcgctccgtgggagcaccaggctcatgccctttcataaacctatttgacagaatagagagttttccctcattggtgtagtcaagacaacatgtgtgttcagcatggaaaaaaggtttcaggtcataaacccccttatccctaatgcttactttcataaagaacaacagtggctccactgtattctaaaaggaaaaaggagctctaatgagaaatacgcaattaaacagctatttaggcggcttagaccctttcaggaacaaataaataaatccgtggttttacaaccctgaagtttgataatagctctcttggatttttgtggttacctcatggcaatctcactaagaagcaggggagcaagctcttggcacatgaaggaataggctcatgaagattcatttcttttcccgcttggccttttggttctctaataagctgtgagctgaggtccatgcagggaaaacaaggagggtaacggcaaatgtaaagtgaatttttctggagaaggatgctgattattttatagcatctacactatcctatgatgaaagaggcatagagccgggtggcaatgtgagttcttgggtgatttaataagccatcgagtgg

SEQ ID NO: 282901 - DNA, 1000 bp, Homo Sapiens
ttccttggtgcatcagggtgtcagtggaaataggatcaggtggtgtgtgtgtgtgtgttttgtgtgtgtgtgtacacatgtgtttatatatacatgtgtgagggaaagtgtgtacatatatgtaggattgtaaccagacggaaaagaatgaggatctccagggtgtttgaatcagcaacagatttgtgttttctaacatgcatttagttggagaggcatggttctgtttgttttgttttgatctaatttgccattggaaataggtacagttacacagagaaggaagaaccaggaaagtgagatccatgaaactaaatgagcagctgtcagaatccagtgtggctgagcctacctagcttatgaaatctaacccagggttccctgagtccaagaccacttagattattaagattttgaacgtccagaggagtgaaaagtctgttttctgacgtaagccggagctgaggataaagccagaggccagtggattaggtgtatggaatgtggatggagagggcttgtgtgggatgtggccagggagtgggtgaggaaggccgcttctaaatggcctgtaaaaacttgagattggatagacgaaaggaaatggagaaattaaagaattggagaaactagttatctgtgttgctgactttgggacccatccaagactcctgcctttggggtgttccatggtggtttcttcctgcctgggcgccaccctttccccagttcaggccctccctggaggactagtttgtgtattggcatcctccccagtggacccaaaccagcgcatacttggtgtgtggagatgggagacaaaggacagatctaggagccttgaaggatcaccagccaccgaccctccatcagggccaactgggcaggaaagggaacattgcagacctgatttcccgacgatgtcaccctgtcctccctccttgcttcttgctctgctaactcaactctgccttcctctttttcattcttctactctgcc

SEQ ID NO: 282902 - DNA, 1000 bp, Homo Sapiens
tattcgcctacacaattctccgatccgtccctaacaaactaggaggcgtccttgccctattactatccatcctcatcctagcaataatccccatcctccatatatccaaacaacaaagcataatatttcgcccactaagccaatcactttattgactcctagccgcagacctcctcattctaacctgaatcggaggacaaccagtaagctacccttttaccatcattggacaagtagcatccgtactatacttcacaacaatcctaatcctaataccaactatctccctaattgaaaacaaaatactcaaatgggcctgtccttgtagtataaactaatacaccagtcttgtaaaccggagatgaaaacctttttccaaggacaaatcagagaaaaagtctttaactccaccattagcacccaaagctaagattctaatttaaactattctctgttctttcatggggaagcagatttgggtaccacccaagtattgactcacccatcaacaaccgctatgtatctcgtacattactgccagccaccatgaatattgtacggtaccataaatacttgaccacctgtagtacataaaaacccaatccacatcaaaaccccctccccatgcttacaagcaagtacagcaatcaacccccaactatcacacatcaactgcaactccaaagccacccctcacccactaggataccaacaaacctacccacccttaacagtacatagcacataaagccatttaccgtacatagcacattacagtcaaatcccttctcgtccccatggatgacccccctcagataggggtcccttgaccaccatcctccgtgaaatcaatatcccgcacaagagtgctactctcctcgctccgggcccataacacttgggggtagctaaagtgaactgtatccgacatctggttcctacttcagggccataaagcctaaatagcccacacgttccccttaaataagacatcacgatg

SEQ ID NO: 282903 - DNA, 1000 bp, Homo Sapiens
acgtgcaccccttttccccattcccagccttcacctcccaccacttccccctggaaggcctggcctgggtcatgctagaaacagcctcaggactccctgccttcaaggggcagttctggagggcaagctgatcaaatgcgaccctgtgggatgctgtggccttgagtgtgtgtgcaggaggctggtgccggctgaagagatgtgggaatgggatttgctccaggcagggtaggggtctgggtgagggttggagagtagggagggacctgtggggagggtttatgagtgatgaggtaggatttgagttgtagaaactcaggactccctccaagatcaagtaaataggttttagaacacagaagtttatgcaggaaggagcctctgaggctggggtggaaggatgcaggggagttagttaggaggctgtctggtggcgggtggaggtcaggatgagagcagtggtcctgggatgaagggcagggacagtagggagcactgcagatagaagtccagatagaagcccagaggcctcccctcccccttgttcccttctctgtcccctgtccctggaggcaaggacctaggcctttggggtctgctaggcgtttttcctgagcagtgactgctggaggggtccatggcagacttggggcagtttacttctctgtccgagcccagcttctggttggctctggcaaaccccacaggactggaattgcccccacccatagtgctccctcccacttcagtttgctctgcactctcatagccagcccattcctgaggattctccccatccttttctcccccaacactcggcatgccctgggggaccaaggtctcagcaggtacatgggaccaggggtctttgggagtttgggggacccagaagagccctgggcagctggggcagagacctggggctgctgccaccatttttggcgtttgtggtcctgggcagaccctcgcctttcccgagcctcatttctctcctgtgtaa

SEQ ID NO: 282904 - DNA, 772 bp, Homo Sapiens
agattgctgtgaggattaaattaattaaggtatgtatttagctagtgcctcacacataacagatgagtatagagcctacctattattactattatctcatgtgcctgaagacacttcactgacctactgatttctgtatggaagttattgtagaggtctactataatattctttcaagcttcagcctaagtgttattcttaaaggacaatctgttgagtgcctgcctactgtgcaaggagcctttgtaatactgtgggttgaaatgtttgtcaaataaataaataagaaggcctccttatgttggaaccaggacatacgtggtggttctcagctacagagcccacacagagcaggtggtcatattctgcttttctccttccctgactccagccttaagcttctatcagagacgccgcttttccccggacgactcggctggagcatccgcccttctgcggtcgggcccctacgtgccacagtgtgatgcgtttggaagttgggagcctgtgcagtgccacgctgggactggtaaggagggataggcaccttcaggtggccaagtgacaccccttttttattttagaggacagagccccacactgggaggcaagtgagctggactcttaggctcctctttagcagctggtgaaaaattccttagcttctcgggcctccagttatctcacttgtgtaacaggagcaggaaacttctaccagcctgaaagacaagtgggtggttgctgggggcatcagagtgattgtggacaatgt

SEQ ID NO: 282905 - DNA, 1000 bp, Homo Sapiens
tgcattgaggattagttttcaacatgagatctggagagaaaaacattcaaaccattgcatcatacaaaaaaaaggctattaaaaattggattatagcaacttaatcttctatttattttttgtactggcatttataacatgaagcaaaaaatttttatgggctgtgtttaatttttagttacttgattctatttagggcacaggttttcaagaaaagttttgcttcatttgggaatacttgggaatatttcacatctggtaagaagaccttaaaagcagaatgttactttgctaccacaaacaattaggaaaaggaaaatatttaaaattgtatacaacatttatgataaatctgagcttcaaagataaaaatataaagaaagtaacaatagaaaagaagaaagcgttaggtaaaaatgtgatcttctttctttcttccatttctatatcccccatatgtgtgtatgtgagtgtatatatatatagatatagatatatagatatatagatatatatcatattgaaaggaaagcaatatgaaagcactcccatggttattgcagtactattcacaatggccaaacctaagtgtttgtcaacagacaaatggatacaccacattttctttatccatgtacaaagaaatgataaatggttgaggtgatggatatgctagttaccctgatttgatcactattcatgatatacatgcatcaaaatatcacactgtgccccataaattgtataattatgtgtccattcaaaataataaaggcaataaaaagatattataggtcagtggttctcaacacaacataacttggtgcaatgccctcttttaatagctagaattttgtaacactttacagtcctgaagtaaaattaatacacaaatgtgttaaatgtgtgcgtgtgtgtgtgactataaccccacttgtaatgtacagaatattttcaagttgtgcaactgtaagtacacatccaagaaggctttgtgtca

SEQ ID NO: 282906 - DNA, 1000 bp, Homo Sapiens
catagagaacttgatggcaaatttaagtcttcatagcaaatttaaatattaggaaaacatgagggtatgtgtgaaggttaacagagagtatgagagaaaaaaacactgattacaaacaaatatcagcaatatagcgaggtctcattacatgtaaactagtacatgcaaagaagtataaattgttgaattgtatagctggaaatgtcctctaacgcttccctcaggtagtaatttaggtagcgacataagggattatttaacccgatcacgatcactgaagaccctggtatcaggctaaatggagtaaagatgagggctagctctataattttggattttgaaagtccatgctccttatcccttttaagatttggataagaaacagcaaaactgaaaatcggtccatctatttactctccataggacttcctgaatggcctgtgtcatgatcaaagaaatggaatggggaataagctacataaaattacctggcagggagttcaggcatctctgtactatcattctttaaattgggatttgaaactaacagggccaaatcacctctgtcacctagttgcagtagcctctacagtcaataaaggaaagaatttctgccaggcatggtggctcacccctgtaatcccagcactttgggaggccgaggaggacggatcacgaggtcaggagttcaagaccagcctggccagcatggtgaaaccccgtctctactacaaatacaaaaattagccaggcatggtggcacgcacctgtaatcccagctacttgggaggctgaggcaggaaaattgcctaaacccaggaggcggaggtagtgcagtgagccaagttcacaccactgcactccagcctgggcaacagagtgagactcgatctcaaaaaaagaaaaaaagaaagaatttctacaaacagacaatttatgtgacttgcataggatagggtctttggcagtttggtggctacctagtagagagtcctgggga

SEQ ID NO: 282907 - DNA, 1000 bp, Homo Sapiens; identical to SEQ ID NO: 195748

SEQ ID NO: 282908 - DNA, 1000 bp, Homo Sapiens; identical to SEQ ID NO: 114969

SEQ ID NO: 282909 - DNA, 1000 bp, Homo Sapiens
ctttagtggtgctaccagccctagtttttgtgatggacccagcaccagtaccggtttcagctttggcaatgggttaagcaccaatgctggatttggtggtggactgaacaccagtgctggctttggtggtggcctaggcaccagtgctggcttcagtggtggcctaagcacaagttctggctttgatggtgggctaggtaccagcgctggcttcggtggaggaccaggcaccagcactggttttggtggtggactgggcaccagtgctggcttcagtggcggactgggcaccagtgctggctttggtggtggactggtcactagtgatggctttggtggtggactgggcaccaatgctagtttcggcagcacacttggcaccagtgctggctttagtggtggcctcagcaccagcgatggctttggcagtaggcctaatgccagcttcgacagaggactgagtaccatcattggctttggcagtggttccaacaccagcactggctttactggcgaacccagcaccagcacgggcttcagtagtggacccagttctattgttggcttcagcggtggaccaagcactggtgttggcttctgcagtggaccaagcaccagtggcttcagcggtggaccgagcacaggagctggcttcggcggtggaccaaacactggtgctggctttggtggtggaccgagcaccagtgctggctttggcagtggagccgccagtcttggtgcctgtggcttctcgtatggctagtgaggtttcagatttattccccatgtttacagataccgctaataaattgcagtagtccttcccatggagccaaagtacatccttggaatctttgtccacacagcagtcaaggcagttatggccaatcagctgagggtgtcatgtgatggaaaaatctgtttgctgttcctgctttattgtttgctttctgtgtgctgtcatattttggtatcagagttacattaaatttgcaaaatg

SEQ ID NO: 282910 - DNA, 1000 bp, Homo Sapiens
cagggggtgggaaccgctgcgttccccatcaacttttctcccacccaccaccctccccaacctacaagcccagctcagcttgaggtaactgctgaccggactgtcctatacagccctacaagacagaggcgcctagggctgaaagcgggggcctccgtagggagccagcgggggcctcaatagttactcattttctctacctttgatgaaaataagagctaattcttaataaggcctaccgggtatcacgcaaaaaccctgtgcttactattatactttgggttgttgcaaagattaaaggaaataagccgtgcaaagcgcttaagagcttggtataagtaagtgctcgtcaatgttggctactctcattttttttgcagacgtgggaactggggctcagggaggctaacagccagtaggcggcacagctaggatttgaacccaggattgtctccaacgccgctcaattatacccgccaaggagtcacagagacttagtgaagtgcacacattgctcacctgggtgaactgaggtccagcgggggaaggcttcctcctgttgtaatcactaaccccaactctgtctcccttgcccgattcattcattcgttaattaattcatccaacatcctgtccccaagaagctcagtctggggacatactgatccagttaaatgcgagtgcttcctagttatacatggcgactgctgagaagggactccagagtccaggcacctacctcccaggggctcaccgttcactcctctagcctcatttagagctcgcattaagagcacgggatctggatccacactgtttggattcaaatcacaacttcaccacttagcagctgtgtgttctgggaaaatgacccaccttctctgtgcctccattttctcacctgtaaaacgggctcccaggctggtgggagggtttcaggtgtaagacatggagagtcctttagcgaacatgtagactggcaataaactcaataaatggt

SEQ ID NO: 282911 - DNA, 1000 bp, Homo Sapiens
ggttctgtgtatgaggccttcatgaacggttaccttctccatacactagggaagcatttgtcagactctgcagactgggttctagagaggcagagtctttaagagtattcatttcttctggaaggtggagctttacccaaagtggaagttagccttgctcaaagatgtgttttgtggtaggtggtaaaaataaataaataaataaataataaaaaaagaaacatgtattggaggtaatttgacactgctgctggcagtagttctctattcaccattttaaagcccattcaggttctctcttcctgaaaagaactgattgctgtgtttacatgaaatgacattggagtcagatggtctgttttaaagatttccatgacagcctcttttcctgagttggagagattggaggtggtctatccgtacgatgtggaatcaaacggtgggtttcttagtagctaaagaagccatgtacttctagtgtgtttctcagaatatcaactcatgttcttcagatgcttttctttttttaatggtgagggaaaaggtataatttgggattccacagtgccttgcatatagtaggcgcccagtaaatacttgttgaagcaaaccaagtttcccaagtcctcatctcttatagtgaccaagacatctttctcctctgaagggcttggcagttgtggctaaaaaataagcagtatcattatttgcttgaaatcatatatacagtttgtatgaatttcagtatgttgccaagacatgattttttcttattgtattttctgtaaatatttctggcactgaactgtaaagtaaaggcaaagtgtaaatatgaaggcgtgcccgtgccccttgcctcctgtgtttcatcttcgtcggttagggaagaaggtccagaggtttgtttgtatttatgccgatcctttgtccagaagaagcccatggaatattgaatgtaatacatttagtcaattaaattttaaggagattcttatctaat

SEQ ID NO: 282912 - DNA, 1000 bp, Homo Sapiens; identical to SEQ ID NO: 206380

SEQ ID NO: 282913 - DNA, 1000 bp, Homo Sapiens
tatttctttttacttacactgatatgaatattgattaccagtgatggctgggccatattaagataacttcaacccctatggtttgtgtaagatgggtaattgggcctgcaatcttcagtatttaaaaatctaacaacttgatctcaattttttcttaaggacctttttcttggagaataatactttttttttttttttttttttttttgagacggaatttcgctcttgttgcccgggctggaatgcaatggcacaatctcagctcactgcagcgtctgcttcccaggttcaagcaattctcctgtctcagcctcctgagtagctgggattacaggcacatgccaccacacctggctaatttttgtatttttagtagaatcgaggtttcatcatgttggtcaggctggtctcaaactcctgacttcaggtgatccgcccgcctcggcctcccaaagtgctgggattacaggtgtgagccaccatgcccggcctaagaaatacttttaagtatattttcattagctagaattgcccaatctgtgtaggtataaattacttggtatagggagagagaaagcctatcttacctgttgctttcttacttggtggtaacatccagcagttagtctatttataaacataattactttttcacatatgaaccataaaatatttaactttctgctctatattgtttgtttaccgctgtatctcccacagcttgaacagtaccaaggtacgtagtaggtgctcaataaatgactattgaataaatgaacatatccaacaaatgttctcaatgtaaaggatcagagatgccacatgttctccttgatgggagagacccttccacatgggaatgatgggaaggagttgtactcctggatgttcagtaactgcttctaggagaaaaggtagagtcctatcactaagccgcagatatttatttgtgtgtggctagaatgggatgttttgaatcttctgttacaaccttgggaac

SEQ ID NO: 282914 - DNA, 1000 bp, Homo Sapiens
gaagttgcctccagtttcaagcagggggaaactactgccttaactcaaacactctcccttcatttcctttccctcctatcatccatatctcttttcaaatccccatacctccggcctggctcataactaatgtgtgggataggattttttacattgttataaatgataagtaattaattcttactcatatggcatatataataaatcatttttttcctgggtgcttgtgaatatatttctttcaaatgtagaatataaatgatagttataaatagagatcactttgcaatcaaagatatagagaatatagaatcattttgactgttaaatacagcagggtgggatagttacttcctagcctaagaaagaaaataaatccacgcatagcctatatctaaagcatcatctatgtcaactacccacatttaaacctatttatgagtcactaacaaaaaatgtttcttgaacatccagagtctctgaaatttctcttttccactataaactgctataaaacctcccataattcccttctttgaaacaggagtcaaatgagacagtgaggaataacctccagcaatggtgagatgagctctctttaacccagtggattactatccattttcaacagtcctttatgtatattgtcatagttattaaaaataataagcaaatgagacttgttggataatgaaatttgttcacattttcaggtggcagacaagaaacatggattattgcgtggagttccattagtaggaataagactcattctacattcttgttgttcttagtgttttttgtttttcatgagaaggaattgtatcagcacaaggcaatattctaacatgacaatgacagcagacagaacctcaataaactctgacttggtactgcaaacaccatttcatgataccttaattcaaataaacctttgtttaatcaattgttcatatatttatttatacaacaagcagtaatcgagtgcctactatgtgcc

SEQ ID NO: 282915 - DNA, 1000 bp, Homo Sapiens; identical to SEQ ID NO: 196390

SEQ ID NO: 282916 - DNA, 1000 bp, Homo Sapiens; identical to SEQ ID NO: 206381

SEQ ID NO: 282917 - DNA, 1000 bp, Homo Sapiens
atttataatttttgatttatatttcagctagatctaaaaagcatctgaaggaatttacaatgaaagatacctatgcaataacatttaggataatctttgacattttggaaaaataagaattgaggaaaaaaagtgtatctttcaagtagatgcaaagcattataatgactgacacttgtatctaactccagtcttacagataactaaggcaaaaagctaaataaacaatatgtaacctctaacatttggtaaaaggaagtatactggtctgttagcagagacaaactttttttagaattgaagtctgaaacaaacaaaagcaattcaatgtcaatagacattaagcaacataatagacaaacatctcctaagggaacatttgttacagctgctccttccctgaactgtgctttggaagataagctctgtcctgagtccaaaccaagcccttccaagagagaacaaaggtcagagatgttgaagattccagcaaatttctcctcttatttctaccaagcctttgtgaacattgctcttcattttggcctgtacttctccctcagggacgtagaacaatggaatgtcagtcagtctctgtagttaaaactttttctttaaaattcaattaaggtacttctccctcagggacgtagaacaatggaatgtcagtcagtctctgtagttaaaactttttctttaaaattcaattaagttacttctccctcagggacgtagaacaatggaatgtcagtcagtctctgtagttaaaactttttctttaaaattcaattaagttacaccagaatttacaggcaagattttttttttcattgctcccataagcaaatttgttttaaaataattgtaaatgaggtatatacttagttcttggttaaaaaatatattgctttgttaagtattaaagattatttgtaagtcattgtattaataatggtaataaaatttatcaagcctttatagcaagggtcagtgaattacc

SEQ ID NO: 282918 - DNA, 1000 bp, Homo Sapiens
tccagtaaatcttctgagtcttacaattttataccctgcataagaggaataaaaggactacatgcagggagaaacaaactggaattgactttttcactacataaaaatttgaatttgaaaatagagtttgagaagacaacctccccttttataaaatgcttcaaacatgactgaatcatgtaacagggataattttaattaaacatcataaaaactgggtttagcatagtatgatttttccccagtaagtagaccaaaaactctcagctaggagtacaaccccttggaaaattaagctctaatgaaaacccagctaccactcattagcccttttaagaaagtggttttttctttaattttataaaggaccaagttttgagtcacctgaagtaaccagggaatagcagcaagacagcagaaatcagaactgtaggttactatcaataattatgtaagtaaacataatcaggataaaggttatttacaggagacagagtaaaaaggaaatacgtattacaatccaacttaagcaaacatgcttagatttcaaatatgctggcccatttataacttaatgcattaaatgcaatgttagtcttcaacaggtaagttacctagtttgaaataatgagaaaaacaacatgaaatgagaggcagaatatgattaactattgaagaaatcaacatattaagatttgtataaagtactatttaatagtgaaattaatctaatttcccatgtgtcaaatggaagcacacataatgaaaataagacattatttttgcatacctttagtctcttccaaatgtttaatactgcagagaaaaatacaaccaaaggagatagaacaaaataaacatatatactaatttttatccatttcagttttaatacattccaaaatacgtcaatgtttatgcattccaataatcatcacatttcagatcaatgataatgtactgggttggaataggtgctagaaacaattctagctttgga

SEQ ID NO: 282919 - DNA, 1000 bp, Homo Sapiens; identical to SEQ ID NO: 114970

SEQ ID NO: 282920 - DNA, 1000 bp, Homo Sapiens; identical to SEQ ID NO: 206383

SEQ ID NO: 282921 - DNA, 1000 bp, Homo Sapiens
agcccaaaccctggattctcacacacacccacttcctcatcgggcaatttggggcaagctacttctctaggtgcctggagtttgatgtctgtgtgatggggagaagagttgtgcctactcagaatcactggaggtgaaatacaaacttacagagaggacctggcttgaaggtattcaagaacaagaggattcagaagtgttcagtcttactcccattcttttgctacagttatcacataagctttgttgttaaatgtgggtccatgaagcttttatcattactgtccccaaagtgtgttgatagcatttcctaggaggatttgacctttgttgtattgtgattttctaataagaggcatatgattggataaaagacataatattggaaaggagtgaaaagactgggccctgcctccaattttactgttaactgtaaccctggaaacactcttttgaaaaaaagttaattaaacgagatcatgtcctttgcagggacatggatggagctggaagccattatcctcagcaaactaacccaggaacaggaaaccaaacaccacttgttctcactcgtgagtgggagctgaacagagagaacacgtagttacagggaaggggacaatatacataggggcctgtcggtggcagtgggggtgggggtgtggggggagggagaacatcaggataaatagctaatgcatgtggggcttaacacctaggtgatgggttgataggtgcagcaaaccaccgtggcacacgtttacctatgcaaccagcacgtcctgcacatgtatcccggaacttaacttaaaaaaaaaaaaacagtttcagggataaggaaaaaaaagttaattaaaaagaagttttgaaattgacaacattgtatatatttatggtgtacaatatgatgttttgaaagatgtatacattgttgaatggctaaattaagctaatggactatcctggagacattcttatctcctcctgcttaatattccca

SEQ ID NO: 282922 - DNA, 1000 bp, Homo Sapiens
gctccacctcctgggttcacgccatcctcctgcctcagcttccggagtagctgggattacaggcacctgccaccacgcccggctaatttttttgtatttttagtagagacggggtttcaccacattagccagcatggtcttgatctcctgacctcgtgatccgcccgccttggcctcccaaagtgctgggattacagtcgtgagccaccgcgcccggcccctagctctgttttaatgaaatcaagttttctttgcattgggctgttctgaggcttatctgaggaaatgaatgcttcccaaataataggtgggagcattagcagttggcttggaaacattccctagtaagtccctcttcaggctggttgctgacatcacagctgctccccttcatgaagggcagcaacctcaggaaagtgtccagcagcagcagagagcccaggacatggccactgtgtcctcctcacagaggagactgaggaccctggctgctaagaacgagtcctgagtcaagatctgaggtcaccacagtttatctcctggtgactaatccctcatgggctcaaacagtggtgcccccatccctccagacactgagactaagtgattgttatgagaggcggacagggtactccaagcaaccctctttcctccaaaggagcaaccatctattcttgagcagtgctcaccacccttggtaatagttcatgacctttcattatgaatgcactaacatggtacatactctaatagtaagaattgtaatcagtaccaggatttcataccacagactctgaagccagaatgtacgatggacagttcatgcacgtgagctgttgtagtgccacaacaagcagaactgaaactgttcaggcagaaaatcatgtcatgttaaagctctcgatttcttttttttattttttggcagttaatgagttcttactttaaaccccatctgtttctacgcttataaaagtcaaggtggcttaaactatgcaat

SEQ ID NO: 282923 - DNA, 1000 bp, Homo Sapiens
ggcaacgcgcggcactaaataaacgcagaaggcaacaacaaagagaataaacagaattttgggaacgcgtttgttcactggcagtgccataacctttccttgcgacttctttatcatccattaatcggggaaagatggtgggagagtgacgaaagaaagtaaagcagtgaggaagtatttcggaatagcgcctgaaaggcgagggcgggtgagtgatatcacccgcctgagtcattaacgcttcagagcgtcgcttaactcgtcacgcatgttcgccagcatggctttaacaacgcgcgggttaccagcaacgatgttaccggtcagcatgtagttatgaccaccggtgaagtcgctgacgatgccgcccgcttcacgaaccagcagctcgcctgcggcgaagtcccacgggcgcagaccgatttcaaagaaaccgtcaacacgacccgcagcgacgtaagccagatccagcgccgcagaaccggtacgacggaagtctgcacattcgttgaacagtttgccgacgatgttgatgtaggtagtggcgtactgttttgctttgaacgggaagccggtcgccagaatagtaccgtcgagatcgcgagcggtgctgccgcgcagtcggtagccgttcagctgtgcgccctgaccgcgagtggcggtgaacagttcgttacgcataggatcgtataccacagcaacttcggtgcggcctttgatacgaacagcgatagataccgcgaagtgcggcagacgtttgataaagttggtagtgccatccagtggatcgataacccattgaacatcctgatcagtaccttcaagttcaccgctttcttcggtgatgatggtgtgctgtgggtaagatttacgaatcgtgtcgataatcaccgcttcggcagctttatctacgttggtcacgaaatcgttactgcctttctggctcgcttctacagcgtccggggtttcatagtttttggcaattaaattacccgccttt

SEQ ID NO: 282924 - DNA, 1000 bp, Homo Sapiens
atgtttaagtgttacttttagtattttattggaggtagccaatacagtatattagtgtatactaattagtgtatacacctcagcctcccagagtgctgagattacaggcatgagccaccacacctggccgaaaacacatgttcttaaaaacatttttaaaagttagcctttctgaaaataaacattctaaaaatctatttttagctttatcacatccacctataatgtgaactcaaacagctacatgattagtagttttaattgcattcattaaaagggttttaatattcaaagatgtgcaaacatcttcttgcgtctgccatagtcttaaatatcacagaaatgagtgtaaattatgtcaaatagcatccttaataaacatgcctctggaaattaatgcagacctttttgtttatatttctatagctacaatcaacctaaattcagccaatgatagctggtttggcagcttaaaggacactattcagcatcagcaaggagaagcggtttgggtctctgaaggaaaggtatgtggcatagatatgctgctatgaggtgagagtccctgttctgaaacttttctcaagagggcagtgaatgtagtcaagccatgcccatttgaagtgatgctcacatgtgtgctaatcaagtttgaaatttcgtaaattctctgaccaagtaataaaaatgaagggacttttaaaagaagagcagaatgtgacatgtgcagccctacattcacttccctttcacttttaatgtagtaactagtgttatattccaagtacactaatcagagcttacaagatctcatgctgagctccacagcttactaaggacgtgggaaacttagagtgcagatgagaggtgaggttgagcaacttggagaatacggctaaacattaataaaaagaaaagctaatggagttagaattacttagaaaataaggttggttgagaatgtgccatcgttctgggagtttgaatgggtgatatgaga

SEQ ID NO: 282925 - DNA, 1000 bp, Homo Sapiens
tctctagcatttttatacttcaaaacctaataatgttatcacatcatcatataaagactgcctttcctcaagggtcatttactctcatagcatggcaagtcgaaatctcaggcaaacttcaaaagaatgtttgttctaaacattgagttggaaaaataattttggaatgcagtgtttctagttgggttgaaagataagcattattaatccattaatatcacagtagaaaatttctctaataattttgggattgtctcaacagctttttttccttaattggtgagggaccaataaggctggaggtgttggggtatgttagctgtcattcatggggacttgtgccattggcacagaatttctagattgaaaaatttcaaggaggagaagaaataggcccaggaatggtggcaaacaagtctatatgataagctatcttggatagacttgtttcttataacttttccattactaaactagcatcttttaggttcagcgtttttagattaattgcaaaaaaattacatgtgatatagtggggtcaatttgaagtatcattgaaagatgaagggaagatatcaatatttttatagtaggagggctggccaaagatgttttaaattcattgtgtacatgtgcctgtttcttagtaaaatgcaggtcatatctgtttaaatttttcacaatttctttaaaaatagtggtcagtcagtagtcagatgagagggtggctgaactgaattttggcagttcttggttaatttagaatttcatgtgttcggacttttcctgtatcccttttctgttcatcctagtcaatgtcttatcattgcatacattttctggatgcttgagccatcagatatcagctagctttttaaaatcacctttaagaaagcagtattttctaatagtaaatttataaacatcttatacatcttagctttcatatataggattactatgtattgatttgtaaacattcactgagtttaattttagt

SEQ ID NO: 282926 - DNA, 1000 bp, Homo Sapiens
tgccttataccccaaccagtagactgaagtctatttattcatttatttattcagtcagggtcatccatgtggcttgctttggccaatgagacattaccaaataagatgcatgcgggggcttgaaaagtgctcgtgcatcagggctttacctctcttgttgctcttggaaaggtgccaccatatgaatcagcctgggctagcctgctggaggatgagaggcacatggcacagtcttccctgccagctgacattcagtcaacttccagatatgcaagtgaggccatccaggaccagccagccaccagccaattccccagcctactgcagatgtatgagagagcccagctgagatcattcagtagcttctacagaatcaagggctaaattaatggtggttgttttaagtcactgagttttggggatgtactatgcagcaatagatcactggtatgccatggctctatacattttcagttttttaactgaattataaagggatggctgggtgcagtggctcacgcctgtaatcctagtgctttgggaggctgacgtgggaggattgcttgagcccagaagtttgcgacaccgtctctgccaaaataaaaagtataaaatttaactaggcatggtggcacacacatgtagtcccagctactagggaggctgaagtgggaggatggcttgagcccaggagttcgggggtgcagtgaactacgattgcaccactgcaccactccagcctgagtgacagagtgagaccccattttttttaagcatttggctgcaagtaagagaaaaacctaacagtggttgaaacaaatagggtttactatttaagaaatctgcagttgctttttaagaagtctagacaggcagttgctggtattggttcagcttttcaatgggggatatcaaggacccaggctctttttatctcttctctagcctcttcagcatgcctatatttaccttcgtgcttgtcccttagtgttgccaagat

SEQ ID NO: 282927 - DNA, 1000 bp, Homo Sapiens
attgctgtgtgacaaattaccccaaatttagcagtttaaaaaacaatacccatagcagttctgtagctcatgagtctggcacagtgtggctggattctctgctcagggtcttaaaggctgaaataagggttggcaggacaacattccttcatggaggctctggggaagaatctgcttctaagttcattcaggttgttggcggaattcagttctttgctggctctcagctggaggcccctctctcacctcaaggctgcctgcattccttcttatgtggtcccctccagcttcaaaccagccttcctgctctttctcatgcttcatatctctctcccgtcctcctgttttaggggcatatgattagctcaagcccacagatatattttaaggttgattgtgcgatagaacataattgcaggagtactgtctcatctcatcatattcacgggttctggagattagctcattgaaagtgggaggggcattttcaaattctgcctaccacaggcaataactgcccatctcagctgtaggtggaatttttacccagaaaagataggccctagaagcctcatttcttttctccatggaaaaggacagccctctgctgcagcgttcaacttgtgtgtttactgacagagtgaactacagaaatagcttttcttcctaaaggggattgttctacattttgaagttattttttaataaaattgaattatgttgtgtattgtgcttcttaataggaaatgcattattggactgtttttgtaacatcctgtttattgcaaatagctagtatcgttcaaaaactgtataaaatacttttgtacatattagcaatgtctaatttgtatacacttcagttaaatttccctaaaacttgaaaggggaccttgtagaaattaaaatatatacttagtctaagtctgagtctgttcatgttttatctttctgctgacccagccagtgaagacacctcatctcctttggcagctccttt

SEQ ID NO: 282928 - DNA, 1000 bp, Homo Sapiens
tgctggcaagagcgatgtctactacttcaggtacctccctgggggcggggagggggtggcggggtcaggccggggtcaggggtcaagagcgggcctgggcagaggatgagcgctggggcccggggggcatgtggcagggacaggctggtttggtggtggaaggtggcggaacccttgggtgagagttgaccccagtgcggtgggaggcagtgtcaaaaggtgagggcccgcaggagggcatcttatgtggaaggcgtcggggaagatggtttgcgaagaaagggttagcctggcagggatggttagtccactgaagggttaaaaggaggtgtaattcatcgaaactataaaacccagtcactgttggctcctgtcccagcctgtcccagattcatcatcacaagtgttaagcatgcacatgtggaagaatgagctatctacagtaacaaggtttcatttacttcatccaagaaagttttgtataaagcagctatttggaatgcctgaagtttttttggaacttcttggtattgcagaatatactcttttgaaactgacacactgtactaagtttttagactcctagaccaaaatttgctccccagggaacatttgtcaatgtctggagacattttcggttctcacacctggggagggtgtgatactggcatctagtgggtagaggccagagatgctgctacatattcgataatacaaaggaaagctgccacaacaaagaatgatctggcccaaattgtcacctgtgctgaggttgagacatcctgttttaaatgattcaaggtttttcaccttagtgtaatcttgcaatcccgtggtcatgctgctgatgtcttcagtttgtgtgaccagtaagctcgagaaagtgcctatggcaagtgacatccgtggacttaatacacatatactacatttggtaataagccatgctattgatagaagaaatatagacttgtattcattaattggaggtactgtgtgc

SEQ ID NO: 282929 - DNA, 1000 bp, Homo Sapiens
tcacctcactttacaaaacagactccagcttgcggtttttgtagctgtctttgagaaatgacctccgtattctcggcccctggccctgaacacattgcttcatgctgttgcatatttcctgctctcttggcatgacctgcagctcaggaaggggttatggaataactgggagcagtggtgggcacagcaccttctgattcctggacctgcctaaagggctagcatgatttggatcctttgtttcattttgttttgttattttctttacttttctcgacaagattacctaaaaggaccctttgtttactttttggaagacaggcatgtcttcaggcagggactaaggtccagcatttctagacataagttcctttctatttttatcacacagttcagcaacactgcctgtcaccttccgctgtgctgaagaaaataaccaggtggacaagaggatcactcgattcgtgttacccgttggtgcaacaatcaacatggatgggaccgcgctctatgaagcagtggcagcggtgtttattgcacagttgaatgacctggacttgggcattgggcagatcatcaccatcaggtggggcatggtgtcacattcattgtcatcactgatacagggattaccgccagtaaaaattgtccatgaagggacaccaagaatgtcccagtgatgaattctttttcttgatctataaagtcccttcccaagattaaatacgactatatcctggtatgcaagatttctgcttcggggtctgggtagccaaagccatcactctgtgctcagtttactgaagccagtaggatctaggcacaggctagcacaaagactcaaggctgagtaagggccagtccctgctttcaaactatccctgctagatgggcatgcacatatccaaatgaatgctgaagaccatgatgagggatgtaagagaactctgtacggtgttcacagaggactccagagagggaagggctggttctagctggg

SEQ ID NO: 282930 - DNA, 1000 bp, Homo Sapiens
attctaagacatcttgttatttatagcatgtcatactttttttattactcagttctgctttcctctgtgtggtttaatcctaagcatgctttctccttgcagtcataagagagccagcagtagctgtgggtttaatccttctacattagctatcttagctttcccaatggttttagccaaggaagctcaggattgcttctccttgggcagacctgggatatatgctccctcttggggacatggaaatggtatagcttcttttaaatcacatgttctaggaatggggaatggtggtatctcaaaataaactcaagatgttgctgatagtagaagaccattaaagccgggtggtcaagcttcctcattctgaagtctagctacatacctttatccgtactatccctatattaaccaatttccaaagctcacctctatcaacctccttgttgttctgaatttttaaccttcaggacatattgttaacattttattgctttactgtttctctttttacatcatgagactgtaaagccacactcaggttttaaaactgaatgagctattatccttcttctttatgcctcatatctattccactgcatgtattctttggcatggtggatagtacctttgttggtccaattgtccagagcagaaaccagccataatctttgacttttatcctcctttactcccacatccagttgctcataaaaccctgtaaacctgctcgcttcagatctcttgacttcttccaagtctcgccacccttcctgctattgccctagtccagatttcctcatttcttgattattctacttactgctctgacatatggtcctcctttaaatatgttctctaatttttcaagaaaactcatcattctaaagcacagatatgatcccacgactctcctcttcagaacctttcagcgattccctgttgtatgatttccatggaccttggtttccttattgataaaggaaaggcataaagagat

SEQ ID NO: 282931 - DNA, 1000 bp, Homo Sapiens; identical to SEQ ID NO: 203038

SEQ ID NO: 282932 - DNA, 1000 bp, Homo Sapiens; identical to SEQ ID NO: 114971

SEQ ID NO: 282933 - DNA, 1000 bp, Homo Sapiens
gaaaaatttccagccatttttccccaatatttcctttcttccactttttaaaaatcattcctgtcactttgatcgggcctatattagatcttagatcttctcacactactcatatcatgtaaccgctctgtcccagtttctatctccatatcattctattttgctttggaaattgctgttatatcccaagatcaatattccccatcttcattttagcctaccaccaggttttagctgaaaatggccacccagatagagagtaaatttcccaatttctcctacagttacatgtggcgataatgctaggttttggttacttttatataagcagaagtgatatgtacaacttaatattcattccctagaaatctgaagttatttgcccttaatactctgcttctccctttcaatgggctagaaagttaatttgctgctagtttgctgctaccttgaatcatatggctgaagatgactgggacaactgctgtagacccaaagatgaagtcacatgtacagaatggcaaaacagagcccacctacctagcttgtcctgttaatataggagaggaatacacctttctcttatgaacactgctcgggatgtcttatgtcatcaacattgcctataaccctaagtagtattggtatagtcttgataattctgtctgatctgaggtttaagctatcaattggttttaaatttcagtgatttttaaaaagtcttatttggctttttttctcctaatatgcctgtttaccttttagtaatctcatatggcatgctttttgtgattctgttttcattttttatcattgttattttatcatctattaattatttcacaacctgaagtattgaggatctaaacctattctgttgattctcactcatgacggcttatttctttacatcttttgtaatttcctattgtgtgttcacatgtgtttggttatactctatgtaaacctaggagtctaaatagggtattctttgcccaat

SEQ ID NO: 282934 - DNA, 1000 bp, Homo Sapiens
ttcttgtgggaaacctgaaagtccagaacatggatttgtggttggcagtaaatacacctttgaaagcacaattatttatcagtgtgagcctggctatgaactagaggggaacagggaacgtgtctgccaggagaacagacagtggagtggaggggtggcaatatgcaaagagaccaggtgtgaaactccacttgaatttctcaatgggaaagctgacattgaaaacaggacgactggacccaacgtggtatattcctgcaacagaggctacagtcttgaagggccatctgaggcacactgcacagaaaatggaacctggagccacccagtccctctctgcaaaccaaatccatgccctgttccttttgtgattcccgagaatgctctgctgtctgaaaaggagttttatgttgatcagaatgtgtccatcaaatgtagggaaggttttctgctgcagggccacggcatcattacctgcaaccccgacgagacgtggacacagacaagcgccaaatgtgaaaaaatctcatgtggtccaccagctcacgtagaaaatgcaattgctcgaggcgtacattatcaatatggagacatgatcacctactcatgttacagtggatacatgttggagggtttcctgaggagtgtttgtttagaaaatggaacatggacatcacctcctatttgcagagctgtctgtcgatttccatgtcagaatgggggcatctgccaacgcccaaatgcttgttcctgtccagagggctggatggggcgcctctgtgaagaaccaatctgcattcttccctgtctgaacggaggtcgctgtgtggccccttaccagtgtgactgcccgcctggctggacggggtctcgctgtcatacagctgtttgccagtctccctgcttaaatggtggaaaatgtgtaagaccaaaccgatgtcactgtctttcttcttggacgggacataactgttccaggaaaaggaggactgggttttaa

SEQ ID NO: 282935 - DNA, 1000 bp, Homo Sapiens
gcctgtaatcccagctactcgggaggctgaggcaggagaatcacttgaacccaggaggcagaggttgtggtgagccgagatcgcgccattgcactccagcctgggcaacaagagcagaagttcatctcaaagaaaaaaaaaaaaagatttattacttgttgtctgtttttgtttctttcccttcttttcacaggtgttgagatttattacttgtcttaatgttgctgtcctgtaagtaggggaccttattttgcattgatacaacaatgacatttttttcttcctcttctcctgtgaaacaggtttccaaggtgctattgggagctcatgcactcttggccaatgggtctgtgatgtcacgggtagggacagcacagttagccctggtggctcgagcccataatgtaccagtgctggtttgctgtgaaacatacaagttctgtgagcgtgtgcagactgatgcctttgtctctaatgagctaggtaaggaggcaaaagagaagcctccagctacctgtgaagacttgagagggagggagaggggcggataaactagaacttcttttctgaaagaacataatgggtacgccttccattgcagatgaccctgatgatctgcaatgtaagcggggagaacatgttgcgctggctaactggcagaaccacgcatccctacggttgttgaatctagtctatgatgtgactcccccagagcttgtggatctggtgatcacggagctggggatgatcccttgcagttctgtacctgttgttctacgagtcaagagcagtgaccagtgacgggggaaacacagggttaataaatgccatactccctaccctcagcaactctgcctttgtttctcttttagcatctccaccacttaagttaggagtccagacttcacaaccccttttatcacctgctactcagacctttgtgaagacctgctcaagtaactagctccatgccagtacattgggactaacctgaagaccc

SEQ ID NO: 282936 - DNA, 1000 bp, Homo Sapiens
ttgacccattcttagtcctcacattactaagcctctcagcacatttgatatagttgattgattctcctcagtaaacattttcacttgacttttgcaatagcatatgctctttgtattcctcctttccagtcactaattgtttagaccttttggctgatgccttctcctttgcccaatagttaaaagtttgagtgtgctgggtttaattatcagccgtcttctcttcattacccacattgtcaccctaggttattctaggtcgtttgtgattttaaatgccatctatatgttaatatctccaaaattacgtagttttctttgtagccaaattttatatgtacatacatatacatggatatacatgggtgtatgtataatttatcattaacttgtcacaaaaggagtttcttaagatttcttaaaaattgtttgtattaaatcttgatacatcttggcatcttttataaaatacagacgagtatagctatctacttatacctttctttagatgttttagcatatccaaagcagaaatttgattatccttaccatcatttcttctccagtcttacccatttgggaaatttcactaccacaatgcagttgcttcaagctaaaaacccaggaatcttccttggtgtctttgctttcttctccttgcacatcctgttatttttacttccaaaatacaaattgactctccctttgtgtctctctactgcagctgctgcagctacactccttcctcactggtctccctgcttaattttctattctcctacaatgaggccaaactgaattttaaaatcttagataagattattttcctacctggattaaaacctaccaataatgaaccattgccctttgaaaaaagtctgcacctgtaccttggcctacaaagtttgatatgatggcacccctgcttacctccccaacctgatttcccacccctctctctttactccccttgcctctcaagtaggccagagctcagaac

SEQ ID NO: 282937 - DNA, 1000 bp, Homo Sapiens
agccactgcgcccggccttgcatgctctttgaccctgaatttgacctacttgctggggtacagttgcttccttttgaacctccaacagggaaggctctgtccagaaaggattgaatgtgaaacgggggcacccccttttcttgccaaaatatatctctgcctttggttttattttcctttgggtccagaagttttcaatctctggagtttgtgcattgggcctcacccggagcagacgagggcagggctgggaaggatggggagggacatagaggattcggttcctcccccaccttgtttcttgagtgtttcctaatcacttgatgggtggtaccacctagaattcttccagcagcctgtaatgggaggctacaggttagcctggaacctgcaatcaaaccacctttgatctgtgtgtcattaaaagtagatataaatgggccgggcgcgattgttcatgcctgtaatcccagcattttgggaggccgaagcgggagggtcacttgaggccagaagttcgagaccagcctggccaacatggtgaacccctgtctctactaaaaatacaaaaattgcagggcgcggtggctcacgcctgtagtctcagcactttgggaggtcgaaacgggcagatcacctgaggtcggggtaagagaccagcctgaccaacatggagaaaccccgttctactaaaaatacacaaaaaaattagccgggcgtggtggcgcatgtctgtcacccagctacgggaggctgaagaagagaatagcttgaacccggaggtggaggttgcagtgagccgagatcacgtcattgcactccagcctgggcaacaaggcaaaagctctgtctcaaaaaacaaacaaacaaacaaacaaacaaacaaaaaattagccaggcatggtggcggcgcctgtaatgccagctactcagaaggctgaggcaggagaattggttgaagcccaggaggcagaggttgcagtgagccgagatcctcgag

SEQ ID NO: 282938 - DNA, 1000 bp, Homo Sapiens
  misc_feature (168)..(267): n is a, c, g, or t
  misc_feature (619)..(718): n is a, c, g, or t
tacgagatcatggtgaaatgctggaacagtgagccggagaagagaccctccttttaccacctgagtgagattgtggagaatctgctgcctggacaatataaaaaggtgtgtttggatctgtgggtggaaaggtctggataaagctggaagttataccagtgagctgtnnnnnnnnnnnnnnnnnnnnnnnnnnnnnnnnnnnnnnnnnnnnnnnnnnnnnnnnnnnnnnnnnnnnnnnnnnnnnnnnnnnnnnnnnnnnnnnnnnnnttttgaggtttggttgttaacacttgattaaatatgttcaatgaatgtttatagagttatgaaaaaattcacctggacttcctgaagagtgaccatcctgctgtggcacgcatgcgtgtggactcagacaatgcatacattggtgtcacctacaaaaacgaggaagacaagctgaaggactgggagggtggtctggatgagcagagactgagcgctgacagtggctacatcattcctctgcctgacattgaccctgtccctgaggaggaggacctgggcaagaggaacagacacaggtagctgtgggggcagcctcggtgtctcacctttcccctcccctataggccctgannnnnnnnnnnnnnnnnnnnnnnnnnnnnnnnnnnnnnnnnnnnnnnnnnnnnnnnnnnnnnnnnnnnnnnnnnnnnnnnnnnnnnnnnnnnnnnnnnnntcgtttgtctctggggggccacagtcctaggtctagttctgtgtaggagttgtaatattgctcttctctccctcctccagctcgcagacctctgaagagagtgccattgagacgggttccagcagttccaccttcatcaagagagaggacgagaccattgaagacatcgacatgatggacgacatcggcatagactcttcagacctggtggaagacagcttcctgtaactggcggattcgaggggttccttccacttctggggccacctctggatcccgttc

SEQ ID NO: 282939 - DNA, 1000 bp, Homo Sapiens
ctcaattgttccggttttttattttctttacaatttcacttagtctgtacttcatcattttgacagcatcttcctccctcctttaattaatggaatcttctgaattttccctgaatgtttaaagatcatgacatatgacttgatcttctgggagcaggaacaatgactactttttctggtgtgttaacatgtcgctagccagtgctccaggcacccagctttgtctgtgggttagtattggtgtatgtatgagtatctgtatgtatatatacacggtatttatagagagagactatcctggagaagcctcgttttgatgccattcttccttgcaaggttaagcaaggtgggtggaaactaagacacctgaaccctccagggcctcccgcatcaaggtcagcatgaggacagaccacagagctgtcacttttgctccgaagctacttctccactgtcccgttcagtctgaatctgccacaaccagccaggcaggtccacagagagggagagcagagaaagaagtcctttctctttattgagttcgaggactacaaccaatttacactgccatctgatgccgtgatcctgagccaaggaggtgaggagcagagcaggcaatttcaccaccaaatgccaagaaaagggctgacattttctttcatgggcaccaacctgcatttgtatgtgtcccgaatccacagtcgtactgattctaatggggacacagatcatggtagagaatctctccctcctcagtaaatgtacaactgcacctgtcatcatggaggtcatacatgcatacaaagaggtgtacaggtaccatcttgtatacacatatatacccacatgtacagacatacatttatgcacattcacgctgtttgtttcatatatacaggcataaaatagagtaaatacaggtagttttaaaagtacccttttgtgtgaattgactaccgttgtttgcaaacccgaaaataaaagacgttcattatgtatg

SEQ ID NO: 282940 - DNA, 1000 bp, Homo Sapiens; identical to SEQ ID NO: 114972
  misc_feature (376)..(376): n is a, c, g, or t
  misc_feature (400)..(400): n is a, c, g, or t
  misc_feature (438)..(438): n is a, c, g, or t
  misc_feature (764)..(764): n is a, c, g, or t
  misc_feature (824)..(824): n is a, c, g, or t

SEQ ID NO: 282941 - DNA, 1000 bp, Homo Sapiens
ctatgaacagtgacactactttctattctttagctgtactgtaatttctttgagttgatagttttacaaattcttaataggttcaaaagcaatctggtctgaataacactggatttgtttctgtgatctctgaggtctattttatgtttttgctgctacttctgtggaagtagctttgaactagttttactttgaactttcacgctgaaacatgctagtgatatctagaaagggctaattaggtctcatcctttaatgccccttaaataagtcttgctgattttcagacagggaagtctctctattacactggagctgttttatagataagtcaatattgtatcaggcaagataaaccaatgtcataacaggcattgccaacctcactgacacagggtcatagtgtataataatatactgtactatataatatatcatctttagaggtatgattttttcatgaaagataagcttttggtaatattcattttaaagtggacttattaaaattggatgctagagaatcaagtttattttatgtatatatttttctgattataagagtaatatatgttcattgtaaaaatttttaaaacacagaaactatatgcaaagaaaaaataaaaattatctataatctcagaacccagaaatagccactattaacatttcctacgtattttattttacatagatcatattgtatatagttagtatctttattaatttttattatgaaactttcctttgtcattattagtcttcaaaagcatgatttttaatagttgttgagtattccaccacaggaatgtatcacaacttaaccgttcccgtttgttagactagtttcttattaatgttgatgaatgttgtttaaaaataattttgttgctacatttactttaatttccttgactgtaaagagaagtaattttgctccttgataaagtattatattaataataaatctgcctgcaactttttgccttctttcataatc

SEQ ID NO: 282942 - DNA, 1000 bp, Homo Sapiens
ggttttaacgatttgtttctcctgctcctcttctatcagacctgaccccacacaaacctgtcccctcggttgtgttgaagtcccctggacagtgggcaggggtggcagaggacacgagcagccactgcccgtaccccctctcctctctgtaagcccatgccctgtcttcccagggacttgtgagcctcttccctcgacggtcctcttctctccttccagtcctctccccctgctgtctgcagcccctccccggggagttggtgctttcttttccttttttttttttttccagggggagggaggagaggaaggagggggatcagagctgtcccaaagagggaaagcggtgaggtttgaggaggggcagaaccagggccggcaaaggttgtaccttcataaggtggtatggggggttggggtcaggccctgaacatcgtcctacttgagaatctgtcaggggaaaaagtcaaggggagcaggaggaagagccaggagggccagaggcagagaagagatggagtcttaggggccagggtgagcgaggggtccagggcctagaggtgcttcctgggggcgggggaatgcagccagtgtccccctcccctcttccaccccagctccagccctggtcttgtcttttcatccctcttccccacgacagaagaagttgtggccctggccatgtcatcgtgttcctgtgtcccctgcatgtaccccaccctccaccccttccttttgcgcggaccccattacaataaattttaaataaaatcctgtttctggctctggattgaatgaattgccctcactaagaactgccgccaaccccaagggtttcttctcggcctggtgtccgtcaatccagccttgctctgccctgtgaggctgtgaggttctggctccgccctccccaggggcagccttactggcggcagcacagatacagggcggggccaaggctgtggctgtggagagcaagttccaggtctttggggaattc

SEQ ID NO: 282943 - DNA, 1000 bp, Homo Sapiens
tgttggctgattaccatattgaacacatggcatttgtagcattctttaaatctatctactgagatgtatttgacattcaagcagttatattcggtccttcattttatagaatattggcactattattggtacagtttaaagccattaatatgttttatccatttgataattttacagtaagtaggtctcattcattttgacagttatcaaagatgtactttccacagttaaatttacattaatggcaatttttgatagttttatggctttttactgttagactaatcaaaaataactttaaaaggaacaaagaaactccaacatttcacattatgcatagttatgtagccatttcacagtttctttaagatgtgtaaactcattgtccttgatagtttttatttttcattataaaattataccaggagatttcttttaagattctgagttagcagagttcaaaactattttgtggaaacaagccaactagtaacaatgcagcaacacttctggtttagctaaattatttttccaatgtaggaaatccacactgatttgtacgtctgactgagagaaagatggtcgtctccagcagagaaagtgaacagcatttgttggaaggtgatggctctccctcctccctccccatttcattggcgtaacgtaaagtgtattctgtacataatttacaaataaaacattttattttaattgttacttattatttagatatttctcaacacttaaattcataaaattaagaccatgtaagggtatgtttttagagaaatggaagtttgagtaacccacagaacatctgtgatctttctacagcagcttcagttttgtgccaacattccatgtattttgaatatgagcaaaaactgatcttaagagcagacttaaagtagctttgtacgccttaatgttcattttgatttattttaaatctttacattcagaaatgagatactgtattatcagaccaggaggcattgct

SEQ ID NO: 282944 - DNA, 1000 bp, Homo Sapiens
acgcccgccgcgactcgcccgtgccgcggctctcgggggagctgtatgggcgcgccaccgcctggaacatgctggactcccacctctaccgccacttcaacgccagcttctggcgcaaggtggaggccttcgggcgggagcgcatggcccgcgaggtggccgccctgcgccatgccaacgagcgcatgcggaccatctgcatcgacgggggccacgccgtggacgccgccgccatccaggacgaggccatgcagccctggcagccgctgggcaccaagtccatcctgggctacaacctcaagaagagcatcgggcagcggcacgcgcagctctgccggcgcatgctcacgcccgagatccagtacctgatggacctcggcgccaacctgtgggtcaccaagctctggaagttcattcgcgatttcctgcggtggtgacgtcccaccgcccagcggcttgcctgcctgctcgctccctgcagaggggctgagcaggacgccgctggtgctggccgcccccagccccctcctggtgccacctcagaccccggggtgagggggggctccctggggggaggcagccagccaagactgggcccatgaacacagagagggcctaaccgagatcagtatttaactaattataccagtttttattaaacccctttccctccccgataaagaatgttctatttctgcctccccttaaaggggagacctcagaagtaaaggaatttgatgttgtgtttttgttaatcagcctcagtggtggtgacttggggtgggggttggggtggggggaaacccaagagaccacagtggtgcctgggtgagtctgtgggcagagcccaatggggtggcagggatttgatgtgttatttgctatatgctatagttctatatggttcagggactcccatgagctaccaaggcctggaaaagcgcgtgtgtatgtgtgcgcttgtgtgcacgtgtgtgcatgtgtgcatgtgtgtgtgatc

SEQ ID NO: 282945 - DNA, 1000 bp, Homo Sapiens
  misc_feature (342)..(441): n is a, c, g, or t
tctcctgctggattcactccagagctctgttctctggcagggtgagtgggcagggatcagcatgggtcaacctgtgcctctgctctcctgactccatggaactttccagagcagccaacatcattgccaagtctgcacgttccatataggcctggtgtttctaccactggacatgctgtggatactgcccatgtgacttcattagatgtttccaaatctgtgcttatatcacattgtcccaaacctgctcagctccttatcaaatcaaaaacatttccatcaactttgtggtccaggtgccaattccacctccttcatatggaattgcttgctagatcctgnnnnnnnnnnnnnnnnnnnnnnnnnnnnnnnnnnnnnnnnnnnnnnnnnnnnnnnnnnnnnnnnnnnnnnnnnnnnnnnnnnnnnnnnnnnnnnnnnnnncagtagcaggtaataagtaaagtaccaaaagaaagtataatcagagtatctctgctctgctgacagatgtacaggaatatacctgaatatttgactctgtgtgttttacgtgttaacttccagataagggaatatgattgaataatttattattttgaaaatactgtattatgaagccatgttcataaaggtaagaaaggcagattctacaactagtcagacaacttaacattcatactaatgacagcttcattgaaatcactttactactcccctagtaatggagtcattgcatttatattatacattattctcttttcagttttgctagccaccctaattatccatattcagatgaatattaacatggaaagctttgcctgatgtctaccagaagccctgtgtgtggatggtgacgcagaggacgtctctatgccggtgactggacatatcacctctacttaaatccgtcctgtttagcgacttcagtcaactacagctgagtccataggccagaaagacaataaatttttatcattttgaaataattgaatgtttt

SEQ ID NO: 282946 - DNA, 1000 bp, Homo Sapiens
ttaaaaggatatgtgattgctaccaataacatttaaccctcaaaactttttgttaatgatgaacatatagctggcttatttctattcaaaacaatgcaagatgagttcctgccttcattgagaatttgaaatagaaaatgtcagaatatctctttgctctgttgacagatatggaggactatgtttgaacaattgaccctgtgtagtttgtgtgataaattccaggcaagggaatataagttgaaaattttcttattttgaaaaaaaaaaaacacattataaactcatgttcatgaaagacattctacaaatagtccgaaaataaacttcttaacattcacactaatggcagcttcatataaattttgctaccagctttttaatagagtcatttcatccatatttatgtactatcctttctcttttcagtcttatggaccatcctgattatccattttcagatgaatattagcatagagggtgttgcacgacatctagcagaaggccctgtgtgtggatggtgatgcagaggatgtctctatgctggtgactggacacacggcctctggttaaatccctcccctcctgcttggcaacttcagctagctagatatatccatggtccagaaagcaaacataataaatttttatcttgaagtaattgaatgtttttccttaaagattcttttcctactcctttctctgttacttgtgtgtttcttttccttctagttctttaaggccaaaaactgatttgcctataagtttggggcagagagtagatgataaccaatattttatagacatttttgaggtgagagtaggtggagttttcagcctctagaggagaagcaagtgacatatttgttagtctgtctttagctcttccagaaagaagaaaacacacagcacagaacctgaacatgagccatattgacaggatgaccaacaattaatggcctccctccagcatcgcaagaatgggagctccagcaaccta

SEQ ID NO: 282947 - DNA, 1000 bp, Homo Sapiens; identical to SEQ ID NO: 114973

SEQ ID NO: 282948 - DNA, 1000 bp, Homo Sapiens
ctgttatgttttgtcactattcacattttagtcttttctacgataaaaattgtatgtgtactttcatgccagtataggaaacctcaatcttttttttttttcgcctttaagaaggttttcagtgattatacctcaggtatttctgagtgtcctattgtctaataggagaaatatcttcccgagctcagaattaaaagttctcctaaattatgaagatcccaaatcttatgtaaataaccttaggcatgagtccttagggagaagttaatgaccattgttaaagtgcttttttagaaaatgttgtgctgtatgttcttgatctgacataaatgaatagactttggcaagggaggaaataagttaaaaggcagcttacaagagcctattccctataaagggtataattttacacagtactcaaagcttgttatcttttctgaccattttagtacagaattagtacttggtggttactaacatcaacttgtgacatctagaactagggctcttagtgtttagtgggccacttctctgatgtcagatgcatgcagacctgtactccacatgcaacccaacagcagtgcagtgtgataactgagcggtcgcatggcagaggacatccccctcagagtgggcacaagtgccctctagggcagccaggggaatactattgttcgatacctgggatttgactttgtcaaacagctctttgtgcccctatctttgttttgtcaaatgtagatcagttaataaacatgagtagcttgaattttcatttgtctccctgtgtctttgtcacagctgtctgcacaggtaatcctgtactaaatcttttctgttatgtttttggttagaaaacaacctctacttgtcaaaccaacacatacacaagaaaccactaataggtaataataaacagatcttaatgtattttccttagatattttttaaaatagcatagacagtatctatgtataccataatacttccttagcaaaaa

SEQ ID NO: 282949 - DNA, 1000 bp, Homo Sapiens
ttctcaaaatcagtgttattgctttagagtataaactccatataaattgatggcaattggaaatcttataaaaactagtcaagcctaatgcaactggctaaaggatagtaccaccctcaccccccaccataggcaggctggatcgtggactatcaattcaccagcctccttgttccctgtggctgctgataacccaacattccatctctaccctcatacttcaaaattaaaatcaagtattttacaaagtgtgtgtgtgtgtgtgtgtgtgtatatatatactttttttttttttttttttttgagacagagtctcgttctgtcacccaggctagagtgcaatggtgtgatctcggctcactgcaacctccacctcccaggtttaagcgattctcccatctcagcctcccaagtagctgggattacaggcacctaccactgcgcctagctaatttttgtatttttagtagagacagggttttgccatgttggccaggctggtttcgaactcctgaccctaggtgatctgctcgccttggcttcccaaagtgctgggattacaggtgtgagccaccttgcccagcctatatttttattctgaaacaaacttaaacatagagaaaagttgcaaaaaaaaaaaacccactttttttcctggacatttgagactaagttacttaccatgatgccccatcatcaacaaatacttcagtgtgcatttcctacaaacaaggatattctcctgcaaaactgaaatacaaccatcaaaatcaggaaattgccaggtcgcagtgctcacgcctgtaatcccagcactttggtaggccaaggcagcaggattgcttgaggacaggaatttaagacaaacctgggcaacatagcgagaccatgtctctacaaaaagaaattagaaattagctgggcatggtggtatgcacctgtagtcctagctacttgggaggctgacgtggggggatggcttaagcccaggaattcgagc

SEQ ID NO: 282950 - DNA, 1000 bp, Homo Sapiens; identical to SEQ ID NO: 114974

SEQ ID NO: 282951 - DNA, 1000 bp, Homo Sapiens
aaatccagcgttttcatgccacggaagccaagaaagggctcacggcctccggcctcacagggctacgcaaagggggagttgaataaacacggtgacgggccccgggcggcagctgctcccggcactgatcctgctgggccagcggtggacttgcagggcccacatccggagctgcccactggtcctcgtgctgcacagccttggaggatctgaggctggctcagggtccctggcagcaactgccctgctaggtgggggctgctgggttccacagctgggccctccctgccggctgccaccaggcggcgctgcacgcccacgctgagtggggcaggccctggagcccctctgcccgggcagcctgacggcccctcctcctcggctgagaccgcagagtcccaggcatcacccactgaaagtgtgctcagtgacctgtgaatagggatgccacgtctgcgtgcagacattgattaggcgcctgtggtatacctggagctggagggtgtgcgtggacaacaggcagaaaggtccagtgggatggaggctgccaacaggacgatggggaaggggcgcgttggggacatcgccgggcacgcggcccaggtgggcccctggctcaggtctccccccacctccctgcctgggctctgtccatctttctgccgcaccctcagccccaggtgtgggcccaccgtgcttgtggacgcctcatgctctgtaccgggtgggaggtgtgggagttacaggtcagggcagccttgggagacgggcaggtttcctggggtgcttaccggcagatggggcgcctgggtccgtgcagggtcgtccgcccgagaaagcagcccctcacccctgggcactaacttcatcttttttctttgcacacagaaacgtaaacctgattcacaaaagtataaccactcagcatgtagctttgtacacctgccctcagcatttagtgtcctcgttcatccaacaagcatctaataagcactggggt

SEQ ID NO: 282952 - DNA, 1000 bp, Homo Sapiens
ttcttacttgttaagtaattagtttagttttttagtgcagaaattgtgatatgttacataatatgtcattacagtacaggagtgttttggtgatatatggggtattaatttggatttttaggtgaactagtttcttttttttcaatttgatgtagtgaaacatatgccacagtatctgaaaacttgctatccaacatggctttaggatcagattaaccacttgagtttctgctttgtgaattacttgttcattgcattttcccattttcttctcttgatgctatcgtatctttcctttttcttgttggtttgcagaaatttattatatatttttaagtcttaattcactatttgttttagttgttgcaactatcttatttcaacttgtcatcggctaactttttcctatggtgtctttaataaagagagaaattcttattgtttgctgtcatcaaatctatcttttttttttttttttgatggagtcttggtctgtcgcccaggctggagtgcagtggcgtgatctcggctcactgcaacctctgcctcctgagttcatgccattctcctgcctcagcctcccaagtagctgggactacaggcgcccgccaccacgcccagctaatattttgtatttttagtagagacggggtttcactgcgttagccaggatggtctccatctcctgacctcatgatctgcccgcctctgcctcccaaagggttgggattacaggcgtgagccaccccgcctggccaaatctatcttttttaaaacatagggtttgagcaattggatctttttagttattttaaaaacaacgttaaactttaccaaattattaatatgtcttcaaccttacctactgaatattgtgaataatcatcctggatgtattcctctgcatttggagtgcttctttcaagaggggtttcagaagcaggctgtgtggggcaaagcttcttagcctaggaggctccctgagaacagcttttatgtt

SEQ ID NO: 282953 - DNA, 1000 bp, Homo Sapiens
tgccacaaacttccaatttgaaaacaaaaaacaaacaaaaaaaacaccaaaatatgtgaagtgcaataaagtgaagttcaataaaatgaagtatgccaggaataaaaactagcaggatcacaggatcaacctctacttaaaagtattagaaatatggaggtaaatagaagaaatagctaaaaagagttgtaaatgcttgcctctggaaagcagtaataataagcagagaaaaactcattttcaatatgagatttttgatataatcttatttttacaactttgtgcataaatggctttggtaaaaattaaaaatcaatcatcagactggtatgtctcttattaatcaacaataaacaataatattgatacccaggtactacactgagagccttgggtgagcctccaagtcttgctggcttcagataccagaaagatcacaggggttaatgcactaagcagactcttgaggtccctgattccaggacttgactctgggatagcatttctgaacctgccctcggccagaggggagcccattgttctgaagtttgaatcccacctcaggcagaattcaatagaagctgattaaagtgcccttgggccttaaggaaacattggcagtagtctagcagtactccctgtgggcctgaagtgttgtggctatgggttgaggctcctttgtatttggaaatgcgagggaagagtgggaaagacggtcttgtggtttgcgtgccacctcagccacaatatgatagaacaccaggtagactttacgagttttggctctagtctctgactcctggatggcatctctggacccacatgggacctgggggacctcgccaccctgaaaggaaggacacaggccttgctggcttttctgcctgctgattgtagagccccatggccttgagcaaacattggcagtagtcagggagtaattacagcagaccttgggcaagactcataaatgtgctggcttcaggtgtaacccaatgta

SEQ ID NO: 282954 - DNA, 1000 bp, Homo Sapiens
cattttcgcctttttttttttttaataaaatataccgaattcctagggtaaaagctgtagtagggtaaaggatatactcatatttacaagtggtgaaagtccaagagttgtaaatccaggaaatttcttaggaactcaaataaaatgtcacatgttttcttacagtgaaggagaatgtttttctgacatttatactatgtctttatggtcaatatacaattgatttttaaaaataatagctgatttcatgcttcatatgactaaggtacaattactaattgcaaaaactgaactattcctggaattatgttcaaaaaatctataatttttgctcatgaaagtgcttcattggctaaacagtattagtttatggctataaacgattatttagataattgaaaatgggtataaagtgattcaaaataatatggtggctttaagtgtagagatgggatggcaaaagctgtgaacacagaatgtaaaattggtaactaagaaatggcacaaacaccttaagcaatatattttcctagtagatagacatatagacatatatatacacacatatacaaatgtatatttttgcaaaattgttttcagtctagaacttttctattaactaccatgtcttaaatcaagtatacaatcctagaattagtttaatattttgaatatgtaaagacttgtggtgcctatttgttaatgctttcccactctcaggggaaagatttgcattttgagctttatctctaaatgtgacatgcaaaggttattcctggtaaaggagttacagctgtctccaaaaatgctacttgttgcaatatctacattctatttcatattatgaaagaccttagatataaagtaaaatagccaaaatcgcgccaccacactccagcctgggcaacagagcgaaactccgtctcagataaaaaaagagacagagagagagagagagagagacaagggatagggaggaggctaattccaaaatgttggc

SEQ ID NO: 282955 - DNA, 1000 bp, Homo Sapiens; identical to SEQ ID NO: 114975

SEQ ID NO: 282956 - DNA, 1000 bp, Homo Sapiens
  misc_feature (572)..(572): n is a, c, g, or t
  misc_feature (574)..(574): n is a, c, g, or t
  misc_feature (629)..(629): n is a, c, g, or t
  misc_feature (688)..(688): n is a, c, g, or t
  misc_feature (892)..(892): n is a, c, g, or t
tacatattccttttggtttttttaaaggttacatgttcaagagtgaaaataagatgttctgtctgaaggctaccatgccggatctgtaaatgaacctgttaaatgctgtatttgctccaacggcttactatagaatgttacttaatacaatatcatacttattacaatttttactataggagtgtaataggtaaaattaatctctattttagtgggcccatgtttagtctttcaccatcctttaaactgctgtgaatttttttgtcatgacctgaaagcaaggatagagaaacactttagagatatgtggggtttttttaccattccagagcttgtgagcataatcatatttgctttatatttatagtcatgaactcctaagttggcagctacaaccaagaaccaaaaaatggtgcgttctgcttcttgtaattcatctctgctaataaattataagaagcaaggaaaattagggaaaatattttatttggatggtttctataaacaagggactataattcttgtacattatttttcatctttgctgtttctttgagcagtctaatgtgccncncaattatctaaggtatttgttttctataagaattgttttaaaagtattcttgttnccagagtagttgtattatatttcaaaacgtaagatgatttttaaaagcctgagtactgncctaagatggaattgtatgaactctgctctggagggaggggaggatgtccgtggaagttgtaagacttttatttttttgtgccatcaaatataggtaaaaataattgtgcaattctgctgtttaaacaggaactattggcctccttggccctaaatggaagggccgatattttaagttgattattttattgtaaattaatccancctagttctttttaatttggttgaatgttttttcttgttaaatgatgtttaaaaaataaaaactggaagttcttggcttaaaaaaaaaaaaaaaaaaaaaaaaaaaaa

SEQ ID NO: 282957 - DNA, 1000 bp, Homo Sapiens
ctgcctgtgagggtgtgccgaggctatctctcacagcccttctcagcttgtctccttaatttgtcccattcttcttggcctgaagccctcccaatcaccactatgggcccagccacgccacctcaactcctactcattcacttctacccccacccccatttcacccccgctccatggcacagccttctttagtgtattgcttagatatgacttttagaatcctagagccacgaggcagggcctgaataagccattagggaactggtatttcttgagcacttaccatgtgtgaagaatctctctgagattttgcatacattcgctctaatctttacaacatccttagaaggtagagatacgtgtccccatttgtagaagacgccagggcccctgaagatgaaatgatttgccgtaggccacacagcaggttggtggcagaattgggatttgaacctattctgcttggcttcaaagatcaggctctttgcacgatgtggtctgggccggttttgtcatgattcctgctaagttaagctctgggctagccaggaagccggactgcatgaagaaggcagccactcctgcagagtgggcatggggagggggaagggaggagaagggccagccacagagccatctggcatctggagaagcctgttcattccatggcatctggagaagcctgttcattccagggctaactggacgtggtgtcacccaaacctccctgctgccttccacggcctgactctccccctccttgggaggaaagtgtctgaggaccatgttcacccagcagaatacctgagaaggggaagggcaatgctgcaccatgagggataataatgcactaagacaggccctcagctacccatcaggccagggggcaacagctttgggctaaagggatcctagactcctcctcaccttccagcctgtgggtttagtgctccaggcaccccatctctttggggctacccctgactctgatcttctcatc

SEQ ID NO: 282958 - DNA, 1000 bp, Homo Sapiens
tccttaattttaaaactcttgatgctggctgggttcggtggctcatacctgtaatcccatcactttgggaggccaagacaggttgattacttgaattcaggagttcaagaccagcctggacaacatggcaaaacacgtctttaaaaaaagaaaagaaaaaagaaaaacagaaagaaaaagaagaaaaactacttgctgcccttacttgaagctcaattatttaaaacaaagaaaaaatataaaaatcttttattgctgaaaatgctaatgatcacctgagccttcagggagtcttagtctttttgctggtgaagggtcttgccttgatgttgttggctgctgcctgataagggcgatggttgctgaatattgaagtggttgtaacaatttcttaaaagaaaacaatgaaatttgccacattaactgactcttccttccacgaaagatttcagtgtaccatgcgatactgtttgataagcattttacccatagtagaacttctttcaaaattggagtcagtcctctcacaccctgccactgttttactatgtttatcaatattctaaatcctttgttgtaggctaaacaatattcacagcattttcaccaggagtaaatttcatctcacaaaaccactttccaggctctttctggactgtagagttctttccaggctaccttgtggcagtttaagagtctggcatcattttccgctgggacctaaggatcgaggaggtgcttgtgactagactgccaatggacccatcacaaagtttaacccaaccttgatccccgagtcttcacaaatgctcactgaagaaaattcctggaacaattcagggtcctttcataacctctactctgaggtgttaataaaaaaccttagtaacttaaaaaaaatgagctgtacacaaatactgaacaataatgctacatatgttaagtatgtaagaaaaatatatactttgacataaataagaaacggtgagttgataattgg

SEQ ID NO: 282959 - DNA, 1000 bp, Homo Sapiens
caacatatacccaaaatatatgaggcaaattttaacaaaaattgaagttcttaagaaaacttcaccaatacatagtcataatgtggtatattcatacaacacactcaataattgataataacagtccaaagaaagcagaaagaaggaaagcctagagcagaaataaatgaaatagagaatagaaaagcaataaagaaaaaaattatgaaatcaaacctggttctttgaaaagatcaacaaaatggcaaacatttagctagattgcccaccacccccaaaagactcaaattactagaatcagaaacaaaagtcaagattttattaccaatcttatagaaataaaaattattagaaagaaataatatgaataattgaatgcaaacaagttagataaatgaaatggacaaattcctaggaagacacagaataccaaatccgactccacaagaaatagatgttgtgaatagagcttgctgtggtatgaatgtgtcccccacagctcatgcgttggaaacttaatccccagagcaacagcactgagaggtgggacctttaagaggtactaggcagagccctcatgaatggattaatgccattattgtgggagtgggttagttatctaagaagtgggttcccgataaaaggatgagttcagccctcttcttctccaaacctttatccccatccccacccgtccctctctctctctctctttctttctttctctctctctctctcttccctcctcttctcccttccttctgccatgggaggatgaaatattaaggccctggccagttgtggcccctccgtcttccatctgaggctggaagacttcccggccttcagaactgtaagaagtaaatctctcttctttaaaaaaaaaaaaaaaaaaaaaaattgttcactcccactgatcctagaaaaaatcagctctccaagaagtagtagatcattgttactggctatccgccttagcaaatagcagatgcctcagaat

SEQ ID NO: 282960 - DNA, 1000 bp, Homo Sapiens
catccttgacaacatcctctaactcttcaagtatttattcaatgccagtatcctagaccttctattttttgcactcaagaaggctctagactcccatgatagttcatcctgaaaatattctcttatgcccacaatcttctgccctgacaacattctgtgtacctctgtgactcaccacagctaacattggatcctcagaatatttcattctcacactgttatgggtgtctcagaagtcccaacccaacctacatcccacattcttccaataccccacctctgccaacattccctctctgaatcaatggcaccctagtctctagagttatagggttcagtataccaaagggtcttcttgcctgaactttattgtctaccaaatattccgtcttgtatcccctccatgaacatccttggtcagtgtcccttgctgttacatctttgtgcatgaccctaaaatgtagtgcaaatccttgctttggacaagttataaaactcacagtctctgtgctttctcatctgtaaaatgggttcataattttttttaattgtaacattattacaagaataaatgtcaagcatttatcactattattatttgcatggttcccataaaatattaccttagaatgttaataacagcccttcgaatttgcagagtgtccaaaaaaagtgttgcactgatttattttcctcaggagacatttcttcagtgttgactatgtgcaagcactctcctgggtgttgttaaatatagtttatttactcaacaaatatttgtacctatcaagagccaggcactgttgcagagacaagtgataaccaatgagttaaacagataaaaacttctgcccttgtagaacttacattcttttcaagaagtctccataacaatgaataaagaaataggctgtcaggtggtgctgcaagccatagcaagaaatgaaacaagggccatatgtggtagctcatgcctgtaataccaacactgggaggccaa

SEQ ID NO: 282961 - DNA, 1000 bp, Homo Sapiens
  misc_feature (186)..(285): n is a, c, g, or t
cagctgtctgggcagcgcttcacagctcgcgatgactttgcctactgcctgaactgcttctgtgacttgtatgccaagaagtgtgctgggtgcaccaaccccatcagcggtgagtgtcccgggttcccatttccaggggcgattggaagcttgaacaaggcctagcattttagcctgtgaccctgnnnnnnnnnnnnnnnnnnnnnnnnnnnnnnnnnnnnnnnnnnnnnnnnnnnnnnnnnnnnnnnnnnnnnnnnnnnnnnnnnnnnnnnnnnnnnnnnnnnnattgcacaggtccagactttgaaatggatcagaccagaattcgttcttcagtccgagttgcctgattctaactttcttcatccggtatgagtttctctctgttaacaggacttggtggcacaaaatacatctcctttgaggaacggcagtggcataacgactgctttaactgtaagaagtgctccctctcactggtggggcgtggcttcctcacagagagggacgacatcctgtgccccgactgtgggaaagacatctgaattcaacacagagaagttgctgcttgtgatctcacacacagatttttatgttttctttctcacccaggcaatcttgccttctggtttcttccagccacattgagactttcttctagtgcttttcagtgatactcacgtttgcttaaaccctttagtgctttgtgatagttcagtcccagggaaagagaaaactcgccctaggccctaggtgggaagatggtttgaaatttttgtaatcgagtaaggcacacccaaatgtaaaaatccttttgaatgatgcctttataaatctttctctcactgtctatttaagtgcaattaacatatgtcacgaacttgaaagttttctaaactcaataaggtaatgaccagttgttatttacagctctgtaacctcccgttgcgtcaagtctaaaccaagattatgtgacttgcaataaagttattcagaacag

SEQ ID NO: 282962 - DNA, 1000 bp, Homo Sapiens
ttggcttcaccctctgataccaactgattatattaaaaacttaccaatgtggcgatttaaatgtcttggagtccagtctgaagaggaaatgtcggaggggtctcaagatactgaaaatgactcggaaagtgagaacacagacactttgagtagtgagaaggaagtatttgaagataagcaaagcgtacttcacaattctccaggaacagcaagtcactgtgatgctgaggcttgttcatgtgccaataaatattgtcagaccagcccatgtgaaaggaaggggaggtcatatggatcatataacactaatgaagatatggaacctgattggttaacttggcctgctgatatgctgcactgtactgaatgtgttgtttgcctagagaattttgaaaatggatgtttgctaatggggttgccttgtggtcatgtgtttcatcagaattgcattgtgatgtggttggctgggggccgacattgttgccctgtttgccggtggccttcttataaaaaaaagcagccatatgcacaacaccagcccttgtcaaatgatgtcccatcttaaccatgtgcaatttgtcctttataagctttgagtatcttacagcttgcctttttaatgttagtcacaatgtttttgtggtttgaagtttagtttaatgttagtgcagtgacgggaaatacacattatgctaatgttgatgacagaatttatttggttgccttgtgtgttaattgaatgcatacctaattgtaaaatttttttatttacaacattggaaattcagaagttaatgtttttttgtaagcacaaaagaagtattatagaaatttatcctagcaagactttacaagataggatcaaattctaatggaattgagccggtttcttatcctaaatgtttcctccctttttacaatctctgtccagcacctcttggttaaataatgtatgctgtgagacatgaaattaaaacagacctatgaaataaattatttt

SEQ ID NO: 282963 - DNA, 1000 bp, Homo Sapiens
ggaacatatgatgttcatggagaaacaattggaagatttgaacatcttgttcaataagaacccatacccaaacctcagccttcagaaagaaatggcctcaaaaatggacatgtatccaacagtacaggtttggctcaagaaccacagagcagaggccaggtgcggtggctcatgcctgtaatcccagcactttaggaggccaaggcaggcagattacccgaggtcgggagttcgagaccagcctgaccaacatggagaaaccctgtctctaataaaaatacaaaactagccgggtgcggtggcatgtgcctgtaatcccagctactcaggagactgaggcaggagaatggcatgaatccaggaggcagagcttgcagtgagccgagatagtgccactgcactgcagcttgggtgaaagagcgagactccgtctcaaaaaaaaaaaaaaaaaaaaaaaaaaaagaaaagaaaacaaacaaacaaacaaaaaaaaaacagaacaaaactcaagaaagcaaaatgcaagcttattcagcaaacacaatctcaacaacagcaattagctgaggatagagtcaagaccagtccttcctaagaaatacagatataccagccaaatctcctaatgatgcctatcttgtagtcctagtttatacagatcactgggcaccctggttgcgactcacgttatgctccgatgttaaggtccctacagatgactttgttgtccacaaaacacttcattttgactgctgccaagatcctagaacatactgcttctgcttctatcccatttttggaatcctgagtttattctccatgtttcaattctaattcttttgactgttcacctctacaaagtagagagagatactagacacaaaaggtaacatattgtaatgtgtgtaatgatttcctacaagagagtacttttcatcaataaggaacaaacccggagatacacacacacattgtgtgtacaacatggatggatttcaaa

SEQ ID NO: 282964 - DNA, 1000 bp, Homo Sapiens
tgaaggctgaacaatcatggatttttctgatcaattgtgctttaggaaattattgacagttttgcacaggttcttgaaaacgttatttataatgaaatcaactaaaactatttttgctataagttctataaggtgcataaaacccttaaattcatctagtagctgttcccccgaacaggtttattttagtaaaaaaaaaaaaacaaaaaacaaaaacaaaagatttttatcaaatgttatgatgcaaaaaaagaaaaaaaaaaaaagaaaagaaaacttcaattttctgggtatgcacaaagaccatgaagacttatccaagtgcatgaccggatttttgtggttttgttcattttgtgtttaatttgtgtttttttttccagctgtatgaaatgggctttctgaagtttaaatagtccgacttcacccatggtgttctgtgcttgcagtgcgagtgttgctgtaattcagtgttgccgtcagtgtctcttttcttagctttctgtctttctttcaacgtagtgtgaagtgtcttatccttttctatgaattccaatttgccttaactcttttgatgctgtagctgtttcagtaaaagttagttcaaactaatgatgtagaatgctttgaccaaatgagctggtctattatgccttgtaaaacagcagcatagggcttttaaaaggtagtcaataaaagttgctgaaattttggcttttttaaatatgtagtaggtgtttttaatgatttttcacataatgtgtaaggtagtgaaatgcaagaagggaaaaatgttttgtgtgaaacacattttctgactggggaacttttattagggtaaattgtttgtaaggctgtacgccaacagtttcctctgatagtttgactgatttaggatatctgctgtatgatgcaatgtaaagtcttttttgccttttttcaggaaaaaaaaaaagctaacttgatgtactagatttagtgtaggtagtgttggggttgg

SEQ ID NO: 282965 - DNA, 1000 bp, Homo Sapiens
  misc_feature (26)..(125): n is a, c, g, or t
tacagatggtgtcaaaggaccctccnnnnnnnnnnnnnnnnnnnnnnnnnnnnnnnnnnnnnnnnnnnnnnnnnnnnnnnnnnnnnnnnnnnnnnnnnnnnnnnnnnnnnnnnnnnnnnnnnnnnattttgtagaggaaattccagtttagactgactacaaactttcccaagatcacagtgattgattggcagagccaggatcccactccaaagcctgtacttttctccttgttctctgctgtccctgtactaggtggattcatcaccattcattgctctaattggactttgttttctttacagggccatgctatgatagtggaagcttatccaaaataatagatccagaagaagtgacctgaagtttctgtgcaacactcacactaggcaatgccatttcaatgcattactaaatgacatttgtagttcctagctcctcttaggaaaacagttcttgtggccttctattaaatagtttgcacttaagccttgccagtgttctgagcttttcaataatcagtttactgctctttcagggatttctaagccaccagaatctcacatgagatgtgtgggtggttgtttttggtctctgttgtcactaaagactaaatgagggtttgcagttgggaaagaggtcaactgagatttggaaatcatctttgtaatatttgcaaattatacttgttcttatctgtgtcctaaagatgtgttctctataaaatacaaaccaacgtgcctaattaattatggaaaaataattcagaatctaaacaccactgaaaacttataaaaaatgtttagatacataaatatggtggtcagcgttaataaagtggagaaatattggagaactgtttacctcattttttattcatcaggggagggtggttctcttggcttaggaccagatttttgcctttaattactcatttataacttctaactattgtggtcaatgctgaagctgctgggaagataaagacaatcctgtttat

SEQ ID NO: 282966 - DNA, 1000 bp, Homo Sapiens
gtcttttgctacctttgtcttttggagggaaagcaatggatgggatatgttaaaagaaacattaattacattggcagttttcatttatacattgttgacataattttactcttaatacacacttgtatttattttaacgtctgaagttgaatatcagtctatagctaatgctactttcatttatatttttaaatgttcttagttttaaaatttcaactgattgtcgaaagggtaatatgaaagattttaaatgaaaaaaatttgttggatgatgatttttgaaaaatagtcaccaactgtatatacttcctcaagaactgataattcattatatcatcagatagcttttattaagcatctgtgggaatatacagttgggtggaatgataatctggtttattttttctgtaaacttaagtttccgttgacttctgtacatctacaatgaatacctcctcatagaagtggtgtctttacataattttttgtgtaggtgacactatggaaaaagaaaaaaaagacttaaaaatatctctcccctgattatttatatgaaaggggatattgttcattgtttaaaaacatttaattgagcacctattgttgataaattttctgggggaagcagtctttttcaagtttcccttttgaaaaaaaaaaagaagagttaagctcaatattttcaggttacattgagtacccacatttaatagaataaattagggaaggcctatagtagttagctcattcgtacagacattttcagtatatgcagaaaatttttggaaattgattttatacattttgtattaaaatccatgtgattgaaattattgtgatttatcatatacctttttggaatttaaatgggtatattataaaggagaaaagtaagaaccatagaaattagttgacttttctagaatcaaagatctatttcctagcaaggccagaatgagagatctgatattctgataaccagacaatgctctttttctcg

SEQ ID NO: 282967 - DNA, 1000 bp, Homo Sapiens; identical to SEQ ID NO: 195014

SEQ ID NO: 282968 - DNA, 1000 bp, Homo Sapiens
tagctctttgcttgttagtctgtgcttgtgaaggccctatgaatacatatattcactttccagggagaaagtctcaagaaaattggttttatcagtcacattctctcactgtatattagaaaacatactttcctatagcttcccaaattggtgattaatgtactttctgagttccagttccagttagaaaagccacaggaaggagaggggttggtggcgttgaggatgatgccctagtcactggaagtccctgtggctgttgggtgggtaatcgggttggtgcctcaggatacagttccctccgctcctggtgtgtagacagctgggtgtagtcattaaagtggggccactctcagaataaatgtgcagattggctggatctcagtttcagggagaggacaggaggaagccacagagactgaattgttaactccctgacattttcctcctttgtcagtacaatttaacttccatgaggacagtgatttttttccttcttgtctagccccacaacctgtaaaaatgacatacattgattatcaataaacatttgtaaaatgcatgaattgtctcataaagtgatatttattgaatatcttacctgttgaatgtactatgctaaggcctagagatacaatccttaataagacataattcctgccctcaggtctttcttttttgcagtggagtcactctgtttttggaatgtcttattataccttcataaactttactaaaaatgggagtgccagagtagtccagcaataaagaattaattgatgtagccaggtggtgaattcacttttccagaaaggataggctacttggagaccctgcactacttattgatttactcaaagctacaaatgaaaataagatggacactgttatccctgacaggtctaaagctctgagtccaatcaaccatccaccttcacgttttctaccatgtccacctgcagccactgctccccaatctctaagcttagaaggacaaaca

SEQ ID NO: 282969 - DNA, 1000 bp, Homo Sapiens
ggagaaaagagaaaacaggctgggcccggtggctcactcctgtaatcccagcactttgggaggttgaggtgggcggatcacctgaggtcaggagtttgagaccagcctggccaacgtggtgaaaccccatctctactaaaaaaaattacaaaaattagccgggagtggtggtgggcacctgtaatcccagttactcgggaggctgaggcaagagaatctcttgagctcaggaggcagaggttgcagtgagctgagattgcgccactgcactccagcctgggtgacagagggagactccgtcccaaaaaaaagaaaagagaaacagctgtcacctcccgcaggacccaaatcctctctctgagcaccgtcatccaccacatggctgggcctggctcccaggaccagtccagtcctctagtgccttatctgaggctgcagccgccagtctccaccccaaggagacagcccctgctcctagatgcccttggcctccgcagtgcagcccccaggtgtcctgactgaagcacaggccatagccccatttccccggtgcctgcagggctaacctccacgggagcccaggagctctggccggcaggtccatggcacggggcatcggaagactgcaaaactgctggacttaccctgggctgcagtccattgtcggcccctgggttgaatcaagatagtacttgcagctagatggatgcttttagccaggggacattgtgaggggaagattcctccacccagtctggcctgtggtgtctgtctcctccctgagaccacagcttctccagtagcagactcatgggcgccaccaagtggaagcacctggagcggcctctgccatccagtggggaagccaggccccgagacggaggtgggggcagcacgtgccctccacagccaccgctttcccgcctcagcagcccaggcctcctggcccagccctgcctggacagtgctctcccctcacccgggaagctggaatcctcct

SEQ ID NO: 282970 - DNA, 1000 bp, Homo Sapiens
ttaataaccagacaccatcattatctcaaccactcttcacgtgtcatattacctcctactagcttttccttaccctacaactgatcacaagaccacaactgacatttacaactccttcttccacacccattccatgttcccttttacataacttcagctagattcaacccacattccttttgagtctgaatcctcagtgttattgtttttcttgggttgctataatagtgttccattaacttttactaagtgacatacagaagaatcccctgcatgtcagatatggtcttccctttcctcattatgcagagaaacacaattttccattgttaactgggattgaagtaccacaggcagtacagtaaaccccttctttgcctactgatttgaaaacataaagaaccaaaattgccaaatggcagtctcaactttcagtagactagaaccatggaagcacttccggtaaaacattaagaattgtatcagacacttcttccttaagaattgtatcagacacttcttgtccaccacttcaaattctctcagccatcttctcttattccagccatagttgcaataaccaattctgtgcagcctttgaccagcttcacatagattcggtctgacagttttactcaggcctattccatctgcttcttgtgtcctgccatatggttcctctgattccatggagtagaatatcatggaaaaccagcccaatgctcatacatacacaaccagaaagtgcaagggagttgttgccgtgttggtcaacccttaaatacaggtattgggagcttatgcatatatgccttagtccctcctagtggctgccaactcaataagtcatcctagtaactggtctctcttcttccctatttaacaccccctctattccttacttcttcacatgaggtaaaattctcaaataaactacttacaaataagactttttctcagtctccactttttgggtaacctaggctatgacagaaagtaa

SEQ ID NO: 282971 - DNA, 1000 bp, Homo Sapiens
ggcaaggagaattgcccatcctgagctttggggctaagggagtggggtgggggacagtgaataaagccttgagtgtttataatgatgggctgttctcctagtgtggccagcattatactaactgggaagttggacaaatcttaagtaagtaattttgttcaaggttgccttagactggtaatgctctcatgtgtgaggctgaagcaaatgtaaatagtttttttgagaggaccagacattcatcccaggcttcaaggaatttcaacatatgaagtttgaaggaaaatgagtgcttcacagccaaaatactactaatgcacaagcaagcactgtgaatgagaacttgcagagataacagatgtggaagcagacctgcacaaatgttagatattagtattatgagataaagtataatatattttaagttttaaagaaagaaaaatgcttgaaaatataggcatgaaacaatcagatttgaaaataaccaaattcagctattagaaattataattgaggccaggtgtggtggctcatgcctgtaatcccagcactttgggaggccggggcggatcacctgaggtcagaagttcaagaccagcctggccaacatggtgaaaccccatctctactgaaaatacaaaaaaagaaaaaaaaaaaaagctgggcatggtggcatgtgcctgtagtcccagctacttggagttgcaatgagtcgagattgtgccactgcactccagcctggacgacagagtaagacttactctgtttcaaaaaaaaaagaagaaattataattgaaataaaaccctcagtagacatgttaatcagaaggttagacacagttgaggagaaattaatgaactagaatagaagatagatgtgaaggaaacattcagaatccaacatacccagacatgtaaatgtaaatgccaaatgtgtcagaagaaaggttggaatctggagggtaaagtgatttctaacttacctaaccagaactctaga

SEQ ID NO: 282972 - DNA, 1000 bp, Homo Sapiens
aggagagacacaggtgaggctgcattgggtgcgtctatattagggagactttgcagataagagaaagagactcaagacttctgataagaaaagtgcacgagggggtagagccttgggttcaagcttgaattccagttcttcctcttatggttattgaaggagtactagtttctgaatttattttcctcacttttaaaatggacatcatactgctgacctcttaggatggccatgaagatcaaataagatgcatgcaaagccccgggcacagagcaagtgctcatttaatgagagctaccatgattgtgtgtggcaggaggtctctagctcaaaaatccgcccaaatgaaattcttgctgtgttatccccaagaaatggccttgcaggctgttatgtgcaatattattccctagcaatttctggctctcgcagtcttgtccaggccccctctcttgctggcttggagataatgcttgtgattttcctcccagagtttccacaaggccaccttggacgtggatgaggctggcaccgaggctgcagcagccaccacgttcgcgatcaaattcttctctgcccagaccaatcgccacatcctgcgattcaaccggcccttccttgtggtgatcttttccaccagcacccagagtgtcctctttctgggcaaggtcgtcgaccccacgaaaccatagccctcccagggctgctcatctgttccaagcaggaggatgtggcaggggagggctgggagtgagtagctctgtgtttagagttggggacaaggatgacaccgaagtccaggagtccaggacagcaggtgctggccggtggggagcggggaggggcactgagatgggcagggcctggacattccacaccctggtgctgtgcagcctctggcagagcatccgacctcttggagcaagtttctgcctctggaaagggggcgggcccttttcacaacaggctggttgtaccgagtaaacaacacgatgccatg

SEQ ID NO: 282973 - DNA, 1000 bp, Homo Sapiens
gactttggacttttgagttaatgttggaatgagttaagaatttaggggactgttgggggggcatgattgtattttgcaatatgagcaggacatgaaatttgggaggggccaggaacataatgatatagtttggatatttgtccctgcccaatctcatattgaattgtaatttccaattctggaagtggggcctagtgtgaggtgtttagatcatgggggcagatttctcgtggcttggtgctgtcttcatgatagtgagtgagttcttatgatttctggcaatttaaaagtgtgtggtattttccccccaccacattcccactgactcgctcttgttcctgcttttaccatgtgagctgcctgctcctgtttccccttattccacgagtaaaagcttcctgaggcatccccagaagcacaatccagcactgtgtttcctgtacagcttgcagaaccatgagcaaaggaaacctcttttcttataaaattacccagtctcaggtatttctttatagcaatgcaagaacagtccaacacagatgctaattgcaagtacaagttgtcatcttctcttctgactggttataaatcaggggttcccacaacaccctccttgggctggatgatctgctgtaatggttcacagagctaagggaaacattaccatttaccggtgtgttataaaggatttgataaaggatgcagaggaatagaggtgaagaaagaaattggtaaaggtgacagatgaaaaggtacatagggcatttgataaaggatacagatgaagaggcacataaggtgaagtctgggagggtcctgcacatagaagcttctgtcctggtagtgttggggtgagtagccctccaagcatgtggatgtcttcatcaacctaaaagctcttgcaactttattcattgagtttttatgaagacttcattggccattaatgattaactcaactcccagactctcctctccctagaggtgagtagggggtggg

SEQ ID NO: 282974 - DNA, 1000 bp, Homo Sapiens
cctggctaatttttctatcgagacagggtctcgctatgtagctcaggctggtctcgaacttttgcctcaaatgatcctcccaccgtggcctcccaaactgctgggattataggcatgagccacagcacccagcccgcatcctcaggaattgaggagactcaaggggtgtcacatcctccctccctccctgccataagactctccaccctcaggtcacagcttcgtttgctgagcacctactgtgtgccgggaccctgctgggagctggtcggctcgcttggtttactcctcctaacaagctgccagggaggcctcaccatcccattcctaaacccaagagggacaggaagtccgggcgatgtgccccatgccacgccaccctcgtggcgggaccctggggagagcggacagcagaaccagcctcgccctggccactccatgccaggcctagggctgtgcaagtacgaagagctcatggactcgtggctccaccctgttgagccctacaccaaggagagttccgtaacccacgtggcacagtgacctggcagagaagcctcgcagagaagccctttctcccaacctgctcggacgcgtctgtctcacccgtctcctctcaggcccctcccatgaacttacgggctgtgtcaatttctgtgccgtaggtctattaaaaccttctgggaggccaggctctcagttcaagccctatactcctctggctctgcttacatacccgggcagccctccctcctcgtcccacccctgcctatctagtcctcccacagctgagcatcttgggtggaagaggagatgactcatgaagacccaccccggcctcatccgatatctgggtctttccaacaaaatgccatttcccagggcacctcaccccaaccagccatggaccctgcccccctgggcagccacagggacccttctggaacctcagccagggagcgtcagcatcactccactgcacaacgccctcccactgcaa

SEQ ID NO: 282975 - DNA, 1000 bp, Homo Sapiens; identical to SEQ ID NO: 114976

SEQ ID NO: 282976 - DNA, 1000 bp, Homo Sapiens
tattcgcctacacaattctccgatccgtccctaacaaactaggaggcgtccttgccctattactatccatcctcatcctagcaataatccccatcctccatatatccaaacaacaaagcataatatttcgcccactaagccaatcactttattgactcctagccgcagacctcctcattctaacctgaatcggaggacaaccagtaagctacccttttaccatcattggacaagtagcatccgtactatacttcacaacaatcctaatcctaataccaactatctccctaattgaaaacaaaatactcaaatgggcctgtccttgtagtataaactaatacaccagtcttgtaaaccggagatgaaaacctttttccaaggacaaatcagagaaaaagtctttaactccaccattagcacccaaagctaagattctaatttaaactattctctgttctttcatggggaagcagatttgggtaccacccaagtattgactcacccatcaacaaccgctatgtatttcgtacattactgccagccaccatgaatattgtacggtaccataaatacttgaccacctgtagtacataaaaacccaatccacatcaaaaccccctcctcatgcttacaagcaagtacagcaatcaaccttcaactatcacacatcaactgcaactccaaagccacccctcacccactaggataccaacaaacctacccacccttaacagtacatagtacataaagccatttaccgtacatagcacattacagtcaaatcccttctcgtccccatggatgacccccctcagataggggtcccttgaccaccatcctccgtgaaatcaatatcccgcacaagagtgctactctcctcgctccgggcccataacacttgggggtagctaaagtgaactgtatccgacatctggttcctacttcagggtcataaagcctaaatagcccacacgttccccttaaataagacatcacgatg

SEQ ID NO: 282977 - DNA, 1000 bp, Homo Sapiens
tattcgcctacacaattctccgatccgtccctaacaaactaggaggcgtccttgccctattaatatccatcctcatcctagcaataatccccatcctccatatatccaaacaacaaagcataatatttcgcccactaagccaatcactttattgactcctagccgcagacctcctcattctaacctgaatcggaggacaaccagtaagctacccttttaccatcattggacaagtagcatccgtactatacttcacaacaatcctaatcctaataccaactatctccctaattgaaaacaaaatactcaaatgggcctgtccttgtagtataaactaatacaccagtcttgtaaaccggagatgaaaacccctttccaaggacaaatcagagaaaaagtctttaactccaccactagcacccaaagctaagattctaatttaaactattctctgttctttcatggggaagcagatttgggtaccacccaagtattgactcacccatcaacaaccgctatgtacttcgtacattactgccagccaccatgaatattgtacggtaccataaatacttgaccacctgtagtacataaaaacccaatccacatcaaccccccccccccatgcttacaagcaagtacagcaaccaaccctcaactatcacacatcaactgcaactccaaagccacctctcacccactaggataccaacaaacctacccacccttaacagtacatagtacataaagccatttaccgtacatagcacattacagtcaaatcccttctcgtccccatggatgacccccctcagataggggtcccttggccaccatcctccgtgaaatcaatatcccgcacaagagtgctactctcctcgctccgggcccataacacttgggggtagctaaagtgaactgtatccgacatctggttcctacttcagggccataaagcctaaatagcccacacgttccccttaaataagacatcacgatg

SEQ ID NO: 282978 - DNA, 1000 bp, Homo Sapiens
tattcgcctacacaattctccgatccgtccctaacaaactaggaggcgtccttgccctattactatccatcctcatcctagcaataatccccatcctccatatatccaaacaacaaagcataatatttcgcccactaagccaatcactttattgactcctagccgcagacctcctcattctaacctgaatcggaggacaaccagtaagctacccttttaccatcattggacaagtagcatccgtactatacttcacaacaatcctaatcctaataccaactatctccctagttgaaaacaaaatactcaaatgggcctgtccttgtagtataaactaatacaccagtcttgtaaaccggagatgaaaacctttttccaaggacaaatcagagaaaaagtctttaactccaccattagcacccaaagctaagattctaatttaaactattctctgttctttcatggggaagcagatttgggtaccacccaagtattgactcacccatcaacaaccgctatgtatttcgtacattactgccagccaccatgaatattgtacggtaccataaatacttgaccacctgtagtacataaaaacccaatccacatcaaaaccccctccccatgcttacaagcaagtacagcaatcaaccttcaactatcacacatcaactgcaactccaaagccacccctcacccactaggataccaacaaacctacccacccttaacagtacatagtacataaagccattcaccgtacatagcacattacagtcaaatcccttctcgcccccatggatgacccccctcagataggggtcccttgaccaccatcctccgtgaaatcaatatcccgcacaagagtgctactctcctcgctccgggcccataacacttgggggtagctaaagtgaactgtatccgacatctggttcctacttcagggccataaagcctaaatagcccacacgttccccttaaataagacatcacgatg

SEQ ID NO: 282979 - DNA, 1000 bp, Homo Sapiens
tattcgcctacacaattctccgatccgtccctaacaaactaggaggcgtccttgccctattactatccatcctcatcctagcaataatccccatcctccatatatccaaacaacaaagcataatatttcgcccactaagccaatcactttattgactcctagccgcagacctcctcattctaacctgaatcggaggacaaccagtaagctacccttttaccatcattggacaagtagcatccgtactatacttcacaacaatcctaatcctaataccaactatctccctaattgaaaacaaaatactcaaatgggcctgtccttgtagtataaactaatacaccagtcttgtaaaccggagatgaaaacctttttccaaggacagatcagagaaaaagtctttaactccaccattagcacccaaagctaagattctaatttaaactattctctgttctttcatggggaagcagatttgggtaccacccaagtattgactcacccatcaacaaccgctatgtatttcgtacattactgccagccaccatgaatattgtacagtaccataaatacttgaccacctgtagtacataaaaacccaatccacatcaaccccccccccccatgcttacaagcaagtacagcaatcaaccctcaactataacacatcaactgcaaccccaaagccacccctcacccactaggataccaacaaacctacccacccttaacagcacatagcacataaagccatttaccgtacatagcacattatagtcaaatcccttctcgtccccatggatgacccccctcagataggggtcccttgaccaccatcctccgtgaaatcaatatcccgcacaagagtgctactctcctcgctccgggcccataacacttgggggtagctaaagtgaactgtatccgacatctggttcctacttcagggccataaagcctaaatagcccacacgttccccttaaataagacatcacgatg

SEQ ID NO: 282980 - DNA, 1000 bp, Homo Sapiens; identical to SEQ ID NO: 114977

SEQ ID NO: 282981 - DNA, 1000 bp, Homo Sapiens; identical to SEQ ID NO: 206386

SEQ ID NO: 282982 - DNA, 1000 bp, Homo Sapiens; identical to SEQ ID NO: 206387

SEQ ID NO: 282983 - DNA, 1000 bp, Homo Sapiens
ccacccatcttggcctcccaaagtgctgggattacaggcatcagccaccgcgcctggctgacttcctcttttattacttatcttcttgaccctgccttggctgttgggctctaagagcatacaaattctaccacctccagctaccaatgcgagccaagttctgagccttgagtgggaatgtggcacaactgggcactgggtaattaagtcctgggtccaggccaaaggaggacccagccttatatggagttcataggacagaggcacatgactttcttaggaggcagccaaaggcctctggactgatcagggcatcggtggcagaggagcagggtgacaggccgcctttggctgggctttatctgggctgatgctgaagctgtagaggccctggagcacaccattcaccaccacgttgggcagcgactctgtgggatagaattaaacaggtctggcctcagacctgcagctccttgagctcctgctcatgggctcagcccccacttgggagtaggagcccctgccaaggcagcagacagcagctgtccaccccaaatgaagcctccgcattcccaggtcacattcttttcacatcagcttggtaaagaagtcaggctgctgaagaaatggagaccagggaagccaaacttgttttccttgtgtctacaaagcaggctccaggggacaggagcaggaggtagtggctccagaggtgggcagcaggaaggagatgctgtctgagggtcccaggagccgagaaatgcaaagcccacaacccagccctgtagccccatatctaggcacctcctcacctggggaggggttgcaaacatagggatccacatggaagctcaggacaggccgctggtgctgctgggagctgggaggaaacagggtcatgaaccatgggtgcgggaggcagggcagaatcccacagaggggtggagacggggttgccatcaccagggacccatgaaggaaaaggtgagtgggaaatggg

SEQ ID NO: 282984 - DNA, 1000 bp, Homo Sapiens
attcaggttaacctgaatcaagttaacccagtctcaaatgctcacttatcctatctccttggcacaaatctctcctctcctggattgccaaagaaaattcaaattattcttcaattagtcaggatgatttgactatcagcagttcatagtacccatcttcataactaagccacctagggatccagcagaaaaaaaagggatgaggggagtcatcatacaggaggtggatcatttaccaggatccacacttcctacaaagcggttgtaatattaaataacaaaactgttttttattccaatcttcacataaaacaggaataattgtatactttcttactaatgtgttccatggagtttttcctccaagaagtggcttaggggaaaatgagccccagtaatgctttgtggcatccaatccttctaccccgaccctttgactttctgccccagcccctcttagttctcctagaattaggactaaggttaagtgccctcttgggatatgacttccttcccttcctcttgatacaaaaagagcctattaccaaccctcatacacacaagagttcccttcctagttgcagactcttctgctccagctggactcccctagctctggactcccactagatcacacaggggtccctgcatgtcagtaaactttggatgaccttgggagaccaaaaaatggaatatcattttttgatctaaacaaaatagtttcctgatttaacactggccaggaaggtgggctgcaccctcagtctctctctcccatcatggttttcacatgatatcaaaggactctcataacagtctgattcttatgagttgggcatcctgtgtttccctttaggggcctgcttccttcaaatagaggagatgggtgctatgaaacctattcactctggacttgggatggctcttctccatcttcccaagtctgagctggagcctccatgcccaactctgctctgctcttctatttcctgacagcagc

SEQ ID NO: 282985 - DNA, 1000 bp, Homo Sapiens; identical to SEQ ID NO: 114978

SEQ ID NO: 282986 - DNA, 1000 bp, Homo Sapiens
caatgtctttggagttcagaccacttgaatgcacacatatttgccaatcttgtacacaactcaaaattttggttttaattcatcatttcaaagtacaataaaatgttcaccagagcaaccaaataaatgagaaaaacttaaatttacggcttcaaaataatataggttataaattatttctcttagctcagcatttgaacttcctgtactcattcatcccgtaaatacttattgagctcctattatgtgctaggtgtacggaatatagaaataaaaagggcaaaaatcagtcctttaagggaatcagaggctatcagagtcctgtacagtaaacctttctgcaatgatggaaatgttctatatctgtactgtgcagtacagtagccctagccacctgtggctaaagactacttaaaatgttgctattgcaacttaagaacagaatgtttaatggaatttaattttaattaatttaaatataaatagtcacatgtacctcgtggtttccatattggacagtacagtctagatggtaatgcagacaagaaaatcaaaggtgattatatactattatctgtaccacaaaaagagatgcacctggctctaaaaagtaggaatccaggggaacagtgcctaagtaattcagcctggggctagagggcaggataagaaaatatatccaaggaaagcggaccgttaaaccaagtcctaaaggacaaagagaagttaatcactgaatccactttctgtctctatgacattaaagaattatatttgcatattctagtatgtcatgaaattagcatattcattttatgtatacattggagctttcctgaatcacttactctacatttgatccagaaggatttctacttgacattttatgttacatacaaaatattttatgttaatacaaaagcactcatgtgccagtttgaataggatatctacaaacttgtttttgagcacatgctaccaaaataattttatctgatcc

SEQ ID NO: 282987 - DNA, 588 bp, Homo Sapiens
caagtctaattaaaataatgtttttcatgtatttatttgataaaatcaccaaacttcatttaaaggcatatttattggataccctactatgtggttgacattgttctagggataccccccaagtgcacagaaattccttcccccacatccacccttcaagtggtgaaaacagaccaataatgaaaataaaatatgtggtaggtcagatggtggtgtaagtactatgaagaaaaataaaccagggaaaagagagagcatgtttccagggtgggaggtggttgcagtttaaataaaagaggccagagaaggctgccctgatatgttgacaataagcaaagacatgaagatgtgtttcgtggaggagaaaaaaagttcatccccaaactcaattaaaaacaggctttagactataaatgccatttaaataaaatattcctgggacaaactatgttttggattaagcaagatatttaagagtacaacctgatgctaggagggctttctttggagctatggtttccatatacatagaaagaatgtatattctttttccctataggatgtctcagtggtacgaacttcagcagc

SEQ ID NO: 282988 - DNA, 1000 bp, Homo Sapiens
agcttgggtttttgttacctttatggtttctccaggtcctctacttaatgagatagtagcatacatttataatgtttgctattgacaagtcattttaactttatcacattatttgcatgttacctcctataaacttagtgcggacaagttttaatccagaattgaccttttgacttaaagcagggggactttgtatagaaggtttgggggctgtggggaaggagagtcccctgaaggtctgacacgtctgcctacccattcgtggtgatcaattaaatgtaggtatgaataagttcgaagcttcgtgagtgaaccatcattataaacgtgatgatcagctgtttgtcatagggcagttggaaacggccttctagggaaaagttcatagggtctcttcaggttcttagtgtcacttacctagatttacagcctcacttgaatgtgtcactactcacagtctctttaatcttcagttttatctttaatctcctcttttatcttggactgacatttagcgtagctaagtgaaaaggtcatagctgagattcctggttcgggtgttacgcacacgtacttaaatgaaagcatgtggcatgttcatcgtataacacaatatgaatacagggcatgcattttgcagcagtgagtctcttcagaaaacccttttctacagttagggttgagttacttcctatcaagccagtaccgtgctaacaggctcaatattcctgaatgaaatatcagactagtgacaagctcctggtcttgagatgtcttctcgttaaggagatgggccttttggaggtaaaggataaaatgaatgagttctgtcatgattcactattctagaacttgcatgacctttactgtgttagctctttgaatgttcttgaaattttagactttctttgtaaacaaatgatatgtccttatcattgtataaaagctgttatgtgcaacagtgtggagattccttgtctgatttaataaaatacttaaa

SEQ ID NO: 282989 - DNA, 1000 bp, Homo Sapiens
tacaaaaatagataaaggagatcttggattaaaaaaaattctaagggacttcaaaaagtttatccctgagagaagggataaccttttttggggaaagcccaaagatttcttctcactacccccatctccccccacccacagcaagcacacccacttgttttcagagcttgaagactgtcattcctcccatggatatcttttttttcctcccttcgatcacctgcctttgtgtacctgtgatggtgggtgttggtggactcactagcaaatctgtcccatattgattttttgggggcgattttctggaaacttggcatgtcatctaagaggaaatgacagcctgctcctctgcctgaaatatgggctgcttctctttcctggagttgtgaacgagcttataagacacttggggcttccagaactttgggcttggctcagcagaaatcccgacgatgtggaatgcagttatttgggcagtgaaggcagcagagaggagagcctgagctcagctcaacccagcctttccctccgtccccagtggtgattcccaaccttggccagcagtgccccctggggacaatctggagatgtggggagaggtgggttgcagggtgcttgggttttgcagtgatggggaggggatgtctagtattttgagggcagggaccaggcatgttagaccccctgcattgtaagggagagcccagtacactgaagcatggtcccctgtctacacataaatctacgtgatacaattcatgtaggtggaaacatgtttataattctctaagcctataaacttttttataggtaaccacaaaaaatttttgtgacatacttttaacatacttgaattttccaggaatgcatcctatatgtaaaccaaaggaagattttagacttaatcttattcagagctttataaggaattgctcgttattttattaagagcacatccttcacaggaggccactcctggcattttgagtcctgaatccac

SEQ ID NO: 282990 - DNA, 1000 bp, Homo Sapiens
ttcagaagttcttccttgaagaaatacagcttggtgaagagttactagctcaaggtgaatatgagaagggcgtagaccatctgacaaacggaattgctgtgtgtggacagccacagcagttactgcaggccttacagcaaactcttccaccactagtgttccagatgctttgactaagctcccaacaattagagaattctaagtgctcagagcttggctgaagatgatgtggaatgagaaacaaatgttaacataataaaatctcagttaaaaatatttaaaaaattcttggtagttgagcagctctgggggaataagggcaaatatccttgttatgaactacactgaaatctaccaaagttaatgtttactttgtgtaggtccatttgtctattttatttatttttcccagtgaaaagtgtattttgatagagaacttttcattttataaatacactatgagttactgaaaattcatatcatggatttcatttattcctgaaacatagttaaaatgtacatatgacatggcttatgttaaaaatacccagtgctcagttttgaaagataggcacaaaaaaaaatagtataggagaaactgaagaatgtacacctttttagctggcacattttgctgtaaatccggaaatttgatagacttgattgtgtttgtgaaaactgagcattaaaggttttttaattgatcatttctttaaaaaaaaaaaaaaagaatgcttttttttggagacggagtctagctctgtcacccaggctgtagtgcagtggcgggatctcggcaggagtcagcaggtgttttgcggttgctgaatttccttgaggtgaagatgtaagactttgagcagcacatcctgattggatgggttactgcatggaaacctcgcccagcccgataaagaagggctttttttgtcttttttgagacacggtctcactctgtcacccatgctggggtgcagtggtgtggtcttggctcactgca

SEQ ID NO: 282991 - DNA, 1000 bp, Homo Sapiens
tgtgaaccaccacacctggctaaatatttactttttatttgtttaaccagtatagaatacatgttgttatgggagaatggttatttccctcataaaataagatttaatgaacatatttgtgaaaaatgtcctagggtaatttatagccaataaatgtgaaaatatgagatgatattggggatcagaatctgtggctggagttggaaaagggaggaggaagtttcacaactaccatgcacatttctcaaaaataattttccctcattatcagcacataaatttttatagcaatattttaggttactccaaaggactgattaaactcctatttaattccttttataatgttttagggtgaagatggttttccaggattcaaaggtgacatgggtctaaaaggtgacagagtaagtatagagaaaatgtacaccagtacacaaaatttaatatatatatatattttttcctttgcttatctttaaatatagtaagcatatgataaataaaatgtttgtactacctaagtctttactcatttaagtttttatacaaagatttaaggattttaatttttgtggagatagtgtagtatcaattgtcttttagatgttatatttccataggttccataataaacatgagcatgcacgcgtgcacacacacacacacacatgcacacacacgtgttagtatttatacacagggacattagaaagttagatcaaattactagaagtaatttgataagtttgctctaaattttgttcatatataatgagctatgctgcctggaaagtatacgtctgtaactttcatgaattttcattatatggtggtgttcaatttttgaatgtaaaaatagtagttttttctagtaatacattatagaaaacaaacagaaatattagttatctaaagcaaattaaatgctttattgggaagaatatttttaagtaatatactagtacctaatacatctgaataaagaacattctataga

SEQ ID NO: 282992 - DNA, 1000 bp, Homo Sapiens
ctggaagcctgatcccaacctcccctgcaagcaggtctgtcacccccatctctcagatgaagaaactgagccttgcaggggtggagtcccttgtccccacgtcataagggtagtcatagtagtaggaagaggaagcacctaggtttgaggccagggctggctgctgtcagaacctaggccctcccctgccttgctccacacctggtcaggggagagaggggaggaaagccaagggaagggacctaactgaaaacaaacaagctgggagaagcaggaatctgcgctcgggttccgcagatgcagaggttgaggtggctgcgggactggaagtcatcgggcagaggtctcacagcagccagtaagtgaacagctggactcgggctgcctgggcggcagggagaagcgggcaggggaagggtcagcagaggagcgaggccccagaggagccctggggtggagcacagccaagggctctgttccctttcctggactcggcttccacaggccctgacctgcctcccccaccctccggtcctgcccctgtgcctggcagcagccccacctgtgtgacatcccagcacaccccccctctccttgcaaaggagaagggagcggcctaggggaggccaggggcccacctgggctggggctgtggagagggagtggctgggacgggaggaaaaagagagacggagattagatggaagaagagggatttcaagacaaattgccagagatgcagtcagagagactgactgagagacacaaagatagaaggaattagagaaagggccacacagagccagacagagagagaagagtggagatggagacagggacgaggacagagaaaggcagacagacacatagggacagaaagagaaaaatcacacaaagtcagaattactgaatgacagggaatgacacatagaacgagacacagattcagagactcagggcagggaaaggaaggctgcagacagacagacagacagaggga

SEQ ID NO: 282993 - DNA, 678 bp, Homo Sapiens
tgaagcctggagtggggtcccgagccgctacactaaatagatttaatgtgcgctctggggccgccaggaaagacgctcaggcctcgctaggagcatcggctgtttcaggacctggagaaaggcccccagctctaccctgagaggacgtgctcctccacgctcctccgcaaatgctgtccctcttccccagcccagggcccggctcttcgaggtgtgaggacaagttgaacgctttggccatctcggtgatgaaccagtggccaggagtgaaactgcgggtgaccgagggctgggacgaagatggccaccactcagaggagtctctgcactacgagggccgcgcagtggacatcaccacgtctgaccgcgaccgcagcaagtacggcatgctggcccgcctggcggtggaggccggcttcgactgggtgtactacgagtccaaggcacatatccactgctcggtgaaagcaggcaaggaaaggaaaccactgcttagagacactaggtacagggcatcaagagggtgcagcccagccccgccaggacgaggcgccgacttctcattcagggttgacggagccaagagtttgtgcaaaatgtatgcatggtggttgctgccagcctccctcatgactaaatgcatatctattcctgtcaaaacgtgtatcacaatgtaca

SEQ ID NO: 282994 - DNA, 937 bp, Homo Sapiens
tgttgcaggcaggttttaggaaattgcactcaatgactccaattactcctacaccttctccacgagttggcttcacctggcaccccaccttctcaaaagattttatgagtcggttgttatgatacatcattattccaaactggttactattcttgcaagagaacccaaaggtgattctcacctgcttatttgtgaaggtaggtttatatgtatcatattctacattggccaggctcttggcaatcatctgggtagtcaccttcttttgacgcagaaaaattttcatgcgtggcttcatgtatagaataccacaaaatgcccttaaagaatattctgtttctggtagctcagaggtaacaccgccagtcattttttcttctgtgtcaaagtctgataccaggatgtcatattgatctgtatcaaagtccaactcagattttccatttttatttctgcggatgctccaaatgagaacacgagtgccttttttgcctgggatggcatcaaactgggccagcaggtcattttcacggttgaaaatggaatagttcaagatggcttctaggctgggcaatgaatcctcggtaataatcatttttttgttttgctggttgaatggaacaattggtacaataactgcctgggcctggacacattccagataggtctgtgatagaagtccaacagtgagagtacccccattcttggtgaagacaagggcgtcctttcctagccgcatggagcctgacttgaaaccattaccaaagaccccaatgggacactggctcttctttattactttatctgtaaagccaaagctgagcattcggtgtagtttatgaggtgtcatcccacatccatcatcggtaaaggtcaaacaagatttattcttgacctcctcaacatctataaagaccgtcctggcagatacatctga

SEQ ID NO: 282995 - DNA, 1000 bp, Homo Sapiens
tctcagacgagaagagcttataatatacttcctgcaaacattctagaaaatgtaggtccttatcagtcaaccttcagaatggggaaaccacaaaataagtgaaattttgttaacctatctaagtaaacattaaagagttgcttttagaaatgacacaatgtaaagagaccatcagggtctaaaacctcattagccagaactggaaaatgagcttttaaatacaggtaaaaagtaaataagcaatttatcctctactttgttagagtacagaaatagtatttcaaagcaaccactagcagaataaaagactatacttaactttgaaatcaccaggaaaaaggctaggaaaacagcccacaaagcaaaagacaaaaaggaggagacagaaataagaacatttttaattaaaattaagcacagaaaaattttaagtagtttgtattcaagtcagttttacttaaattttataacatgcaagccctggttatttttagtgattggaaatgtagacaactggtggtttgcccctagtcaatgggaagtcctggcccttgatactctggcccagcagtaagagcttctattaaacctctgctccttgaacaaggaacaaatcttactttgtattccccaaaatgactgcaaagtaggcattcaatagatagctgttgaatggattggagatttctcctaaacatcatgttacaattcaactgttctttgatgtactgcagtagacattttcatgccattcttaaatttctcagtctcctgatgccaaattttgtttagaggtagaggctgaaggttatgcttgctttggtggagagtataaagacaatagtatgtgtgtagcggggaatgaggcagtggatataaagaaaagaaaaggttatttgcacatccataagtaatatgtaacggtggcaatgaatggctggctggggtgggatagtggttctggtcagctccgggaactttgttggtcggtcatagtgtg

SEQ ID NO: 282996 - DNA, 1000 bp, Homo Sapiens
tattgatgggaaagctgaagttcaatgaagtaaatttttcaatagcccacagagtaggaaagtgacaaaacctgagcctgggcctccaggtcactcaaggacactttctttcttccacacccaattgcttcatgcttaaagttggcaaaacaggaagtgaaactcctgcagttttctgtgtggttgacactagcaagggtttctcagttgaagccatgaatcattaagccaatacatatgcatatatgttatacataccaaatgatttatttataaccctatctttccataaaggacttgaaggagcttcaaacaaaggatatgtgaacaatagggttaatcaataataagtagaaaatctggacatagaataaaaagaggagagaaagacaccgagaatgagcgttaatacagtgctttccatttttctggtgttttgagtagcgtggcttttggagaaagccaaaactcaaattcactccttatcaactgtgtgccttgggctccatttctctgagagtctacttagctccaatgtaaaataagaatagaactatgactttgtaaggttgctctaaggattgaaaatcatgtattatgttcaatacggggacactgtccttatgggtgagtactcccctaagactttattaagagggcactaggagaagcactgggaggtcttctcagtaacaacactaaagtaattgctatttttccagcctgtggaaccacagaagtgactgtaactaaaattagacatttctttctgattcattctctactcacgggattgtcagaccccagtcttcttctggactctataaactttttagaaatcatcagcaggctcctggagaagcttaaatgaactcacacaatatgtgacagtgaactccctgggagagtgaaaaccaaagtctaagccagtgtctccatttacttgtgtgattgtgggcaagtcattcaagtgctttgaggctcaggtcttaattcatga

SEQ ID NO: 282997 - DNA, 1000 bp, Homo Sapiens
cagaagaagaagaaaaggcacagcagcacaggggacagtatcgatggggcgccgtcagccccagggagcacacatggagagccagagacggaggctgcagccctcaagcctggccccttgctccccccagagaggaagccagccccggccccctggaaggactcctctgaaagccctcccagcctctctcctcctgtggcccagcccgggcccccactggcaggtagccagcccccggctccggagcaggacaaggcggcaaacaggttgcccctgtcccagaagccagccctggcgcccaagcctgcgggccagaccccaccaccctccccgctctccaaggtgagcaggccctacttggtggagttgctgactcgccgggtggggaagcccgagatggagcccagcgagccgtgcaaggagggccgggacagcggctggccgccctcacccccgccacctgaggagagaaaggagcagaagcgggataaggaggaagaggtggaaaccgagaggaaacccgcttccccggtgccatccactgggcaagagaagcctgtcccaacgccggaggcggggaggaaaggccctgcatatgcgtatgtggggccctggccccaccagcttgctactgtgaagccctctgaaaagccgatgcttcagagcagacactccttagatggctccaaacttgtggagaaggttgagaccgcgcagccactgtggataacgctggcgctgcagaaacagaaggggtttcgggagcagcaggcaactcgggaagagaggaagcaggccagggaggccaaacaggcagagaagctcgccagagaacaagtcagtgtcaccccacagcctggaagcagcagcgtcagcagagctagttccctgcacaagcccaccactcagccagaagagaagaagccagagacaccagtgtccaggcttgagcgcagagaacaactcaaaaaggccaacactcttcctacatcagtgacag

SEQ ID NO: 282998 - DNA, 1000 bp, Homo Sapiens
aattaccgactgagttatcaaaggaaggaccctctaccaaaaatacaactgcagacaaactgggtataaaatctggctttagcttacccccagcaagggcaagacctctggaacaacatcttcctatttcagactctagttcagagtcagatgaccaatgcttgatgtcatcaagcaccctggagtgtgctgcgggtttcttaaagacagtaggcctttttgcaggaagaggttgtccgggcccagagttgtcatgacagactgtaggtgctgctggatggaggcgttcttgctcaaatggtggcggacaggctcctggtcctcctctcagtgtgtctctccccaccagtttaggaagaagatggggtagaggagataaccttttttcttgaaagggagctaggggacggggcatgcgggggagaggtcgaggacaagggcatcctgtttcctgtgttgtaaatagaagcactgagaaccagaggcaacagcaattaaatgacctggtaacaaattcatctactattatccagaatccagtagagacacccaagaaggactatagtctgttaccactgttagcagctgcccctcaagttgaagaaaagattgcatttaagcttttagaactaacatccagaagaatattaagccccaatccagagacccagcaagtagatatagaaattgtttcatccttacccgccttgagagaacctgggaaatttgatttggtttatcacaatgaaaatggaacagagatagtggactacgctgtgacacaggagagcaagatcactgtattttggagagagttgattgacccaagactgatgattgaatctccaagtaacacatcaagtacagaacctgcctgagtatgacattatgtggggagtgaatgtagagttgtgaaaattctcacagtttacatcaagtacgtatggaagctgcttaacactttcaatttagaaacctttgtgatacatctgggaaggta

SEQ ID NO: 282999 - DNA, 1000 bp, Homo Sapiens
tgaccttagaaaggagagagttttcagaggatttgccaggctgtcaggggctctgcctccaggcccagtgtggcagtgtggcctcagggcctccgcctccctgcttgagggctgcatggaggccaactgtcctgggagttgtaaaaatcttttaaggccagaccaatttgagggattttaaaaagtgtctcagtgcctcttatgatttcagaaggttttgctatatgtaatcccaactactgttttcttgagagtagcagaggattagaaaaagtcctccataaattatgtaaccggccttcctgactagcctgactcaagcaatgtaagagataattattctgttttcataatttataagtgtgggggcatgcctcagcataaaaacaacctattagggaaaaatatctaatagattacctttatcgcctgttagggttttatgttgtttttaactcagatgccataagaacaaagatacatgtaatttataatagtaatcattaatacctatattgtgctttaaggtttacaaaataatttttctcatactttatcttagtttagtttcttgacagtccatgaggtaaggtggtagctttatcaccattttacaaagtgggaaacgaaggttcctcttaggaacctagttgtcacctttgtataataaaacttcgaagctcggagctgttaactggtttgctgaaggcttagctgtaagagccagaattcagacccaggtctgagtgacttcaaactgcacagtccttcccattattacccatatgctatcccttatatttttaatttattaggaattcattcatttataaacttggtgattcacctttattagattctggtcgctgaaggctttagtaacttcagagtaaaacttgagagatgagatgtaaaatgcagccattcttgagagttcctttttctgtaacattcatcaacacttcattgagaagtgaaggttcctatggctgtctctacc

SEQ ID NO: 283000 - DNA, 1000 bp, Homo Sapiens
aggagtttgagactagccctggcagtatagcaagaacccatctctacaaataattaaaaaaaaaaaaaaattaagctgggcatggtggctgacgcctgtaatcccagcattttgggaggccgaggcgcatggatcagtggaggtcaggagttcaagaccagactggccaacatggtgaaaccccatctccactaaaaatacaaaaattagccaggtgtggtggcatacgcctttaatcacagctacttgggaggctgagacacaagaatcacttgagccgggcgcggtggctcacgcctgtaaagcttgtaatcccagcactttgggaggccgaggcggatggatcacaaggtcatgacatcgagacctcctggctaacacagtgaaaccccgtctctactaaaaatacaaaaattagccgggtgtggtggcgggcgcctgtagtcccagctactcgggaggctgaggcaggagaatggcgtgaacccgggaggcggagcttgcagtgagccgagatcacaccactgcactccagcctgggtgatatagagcgagactccgtctcaaaaaaaaaaaaaaaaaaaaatcacttgaaactgggaggcggaggttgcagtgagtcaagatcgcgccactgcattacagcctgagagacagagtgagactccatctccaaaaaaaaaaaaaatgtaggaagcatgaccagaacacctactcactaggtcttgaccctgactttccccttccctgccctatcgtgaggcagagagtgagaagctacatatctttaaaaatcgaatacctttatttgtgctcccttaagcagcatgtgagaagtggcagtgacctcagcagcaggcctggtatctttgccctgttgagaagccaagatctcagctgtactagtcaggtgttttttcagacagcaagtagaagaggtggtggccaactccagtgctgtatcctggaggaggtccgggtcagcactgggcaaggtagg

SEQ ID NO: 283001 - DNA, 1000 bp, Homo Sapiens
tttaaacaaatatttacatttaatatgggaacataaaagagctttaaatattatagactttgtacctgttatatatatgaatattccctatgttaaataataataataactagtgtttatgaatagaatcatatcatctttagaaattgtttaaaattagttctgggaagttgaaagtggggaatgaagagataataaataaaactagattggccatatgtttataatttttttagattgggtaatgaatacatggagtttcattatacttttctctccacttttgtctatgttgaaaattttctgggagctaaatgatgagaacacatggacacatgatggggaacaacacacactagggcctgttgagggcagggagtcggcagagagagagcatcaggaagaatagctaatggatgctgggcttcatacctgggtgatgagatgatctgtgcagcaaagcaccatggtacatgtttacctatgtaacaaacctgcacatcctgcacatgtaccctggaacttaataaaagttggaaatttttaaaaagaatgaataagacctggtatttgatagcacaacagggagactatagtcaacagcaatttaattgtatattttaatatgactaaaagagtataatggattgtttgtaacacaaataaatgcttgaggggatggacaccccatattacatgatgtgattattacacattgcatgcctatatcaaaacatctcatgtaccccataaatatatacacctaatacccacaaaacttaaaatataaaatgttttaaataaaaataaagaaaagatttcccacaataaaaagatttttactggaaaaaaatcactgtatttcacatacatgtgtacatatatacattatatatatatatacactatatatatgaaatatatagtaattgtgattatgtgtgtatatatatattaatatatacacacatatatacataaaacattattatatactttg

SEQ ID NO: 283002 - DNA, 1000 bp, Homo Sapiens
gtgaacttcatgtttattggagccctactaagtgctcagcgtgtggcactgggtagatgggggagagtcaaaaaaaaaaagtaggccacatattactaacactggaatctagcagggagggtctcactgtctccttccttctgcacccccttccccacagctggaggaacagcagaccttagaggaggccatcaatgtggccactgcggccatgcagcaaggggctgtgaccctggagacaacagtgtcggagagtggctgctgagtccaagagggctgggtcccacaccatgctggaggaagtgccatctgcatggccactcttgcccccaagggcccaggctgtggctgacacatagaaggtggccacataggtctctggggtgagaagacagcaagaaaactgcctaactgaagggaatgggggccctgctcaagaagggggccaggcagctggaatcaggggagtgcatcatcctcgggagctgacaacagccaggctacaccagggcacccgcctctcaaaatcagctgggcgcccactctcctcctaaagaacacccttctggccctcagtctgttccccttctcaggtagagattggggctgctatggggactggccctgtagggttgagccacagacagctcttcagcccagtagcagtggagcaggccctgtcctgccctcccagcaataaccacctccctggaggccagctgagatgcctggctacttggcaccagggacttcctgacaccacagtcaattaattcctcaggggcctgtggctggagaaaaggtgcccagcccccaccactcctcagctgccccccaacctctctatggcagagaggcagggagtggccctgtacatagactgctggggattgggtttgatttgttttgtttttttaaattccattttgataatttttttcctgctctgggtggtggtggcacatggatgaatgagtatttaataaaagttccaaatttc

SEQ ID NO: 283003 - DNA, 1000 bp, Homo Sapiens
ctgataacagtcttgttatttgggtctcttagaccttacctctcaactccctcaagagtaccagtctctgaagttataatgctttggtctctacattaggggcaagatccagtctgagagaagtctcctttgagaagggccaagaggctctttcctgagtgtttgctttcggtttgttggtatgcctgtattgctgggctgtgctgctgctcgaagcagatggttttgactgtctttttgctctttcctatataatgaatagatgagtgaaaggagttttctttttctctttagtacttacgtattgggattcctgtgtcttacagctctccctctccaaataatacacagaatcctgcaactttttgcacagctggtatctgtctggtagcagtgagaccccttgtcttggtgatccttactgggtttccaagcagaggagtcacatgattacaattgccagtagagttgttgtttggggtacaagatgagaagaaagaaaaacctacagcctttctacattctgacatgctaacagtggtttaagtttctaaagtgtttaccagatgctgaaggcaaggggagggagcagaagcacttatgtttacggatattttaaactctgttagagagcagcctttgaaaatccccaatttggttctgctttttgacctctctctaccttttcagggtaatctttgtggcacaaacgatagcatttccaagctttagagttttctgaattcctgcgccttcctgacgtgagccctgagcgatcttctatgcagttctgccatgcgtcctgttggtctctctgtgttctttgttacttgggtgcaatagcaacttccctaccccgtgcattccatctttcatgttgtgtaaagttcttcacttttttctctgagggctgggggttgggggagtcagcatgattatattttaatgtagaaaatgtgacatctggatataaaatgaaaataaatgttaaattaaatgg

SEQ ID NO: 283004 - DNA, 1000 bp, Homo Sapiens
tgtaattattcagttgcctgtctgccctgccagattaaagctccttgcctgcaggtactgcacgttctagctaggcaggggtcttgtttattgctttgctgtccctagggtgcatagtcaggaaaccttggggcccagttcttaggttcaaagttcagtcagcaatttgctagatgtgttagcctcaggtggtacttaacctcagcatcaccgtgtataaaatgggggctcctctaaacagtgctcaggttttatggttgtgagaattaaatgagatggtggatataaaggatttagcaccatgcttgcatgggatgctctcaatatctcgagcaccacaaatacgaggtaccattcatagcatccttctatttgtcccctcctccctgctcccctgctgtaggcattgaacctggccacatcccaggtaccgtgaacatccccttcacagacttcctgagccaggaggggctggagaagagccctgaggagatccgccatctgttccaggagaagaaagtggacctgtctaagccactggtggccacgtgtggctctggcgtcacagcctgccacgtggcactaggggcctacctctgcggcaagccagacgtgcccatctacgatggctcctgggtggagtggtacatgcgcgcccggcccgaggatgtcatctcagagggccgggggaagacccactgaagctgggcaggacacaggcgagctcaggtgatgccggccaccagcaatgcctggcctggtagctccgcttctgctttcaccaagagagtgtttcttcactcaactcaggtggcatttggggtgacatctcaaaggccaggaattccgttgacttgttggctgccagtaggggcgggaggaaaggcggaggcgagccctggaggagggaggccacaactccgagctgcccacctggtgctgagctggggccccgcctcctttctgttttatttttgaggaaataaaataaccaagtgct

SEQ ID NO: 283005 - DNA, 1000 bp, Homo Sapiens; identical to SEQ ID NO: 114980

SEQ ID NO: 283006 - DNA, 1000 bp, Homo Sapiens
tctcctaaactttaataaaatgtatctttaaatgtatgtattattcaatcctttggaatgttatatttttggaaatcatagctttttatttccaaggcccctaaaaactgcacaaaatagatgctgctttctataatctattttaataataataaacaatgattctgttaccttgactgggggtggaacactacattctttttagagtctgattttatggattggaatattgggatatctttctttcctttatttatttgaaataattagtgtagtgattacaaaacagtcataaatttttaaaggccttttttctctctttttttttttttagaatagtatttttttttaagtcctttatgtaacatccagataatgtgatactgtctctttgaagcaccctgtaaaccttttagagatttgaagttgggtcttgactcttaatgcatgtggacagtcgcgagcgtttatgctgtcggtgtgtctgtgttggacaaaacaatctgtaatctacagcaaagtacattctacattccgttcatggggcacacccaggggaataagaataaaatgctattatgactaagttgtaaacctatgcacatcccttgcattttgggcaactttataaaaaaaaagaaactgatttttattaataataatcatgtagtgaaatgtgtttgtaattttgtctcaatttaatttgttgtaaggtggggtggggggaattgctggtttcaccatttcagatctgtgttgtctaagagtattaacgttttaattaagcaaagaaatgatttttaatctgtatgtaattgttttaaagcacccattttaagagaaaatactgtgcaatgaagaaaccagtttaggcatttgctataaactgaaatattccaaaagaatcatctataacagccctgtaaattcctttaaaatgataactaacaggacagtttgaccaattttttttaaatatacttccttttatgtgttcaat

SEQ ID NO: 283007 - DNA, 1000 bp, Homo Sapiens
actgcagaaagatacagctgaaaaaggacggctcctctaaccatgtttacaactatcaaccctgtgatcatccacggcagccttgtgacagttcgtgcccttgtgtgatagcacaaaatttttgtgaaaagttttgtcaatgtagttcagagtgtcaaaaccgctttccgggatgccgctgcaaagcacagtgcaacaccaagcagtgcccgtgctacctggctgtccgagagtgtgaccctgacctctgtcttacttgtggagccgctgaccattgggacagtaaaaatgtgtcctgcaagaactgcagtattcagcggggctccaaaaagcatctattgctggcaccatctgacgtggcaggctgggggatttttatcaaagatcctgtgcagaaaaatgaattcatctcagaatactgtggagagattatttctcaagatgaagctgacagaagagggaaagtgtatgataaatacatgtgcagctttctgttcaacttgaacaatgattttgtggtggatgcaacccgcaagggtaacaaaattcgttttgcaaatcattcggtaaatccaaactgctatgcaaaagttatgatggttaacggtgatcacaggataggtatttttgccaagagagccatccagactggcgaagagctgttttttgattacagatacagccaggctgatgccctgaagtatgtcggcatcgaaagagaaatggaaatcccttgacatctgctacctcctcccccctcctctgaaacagctgccttagcttcaggaacctcgagtactgtgggcaatttagaaaaagaacatgcagtttgaaattctgaatttgcaaagtactgtaagaataatttatagtaatgagtttaaaaatcaactttttattgccttctcaccagctgcaaagtgttttgtaccagtgaatttttgcaataatgcagtatggtacatttttcaactttgaataaagaatacttgaacttgtc

SEQ ID NO: 283008 - DNA, 1000 bp, Homo Sapiens
catcttttccttgtttttgttttttttttgttctttttttccatgtcactaaaggccctcgggaccaaggatcacgtcatgactccgaacaggataattcagacaacaacaccatctttgtgcaaggcctgggtgagaatgttacaattgagtctgtggctgattacttcaagcagattggtattattaagacaaacaagaaaacgggacagcccatgattaatttgtacacagacagggaaactggcaagctgaagggagaggcaacggtctcttttgatgacccaccttcagctaaagcagctattgactggtttgatggtaaagaattctccggaaatcctatcaaggtctcatttgctactcgccgggcagactttaatcggggtggtggcaatggtcgtggaggccgagggcgaggaggacccatgggccgtggaggctatggaggtggtggcagtggtggtggtggccgaggaggatttcccagtggaggtggtggcggtggaggacagcagcgagctggtgactggaagtgtcctaatcccacctgtgagaatatgaacttctcttggaggaatgaatgcaaccagtgtaaggcccctaaaccagatggcccaggagggggaccaggtggctctcacatggggggtaactacggggatgatcgtcgtggtggcagaggaggctatgatcgaggcggctaccggggccgcggcggggaccgtggaggcttccgagggggccggggtggtggggacagaggtggctttggccctggcaagatggattccaggggtgagcacagacaggatcgcagggagaggccgtattaattagcctggctccccaggttctggaacagctttttgtcctgtacccagtgttaccctcgttattttgtaaccttccaattcctgatcacccaagggtttttttgtgtcggactatgtaattgtaactatacctctggttcccattaaaagtgaccattttagtt

SEQ ID NO: 283009 - DNA, 1000 bp, Homo Sapiens
accaccgcccccaaccacagcagagactagcagcggggccacctccacaaccaccaccacaagtgcacttgcccccgtggccgccatcatccccccgccccccgacgtccagcccgtgattgacaagctggccgagtatgtcgccaggaacggcctgaagttcgagaccagtgttcgtgccaagaatgatcaaagatttgagttcctgcagccgtggcaccagtataatgcttattatgagtttaagaagcagttcttcctccagaaagaagggggcgatagcatgcaggctgtgtctgcaccagaagaggctcccacagactctgctcccgagaagccaagtgatgctggggaggatggcgcgcctgaagacgcagccgaggtgggagcacgggcaggctcaggcgggaagaaggaggcatcgtccagtaagaccgtcccggacgggaagctggtgaaagcttcctttgctccaataagctttgcaatcaaggccaaagaaaatgatctgcttcccctggaaaaaaatcgtgttaagctagatgatgacagtgatgatgatgaagaaagcaaagaaggccaagaaagttctagtagtgctgcaaacactaacccagcagttgccccaccctgtgtagttgttgaggagaagaagcctcaacttacccaggaggagctagaagcaaagcaagcaaagcaaaagctggaagatcgcctcgcagctgctgcccgggaaaagctggcccaggcgtctaaggagtcaaaagagaaacagcttcaagcagaacgtaaaaggaaagcggcgttatttttacagaccctcaaaaatcctctgccggaagcagaagctgggaaaattgaggagagtcctttcagtgtcgaggaatccagcactacgccctgccctctactgactggaggcaggcctctgcctactttagaagttaaaccacccgataggccttcgagcaaaagcaaagatccaccgagagaagaagag

SEQ ID NO: 283010 - DNA, 1000 bp, Homo Sapiens
tttatggaagttactgtaggagaatgtttttaacactcaaatagacagtttttctgaggttcaggataattactgtattatttgatcaaaacagtataacagatattagaagtaacacttgtcaagccatggattgaagtcatggttagtaatgtttttctaagggaagagaacaagtattttttatagagaagacaatcctagcttttttttttttcttttgagatggattctctctctgttgcccaggctggagtgcagtggtgccatcttggcttactacaacctccacctcccaggttcaagtgattctcttgcctcagcctcctgaatagctgggactatagccgcatgccaccatgcctggctaatttttgtgtttttagtagagacggggtttcaccatgttggccaggatggtctccatctcctgaccttgtgatccacccgcctcggcctcccagagtgctggaattacaggcatgagccaccgcgcccaaccaatcctagctttaaacagactgtatttttataaaagacagtgaatggcggtttaaaaaatatatatgcattgcatttttttgcatttgtaaaaagtgatttctcattagtttgctataaaagtgctgttagaaaattattgatttccactcctccctagtcccttgatgttcattcaggaagactgttaggactggctctcacacaattactattaggagtatgtctaacattctgtttcgatttttcattttcaaattactgatttatcacattttggtgttttatatcaaggaagagtaaagacaaatgaactgaattagataatagtaattaagataacatcctttttattttttttgttttgtttcaatagtagggaaaaggaagttaattttatcttgatgactgtaaactatgttatgggacaggaattttgttctttaatacctggattgttctttttgctcttgctgaaatgaaaatgaaataataaatt

SEQ ID NO: 283011 - DNA, 1000 bp, Homo Sapiens; identical to SEQ ID NO: 114981

SEQ ID NO: 283012 - DNA, 1000 bp, Homo Sapiens
tcttaggcttgtatagttattttctacacatgccaacacacatgatgataaaggaaccttttctaggaggcattgcagggtttcaatacacaggacatgttctagttacagaagccttgctctgctgtcaacaattgggaaatgctcattttttcatgttttgtgaatactctggtcttgctgtaagctaatgtcatggctgtgggatattagagaagtgggtttatgactctgaagaccagcagacaccagactttaaaagtgcttaaattggaatttggaaactacagtaaagaaaccttcagataccagttccatcctgaagccctctgttgaacaacagggccagatcctaaagctctttcagggagctcttctctggggctggaacagttgattatgcaaccccattgtgtggagattggatcaactgagttgtgttatttttgttttaagtcaccttgtgcgagaacctcaaccgcacctatcttgggaaccgggtatacccttttctttagcactgctatcctttttgtcttcagcacaaataagatgttcaagtgagccagaagcaagaagagccattttagtcttcatagctattggctaagagagataatgagctgatggtctattttaaccttgaaagtaaaaatgtatattttttcactacaagtacattgaacagtaaaaagtgtaacagcaaagtatatatttgatgccttctgtcttttcatgataatgtgctaacaagttgtgttaatattttactcagccagagtctcattcatttgctaagcattgggaacattatgtatattgaccttaaacataggtgtcctatatttggattgtgacttgtagactcaagctaaccttactgcctctttttcacacttgttgaaaagtctgtgaagaacatagttaaagatctccaactttggaaaatatacatgatgtgaaactggggtgctatgttaaaaataaatgtatgataact

SEQ ID NO: 283013 - DNA, 1000 bp, Homo Sapiens
gtcattttgtataaaatattgtgaaaattgaaggaggacactcagtaaacatcctgggactatttgtaagttatggcaaaaccagatgagagaaaagggacagtcccctctgtatcctcgttgtctcttagtaacatcaaattgtagttaaaaaaattttaaactatgtacaagctacaaaatagcatctctttcatggtatgtttgagtgtgtaattttagtttcttttctggttgtatttgtggtagtcagatgtgttggattgattccaactggacagagtaaggaattccagcatcctcttcctgcttgctcgtgttaccccacagatcaaaccctcaattctagttggggatgctgtctagccccacaccatgactgaagccttaagcactgttgcgcctccatgtgctttggatcagcaaccccagtggtattctaccagagcattgtgggaaagcagatgtatagtcaggtcccaacagcaaattgttgggtgtgagagttctaaagtataggggtgagggaagagaaggatatgaactcctctgaccttaagccagcattcatttaacttttatgtctacttaacaagagaacctggagaaaactaccgtattcaagagattaatcaaaatcagtgttttagccaggcgatgacagagaagcaccattcctcaccctccattcttgtaatgtctgtaataaatttcagtgcgtcaggatggatgaacccaagatccagtgaatgattcagctgttccaagccttacattttccatcattcatcatccattctcattcagtgtaacctcttgcactattgtggttaattttatgtaaaaccagtttatgtttttttttttttaatatgtgcctatgtaataaagtctacacactggctatctctgtagaggtgaggttttgtttttagttgttctactgattatatccttttctgagctatgaaaatgaattattaataaaaaatttttgaac

SEQ ID NO: 283014 - DNA, 1000 bp, Homo Sapiens
agccccgtcccacacaggcgaggatcgttgggcctccttagtagccaaaggaactgaggtccagagcagggaatgtgttgcccagtgtcagcatggtctgctctggggtcaggcgtcttgccctggtcctaagccaccccaagccaaggcatgtccctgggcccatttcctctctcgaggtcttgggttccctatttctgatgtgtgaaaggaaggcctgtcctctggggtgaccatgaggctcagtgggaggagctgccaggcttgagctgggacttggcacctggccagccttttttctatttcattgtaccttgatgggctgtcagttctgaagagaaaaaatacactaggaatccattcttcctccaccattctccctggcagagggaagtgactacacccctatggtgtggacatactgacgctcctccatgaagcagcaaagttctgttgtttcaggagactgtgggccttgaggatgtggtagtgacctcaccagaggaggtggcaattcctaagtgctgcctggaggcctctacagagacataatgttggagaacttctgccacatggcagtgctgggtaagacccctctgtccccaccagtgcccttaaggttatgggtgttggtaggtctgtggcctccatttccatgacgatggtgttaaggactgcatgtttgtgtccccccccaaagtttatatgttgaaaccctgacccccaggagggtggtattaggaggtggggcctttgggaggtgactaggcttaggtgagatcgtgagggtggggctcgccgatgagatcgagtccttataagaaaaggaaggaactagagcgagatcactttgtgctgtgtgagcatacaagaaaactgccatcttcaggctgggtgcagtggctcacgcctgtaatcccagcactggaaggccaaggcattaggattgcatgagtccaggagttcgagaccagcctaggcatgataagaccttattgct

SEQ ID NO: 283015 - DNA, 1000 bp, Homo Sapiens
ctgttcctcctgggtgagacttttcacccttgaactagagtgcctttgtatgtggtcagggggagggtggaggaccctgggatctcccaggccttacaaaagtggcggcacataaatacaaacctaaaaaacagccatttcctgccagcaggtatcaactggccccacagcttcagctatggccaaagaggccagcgtggcaaggtcctgtctcagatctggctgatggcagggagccaagaggtgctagcaccctcctcagcccttcactttgatgaccgtccttcctcgtgatcatcaaagaggttagggttctctgccagcgtggctctcactttcttcttctccttgaagcgtcctgagttggagaccttgacgtgcttgccctttgtgctcttgtccacaatcttctccaggcgggtgttaaagtcgctgttggggcctccagcgtcaggcctcgggggttctgcatctccctctgtttgggcataggtgtcagggatctcatacagcactttgggagtggatttctttttccggaggaaagtcagcttccaccaaccaatttcagtcgtcatggcgctccctaagccaaggatggggctttctgctggagcagggtgggggagacaaaggggtcagtgggaaaagggggtgggtgcctttggaccagcttgctgcagactcctaatcatgggctgttttaagaattaaataaagggctgggcgtggttcttcatgcctgtagtcccggcactttgggaggccgaggcgggtggatcacctgaggccaggagttcgagacgggcctggccaacatggtgaaatcccggctctactagaagtgcaaaaattggctgggcgtggtggcgcgcgcctgtggtcccagctactcgggtggctgaggcgggaggaccgcttgggcccgggaggcggaggttgcggtgggctgagatcatgccactgcgctctggcctgggtgacggagtgagactatctc

SEQ ID NO: 283016 - DNA, 1000 bp, Homo Sapiens
gttcagcaaaggcttaagtcaacaataaatatgtacccacttgtattattttacctatactaacacatccattttttttttaagaggatggatcagttctgaaacagtttctttctgaaacagagaaaatgtcccctgaagacagagcaaaatgctttgaaaagaatgaggtaagagaacttacagagcatggcctttaaataactctagagatttttgtgctaattattttcttttttccgcaggccatacaggcagcccatgatgccgtggcacaggaaggccaatgtcgggtaaatgcaaatacaaatcggagccaggctgcctgggtgccatctgtgtttctactgaaattgtgcaggaatctcttactggaacacagcaaatgttatccacccaaggccaaatgacaccagaaagttctacccaaataatgctttgactagacctgttcataaaaaaagttttcttcagaaattgtattggtcattgaagtcttgagtaaattcaaattgacagtattttgtttagatccaaatgagtcttataggtcaggcatagtggctcatgcctgtaatcccggcaatttgggaggccgaggagggtgaatcacttgagcccaggagtttgaggccggcttggccagcatggtgaggccccgtccctacaaaaaatacagagtagcgaggtctgtggtcccagccgcttgggaggctgaggtgggagaattgcttgagccctagaggcagaggttgcagtgagctgagaccatgtcgctgcactccggtctgggtgaccctgtctcaataacagaaacaaatgagtcttatagagtgtacacctctcctagtaagtgagcatttcaaataatcttcacaggctgttggggagaatgaaatgcccaacgaaggacaagttctagaaggcttgaatataccataatctgatgagaacctctgagtcagctgctaaatttaagtcagatctcagtgtccttttt

SEQ ID NO: 283017 - DNA, 1000 bp, Homo Sapiens
tcgcagacgccgctgctcacgccttttttagcaagccttctgctgatggaagcactaggatgattctaggctgttaaatagatttctcaataatgtaaataactaaattgttctctgcatatagcaggaaaactagcatgaaatattgtttcaggccctgggttctatgtgacactacattaggaattggattgtttgggtttgctttgtgtttttgaggtagaggaagaaatgggaatcttttttttctcttccaggagtcagtggaagaatagttctctagctaaggaatggacatacctttgttttaaaatattttatacttacaaaaatctagaaatggagagggaactgttttgaataaggatttaaaatacctgcacaaggatagagagaaactatgtgactcattctgtgaaaagacttcttgcagttgtgagttatttagaaatgatcaaaatttgtaattaggctaatccatttagtgattcctaatattttgtactcacagagaactaattgactaaacaacttgaacgctagtggtttgtccttagacaatctgtctttgaatttaaagtctttatcgctaagaccttgactttaaatttttcatcactacaaccttgaatttaatttcaggtcttcaacatgatgaccttggatttaatttaaagtcttcaacactatgcgctttatcatattattcacagatgcatttttgaaatgtagtatgtaaaagtatgtaacgtgctgtttattaacaaaagattgttcacaacatctcatgtagtttaaatttgtaaatactgcttctgttttgtttctcctttatacacttgactgtctttgtgataagtgacatgaattttatgttaggattaagtatgttttcctgaaacttggattttttttgtaattatataattgagagttaagaatgaaatccttcaagtgttaaaaactcacattttaaaagcaaattttggttccaattctg

SEQ ID NO: 283018 - DNA, 1000 bp, Homo Sapiens
tcagcaggctaaggtgggaggatcacctgagcccagggagtttgaggttgcagtgagctgtgatcacaccactgcattgtagcgtgagtgacagagtgagaccctgtctcaaaaagcaaataaacaaataaaatcaaaataataatagggaaatgcccttggtccacagactcagctgtcttccaggtgctagtcattggtgaatgaacaacaagagagcctgcactgtcttgtgtgaaggtctaggtattttgggtctttgtcttgataaaatcagaatagacgtggcctctcactatcagctaggaagcagtttgaacttggagtatcagagggttgctctttttgccaagcctctggcttcagtccttgcctggggatggcagtgctgctgagggaaggaagtggggaacactgtgagtgcaaggacaggtgaggcaggcacagacggctgtcccaagggaaagtgctccatcagctgtgccaggagagaagcagctcttgggtccgtgtttctgccttagaaggcaggagttgggcatctagctccagcactcatccctcttgaaactgctggtttgtttactttcattgcaactatatgcctggaagagatgaagagaaagctcaacaggcttcactaggattgtttgggtggggtggcagcagctcagatattttccctcctctgtttctcataggctttttgtaatcgtgttataatactttaatggaaaaaaataaatttattattttaaagctataaaaattataaatcagtcattatgatgtgtttttctctactgagccctctggtgtgttccctgttttattaacgtggatggagggtgtgtcagggaggttgggacagaggcagagaagaggccagcccggccttcagggagttcgtggcctgtctggaaagagggtcttttacataccagcagtttgcagagccagacacagaacgatagagcaggaccttttaaactcctttttc

SEQ ID NO: 283019 - DNA, 1000 bp, Homo Sapiens
ccaagccttgattattcaccttcccactaccaggttgtccaagaaggtcatttgcaatttttaaggtgcatctctccacattcagattctacgttgacgcctctgcagtccatttcagcaactctctcatcttctgtctgctcctcttcggaaacatctttgcacctagttctcccaagcagatcagaggagggcagcttcagtcagggaactgtgagttccttcagtctggaaaacttaccaggatcttggaaccaggaaggaatggcatcagcttctacaaaacctttggagaaccttccactggaagttgtcacaagcacagcagaagtgaaagataacaaagccataaatgtatgatattagtgcccatgatgcagcagctaatttcaaacctaccactgcatgacagttttagtttgcctttttgcctctggtgggcatgaagactgagcaaagctgggaatcctgcagaaaagagtgtgaggagccagggaaaggcagaaccacctccatgctgtagcaaacaatttctagatactagaagcataatagaaacatttttctgtacaggtattaaactactggtctgtttgacagactttggtaacaatccaaagaccctgagggtctgagcagctagaagtcctagacaaagaacttgtggatgacttttgtcccatgtggcttttgtgaagtatggcaaaggtttttcatgagtgcctgattgttattcctgaacaatatccatagcactgttggcctcaggagtgcacagctcctgctgatgtatttttctttttgtgaaggcaaagggacaattatcactgcatgtcatctcctagacaatcagtcaaatagagctggtggccagtggttagctattcgcacgttatttgccatgtaaatgaaaacgtctttatttatcaaaaaaacacagaggctatttttatatccttggtatgaaatatgtatttaaactatttaaatatttataaag

SEQ ID NO: 283020 - DNA, 1000 bp, Homo Sapiens
tgggtgtgaagcagctcatcgtgggcgtgaacaaaatggactccacagagccggcctacagcgagaagcgctacgacgagatcgtcaaggaagtcagcgcctacatcaagaagatcggctacaacccggccaccgtgccctttgtgcccatctccggctggcacggcgacaacatgctggagccctcccccaacatgccgtggttcaagggctggaaggtggagcgtaaggagggcaacgcaagcggcgtgtccctgctggaggccctggacaccatcctgccccccacgcgccccacggacaagcccctgcgcctgccgctgcaggacgtgtacaagattggcggcattggcacggtgcccgtgggccgggtggagaccggcatcctgcggccgggcatggtggtgacctttgcgccagtgaacatcaccactgaggtgaagtcagtggagatgcaccacgaggctctgagcgaagctctgcccggcgacaacgtcggcttcaatgtgaagaacgtgtcggtgaaggacatccggcggggcaacgtgtgtggggacagcaagtctgacccgccgcaggaggctgctcagttcacctcccaggtggggggctgcgctgggtccagggggctggcgcctgctggacagcagcaggactgtcctgggtgaggctgctgtcggcaggtggcctggcgtggggagaaaaccggaccctcaggctgggcgcagtggctcgcgcctgtagtcccagcactttgagaggccgaggcgggcggatcgcgaggtcaggagatcgggtccgtcctggtcaacatggtggagccccgtctctactaaaagtgcaagaattggccaggcgtggtggcacgtgcctgtagtcccggctatcgggaggctgaggcaggagaatcgcttgagcctggggggcggaggttgcagtgagccgagattgcgccactgcactccagcctgcgtgacagagcgagacttcgtctcaaaag

SEQ ID NO: 283021 - DNA, 1000 bp, Homo Sapiens
tttgttttcaactggaaattgtaaagaaaattatactcatgtttatttataaaaatcaccttatgtatgaattaaactaacatggttcaaaagaaggtttggttcatttgaaataataaataagtactctaatacagataaaaatcatgtacttagggtattggcagaaagcacaagttaggatgatttcagaagtctggccttgaaggatgagttgagttttaacaggaggagaaggtgttaagagccatatgagtgagcagtggcccaaagccatgcacatcagtggctcatttaaggaatgaatgccattagatgggctactgagagtacagggatattatggaagataaagttggaaaagctgaaggattgattttcttccatcaactctcaagatcccattcgccattcaatctctgtgctgcagtaagagcaatcttaaacagtataaatcacacacacacacacacacacacacacacacacacacacacacacacaagtccctcaggaaaaattccaagctcttgagaagatcacatgagccccttcatgacctggcgcttgcttatttcttccaggacttctctcacttctatccagctattcccgtcagcaaatgaacctccaaagcagcacatggagcactgcatagactatttcctcagtgcgtaactcctccctgtctcctctttacctgagtaacttgtactcatccttcaatactccaactgaattttacttaccctgaaaagatttccatggctatccaccacccccctgcctgtgagactgagttaggtgccctttttcatgtctttcccccatcacggcacttaccatactgcgttgtaattgcctgtgtatcgtctgtataactactagactgtaagctccttgagggcagggactgtgtctatcttgttcacagttgtatccccagcacccagcacagtgcctggcatattgtaggtgcttaataaatatttgttgaatg

SEQ ID NO: 283022 - DNA, 1000 bp, Homo Sapiens
taagtttttccacctaattattacccaaatcaatagacatacacttcatctccaaagctaggacttaactggatggaacctggcatcctcctctctaggaatctccaaaaataatttaaagaaaaatacctaaaatctcaacaataaaaagataaatcactcaattcgaaagtaggagaaggttctgaatagacatttctccaaagacaacatccacatggtcaataagcacatgaaaagatgggtgacatcattagtctttagggaaaatgcaaagaaaactcacaataagacaccatttcacaccccctgagatgactacaatagcaagtgttagccaggctgcagaaaaattgaaactctggtactctcctggtgggaatgtgaaatggtgcagctgctttggaaaaccgtttggtagttcctcaaaatgttcaacatagagttaccatgtaattcagtaattctactgctaggcatgtacccaagagaactgaaataatatgttcccacaaaaacttgaacacaaatgtgcatggtagtattactattaatagctaaaaagtggaaacaagtttattgtccatcaactgattaatgaataaacaaaatgcggtaatccatacaatggaatattattcagcagtacaaaagaataaagtactgattcatgctgcaacacagataaacctctaaaacagtgtgctaagtgaaagaagtcagacacaaaaggccacataccatatgattccatttatatgaaatgtccagaataggcaaatccatagagacaggaagtagattaatggttaccgggagatgggggcagggaagaatgggaattgactgctactgcgtacagggtttcttttgggggtgatgaaaatgtgctagaactatatacagtggtggcaattgtacaacattaatcatatacaaaaaaaaaacactgaatcattcactttaaaggctaaatattttggtacctgaattatatctc

SEQ ID NO: 283023 - DNA, 1000 bp, Homo Sapiens
attttatttgaaggtatgggggaacgaaaaaaatactattatggagtgcagtgcacagtttgcatgaactctaaaagataaagcaagaaatgtcaagtaggttttgcacattgggctgctttaggctgtgccctctgattcttctggtgtactcatgatactctcccttggtgccctccaggctgacgcagctatttacgttcagagtgaaatgggctgtgtggctgggattgggaaaggccttgttaaagctgggagaggtttggtcatggtgacaggggacctgaaggcccagctcctcttccctcttgccaatacagggacaagtcaaagaagaagaagaaagtaaaggtaaagatggaaaagaaatccacgccctctaggggctcatcatccaagtcgtcctcaaggcagctaagcgagagcttcaagagcaaagagtttgtgtctagtgatgagagctcttcgggagagaacaagagcaaaaagaagaggaggaggagcgaggactctgaagaagaagaactagccagtactccccccagctcagaggactcagcgtcaggatccgatgagtagaaacggaggaaggttctctttgcgcttgccttctcacaccccccgactccccacccatattttggtaccagtttctcctcatgaaatgcagtccctggattctgtgccatctgaacatgctctcctgttggtgtgtatgtcactagggcagtggggagacgtcttaactctgctgcttcccaaggatggctgtttataatttggggagagatagggtgggaggcagggcaatgcaggatccaaatcctcatcttactttcccgaccttaaggatgtagctgctgcttgtcctgttcaagttgctggagcaggggtcatgtgaggccaggcctgtagctcctacctggggcctatttctactttcattttgtatttctggtctgtgaaaatgatttaataaagggaactgactttggaaacc

SEQ ID NO: 283024 - DNA, 1000 bp, Homo Sapiens
gacagagtgagactctgtctccaaaaaaaagtatttttcgttggcatcaggagtcattttagatacttgctttgagtgtgtgttttgttcatctgtctttatgtatgtcatttatcagtttatctacatttattaattatgaagcaaaaattttactatggcaatgtcttcaattatataagaaatagaacagaagtagtaatcaaaagtagagaattttcctttttggggtagctttacaagaattgcatctcttctgagtattggtggggttttgtcatttcttttgccttatactttttatcatttctaaaatctaaggccttcacccgctaacctaagtttgacttctgattgttggaggatgcttgtgattatttcagaaaaaagcatagtattctttaaaattatttgtcaaattatcctaagtaataaacaaggaataacagattttaatataatataatattagaatcaatctctaattacaggtttgtataattttactcaccttctaaaacagaacaattgtatcaaattttacgttgtcattctcttgtgaaagttctagtaagtaatgaaatggtcaaaaagacatggggaagactaataaaatcacaagggaaaacttcagattggggtggtttgagaagtatgaataaaactaaactcattggagttacatggatggattggggctgatcttgtgtgtttgaaatagttttcaatttatgacatcatgtgatgtgtgtttttttttccagctgtaaaactaccatagaagctatccatggattgatgtctcaggttattaaggataaactgtttaatcaaattaacatctcttaaacagtctctgagaagtactttacctgaaagacagtatgagaaaaatattcaagtaacactttaaaaccagttacccaaaatctgattagaagtataaggtgctctgaagtgtcctaaatattaatatcctgtaataaagctctttaaaatg

SEQ ID NO: 283025 - DNA, 1000 bp, Homo Sapiens
atgccttgctccagattggggtgtgacgcattgatgcagattatattactatagaatatgatggtctcagggaccaggcaggactttggcttctgagcagggttcagctcctgacttggccctaccggtgccgtgagatctcaaacaagtcagcctctaagcctcaggttcctcctttgccaatccaagagatgagctggcctgggacaggctgtgtggtgatggtgctggggttgagtcttctccccctgcaggtggtctatgttgcccgcaacgcaaaggatgtggcagtttcctactaccacttctaccacatggccaaggtgcaccctgagcctgggacctgggacagcttcctggagaagttcatggtcggagaagtgtcctacggatcctggtaccagcacgtgcaggagtggtgggagctgagccgcacccaccctgttctctacctcttctatgaagacatgaaggagaacccgaaaagggagattcaaaagatcctggagtttgtggggcgctccctgccagaggagaccgtggacttcatggttcagcacacgtcgttcaaggagatgaagaagaaccctatgaccaactacaccaccgtcccccaggagttcatggaccacagcatctcccccttcatgaggaaaggcatggctggggactggaagaccaccttcaccgtggcgcagaatgagcgcttcgatgcggactatgcggagaagatggcaggctgcagcctcagcttccgctttgagctgtgagaggggctcctggagtcactgcagagggagtgtgcgaatcaaacctgaccaagcggctcaagaataaaatatgaattgagggcccgggacggtaggtcatgtctgtaatcccagcaatttggaggctgaggtgggaggatcatttgagcccaggagttcgagaccaacctgggcaacatagtgagattctgttaaaaaaataaaataaaataaaaccaatttttaaaaag

SEQ ID NO: 283026 - DNA, 1000 bp, Homo Sapiens
tcttacagtcgagattatcgtagacggcacagccacagccattctcccatgtctactcgcaggcgtcatgttgggaatcgggcaaatcctgatcctaactgttgtcttggagtatttgggctgagcttgtacaccacagaaagagatctaagagaagtgttctctaaatatggtcccattgccgatgtgtctattgtatatgaccagcagtctaggcgttcaagaggatttgcctttgtatattttgaaaatgtagatgatgccaaggaagctaaagaacgtgccaatggaatggagcttgatgggcgtaggatcagagttgatttctctataacaaaaagaccacatacgccaacaccaggaatttacatggggagacctacctatggcagctctcgccgtcgggattactatgacagaggatatgatcggggctatgatgatcgggactactatagcagatcatacagaggaggaggtggaggaggaggaggatggagagctgcccaagacagggatcagatttatagaaggcggtcaccttctccttactatagtcgtggagatacagatcacgttccagatctcgatcatactcacctcgtcgctattaaagcatgaagactttctgaaacctgccctagagctgggatattgtttgtgggcaatattttttattgtctcttgtttaaaaagtgaacagtgcctagtgaagttaggtgacttttacaccttttacgatgactacttttggtggagttgaaatgctgttttcattctgcatttgtgtagtttggtgctttgttccaagttaagtgttttcagaaaagtatgttttgcatgtatttttttacagtctaaattttgactgctgagaagtttctattgtacaaaacttcatttaaaaggtttttctactgaatccagggtattctgaagatcgaagcctgtgtaaaatgctaccaaatggcaaaaagcaacaataaacagtttgattttt

SEQ ID NO: 283027 - DNA, 1000 bp, Homo Sapiens
ggcctccctaatcttccttctcccagcgggaaaacagggatgacaccacctccctcagccagttttcttgtcatgatgtttagtaaggttttcataagatgatatgtgtgcaagagatcagtaatctgcaaatgggaaagatggctggttctgtgagaccgggctgttcctggtcccagctaagacattgcagtacccacctcccaaagggagtacacccttgctttgggcctgtgcctgcctgagtcctgatccgtcttccttcctaccctgcccccggcccccttctctttctgcagacaaactggtcaagtgtgagggcatcagcctgctggctcagaacacctcgtggctgctgctgctcctgctctccctctccctcctccaggccacggatttcatgtccctgtgactggtggggcccatggaggagacaggaagcctcaagttccagtgcagagatcctacttctctgagtcagctgaccccctccccgcaatccctcaaaccttgaggagaagtggggaccccacccctcatcaggagttccagtgctgcatgcgattatctacccacgtccacgcggccacctcaccctctccgcacacctctggctgtctttttgtactttttgttccagagctgcttctgtctggtttatttaggttttatccttccttttctttgagagttcgtgaagagggaagccaggattggggacctgatggagagtgagagcatgtgaggggtagtgggatggtggggtaccagccactggaggggtcatccttgcccatcgggaccagaaacctgggagagacttggatgaggagtggttgggctgtgcctgggcctagcacggacatggtctgtcctgacagcactcctcggcaggcatggctggtgcctgaagaccccagatgtgagggcaccaccaagaatttgtggcctaccttgtgagggagagaactgagcatctccagcattctcagccacaacc

SEQ ID NO: 283028 - DNA, 1000 bp, Homo Sapiens
ctcctgtgatctttctgaaccaataataaacagtcaactgtgatgctttttagtatgaacaatgatagttttctaaaatctgaaaatcaatacctgagtatgtgatgtggcaatgcattcttctagataagcactaaacaaagtatggaccctcaatttatgtctttaagatttaaagtgaagtaaatttctaaggaactgtgtcctttcctagcaggaataaacagtgaaaatttggtaagtatttaacttgaagtgcatgtaatagtgatgagagtaagtagccaaatttccgtaatataaggtaatgtttaaaagtgagcaataattattgcatctcttttgcgacttcatgtagatgtgattaacattttttacaaatttgcctgcataaagattaaattggaacataccttactcctttgtctggtttttttattttgtatggtgctttaaatactaattttatatttcaagctttttgcagggtagaaataagtggctgttaaagaaaatatcttcaagaaggattatttcagtgtccctttttaaaactcgatgatggctttcagtttatttaagtcttctgtttttcagctccagttaaaactgacaataggcagctatcaaaaatggaaaaaatcttgtgctctttctggaatattagaggaatcagttaataatagtaaagtggtattaacccaatacttgatttgcagtttttaaagcagtttttaaattgagagaaaaggggctgggcccagctgaggcgggtggatctcctgaggtcaggagtttgagaccagcctggccaacatagtgaaaccccgtctctactaaaaatacaaaaatcagccgggtgtggtgggacgtgcctgtaaccccagctactctggaggctgaggcaggaaaatcgcttgaacccagggggaggaggttgcagtgagccgagatggcgccgttgcactccagcttgggtgacagagcgagactccgtctc

SEQ ID NO: 283029 - DNA, 1000 bp, Homo Sapiens
acttcatttgcagtttctttcccatgatagtttttagttgggcagtcttaaaactcatctgataggaaggaaattagatgtaatgtgagagagaccacagtaaaatgtgggtatttttgggagtggggtggggttttcaatcttctctttcctccccatccccccatggggtgtattggagatcaacttcctccacccccccaggtttaacccccccactctgccctcctcccgttccccacccccttcctcccccccagccaatggagatcttcgtggatgatgagacgaagttgacgctgcatgggttgcagcagtactacgtgaaactgaaggacaacgagaagaaccggaagctctttgaccttctggatgtccttgagttcaaccaggtggtgatctttgtgaagtctgtgcagcggtgcattgccttggcccagctactagtggagcagaacttcccagccattgccatccaccgtgggatgccccaggaggagaggctttctcggtatcagcagtttaaagattttcaacgacgaattcttgtggctaccaacctatttggccgaggcatggacatcgagcgggtgaacattgcttttaattatgacatgcctgaggattctgacacctacctgcatcgggtggccagagcaggccggtttggcaccaagggcttggctatcacatttgtgtccgatgagaatgatgccaagatcctcaatgatgtgcaggatcgctttgaggtcaatattagtgagctgcctgatgagatagacatctcctcctacattgaacagacacggtagaagactcgcccattttggaatgtgaccgtctgtccttcaggagaggacaccagggtgggggtgaaggagacactactgcccccacccctgacagcccccaccccatggcttccatcttttgcatcaccaccactcctgaacccccatttctgatttgtcagaatttttttttaacaaaactaaaaatg

SEQ ID NO: 283030 - DNA, 1000 bp, Homo Sapiens
gccaccccttgtcccgtctccacctcattgccccacctctactctggggctgggtggacagtaactgtgaagctcctgttctctttgggccccctcctgtgacccagacccagacctgcccactggtccctggagatagggaatcagcagccacaggccacaagtaaagaaaaagatgagtttgagaagctaagtccacagtgcacagaaatactgggagatggagggcctgggcctgaagcaggggagtagtacatcttcaccctgtccgcagctcactgaagaagctgccctggatgaggcaagtggctttaacatccctgcagagcaggcttctcgaccctggacgcaaccccgcggggcagagcctgaggcccaggatgtggaccccaggcctgaggctgaggaagaggagctcccctggtgctgcatctgcaatgaggatgccaccctacgctgcgctggctgcgatggggacctcttctgtgcccgctgcttccggtgggtgcaggtggaatgttctgtgcgagagctcaagggctgcctggatccctgacttgtatccctttgttccacagagagggccatgatgcctttgagcttaaagagcaccagacatctgcctactctcctccacgtgcaggccaagagcactgaagacaccctggtcctcccggaagggcagtcccacaggcagcggcacccatttctgggcccagccacaggacgtccgatgggagagcttgtctggctctactgatgatggataggccccttcctgagccttggtgtccctggaatgaggaaagattctccattcgagagaatgactgggagggaagaagtcggggccctcctattagaagcccagactggaagtgagaggcatgatggggagagaccagactgaatctacgggtgagccctgtaacctggctctagggcacaggcccctcccctggcacttagtgggtctaataaagtatgttgattcattggg

SEQ ID NO: 283031 - DNA, 1000 bp, Homo Sapiens
ccatatgtgatcatgttattggaggatggaaaagagccctggatgatggagaaaaaactgtcaaaaggtatgattccacatgagtcatggtgaacgagacaaaggaagattttgttaaagatgtttatagtgagtgtggaagcattttagggatactgtcttcaaagatctcagatagaaatgaaaaattgagggatatttagcttagattttcaaaacaattgttcctccctctcaaattattatctgtatcactcatgtcacctaatcaaggttagaggtttttgccatcataataattcaaattgttactatattcatgacaaagtaagacaatttattctttcttaattctacttaagaaaaatatactaatagttttaagctaagaaaagctgtcagttagatggaaaatcacttttctaaagctgagctttgtagatgaaatatgaacatattagaggaagtaagggacatataaatgtttctaggaataatattttctaatgttcaagaaaaatatgattcacacagtttcttcataacctcagaaagcctatatctttgtcagctataaagagcatttactttgtttttactgcagttgtttaatatagtagtatcaattctgtattttaagcttgataatccagcagcaaattgagattaatggaaggttggaaaaaaaggctatgaaacaaaatgcaacctttcccacatgaatataggcacaaaatgatgatttgtaatcctgaatgccttccacatcttatttctgatactttccttttttccatactattttatccatttcgtacagcttacccatttcctttatcacactctgttcctgcttctgtgaactttggattctctgctctatttgagcattgttcagaagtcactgaaatatttgagttgtcagaactatgtgttttctgggtgcttcatttcttatccaattctcctaattccactgtagaagcttttttcaagaagt

SEQ ID NO: 283032 - DNA, 1000 bp, Homo Sapiens
tcctctctgcagggcaaattgtgatgatgcaatgatttcaggtcaagactgcagcccacagggtgggtgcccattggcaggagaagtgtgaaagttgtatcatcacacttacctccccccaaccccaactcagccaagatggggaacactgaatatcccgcagggtcaagtatagaaatagccatgttctggcgggaggtgagagttcattacaatgagcaacactgttaaaaaaacaaacaaaaatctcccctgccatttataccaagtgctcttctcggagtccctcttcttgggtttttggtcttggattctcggttgactccatgattccctacattaggcctactgtggcctcccttttggaaggggcccaggggcagaagacctggcgggccagggcagggaggactggcagcctccaggctcacctccctttggcttcactctctttgctcctcagcttcagagcactgcatcctcaaaggccaagatgaggatgctgaattaggaaaaaaggctgtggagtctgaattttagttcctatcttgggctagaggggtcaaagaattcctgaagcttatgtaagggccggctggtcagctccctagaaccacgggctccacagaggtggcaaaacccagtgattttgccagtatccctgcagggacctgcggtacaggcaggttgaagatctgagactcaggaaccttggcccctttgtcacttacaactgtgtgtgaaacaggactaacagtttggactgagagcactgaagctgctgtgtgttgtgcatataacttaatgctgtgtgttgtggcttgcactgctgtgggggcggggagggcagtggtggggaatggctggcatgaagcttgcttgagccaatgctatgcttgctgggctttggctgactggctttgggccaccaactgtatttgcatagtgatggcttggaagtgtccatagaagggattgcaataaaggtgtgtcttccttc

SEQ ID NO: 283033 - DNA, 1000 bp, Homo Sapiens
aattcttgggtattccaagcatcttgccttttaatggtctctaactattacccaggacctcataagttggctaccacctgaaatttcttcctaactaaaagtctttaagcaacttaaaatttcatagaaagtaatccattaagaaccacaattaaaagcaatttaatttgaagactcatatatcaaaatttattaaagtgtatttaaatagagcagtgttcaataaaatacatatataataaaattaaataagtacttgttacttacaaatatctaattttctcatagtgtatgtttgcatattctatgtataaaacctaattcaaaacataagtattggggaaatgtggacctgtaagtgatgaaaattagattagggaatgagttcaggcctatcaagttttctacaattctttctgttggaacatcggacctttgattattctcttttttcccccctttagagattagttcttgctctgtcacccaggctggagagtagtaccgctgtcatagctcactgaagcttcaaactcctgggctcaaacagtcctcccacctcagcctcctgtctttgatcatttttacttacagtttcatgtcttaatctcgatgctttgttgttctggcaggggatgtatggcattgagaatgaagtcttcctgagccttccatgtatcctcaatgcccggggattaaccagcgttatcaaccagaagctaaaggatgatgaggttgctcagctcaagaaaagtgcagataccctgtgggacatccagaaggacctaaaagacctgtgactagtgagctctaggctgtagaaatttaaaaactacaatgtgattaactcgagcctttagttttcatccatgtacatggatcacagtttgctttgatcttcttcaatatgtgaatttgggctcacagaatcaaagcctatgcttggtttaatgcttgcaatctgagctcttgaacaaataaaattaactattgtagtgtg

SEQ ID NO: 283034 - DNA, 1000 bp, Homo Sapiens
tcaagacctgtgggccactgcttagaagctgcagcagtgctatctaaagaaggagttgaatgtgaggtgataaatatgcgtaccattagaccaatggacatggaaaccatagaagccagtgtcatgaagacaaatcatcttgtaactgtggaaggaggctggccacagtttggagtaggagctgaaatctgtgccaggatcatggaaggtatttcaaagaaactggttctagaatacagtcaagctatagtaaacatcatgtacctgaatacgtacaggataaagagattgaaagctaggagtggccaaacgacttcaactttaaacttgtaagtttggcatttctcttcaggcagatatttttaaaagcaaatccagaaagcggttccccataattagcattccttacattttctcttcctggtcagccacacctctgtgccaaggtggtagtgcccagctggcatttgcactctctcagttgagccttccttctcctaggtcctgcgttcaatttcctggatgctcctgctgttcgtgtcactggtgctgatgtccctatgccttatgcaaagattctagaggacaactctatacctcaggtcaaagacatcatatttgcaataaagaaaacattaaatatttagtttggacttgaatatcaagtcgttgaaatttatttgaaatacttgctggcactgcacctggatttgtactgcaagacctgactattcataacggaaaatgatttctaaagcaacagcaggtatttttgtacagggaagtttaaatgtgtttgtgtatggaaaactctccactctcctcccctagatgccatgcttccttttgtctgttacggttgccatgttctttgaataacaaattatataacattttatcctctctcaccacaaggacaaagtatggatgtggcagagtcctgatgaaagatgtatccaaacaagataacttatatgtataaaattaaagcatataatat

SEQ ID NO: 283035 - DNA, 1000 bp, Homo Sapiens
ggcaggggctgcccaatgcagttagcctcctgctggtgttctctcttgttgcttggtgaaggtggccctggtcagcttctccactgcccagtgaacgacccctttgtaatgaatgagtggggaggtagtgtgaagcgatgccaatatcccatccctgtcaaactgcctttactttttccttccttccttgctcccacctgtgtggatcctggtcccttcttgtattcagggctgtggtctgttatgacatttactctcaggctcaggtcctgcttgtttggcccgtgggagccccttcttctgccttttgtgttttttttgttatgtacctacagttctttagctgtttctttactttctggtgcaaaaagatgttcaagccttattttatacttgcctgcccctttctctttcatttattggagtgagctgcagctctaagaagacctgttcttttgaatggagagtagcatcaggaaccaggatgtgggtgcgaggcgtgctcctggctgttgcagattgctgcacccgggagatcttagtggacagagctagaggatatgtgcacgtacttccatctctctctctgtctcatctattcacagctgggaatgatactaatacctccgattttagcccagcaccacagggtacgttccagtttttctctctttccatagctgtaaggccctttctgggaatggttctcattctccttaatctattattgggtcagttttcctgcatgtccccagcctcccatcactgccacccactccccacagagatgccctgctcatccgactggggctttgactcccacactgtgtacccctcttgtgtggacgccctgctgccaaaaccttcagcaaacagctttccaaatggaagttgtcactgtcagggcctttacaatcagcaacagcaaaatctacatgctgctgagggtcctgcctcattaagatgcaataaatatgtaagtacataaaaacagcaatag

SEQ ID NO: 283036 - DNA, 1000 bp, Homo Sapiens
aaaaaaaaaaaaaaattagccaggcatggtgccaggtgcctgtaatcccagctacttggaggctgaggcaagagagaattgcttgaacccgggggggtggagcttgcggtgatcccagatgcgtcactgcactccagcctgggtgacagagcgagactctatctcaaaaaaaaaaaaaaaaaagagtaaagctgaggcctacacatggatggatgtggaggaggggcacttaggatgactagtggaagccccattgagaggggatatttgaataatgaacttcaaagtggttagggaataagccacttattccagacagaaggaataatcaatgcaaagttccttctgttgaaaaaaatgcttttataattttatttttcatcttctaaagcccttcagtctccttttggtcatcttttttttgtagttggttatgccttaacaacagtactttgaggatactagttacagtatttaaaaaatacgtcactatatgctgagttattttttcagtgttagcatttatgtttatcttgttctcattctcttcatcccccctttgttgtcttttcgtgtttcagaatggacaattagattttgttaaagttgtatgctttcctctaggataaagtaatgaagagcgtttactaagctgttacccccattccccccaaataccaaagaggctcttattctgggtcaacaaaactccctttagaatttctggtaccaggctgggcgtggtggctcacacttgtaatcccagcactttgggaggctgaggtgggcggatcacgaggtcaggagatcgagaccatggtgaaaccccgtctgtactaaaaatacgaaaattagctgggcgtggtggtgggcgcctgtagtcccagctactcgggaggctgaggcaggagaatggtgcagacccaggaggcggagcttgcagtgagccgagatcgcgccactgcacttcagcctgggcgacagagcgagactctgtctc

SEQ ID NO: 283037 - DNA, 1000 bp, Homo Sapiens
agacggggctgagtcccgagatcgtgcacttcaacctttacccccagccgggccgtcgggacgtggaggtcaagccagcagacaggcacaacctgctgcggccagagaccgtggagagcctgttctacctgtaccgcgtcacaggggaccgcaaataccaggactggggctgggagattctgcagagcttcagccgattcacacgggtcccctcgggtggctattcttccatcaacaatgcccaggatcctcagaagcccgagcctagggacaagatggagagcttcttcctgggggagacgctcaagtatctgttcttgctcttctccgatgacccaaacctgctcagcctggacgcctacgtgttcaacaccgaagcccaccctctgcctatctggacccctgcctagggtggatggctgctggtgtggggacttcgggtgggcagaggcaccttgctgggtctgtggcattttccaagggcccacgtagcaccggcaaccgccaagtggcccaggctctgaactggctctgggctcctcctcgtctctgctttaatcaggacaccgtgaggacaagtgaggccgtcagtcttggtgtgatgcggggtgggctgggccgctggagcctccgcctgcttcctccagaagacacgaatcatgactcacgattgctgaagcctgagcaggtctctgtgggccgaccagaggggggcttcgaggtggtccctggtactggggtgaccgagtggacagcccagggtgcagctctgcccgggctcgtgaagcctcagatgtccccaatccaagggtctggaggggctgccgtgactccagaggcctgaggctccagggctggctctggtgtttacaagctggactcagggatcctcctggccgccccgcagggggcttggagggctggacggcaagtccgtctagctcacgggcccctccagtggaatgggtcttttcggtggagataaaagttgatttgctct

SEQ ID NO: 283038 - DNA, 1000 bp, Homo Sapiens; identical to SEQ ID NO: 114986

SEQ ID NO: 283039 - DNA, 1000 bp, Homo Sapiens
tatcacagtacaatagcttagaatgatcattagaaatggtagaaaatagaataaatcattaaagatcccaaaatgttgagttctgtagcatgaaaactctcttgctcctccatgtttgtagttcaggccagaacaaactaaacagaccaataaatataaaagtgatagtttagggaaaaaaaaaaactttgtataaataaaattgtatgtgtgttcaaataactacctattaaatcatccaaagcttagaatttaaattggtcatagtagcaaatagtgcagatgatggaagaaaaccagtctcaataatggttttttttttccaattgcataaggtcacgtcatcccccaaattgtctattttttcttttctttttttttaagatggagtctcgctccgtcacccaggctggaatgcagtggcgcaatcttggctcattgcaacctccacctcccaggtgcaagcgattctcctacctcagcctcccaagtagctgggactacaggcgcccgccaccatgtgggcctggctaatttttgtagagatggggtttcaacatgttggccaggctggtctcaaactcctgacctccagtgatgcacccgcctcggcctcccaaagttctgggattacaggcgtgagccaccgtgcccagcccctattttttctgaaataatttttcggatatacttttatatttgaaattagttgaacataagatgatcatcaagcttgctataagttttaagctattgctacatttgaacaaagacccacgtacttagaaagtacttaggatatctttgagattaatggtgctacatcactctacagtactatgtaaaatgaatggagctgctgttcctttctagctagctgtttgtgtagttcatattaatttaccctgccttttatttggattgtctgatttcttagttgtacacatgaacctcattatttgcctggaataagtaatcaaataaaattgctttgataaat

SEQ ID NO: 283040 - DNA, 1000 bp, Homo Sapiens
aatggtgagtttcttagggcaaagactgtgtcttctgtttcttttcatgcttaggatatggttctgtgcatagtaggtactcagtaaatgttcctagaatcataaaatcctcaacagatatgttactgagcatctgcttttcatgataagcactctatcagatccttgggatgcaaaggtaaataagacaaatcccttttacccaaagagctcaccatcaagttgggggagggaaagtggaattcaaaacatgttaataaatcatcatagtactgtgagataagtgcaattaagaagctagttataaagtataggggaaatagaggagtaatcatgtctgaaaagtcaggaaagtcttcctagaggtaatttttaagctgattgttttagaattagtagaagcttgccagatggaaaagtccaggcaaagtgtaacatgaatgggaaaggccacagtctagaaatggcagagtgtgttcctagtttgtttgtttgtttgtttgtacctgccttgttccaggaaggatttaatgtggtttatattccagtcctttaatgctggaagggctgagatgagactgaaagatgggcaggaagtatatcatcacaagctttgtgtttgatgttaatgtgtatgatttttatattatgggaaataagctcttagaggagtgatataatcaggtttgtgttttagaaatctgtgtaatgaatgaatgaagaaagaaattgaagaatcatgtaacatatgtgatcgcatttttgtaaaagaaccatgtgtgtttatatgtgtttatatatatacttgtgtatgcaaaggtaaaagtctgaaaggatatatgctaactgttcacaatgataaccccccaggaatgggattggaggggagggggcttctgtgtttgttatgtatgctgggtgggatattgtgcttttatttctatattgtttgaatttttttacagtatgtattatttttgtaataaaaattttaaaaaat

SEQ ID NO: 283041 - DNA, 1000 bp, Homo Sapiens
tacctcggggctgctggagccgctgtgggttagggatggactgaggcctcgaggagtgagggtgcacccggggcccagcctcaggctgccctagggatctctcagtaggaagaggaagttgcgtgtttacccaatcctgtttctccaatgcaacgtccacccactttaccaccaaaaactccagggcctgacggcagcccggtcccccagcactcaccagcagcccagtgttctccaccaagccacagtgtgcatgcctggtatcctccggattcccttccttctgcccgctgagtcactgggcagagaatgatgacatgtgtaggtggtgtggttgggggtggaaaggggaaggggttgatcctcaggactctgagggagcatcgttgaattttcctgttcagtgtgaccaagacccacctggaaatggaatttggaactggcttcaggagacatcattcctgaacacactgtagggtgaattggtgcatcttccccaccatacacacacacacacacacacacacacacacacacacacacacacaccccaaaccttttcatggggaatgtgtggcaaccttgccaaacagcaccactcagagtgtgactctgactgtgaccttggccttaatgaggaacttcttaggagagtttgaggacaaggccaacatcgtcatctgggctcgctgcgtcccagcacatcaaactctgtccagagacaaggccaactgcaaatgaaagccagggaacattgctaagggtctgtggctctgtggtggtgttcatcgccttcctgagataggatttcccttgccagtcccaacctgtatatattctgtacagaagacatccctgaatatactgtaggtgagtcgtccagccaaatttatatctccaaaacatttttagctttttctacatgctatgaattgagatgacatgctcaacttgtaaataagtctttttgtacattaaaaaagtaattttttcataattt

SEQ ID NO: 283042 - DNA, 1000 bp, Homo Sapiens
aaaatggggataatatctacctggtaaggcattgtgaggatcaaatgaaggcgtatacatggctgaagcacttagaatgtacttggcatataaatacttggttctcaataattgagaaccagtaatgataatctttacaataattagtaacagtcactatttattgagtgtttaattatgtgccagacactgaactaaataattttcatatatatagtttatgtaaacactaattttctgttaataatgacaaatagaattgtccaaaattgaaattggtgcttcataaaatagtgaatttttttctggagagtctgcaagcaaaaattaggtgagcacttgtcaggggaggatgtagttgggggttcatgcatcaggtgggcaattggaagagatacgtcctctaaagtcttattgattctaagattttctgggtctggagctcattgacaagcgtaaggctagttggagcttttatagtctttattgatagcagtcatcccccacacacccctgatagtaatacactttactatctgtagtcatgaatgagaaagaatttgttttaaagcaacaagggggagaattgtgatattttaaaagcactaacatttttcttttttatctcaaagtcacatacttgtcatttgtgaagctgaataccagaagaatgcatgtgttgctgactagattgttgatattaaggagctattgtttgttactttatttttaggtgtgatgatggttttgtttttatgtttaaatgagccttgtcttttggagatacatactgaaatatttatagatgaaatgatctgatgtctggggaggtttgctttaaagtaatagaggagtggggagtagacaggggtatagatgaatcaaggttggccatgagttggtaattgttgaaactggtgataggtacatgtgggtttatatattattctgctttcatttatgttttgaattctccaaataaaacttaaaaaagaagtag

SEQ ID NO: 283043 - DNA, 1000 bp, Homo Sapiens
gtagattgctgcagtaattgaactacatccaaatctttttgtattttttccccaaatatagaagtgttaatattaagaaaggacaattacacagttttcaagatttaggaaatcacttgtttagaaacttcaacagccttcacaatctgttttatatgatggacagaaaatttctttgccctccaaaattataatttctttatttttttcttattcttaaactataataattcagtaaggatattatgggttagaattttattatgatttttttcttagacaaaagttatatgctgaagaaggaaaaagttataaggcagtatgttttgataaaaggcatgtgcatcagtgaaatgttaactgtatagcaaataacctttcataatctgtagcaatcagtatttttctgatttaataatattttaataactgacgctgcatttaatttttttgccagtttaaaatgtttgtgtgtttttatagatgattttaactggtacatattttgagttaagttgaatgtatgaaagcagcatcttatcagttttgtttattcgatttctaaaatgtgctgatccttttaaaactcctgcttatctctgcaacaaagaaaaatattcaaaaatactgccttcattttcacacacagtgctgaagatgctgcaagcaccaaatcatagctcataaaatcaggtcctgagatagttacccataaagaggaatcctttgagtgtatgccattggtgagccgatgagcatggaccatagaagggctcaatgtagaagaaactacccgtgtgtaaaaagaagattggcttaaaatggctactgtgatgggaacagtgtcttagggagatgcagcttggacttgaggtaaattgaatactttacaactgtggtttagagtttgctttaatgacattgtatgtaaaaggtcacatgattgctgtaattttgtattcattatggtttcctcaataaatgtacattgatgactatt

SEQ ID NO: 283044 - DNA, 1000 bp, Homo Sapiens
tctacaatgctgcagaagtttctacctgcctggctgggaggtaggagggtctggtttggggatgtggccctgaggagaggaccagtgtttggcagtggccatgtattgatctcccagttcttcctgtggcaggtcccacgtacctcggagatttatgtccaccgaagtggtcgaactgctcgagctaccaatgaaggcctcagtctgatgctcattgggcctgaggatgtgatcaactttaagaagatttacaaaacgctcaagaaagatgaggatatcccactgttccccgtgcagacaaaatacatggatgtggtcaaggagcgaatccgtttagctcgacagattgagaaatctgagtatcggaacttccaggcttgcctgcacaactcttggattgagcaggcagcagctgccctggagattgagctggaagaagacatgtataagggaggaaaagctgaccagcaagaagaacgtcggagacaaaagcagatgaaggttctgaagaaggagctgcgccacctgctgtcccagccactgtttacggagagccagaaaaccaagtatcccactcagtctggcaagccgcccctgcttgtgtctgccccaagtaagagcgagtctgctttgagctgtctctccaagcagaagaagaagaagacaaagaagccgaaggagccacagccggaacagccacagccaagtacaagtgcaaattaactgccgtggtcaagtgtgtcagtgactgcacattggtttctgttctctggctatttgcaaaacctctcccacccttgtgtttcactccaccaccaaccccaggtaaaaaagtctccctctcttccactcacacccatagcgggagagacctcatgcagatttgcattgttttggagtaagaattcaatgcagcagcttaatttttctgtattgcagtgtttataggcttcttgtgtgttaaacttgatttcataaattaaaaacaatggtcagagcc

SEQ ID NO: 283045 - DNA, 1000 bp, Homo Sapiens
ttttaattcagataaacacacaaacatacttctctggcacagccttcagaagcatcagtttttgttttgttttgttttgttttttgagacagggtcttgctctgttgcccaggctggagtgcactggcacaatcacagttcactgcagcctcgacctcccagatccaagcaatcctcccacctaagcctcccaagtagctgggtctataggcgcgtgccaccaccatgcccagctgaattttgtattttttgtacagacagcattttgccatgttgcccaggctggtcccaaacttctagcctcaagcaaccctcctgcctcagcctctcaaagtgctaggattgcagtcctgagctactgccccctaccctctttgcgtcttaggagtcatttagattttttttgatccttttgtttagtgcctctggagctgcttacaccaaggcaatacgccttgatatactggatggttgagaggcagcctctttttttttttttttttttttttttggaggatagggagtatggctgttgtgaaaagggaggtaaagagaaatggtagatctgaagaggcctcatcagagcacatattttaggacaacacatatggaaattggacatctttaagttggtttccatagagctatgcatgtatccttacccccatgggaaaatgttggtgtgttctcaagggtatgcatgtgtcattttgaagaccaaggccctagaattgtcaaacttaaggatcataaaaatcatgagggttgcttgttaaaaatgtccaaacgtgcagagactgatctttgagatctggaccaggaatttgcatttgaacaagtgttcctggaatctctatgcaagttttatacagaacatacttttggaatccttgccctagacaggggtgtccaatcttttggcttccctggtccacaatggaagaagaattgtcttggaccacacataaaatacactaacactaacaatagctgatgagct

SEQ ID NO: 283046 - DNA, 1000 bp, Homo Sapiens; identical to SEQ ID NO: 114987

SEQ ID NO: 283047 - DNA, 1000 bp, Homo Sapiens
ttaccctattctaggtaggcaaaggctttagtttggtacgtgaaatataacaagcttatttgaaaatgagtgttaatttgacttcaggaacctgggatttgcatttttattttgacttaaagaggtgccctctggagttgcccagagggcaggcgttgctaggttgcttaccttttaaactattcttttagccgtactctgacagctgtgcacgatgccatccttgaggacttggtcttcccaagcgaaattgtgggcaagagaatccgcgtcaaactagatggcagccggctcataaaggttcatttggacaaagcacagcagaacaatgtggaacacaaggtaataggtcaacattttatcatggaaaggttcagccacagtgagagtggattttagtgtaaccagtctccatgcgccaccatagcaatgactgtagtaaactcaggactagttcttttacccgcacttcagcctgctctcctttggattatgtgtcaggtgttaaatggagatgtttcaagaattgaacacttgaaattctctgtaccttttggaagtagactctttctgtggtcttttagttaggctgtatattcttggtgagttaggggtgggtggtgatgggatcagtgtcttggggggacataaccatgtgggtgactgctggggtcccctgatggcttccccggtgcagtggtgtacagttctgtcccacagcattggagaagagcttgtccccggtcgtgaagactgctgcagacatgttgtgtgtacttagttgctgaggagaaaaacaatacagggcacaatttcacgaaactattaggttttaagctgagtgtgtatttcaaagttctgtgatgaattctttcttttcttgtaggttgaaactttttctggtgtctataagaagctcacgggcaaggatgttaattttgaattcccagagtttcaattgtaaacaaaaatgactaaataaaaagtatatattcacagt

SEQ ID NO: 283048 - DNA, 1000 bp, Homo Sapiens
aataaagcaccccagcattttgtataagctcttaattaaacctgtacagcttctttacctgatttaagaaagggagacaagcaataggggggaataagcttcttcaaaattcattccaagcacaaaagaaattttttccctttgcatataaacttgacatcagttgattctgttggggtcggggtgggtatgcagggattgccttttattatcaagtgatttatttcaagagcctttgaggggattcaggtgaaggaacccccatctgtgctggagagttggatactcctttaaatagcccccaccacagtcataacaataatgataatgctggattatttgttaagccaaggttgtctgcctcatatccatcatgctgtttgcaatattcttgctttcaatcaatttatactgagtgtaactttaggatttctgctattaaatgcatgctctctatcctgcttcagtttctggctttgctttgtctgtttcaaaatatgtagcttcctcttttgtacaacaaaaaactcattctcacttttactaaatatactgtaggagtcatcattgatgttatttttctcttatgtatctgtaaagatttttggcatatgaatgtaatattaaagtcaatgatgctataacttgcgatgtttgcatcatgtcaacctttttgaaggagtgaaaaagccctactatgtttttaaatagcaagtgtaagctcagtgctagagtggatatacacaccgcatgttttcatatgtggcacttttatgtatcatgttgggttattgttctagactggactgttaaatactatgtttgaggctgggttgtcatttttataactgtcttggtgttttatggccattatttattacttttgatacacagaatgagctgcatgcatttatagagcaataagaggatgtatttaatgtgccttgtttttaactgaataagaactggaagcatgaatcaataaaactgattaaaatgg

SEQ ID NO: 283049 - DNA, 1000 bp, Homo Sapiens
ttttgagcaaggataaattcaactccctcatctgagaaccttgactttccagttgccttgaagtattgggaatagtaactgtacattttcaatttaattatttggtattttatttgactgtcttggccatgtcattttatggaagcatttttaaatagcactttttgttagtggtgtggaatttctgcggttatttttttttttttttgcaacagatgaagcaaaaaaaaaaaagcactcattggagaaatagtgagtgtaaaaagagatttattttgtacagacagcaaagtatcctgtgtaatgttgctgacataaagcactttgggggaaaaaagtggaaatctgttttccataaatcacacagactcttgtacatagttatatacactcacgtagagaaatgaactgcatatatcatactggatatggggccgattttactctagaggcacatctggtgcttattgtcataaatcttttaaagaattaggtacacttttttctattaatatgtatagttttgtgatttgtcacagttatgtttcatataatcataagttattttgtcttgttcatgaagtcctttttttatgtcaaaagtaaaatgaagggattgtgcacttggtacagaataaaactggaaatagagaagacgccctcctgcctaaaatcctccttcagcctgtcggtttaaaacacaatggcaaccatcattgtttgtttgtttgtttttttgttttgttttaccatcagcctcttacatactgggaatggtaattataattaaaggcagatgatgcgggagggaatgttcaagtccagctttaaaatgctgcattgctttgggccagagctgtagcctggatttaattatagatatgaggaggaaatggcagtaaaaatgaatgtctccctgagtcctttacatgttgggagtgtccataaataaaacatgaagttttatttcatcagatttaattaaagcttttatacatgt

SEQ ID NO: 283050 - DNA, 1000 bp, Homo Sapiens
gtttgaaagatgattcgtgcttattaaagaaatatggcctttcattgttatagtctatattttaatttttttcattctaaaatatgtgggataattcctagtgttgactgagaatatactcttaaataaaatgatacagctgggaggttctcttttaaacacagttcagttgcagctggaacactgtatttcagtttaggttggctgaatcttcaaagtgtcataggctgccaaattcagctttggtgacggaactggtttcctagtggaaatggtttttggctatcattgctttaaactcacctctaaaaacgcgttgctttgggaaagaacttgcacatttatgctgcatggcttctgctgctgcctttgtgtgtgtgtgtgtgtgtgtgtgtgtgtgtgtgtgtgttttatttgtttttcagagaatcaagtctcacactgagttactaacctggtcatgagtgactgaccgtgtctgactgccactcctttttgcaggagcatccccccggtccttcagaatccaaacacgctttccgtcctaccaacgcagccaccgccacctcacattccacagcctctcgcagcaactctttggtctcaacctttaccatggagaagcgaggattttacgagtctcttgccaaggtcaagccagggaacttcaaggtccagactgtctctccaagagaaccagcttccaaagtgactgaacaagctctgttaagacctcaaagtaaaaatggccctcaggaaaaagattgtgacctagtagacttggacgatgcgagccttccggtcagtgacgtgtgaggcagaagcgcacggagcctgcctgcctctgccgtcctcagtttcctttcatgaggcttctagccaaagatgataaagggggaaatggtttttagtgcgtatattatactgcctcttaggtgtactctttataagctggtaaaccaagaatctagggagtggccaaactaaatataatttcttt

SEQ ID NO: 283051 - DNA, 1000 bp, Homo Sapiens
ctccacccctgtcagggccaatggcgccatgtcagagtgccctagagtccatccagagtgcccgtgctgcccaggccccgcactggaagagcctccagcagcaagatgtgaccgctgtgccgatgagccccagcagccactccccagaggggaggcctccacctctgctgcctgggggtccagtgtgtaaggcagctgcatctgcaccgagctccctcctggaccagccgtgcctctgccccgcaccctctgtccgcaccgctgttgccctgacaacgccggatatcacattggttctgccccctgacgtcatccaacaggaagcgtcagccctgagggaggagacagaagcctgggccaggccacacgagtccctggcccgggaggaggccctcactgcacttgggaagctcctgtacctcttagatgggatgctggatgggcaggtgaacagtggtatagcagccactccagcctctgctgcagcagccaccctggatgtggctgttcggagaggcctgtcccacggagcccagaggctgctgtgcgtggccctgggacagctggaccggcctccagacctcgcccatgacgggaggagtctgtggctgaacatcaggggcaaggaggcggctgccctatccatgttccatgtctccacgccactgccagtgatgaccggtggtttcctgagctgcatcttgggcttggtgctgcccctggcctatggcttccagcctgacctggtgctggtggcgctggggcctggccatggcctgcagggcccccacgctgcactcctggctgcaatgcttcgggggctggcagggggccgagtcctggccctcctggaggagaggacgtccaggccctgatgtacctgagagggcagctggagcctcagtggaagatgttgcagtgccatcctcacctggtggcttgaaatcggccaaggtgggagcatttacaccgcagaaatgacaccgcacgccagcgcccc

SEQ ID NO: 283052 - DNA, 1000 bp, Homo Sapiens
acacctgctgggtggatccggctggtgccccatgggcgcctctgagatgcccctccccaccccatcagtggcgctgtctcacctgcaggctgcttctcacaggtggtcccccctcactcctcctgcagccccagttcctggctgttcattcttattgggacccgtcaccctcctggaggcggtcccagccgagcccccttaagacagcaccaggctggctccacttggcccccgctggttcagggaagtgctgctgcagccgtttagtttgacaaaggaggcagcgaggccgtctcattggtagccctctcctggcttgcccagccaccacctcacctcgattcctcccaggcctgggtccagcaccagcctaggaagagggtgccccatgctgtctagctcttcttcgggatggggggctccaggttccttggtattttgctttggcctttggagcctcagtcaaaactgaggaaaggtgtcattttcacatctcgtcacacgtacagtgactgcaactaaaagcacaggctttgtagaaacagacatgggttcaggccccagctccaccattcacaaggtgtgtggcttcctgcaaggtaccttcatctctgagttacctgactccatctgagtttccttcttgtaaaactggcatccatgaaagtggctaccttgaagggcgtgaagatgaaatgaggtggaaagtaggtagcccccgaatgagggaagcattgagtgagagctggccctctgacccttctaaaagaacacagccaactttttaaactgtctttccagaaagagatggaaaacttcgaagcccctttccactgccttgccaagcagttccaccagctgtaccgggagaaggtggaggttttccgggccctggcatgacgagctggagcagatcgtgctgcacaaccggagaagacagaattacctctgctcttttaatatataatgatggctttaaataaaattaggagaaaatgtc

SEQ ID NO: 283053 - DNA, 1000 bp, Homo Sapiens
tggcagggcacagggttgtccctccagttccctcctgagggctgtgccaggatgactgtctcatgccccctctgcattttgtcctggagtgccagcgagtgtgcacccccagtttccttccctggaaccctgcagagctcacagggcccaggacaccaacgccgcataggaccgcccacatgggaacgcccacatgggaccgcccacataggaccgcccacataggaccgcccacatgggaccgcccacatagaaccgtcctccagtggtgaagcggaaacacttagctttatccaccctccccactgggaactgggcacgcctgttgtgagtgccctttcctggaaggtgtttttatctggaagatagaatccaagtatttataactcattgtcagccaaatgctatcatgaacgtaggaaacttgatttttttgttttgatcatggcctctacatgcacctttccagagtggtctcttctcgggccctttttagtccctttccaaagctgcccccaccaccctgctcctctggcctcagtgcacagtggcccccagcctcggccaggcctgctctgctcagcgcccaccgcccaccacccctcctgcttccccgagcctgaccctgttccgcccactggcaatcagggctgcgcacttccctgtccacggtccccaggccttcctgtcttgtcccttttgatcattaactcagggtttcagctccaacctcgctgagttggtgcagctccgggtcattcctggggtgggaatcggatcatccctgactcagcttataccttaattttatttgcagaggattcttttctcaaaatgctctggcatttggacacacatcacatgtcgatatttgcataggagtcattttcagtggaataacatttttaatgtgtggttttacggttcaaggaactacatgatgattttgaggaaacacttgccagaaactaaattaacgaataaaagatttcagtgcccg

SEQ ID NO: 283054 - DNA, 1000 bp, Homo Sapiens
ttgctggatgtggtggctagcattcacctttccaagaggactgtccgaaggatacgcatcaacctggtcctggcactgatttataacctggttgggatacccattgcagcaggtgtcttcatgcccatcggcattgtgctgcagccctggatgggctcagcggccatggcagcctcctctgtgtctgtggtgctctcatccctgcagctcaagtgctataagaagcctgacctggagaggtatgaggcacaggcgcatggccacatgaagcccctgacggcatcccaggtcagtgtgcacataggcatggatgacaggtggcgggactcccccagggccacaccatgggaccaggtcagctatgtcagccaggtgtcgctgtcctccctgacgtccgacaagccatctcggcacagcgctgcagcagacgatgatggggacaagtggtctctgctcctgaatggcagggatgaggagcagtacatctgatgacttcaggcaggcgggccggggcagggacttgcctccactcaccacaagctgagcaggacagccagcagcaggatgggctgagctagcctccagctttggggacttccgctccctggatatgtccagtcatcctgccctgcagcacgcggccttgtctgggtgcagctgggcttggcctggagaggacggccctgcctgcctcttggcctcacgggaccgtcagcatgggctttgtcttggactctagtccttggctggactgtagaaggtgagaggcgagtcaccctcctcacagacctctgcttggagtatttaggatgactgctgtgaaatggagaacagtttcatcaggaccaaaaaacctcactgggcctttccagagaactgcagacctcactgtcagggtctttctgatgacgcctgtctgtgtgcatcatgtttctgagaccacagtttacctcaggtgtgcctgttgctttcttcctgcatagtctgttcctttcttcgt

SEQ ID NO: 283055 - DNA, 1000 bp, Homo Sapiens
ctgggacctgacaaggacagcaggttagtagacagagcaggtgggcaggagggaccttgacacaggatagggatcctgcccaatcatcgaagcattacggaccagaggccccctgccatctacctctcagccaccacctttgtctggcatcatccaggctcctcctacaacccatcttctgttatgttccttcctgttcctgagacccagggtctcctctttcttagttcacacctttgttttggtggagctttgtgggtgttctggtgtggaagataaaattctgacatgtcccatatctgaaacacattgtctagccctcaacattagattgaagtttggctggaagaattctttttattagtacagtcacagacctttttttatcactattgttggtgagctttttcagtttgaaattcacatctctcagttctgggaaactgccttgaaatttttttttatttccttcccttctattgctctgctccctgtttctgggatgcctcttacttggctattggcatctgggatgggtcctttaatgttcttatcttttcactccaattttccattcctttgtctttctactctattttcctggaaattttctcacttgtatctttcagaccttctgttaagattttcatttctggtagctttttttttggtggggggagggggtctcactatttcacacagactagagcacagtggtgccatcatagcttactgtaatcccagcactttgggaggcggaggcaggtggattgtttgagtccaagagttcgagaccaacctgggcaacaagagcaaaactacgtctcaaaaaaaaaaaaaaatacaaacaattagccaggcatggtggtgcacgcctgtaatcccagctactcaggaagatgaagcagcagaatcgcttgaacccgggaggcagaggttgcggtgagccgagatcacaccactgcactccagcctgggcgacacagcaagactcagtctc

SEQ ID NO: 283056 - DNA, 1000 bp, Homo Sapiens
atgtcccggcgaagagaagagacacattgttggaagaagcagcccatgacagctccccttcctgggactcgccctcatcctcttcctgctccccttcctgggatgcagcctaaaaggacctatgtcctcacaccattgaaaccactagttctgtccccccaggagacctggttgtgtgtgtgtgagtggttgaccttcctccatcccctggtccttcccttcccttcccgaggcacagagagacagggcaggatccacgtgcccattgtggaggcagagaaaagagaaagtgttttatatacggtacttatttaatatccctttttaattagaaattaaaacagttaatttaattaaagagtagggttttttttcagtattcttggttaatatttaatttcaactatttatgagatgtatcttttgctctctcttgctctcttatttgtaccggtttttgtatataaaattcatgtttccaatctctctctccctgatcggtgacagtcactagcttatcttgaacagatatttaattttgctaacactcagctctgccctccccgatcccctggctccccagcacacattcctttgaaataaggtttcaatatacatctacatactatatatatatttggcaacttgtatttgtgtgtatatatatatatatatgtttatgtatatatgtgattctgataaaatagacattgctattctgttttttatatgtaaaaacaaaacaagaaaaaatagagaattctacatactaaatctctctccttttttaattttaatatttgttatcatttatttattggtgctactgtttatccgtaataattgtggggaaaagatattaacatcacgtctttgtctctagtgcagtttttcgagatattccgtagtacatatttatttttaaacaacgacaaagaaatacagatatatcttaaaaaaaaaaaaagcattttgtattaaagaatttaattctgatctc

SEQ ID NO: 283057 - DNA, 1000 bp, Homo Sapiens; identical to SEQ ID NO: 195048

SEQ ID NO: 283058 - DNA, 1000 bp, Homo Sapiens; identical to SEQ ID NO: 195051

SEQ ID NO: 283059 - DNA, 1000 bp, Homo Sapiens
tggagagaaaccttacaaatgtgatgaatgtggcaaagtcttcagtcaaaattcataccttgcatatcattggagaattcatactggagaaaaagcttataaatgtaatgaatgtgggaaggtcttcggtctaaactcatccctagcacatcatcggaaaattcacactggagagaaacctttcaaatgtaatgaatgtggcaaagcttttagtatgcgttcaagcctcactaatcatcatgcgatccacactggagagaaacatttcaaatgtaatgaatgtggcaaactcttccgcgacaattcatatcttgtacgtcatcagagatttcatgccggaaagaaatctaacacatgtaattaatgtggcagagtgttcagttagcattaaagccttgtaagacatacaataatttatactggagaaaaactttgcaagtataatgaatgtagcagagcctttagtttttgttcaaggcttaataaccgttagctagaccatagaggacagaaactttactaatgtactgaatgtggcaaggtcttaaggtaaaatctgagaccaggatttttcaaagaattcttgctggtgagaaacctaacaaatgtaatgaatgtggcaaggtcttctggcacaattctcacattgtacaatattgcaaaaattcatgcttgagagaaacaaaaacactgagagtgggaaaccattatgacttcaaacattcatcaacatcagagaatccatactaaagagcatttataataattatatgtgatagagattttccacaggccaaagtctcactaggcatcaaaaacttttttgatgaaaccatacaaatgtaacgtgcatgcttaagcttttacccaggcatcaaaaccggaacatcacagggtttatactggagagtaactacacaaagataatgtaataagcctttcagtgtaatattcatgattttgtcgtgagagatccactcaataaaaaccaggcaaatgt

SEQ ID NO: 283060 - DNA, 1000 bp, Homo Sapiens
attgatcagagaacaaacggaccaggccttttgttttacaatttacaaggctgtattctattatatataagcatcgataaaaatatgcttctggccaggtgcagtgactcacacctgtaatcccagaaattttgggaggctgaggcaggaagatcatatggggccaggagttcaagaccagcctcagggagaccgtcttcacaaaaaataaagaaaaaagaaaaccacgttcccgtgggacagtgagatgctacgttggggatctatgtggacatgttgggggagtcgtgttgtaatgggggcaacgctaggctgctgttggtgaatgacgagttagaagtgaccaccagcttctcttccactgcccacaggtgtttgtcagcaaagatgtggccaagcacttggggttccagtcagcagaggaagccttgaggggcttgtatggtcgtgtgaggaaagggtgagccggggaagccaggaaggggctttagaaggtacaggatgagcctggactccaggagtccgccctggagctgggaggatggctggggggacggggtgggctaacacccagctgagtggagccgtcttgcagggctgtgcttgtctgtgcctgggctgaggagggcgccgacgccctgggccctgatggcaaattgctccactcggatgctttcccgccaccccgcgtggtggatacactgggagctggagacaccttcaatgcctccgtcatcttcagcctctcccagggtgagtatggcagcaggaggggaaaaggactgggacctgtccctgccccaaacacctggctgacctagctacttgcccctcctccagggaggagcgtgcaggaagcactgagattcgggtgccaggtggccggcaagaagtgtggcctgcagggctttgatggcatcgtgtgagagcaggtgccggctcctcacacaccatggagactaccattgcggctgcatcgccttctcccctccatccagcc

SEQ ID NO: 283061 - DNA, 1000 bp, Homo Sapiens
tttgccgtgaaaattccaaagagagcagatatttggatttgccctcctttgggcatctacctgactgttgtgtgtgtgggaaagtcagtgtgtatgtgtagagtgtgcttaggagtgagtgagtggtcaggcctcctggctaggtgtgttgtccatagttttgttgttgttgttgttgttgttcagagttttgaatcttacgttttctagagctgctcatgttttcccttcctttttgtcgttgtagtatttgacagttgtcttttccatcaaaaacatactggccctaggctggttagagcaaggggttatgcctgttaggcagcatcttacgcccagtgttctcccagatattctgcctaacaggtttaagtaggagattaaatagtcagtttatctaaaccctctatttttccaaactagcttgagaggtcttttcatctatttttactccatgggcctctgatatgctgagatgtggcacggttatgattatggtatcaccgttacagaggcaaagggataaaggtctaccagggccaacgtaaccagaatgtgaggagagtgaagagtcggtctccgctttgcacagtaccagaatgtgaggttgccactggagagtggagagtcggtctccactttgcacagttggagctgttctcctctaactcctttgctgggttttctgtttgaaattggcccctactcctctccagccctttactgggttttctgtttgaaattggcccctactcctctccagtgtctgctttttgaatccttctgttcgtgtgtgtgtgtgtgtgtgtgtgtgtgttccctatgatactggcagtggcaataattttccacccagagagaagcttgtggtccacaatgctcgaagaatgaatttccaagtatttgccagtggaaacggagcagaggctatgacaagagtgatttagtgttgcactttcagagcaattatctactgcagtaataaattgaaaatatcagc

SEQ ID NO: 283062 - DNA, 1000 bp, Homo Sapiens
tcatatgtaaatgatcatcacatttcgtgaattgaggccatgttcaggtgctaaggaagttcgccttttacacagaagattgagaaaatttcctagatataaatacagataaatcagacgttacagtggtgacgtagtaaccatcatggcaatggaaaggagtccaattcatagcctaaaacttcaaatgtattcttaggagtcagattttactgaatattttacccacaatagctgcctattttgttataataaaatatatataaatatatatataaaactttctttaaactgtaactatgggaattattttctttacatagttgcgcacacacacaaacatatatatatatttaaaatatattttgtttcttttgccacctactcctaactttttgtttggtttttaaattaaatattaattgaatagacttatcttccttaatcatgtgaactgaaaatgggggcatggtggtcatgaggaggaaacatttagggaaattagattataagtaaaagtgtgggcatattctcctcttttctacaaaggttttcaaatggttcctgaggttttttgttgttgtccgtgttgttactgttgttcttgtcatcaggtttgattttggtccttgccctttccttctagttctccttttattaataggaaggcaggcaaaagccccatttatgtgtgtgttttcccctcagacagctttcatccactgctctgcactagaattgcacaaatcttcatggtgagcaattttaagaaatgttagtgaaaggtagaaattatttcacaaatcagtttctctggtccttcatattaataataatatttggcttcccattgctctttggagttgtttattaaatatgtgtttttgacaacctcctcattagtttcttaaatgagtactggtttgtaaagaattatcaacattatccattccatttatgaagaagaggagaacagctaataaactgtattgtaaaatcc

SEQ ID NO: 283063 - DNA, 1000 bp, Homo Sapiens
taatttcatccctatttatagtttttatattaatttgtttttcttatccaagtaaagatgtcaataggaattgcattagtccaaggcctttttcataaactgagcctcttttcaattatttcaatgggacaggaactaggatagatgtgattcctgcatttttttaccttaaatctgcctttgtttctaaaggtagatcatcttgaatatttgcttaaaattgctagtgatttcattaccaagttacttgaaaaaatgttctatatgcatttaattctgaaatcagtctaccaaggggctgctagtatatgtcagacatgaaaactattttaaagctgactttgttgccttatcttgaaaagaatctagataggtgcttttaactggggtattaacttttttagaatgacacagctgaacagtgttaataatagtgtgtcaagattgcaaagtcgacatactcatttggtttaagcaggaatcctagaagcaaatggatggggataagaataggtcattttctattcaccatcctttactattaagggaaaggaaaagaacactagctaaggaagggaaagggaagtgatatcataaaagtagcaaccttcattttacattctgtctgtttttctttttttgctttgttttgtttgtgctaatttgggaattgtgtactccgaaacaagtagaaaagtgctgtttgagggattttattaaatctttttttaatggaatgtggtacaaattgttcatgttaccaaagcaatatttccctggaatttaattcaaagtttgtggcatacaacctgagccttttcttatataagacaagaatatgttcacatcttggtatgtggccatatttatagaatgctgaactcaatgtgcaagttatactgtatgcagttttgtaaataagtgaaaataatttgttgtactttttattcaattctgtatagattataaaattatttttattaaataaatattttacagt

SEQ ID NO: 283064 - DNA, 1000 bp, Homo Sapiens; identical to SEQ ID NO: 195052

SEQ ID NO: 283065 - DNA, 1000 bp, Homo Sapiens
tctcctaatattgcctttccttcctttttgcccttccctaatttgggagttcacccaacaggccaaaagataggctctaatagagaacacagtgagtcagaaccgtaattaaacaccatctcagtgtgcatgctcctccctggccgtccaggaggcttcagaggcatctgcttcctcttccttcccatcctgggcttcccagccacgtaccttgggcggctctggcttgaatgctgggggcgggctattgtccctaagttgatcgctgctagcagccctcctcatctgagctcgtggctctgggctgggtttccttatgctctacaagacataaaggttcattcacaacaagaacatccaagcagagagaacagagcactcgactgctttggaggagttctgcaaacttgagtaagtccagaagttgaggttctgagccggtgcttctttactgaacaggcagaaaccatcaccaaatgcttcagacacatttttaaaaactggctgcatccaatgtagagtctcttcctttaaagcacaattttttaagaaccctccaaaagtctaaaatctcttgtgtcactaatatccatgtctataggcatttggaagttaatttattctttacaagttgtctagcataaactaatttgttgctgtggtaatggtgtatttttctcccccttcagtttgttgttgttgaacttttttttttttttttttttggtagttctatttcataaagaaaaaaatcatttactggaatgagctaaaatgctagagagaaatccacagcaataattatccaaatatatgaacaatcccatcttcaaagatcattattccaacattctctgaggtgcaactaataattgctaacttggctgtgactttacagtgcctgtcaatgtgatttcaaggatcccataagctatctaatcacagtggatgcacagtacatgtgatgtgatcagatgaaggtttgatcatgaactcaatt

SEQ ID NO: 283066 - DNA, 1000 bp, Homo Sapiens
ctgaagaagcaaacatgactagagacgcaccttgctgcagtgtccagaagcggcctgtgcgttcccttcagtactgcagcgccacccagtggaaggacactcttggctcgtttgggctcaaggcaccgcagcctgtcagccaacattgccttgcatttgtaccttattgatctttgcccatggaagtctcaaagatctttcgttggttgtttctctgagctttgttactgaaatgagcctcgtggggagcatcagagaaggccaggaagaatggtgtgtttccctagactctgtaaccacctctctgtctttttccttcctgagaaacgtccatctctctcccttactattcccactttcattcaatcaacctgcacttcatatctagatttctagaaaagcttcctagcttatctccctgcttcatatctctcccttctttaccttcatttcatcctgttggctgctgccaccaaatctgtctagaatcctgctttacaggatcatgtaaatgctcaaagatgtaatgtagttctttgttcctgctttctctttcagtattaaactctcctttgatattatgtggcttttatttcagtgccatacatgttattgttttcaacctagaaacctttatccctgcttatctgaaacttcccaacttccctgatctttaagactttttttttttttttttttttttttgagacagagtctcgctctgtcgcccaggctggagggcagtggcacgatctcagctcactgcaagctccaactcccgggttcacgccattctcctgcctcagccttccaagtagctgggactacaggtgcccgccaccgtgcccggctaatttttttgtatttttagtagagacagggtttcaccatgttagccgggatggtcttgatctcctgacctcatgatccacccacctcagcctcccaaagtgttgggattacaggcgtgagccactgcgcccgggcaagaccttttttt

SEQ ID NO: 283067 - DNA, 1000 bp, Homo Sapiens
ctggctaggcccacaccagggcctggctgggagtggcatgtatgacgtgactggcctgctggatgtggagggggcgcgtgcaggcagcaggatggagtgggacagttcctgagaccagccaacctgggggctttagggacctgctgtttcctagcgcagccatgtgattaccctctgggtctcagtgtcctcatctgtaaaatggagacaccaccacccttgccatggaggttaagcactttaacacagtgtctggcacttgggacaaaaacaaacaaacgaaaaacatttcaaaaggtatttattgagcacctgcaggcgtgacctgacagcccaagggtgggtggggtgagggcttgaggacttgggcgggacacaggctccaaactggagcttgaaatagtgtctgatgaatgttaaattatctatctatctatttatttatttatttgagacagggaaagggtctccctctgttgccaaggctggagtgcagtggcgcaatcttaactcattgcaacctccaccttctgggttcaagcgattctctttattcagccccgggagtggcgcgcgccaccacgcccagctaatttgtgtattttcagcagagacggggtttgccatgctggccaggctggtctcgaactgctggattcaagtgatccgcccatctccgtctcccaaagtgctgggaattacaggcgtgagccaccaaacccggcctgattaaagttaaataaatactagttcccttctcgtccaaaggagcagggaatgggaaccgggaaggcacgaagtctctaaagcatccagaagacccctacaccagggtctggtccgctcctattcgccgcagcctttctgttccgcctgcaacccattttccagacagtaaaacggcggcgcacttctttctccgtcaggcaccaggtcataaggaacccaagagtctgtgcctctgaggcccaaattatttgctgtttcctcaggggagccg

SEQ ID NO: 283068 - DNA, 1000 bp, Homo Sapiens
ttccatccagagctcaatcccccacagaactgcccctggcaccactggcagagcctaacactggctgttcttcactcctttcctggcattcaacgcgtggggagctgcatctttgggccttggggctgggtcaaatgggtgggagcaaatgtggcagccccttaagcccactggctcccactctggaagctcttcgtcgcccttggtgtggccagcagggggcaggaggcacccgaggaatcagcactgacccaccgtctgggaaaggggggagggcttggggaagggatccgcttcccagggaggggctcctcagaggcacagctgcccctgctgctgggggtgacctcacaccttgcctctccaggccccccaccccaagcaggaaccccaggagatcaattttcccgacgatcttcctggctccaacactgctgctccagtgcaggagactttacatggatgccaaccggtcacccaggaggatggcaaagagagtcgcatctcagtgcaggagagacagtgaggctgcacccacccaggagtgtggccacgtgggcaaacaggcagttggccagagagcctggtgctgctgctgctgtggcgtgagggtgaggggctggcactgactgggcatagctccccgcttctgcctgcacccctgcagtttgagacaggagacctggcactggatgcagaaacagttcaccttgaagaacctctcacttcaccctggagcccatccagtctcccaacttgtattaaagacagaggcagaagtttggtggtggtggtgttggggtatggtttagtaatatccaccagaccttccgatccagcagtttggtgcccagagaggcatcatggtggcttccctgcgcccaggaagccatatacacagatgcccattgcagcattgtttgtgatagtgaacaactggaagctgcttaactgtccatcagcaggagactggctaaataaaattagaatatatttatac

SEQ ID NO: 283069 - DNA, 1000 bp, Homo Sapiens; identical to SEQ ID NO: 195054

SEQ ID NO: 283070 - DNA, 1000 bp, Homo Sapiens
accaccagttaacgtattagttgccaatatgccagcttggacatcagtgtttgttggatccgtttgaccaatttgcaccagttttatccataatgatggatttaacagcatgacaaaaattatttttttttttgttcttgatggagattaagatgccttgaattgtctagggtgttctgtacttagaaagtaagagctctaagtacctttcctacattttctttttttattaaacagatatcttcagtttaatgcaagagaacattttactgttgtacaatcatgttctggtggtttgattgtttacaggatattccaaaataaaaggactctggaagattttcattgaggataaattgccataatatgatgcaaactgtgcttctctatgataattacaatacaaaggttccattcagtgcagcatatacaataatgtaatttagtctaacacagttgaccctattttttgacacttccattgtttaaaaatacacatggaaaaaaaaaaaccctatatgcttactgtgcacctagagcttttttataacaacgtctttttgtttgtttgttttggattctttaaatatatattattctcatttagtgccctctttagccagaatctcattactgcttcatttttgtaataacatttaatttagatattttccatatattggcactgctaaaatagaatatagcatctttcatatggtaggaaccaacaaggaaactttcctttaactccctttttacactttatggtaagtagcagggggggaaatgcatttatagatcatttctaggcaaaattgtgaagctaatgaccaacctgtttctacctatatgcagtctctttattttactagaaatgggaatcatggcctcttgaagagaaaaaagtcaccattctgcatttagctgtattcatatattgcatttctgtattttttgtttgtattgtaaaaaattcacataataaacgatgttgtgatgt

SEQ ID NO: 283071 - DNA, 1000 bp, Homo Sapiens
tctcaacattttatggtagaagacttggacctcaagtataaaattatacgtttataatttttttaaaatttaaattataagtattgtgaattcacactctcaggctattgtctgacttgatctacgtctcataaagcctgtacctgagtggagtggaaggtggagtcttaggttaatcagttactgactctaccctcaccctctttcaattgaggtaaactttgctgtttttctttttcataaagcattttcaaattgttgagtttattgctgaaaaaaatctccatgactttacagatagaattacaaactaaatgatgtcttgtatttagaagcagagtacagacctaacgaactgttagattctccaccatcacttagggtttgcccagaagcaacaccagagaattacagacaacgcgcttttgctgaactgtccattttggtggttgtgtttttcagtcaaatataagcaggatgggcgatagagatatatttatatatagatacatattctatatatctaatgcctaaatatgggtattaaagggaaaatttttaaagtctgattaaatccaatatgacatgaaattaaatatatggattagtaaggaaaaatgttaaaaagtagagaggataccaagaagattaaactggactagccttatttgcaagtgaaggatctggtgctgctttcagatgtttatcttttatttttttcccttaagctttaatcttcgtcattgtcttaaagtcaactggtgtttcttgttcattgactttggtacgatggtgctttgcaaggatgtatttatgttataatggccaacatttggtcagcccttgtccacttattcacttccctccttttgtaaaataagtgctttaattataaactgtataaaaataccttgtataaaccccttttttgattattacaataaataagctgaattgtaacaaatgaaatttgatttttgtaataaaacagtggaaaagt

SEQ ID NO: 283072 - DNA, 1000 bp, Homo Sapiens
cacttgtgtaacgtagttatactttgctgcattttaattaaccttcaacagctattaaagtggaatgtaagttaaattttgaaggaaaggaaataaatgttttccatatttcgtcttgatttactttctgtatgagaacagctgtgtttttgataggtttatggtttgcatgagttcatatttaaagtgatccaggccaatgcatggctattgctgtaaatcttgatgtttatttctgccttgtaaagttctatcacggcctacctggaatttaaaattcagtagacaaattaattggtcctctgcacaacttttttaataagtagattattttacaaagaaatttgaacaaatttaattgaatcttttgtttagcttgcctctaagaacttttcttaataaagctcccaaaacttctcagcaaataaatctcccttaagtaggaaaactagatttcatatttgcttactttgaattaacagcaactttccacaggtaaatctgttcttgcaaagatgtgagcagaatagttaaaaataatatttttatgtttcatggttctaaatggaagccataaatgcagtaaatactatctgttgtttaactactttaatcgtcattttttacattttcaagtttattaggttaagaaaaacagggcagccttggaaggcagctactacagaaaactgcagttttgcgttaaagataaagtagtattttcagctccctgaaaaaccattcctgctgaaactgctgtagaaattgtgaagctgcatgagtggagagtattgaatctgtggttatagtagttttctcaggtttgtttatcttgatgtttgatgcactgtgttttatagttattaaaattgagtaatattatttctatgcagtgttatgtgtcattggccttttgtgaatgtgcatgttttaaactgcaaattttaaacattttgtcctctaattgttattaaaaatgaaataaactttaccattactt

SEQ ID NO: 283073 - DNA, 1000 bp, Homo Sapiens
catgcaaaaataataagtttatttgttatgacggagactgccatgatctcgatgcacgttgtgagagtgtatttggaaaaggtaatatctttttgttacatctcaatagcccttaacattgttattaacattaccaggataatggggaatattttcatatatataaaatgtggaatgttttatatagtataaaatgtggaatattgtttatatatattttattatatatataagcagaatgttttatatagtataaaatgtggaatatatatattttattatatgtataagcaaacatatacgcgctaattcttcttgttaatgtttatattttttccatctttgctgacgtataattgacaaaaattgtatgtatgtttttaggtgtatgattttgttttgatatatgtatacattgtgaaatatttgccacagttaagttgattaacatgcccatcatctcatatagttaccattttcttttttatcctttaaaagaatttttgtatctatcctttttgcagatttcaaatatataatagaatgtcgtttactaaagtcacattgttgtacattacatctcttgaacttatttattttgcataactgaaattttgtaccccttgactagcattttgccatttctccccttacctcagcctcttgcaaccatcattctactctctgcatttttgagtttgacaattttagattgtatatataagtgagatcatgcgttatttacctctctgtatctagcttatttcacttagcataatggcctccaggttcatctgtgttactgcaaatggcaggattttcctccttactctgactgaataatattgcattttgtgtgtttgtgtatatgtatatatctatataaacacagacatatatatatcatatttttaatacatttatctgtttacctaagctaaaagtgaactttcttctcttatactcagaacacaaataaaactctgactttcattccatc

SEQ ID NO: 283074 - DNA, 1000 bp, Homo Sapiens
taggaccagccttgtgctacactgccccctgagatctggcccttatgctgagagtgctatggggttggatggggagaagccacctagtttctatcttggaacctggtttctacctatagagtttctactgtggagcctaggatcagctgacaacagagccagcaatgcttccccttagtttgactgggtctcgacctggagggagaaggactaggctcagggaggaatactgaccccactatgcccccatctttcagttgtccggaattccgagtggctgccaggatgtcctggccatgactattcctgtgcttcagggtgcttattgcaaggacacacatgaagggaagggaagacacccaagaaaatactttccaggtacatggtcaggacttatggtgaactgagatgttgttcaggacaaactggccactcacaagacccgttcttcttgcaatccccaaatccccattctggattcctccttctctccattgctgcttattcctctacaaccccagctccgcttgctttttctactccctcccttctgtctctaagcagggactccacctggctcggtacatggagatccaatatggagcaccacttttgggcagagtcctcatgctgcgtcaactcataggtcactggcctcatgtccagcctttatatggaagtctttggatgaatttctaatttctgcaccatccgtcagccaggatagtcaggccacaaggcacaaagctcacagtgtatctcagaattccttactcagaatgttgcgaggggcctggcagacacttggaatctgctggaccctccccaagtcaatcgtttcaaacccatgcttaggacatgtgatctaagtaagagtgttttatatgatctgtaaattatgtatttgaaaaatctcacaaaagaataaaaacaaaaatcacaggtagtcccacactttaaatcccaattataaaatggaataaagttatacaaaatcagg

SEQ ID NO: 283075 - DNA, 1000 bp, Homo Sapiens
agtaaagttgtggggtaaaaaaaaatcagcatacaaaaatcagtagcaattctatacaccaataatgaactcatggaagaagaaaccaataaagcaatcccatttacaattgttatgtagaaaataaaatacctaggaataaatttaaccaaggaggtgaaagacctatacaaggaaaactacaaaacactgatgaaagaaattgaagaagacacaaacaaatgaaaaaacatcccatgctcatggatcgaaagaattaatattgttaaaatgaccatgctacctaaagcaatctaaagattcaatgcaatctctgtcaaaataccaatgacattcttcacagaaatagaaaaagcaatcttaaaatttgcgtgaaaccacgaaagagccaaatagccaaagcaactctgagcaaaaagaacaaagctggaggcaccatactacccgatttcaaaatctactataaagctacaataaccaaaacagcatggtattggtttaaaaaataacaacagacatagaccaatgtaacagaatagacagcccagaaatatattcatgtatttacaggaaacagactcaacaaaggcaccaagaacatacactggggaaagggcagtgctgggaaaactggatatctaaatgcagaagaattaaaccatacccctgtctctcaccatatacaaaaatcaccttaaaatgaatagacttggccgggcgcagtagctcacgcctgtaataccagcactttgggaggccaagatgggcggatcacgaggtcaggagatggagaccatcctggctaatatggtgaaaccctgtctctactaaaaatacaaaaaattagctgggtgtggtggcacacacctatagtcccagctacttgggaggctgaggcaggagaatcacttgaacccgggaggcagaggttgcagtgagctgagatcatgccactgcactccagcctgggcgacagagcgagactacaagactacatctc

SEQ ID NO: 283076 - DNA, 1000 bp, Homo Sapiens
atgatttaaaccttgagtaaatcacttgaaccttgaggttagagttactatatttgctcaagatgacaaatgtaggtgctttcttttttaaagaaaaatgacactagatcattaacaccttgagtataggacaggtaattgcctctgtaattcccagcgtctagtgtagtgcctggtccatagaaagctctcaataagtgtttgattacatttaatctcagagctcccttccaagggatactgccaagaggtaaagctccaaacctctactcttactgagagcagaatttcttagaatttccagaaccatctcctatgcttaagtataaattcttgtcagacacagtggctcacacctgtaatcccgctacttgggaggcagaggtggggggaatcagcagaggtcaggaggtcaagaccagcctgggcaacatagtgagacccatctctaaacaaatgtttaaaaattagctaggcatgctggcacacacctgtagtcccagccatttcagaggctgatgcaggaggatcgtttaagtccaggagttcaaggctgcagtgagctataatcatgccactgcactccagccagggagacagctggaatccatgtcttataaacaataataattaatttttaaaaaaagtatttatcatccacaccaatcctggggaagctaacaatccacccttaacacatttcagttttaaaacctggctgatctggaatagaactttgtccaaattaaattgtagaaatgctatggattcaagagtaaacctgcttgattaatcaaacaagctggaaaactactgttaatttctttgttgtaaattgatcactgtaattttaccttacatgtcatttatattttgtatatacatgaacattttaatttccatagcttttaacaggttgacataatacttctccatgcagtaagtcagtcattttttccacttgtaactgtaattcaataaaatttaatcctgtctggtc

SEQ ID NO: 283077 - DNA, 1000 bp, Homo Sapiens
taggctctctaaacctaaaacattgcatcctgagaattacatgtcacagtacatgtattctagaattctatttgttcattttgtcaaacttcaaaaagttttggatctgtattcatgaataatgtgtgactttgtttttattttattttaatttatttatggcagagcctcactctgtcacccaggctggagtggagtggcacaatctcagctcactgctacctccgcctcctgggttccagtgattctctcacctcagcctcccgagtagctggaattacaggcacccaccaccacgcctggctaatttttgtatttgtaatagagacgggttttccccatgttggccatgctggtcttgaactcccaacctcaggtgatctgcctgactcggcctcccaaagtgctgggattacaggcatgagtcactgtaccagcctgattttgttttttaattgtattatcttagtttggtttaggagtatggttctgctagccttataaaataaattggcaagcttatcattttctatgcccccccccaaatttgaataataaaggaattagccgtttctgcaagatgtgttgaactcatttatacaactatctgggtttgctttggaaatagctctttgattgctttatcaatttcctttagagttatcttttcaggtttgctactttctcaggaaacaatttggataatttatacttttcaagaaaatcaaccattccctttttctgaatatattgctatagagttgtacatagtatttcttataatttttgtaaaactcctaatattgtcaatagtgcagttttagtttctgacgatatattttaccttccctctcatcctcagatgagactggctgtgctgttttggcatacatcttacatttatatatgttataagccccacactaccttgtttttgttaggcagattcttaaataatagaaaattatatataatacttaagaaaaaaaaagaaaaaaaa

SEQ ID NO: 283078 - DNA, 1000 bp, Homo Sapiens
catgatattatctataataaggaaaaattagaattttattcctatatgctagtaaaatgtgaagtttgatttcttcatattttttattttcaaaatttctacaaccagcatacattatttaaaaacaaagtttaactaccttgaaatttatacattaaaaacattataacagaactcctaaaggaagaaaaaaatagaagtccataattgtctttaagattaaacctaaggatgttaaaaggaacagcattcaaatggtatttgattcggtttaaatccttttatttgtccactctaaaactacagaacatctgttacgtgccaagcattgtctttggtggtatggatataaaggtcagcagtgtaatgactttattctgaaggaattcagtctgatggaaaaatcatataaacaaggtggttactataaaacatggtacttccagtgccagcgatgtgaacaagacatttggggacctcttttgcttaaagatggtttcctggaggaggcgaaaccctgaggtgagttttaatttattccactcgtctctttggaaattatttagacttttttcttctgcatttagctgcagtacagcaatggcgatcagaaggtagaacagctgtatggctgcacattcccatcctccaaagccgatttattgcccctgctgcttccctgggcttctgctttcaccacgcagaatcggattcatcaacgttgactctgtggctgagagaagggcccagcagattaccaggatatgcttcacatcaagtaggagttgcaggagctgtatttgatgaaagtactagaaaaatactggttgtacaagatcgaaataaattgaaaaatatgtggaagtttccaggaggcctgtcagagcctgaagaagatattggtgtgtatcttttatatttttaattggcttaaaaatgttgaggaaattaatgtgtttactttcttgctttatagctaagaataaaaatttaaattttc

SEQ ID NO: 283079 - DNA, 1000 bp, Homo Sapiens
gtgttttgttttgctttgctttcttttcttaaatccctttaaaactgtaacaatatttttagctacaaaaacaagctgtgggctggatttggcccatggcccatagtttgccatttctgatctagtatgtcagttcctttgagctttagctgtcttctaacaggaatccatcacttgaagatcaagcttgtgaccgaatttaccgagtagggcagcagaaagatgttgtcatacacagatttgtttgtgagggaacagtagaagaaaagatcttacagctccaagaaaaaaagaaagatttggccaaacaagttctatcagggtctggagaatctgtcaccaagctcaccttggctgacctcagagtcctttttggcatctaacctcctgtggataagggctcagaatagcaccattgctggtttgtattaggatctgggaataacaacctaaccatgagccttgaactctgttctttgcatttcaatttcaccgtcaagcctttcaccttcctcaaaatgaggcataatcttatccccagaattgaggaggggttgtgttaaccaattagttaaccaattatgttaataatttatttaatgagtggtatggaaaccaattgatttttttagataaaagaatatgttttagagttggatgattttggaaaacaactctggcagaattgtatataagcttcagtaaagttcaaaaagcgggccaggtgtggtggctcatgcctgtaatcccgacactttgggaggccaaggcaggaggatggcttgaagccagtagttcaagaccagcctgggcaacatagtaagaccccatctctatgaagaataaaaaaatgagctaggcgtggtagtgcacacctgtagtcctagctacttgggaggctgaggcaggaggatcccttgagtccaggaggttgaggctgcagtgagctgtgattgtgccactgttttccagcctgggcaatacagtgagaccctgtctc

SEQ ID NO: 283080 - DNA, 1000 bp, Homo Sapiens
gctctcgtgtgactgaacgttttgtgatgaaaggaggagaggctgtctgcctttatgaggagccagtgtctgaattgctgaggagatgtgggaattgcacacgggaaagctgtgtggtttccttttacctttcagctgaccatgaactcctgagcccgaccaactaccacttcctgtcctcaccgaaggaggccgtggggctctgcaaggcgcagatcactgccatcatctctcagcaaggtgacatatttgtttttgacctggagacctcagctgtcgctccctttgtttggttggatgtaggaagcatcccagggagatttagtgacaatggtttcctcatgactgagaagacacgaactatattattttacccttgggagcccaccagcaagaatgagttggagcaatcttttcatgtgacctccttaacagatatttactgaaggaatctaggttgtattttcagtggacaatgggaataaagcatttctaaagcaccgactggagaggaaggcaacagagacaaggagagaagccgagagacatgtctgcgtgctgccacgcatctgagcgattgctctgtgaagagttgtacactgaacattttcaggggaggctgtttacccaggcaatgtcctcaaacaagcctgtgccggggtgtcctggaatctgtgccaggactgtgtttttagcccttcacctctcagctttagcaggacatgaaccagttataacaagatggccctgcagctggttacaagaatgtgacatggcaggatctatggaaccaaatggaaggttttgaggtgatgtaggtctttcacagttagctttggggaatacagaatactcaaataaagtgctttgttattatttcagagggaatggcgattgaaatgttacaacagagatttcttggtggtagctatttgggtaaaggtatatggatatttttctgtacatgtgaaattatataaaaataaaagttatataaatt

SEQ ID NO: 283081 - DNA, 1000 bp, Homo Sapiens
aggagaatggcgtcaacccgggaggcggaggttgcagtgagccaggattgtgcgactgcactccagcctgggtgacagggtgaaacgccatctcaaaaaataaaaattaaaaaataaaaaaagaacctggatctcaatttaatttttcatattcttgcaatgaaatggacttgaggaagctaagatcatagctagaaatacagataattccacagcacatctctagcaaatttagcctattcctattctctagcctattccttaccacctgtaatcttgaccatataccttggagttgaatattgttttcatactgctgtggtttgaatgttccctccaacactcatgttgagacttaatccctaatgtggcaatactgaaaggtggggcctttgagatgtgattggatcgtaaggctgtgccttcattcatgggttaatggattaatgggttatcacaggaatgggactggtggctttataagaagaggaaaagagaactgagctagcatgcccagcccacagagagcctccactagagtgatgctaagtggaaatgtgaggtgcagctgccacagagggcccccaccagggaaatgtctagtgtctagtggatccaggccacaggagagagtgccttgtggagcgctgggagcaggacctgaccaccaccaggaccccagaactgtggagtcagtggcagcatgcagcgcccccttgggaaagctttaggcaccagcctgcaacccattcgagcagccacgtaggctgcacccagcaaagccacaggcacggggctacctgaggccttgggggcccaatccctgctccagtgtgtccgtgaggcagcacacgaagtcaaaagagattattctcttcccacagataccttttctctcccatgaccctttaacagcatctgcttcattcccctcaccttcccaggctgatctgaggtaaactttgaagtaaaataaaagctgtgtttgagcatcatttgt

SEQ ID NO: 283082 - DNA, 1000 bp, Homo Sapiens; identical to SEQ ID NO: 114990

SEQ ID NO: 283083 - DNA, 1000 bp, Homo Sapiens
agaagaatggctgcttttgaatggggaggaaagaagacatttttcttaatatcctttttgtcccatctctaaaatgtataaatattttgatttggttttactttaatttctcattcataatttcgcaactgtccttttgggttgccctccaacacattacttccatttcagaaaccatatctgatttaatataaactgctaacttaagaagaggtgaatttgcatttacacttagacactttctaaaaacagggtgaacttaattgaaatttttcagtgttgttaagctattgttatagtagctgccctatagttacaaaaataaaaactataaaaacccatcccctatctacttaatccagatagcctggatttaacaaaaccaatagtataaaaatgtgtgtgtgtgttctgtgtgtgtgtgagagagagagtacttgattcattaaaaagtcctggaaacagctgttctaggatcttgtcatttttactaaaagtctcgtgcacatgtgaagtgccctctgagtttaaggtttggttaatactggtatatttttataagattgaaattgtgtccccatctttaacttaaacattttcattatcagggtcaatgtgctagaactgaattgtaacatttttaggcacagatggaaaaaaatgttattggctccttgaaaatgtgtgtgtgtggcgaggggaatagatccacaaaagcatgtatgtacttacaaaccaagctgtagagatcaagaaaagaacttaagtgttgatctcaagatttctaaattgtcaagatttacatggcattgtggtggaactagttaacacttagagcttttggtatgtaataactatttgctatggactgattaaatgtttcaaaagattgtgttcttcaattttggtgggttttgatttttgtttttttaactgcctctcagattatatttacttagtttaaatttctttgctttattcattaaagtataaaaacttc

SEQ ID NO: 283084 - DNA, 1000 bp, Homo Sapiens
gctctcttcacctgaacacatcgtgtttgacatcatctttgtgttgatgtttattacatagtaccacaaagcctgctccacacctggatggggtgcatgtagtctttggactggttatttctggttttgaagtaatcgaacaaattgaaaatctgaagaccgatgctgcaagcagaccatatgcagatgtgcgagttattgactgtggagtacttgccacaaaatcaataaaagatgtttttgagaaaaaaaggaagaaaccaactcattcagaaggctcggattccccttccaattcctcctcttcttcagaatcatcttcagaaagtgaacttgaacatgagagaagcagaaggaggaaacataagaggaggccaaaagttaaacgttctaaaaagaggcgaaaggaagcaagcagttcagaagagccaaggaataaacatgcaatgaacccaaaaggtcactctgagaggagtgataccaatgaaaaaaggtcagttgattccagtgctaaaagggaaaaacctgtggtccgcccagaagagattcctccagtgcctgagaaccgatttttactgagaagagatatgcctgttgttactgcagaacctgaaccgaagattcctgatgttgcacccattgtaagtgatcagaaaccatctgtatcaaagtctggacggaagattaaaggaaggggcacaattcgctatcacacacctccaagatcaagatcctgttctgagtcagatgatgatgacagcagtgaaactcctcctcactggaaagaggaaatgcagagattaagagcatatagaccacctagtggagaaaaatggagtaaaggagataagttaagtgacccctgttcaagccgatgggatgaaagaagcttgtctcagagatccagatcatggtcctataatggatattattcagaccttagtacagcaagacactctggccaccataaaaaacgcagaaaagaaaaaaggttaagcat

SEQ ID NO: 283085 - DNA, 1000 bp, Homo Sapiens
atgtcatttattattattactttaagataggtattattcatgtgtcaatgtttttgaatattttaatattttgaaaattttctcagttaaatttcctcaccttcactattgatctgtaatttttattttaaaaacagcttactgtaaagtagatcatacttttatgttcctttctgtttctactgtagatgaatttgtaattgaaagacatattatacaaatacctgccttgtgtctgagttctatttagttagcatcttgaaatttgtattcattttccagatggctagtttattaatgatttcccaaaagccataccttaaagataactttttaaattctgaagagacatgccaatgtcaaactaaacatgttctgtttttaaaccaacaaacatgttactattcattggacagatatcattttatgtataaatactgttcacatcactgggaaaatgtaaactttaaacataatgccacaaggtcactaatttctagcaggtaaaattataaggatataaattccaataataaaccaaatgtatttagagtatttattagtaaatgcaaggtgatgttagttatgatcagttatactctaaatatttaatttgttttataaaggtagtgaaaaaatgaaaatttgctatttattaaaaaacattaaatttcattccaaatgagataagtgatattactataacatctaagcatcatctgatttgatattccctaaaaaacatttggaatatatgctatctatagattcagtatctactacccatatttactttaccaaatatatttctcctcactgcataaggactactcttctcatattttcttctttgatgaagatatttttcaccaaagtttattttgtgatgccctcttggttttgatactttaaaatctgtggcacccgttctacatgaattatcaatatttggtaaattcaatctgtatttgttttgttaaagtcaaaaatctcattttcc

SEQ ID NO: 283086 - DNA, 1000 bp, Homo Sapiens
cttatgcctcagcctcccaggtagctgggattacaggcatgtgccaccacgcccggctaatttttgtatttttagtagagatggagtttcaccatgttggccaggctggtctcaaactcctgacctcaagtgatccgcctgcctcagcctcctgaagtgctgggattacaggggtgagccatcatgcctggccctgatcacttgactttttaatttttaaaaataaataaaaccttattttctggagaagccctgtcctgttggcacctgttctattttcttctgtgttccctacagcaggggacctcctcgcccacgacctgccccagcagttggagaggctgaagataaagaaaatcagcaagccaccagtggtccaaaccagccgtctgttcgccgtggataccggcgtccctacaattaccggcgtcgcccgcgtcctcctaacgctccttcacaagatggcaaagaggccaaggcaggtgaagcaccaactgagaaccctgctccacccacccagcagagcagtgctgagtaacaccaggctcctcaggcaccttcaccatcggcaggtgacctaaagaattaatgaccattcagaaataaagcaaaaagcaggccacaaccttaaccaacaccaaagaaacatccaagcaataaagtggaagactaaccaagatttggacattggaatgtttactgttattctttaagaaacaactacaaaaagaaaatgtcaacaaatttttccagcaagctgagaacctgggaattcctgcacggaagacaagagagtagcctctccagtttcagcaaccgctaggtttctattttttttcctggtttttactgttttggtaatatatatattgaaacaagaaatattaataccacatggggagaaccccaaccaaagaaatctgaaatatatagtaaatgcttttttttccgtttttgttcattttggatgctggtgctaaacctccaagtgtcatgattt

SEQ ID NO: 283087 - DNA, 1000 bp, Homo Sapiens
atttatatatttaatatatattatatataatatttataatatttgtttaataatatataaatatatatacttaatatatatatttatatttaatatatatatttatatatttatttatttttttgagacagagcctcgctctgccgcccaggctggagtgcagtagtgtgatcttgactcactgcaacctccgtctcctgggttcaagtgattcttttgcctcagcctcccaagtagctagtactacaggcatgcgccaccacgaccagctaatttttgtatttttagtagaggtggggtttcgccatgttggccagactggtctcaaactcctgacctcaggtgatccacccgtcttggcctcccaaagtgttgggattacaagtgtcagccaccacacctgacctgtgtttatgtttcttaaattgaggaaactattttagagtagattaaaaaaaaatgactcacctaaaagaggatacaaagatgaacacatcaataactacctttccttggaaaatttaaaacaaacaaactgaccgtgtcagtgttcagatttaattgaagtctcattttagggtcatgctgcattaggtacaagaaatacaaaaatgaactctgagaaactgaaagctaaaatgactgtgtttttagttgatgtgaaacaaagagaatgaattcttttaaagtaaaaattaactaatgtggaaaagatttcactgtttgagtgtagcagtaattgttggtaaaattccatgtaagagaacactggtacacaagacaaaccatcaaatttgtgattttttttttttgggaaaaccatattatatgataaattaaaattttgaatagtttttgtttactgacctgggactaagtatcctgggttttgcaaaatatggaggatctgtttaccttatcgctaatgggtacagcagagagtggctttcagttattttcaaagtgaactgaagagcctaactgccctctttgtttaggg

SEQ ID NO: 283088 - DNA, 1000 bp, Homo Sapiens; identical to SEQ ID NO: 114991

SEQ ID NO: 283089 - DNA, 1000 bp, Homo Sapiens
tggaaaatgatgagatgcctgctgacttgccttcattagctgctgattttgttggaagtaaggatgtttgcaaaaactatgctgaggcaaaggatgtcttcctgggcatgtttttgtatgaatatgcaagaaggcatcctgattactctgtcgtgctgctgctgagacttgccaagacatatgaaaccactctagagaagtgctgtgccgctgcagatcctcatgaatgctatgccaaagtgttcgatgaatttaaacctcttgtggaagagcctcagaatttaatcaaacaaaattgtgagctttttgagcagcttggagagtacaaattccagaatgcgctattagttcgttacaccaagaaagtaccccaagtgtcaactccaactcttgtagaggtctcaagaaacctaggaaaagtgggcagcaaatgttgtaaacatcctgaagcaaaaagaatgccctgtgcagaagactgtctatccgtgttcctgaaccagttatgtgtgttgcatgagaaaacgccagtaagtgacagagtcaccaaatgctgcacagaatccttggtgaacgggcgaccatgcttttcagctctggaagtcgatgaaacatacgttcccaaagagtttaatgctgaaacattcaccttccatgcagatatatgcacactttctgagaaggagagacaaatcaagaaacaaactgcacttgttgagcttgtgaaacacaagcccaaggcaacaaaagagcaactgaaagctgttatggatgatttcgcagcttttgtagagaagtgctgcaaggctgacgataaggagacctgctttgccgaggagggtaaaaaacttgttgctgcaagtcaagctgccttaggcttataacatcacatttaaaagcatctcagcctaccatgagaataagagaaagaaaatgaagatcaaaagcttattcatctgtttttctttttcgttggtgtaaagccaacaccctgtctaaaaaa

SEQ ID NO: 283090 - DNA, 1000 bp, Homo Sapiens
agagagccaaataaatctttctgtctttaaagacttgaggctgctctgcctggagagtaaccattcttttattcctttacttccttaacaatcctttcacttcagaaatctataaattgaaaaataaaacttgacgtcaagatatgtctgtgaaattcagtaggttttagatatgaagagacagtctgactcgttctttctggattcacacaagtagacttcattacaaggagaatattttaactgtatctgtagaatagtttttaaaagtacagccagcccagagtgtgttcagctgtgtgtgtgacggggcagaagcacaaaaatgagcgcaaatgagaatgagtctcaaatcctgtgtgaccagcactgctctgtgtatttattcctattgactgaggctgttcatgctactggccccaatgcagccaacatcactcattacctagcacatgacttatccaagattccctttaccatcactgctgaccttctgatccatttatgatgatttccctgtgtcctcagactcagcgagaggcttgaggtgcatttgcggaagaggaatttgccgtttgttataacgtcgctttgggtcctgcgcctttcgtggtacactccaccgggtctgctgccgctgagcttgcagaatcaagaaaaataagctcagaatttactttgagagttaaaagaaattcttgttactcctgtaccttgtcctccatttccttttctcatccaaaataaataccttgttgcaagatttctctctttacatctctttcacatttgatgtgtctttgtgtctcaagacacttgggatgcacttaccagaatcctaagtttttaaacaaaataaaatttgaaattctaggaatttcaagcaggcgtttaagcttcagactcaaatgaaggcccaaatcataccacccatctccccatccactgctctgtcttttcactctgcctcattttctctggatccactctcaaagagctc

SEQ ID NO: 283091 - DNA, 1000 bp, Homo Sapiens
cttttgtgtttctggaacagctacgcaaaaactttggcatcaaagtgccatcctgaccagccgtgggaatggctgggctgccaggccagacacgctaggttcttccaaagagtcccaagcccagcacctgctcctggggccacgacctccctggccgtggccacccgtcctccgcagcaggcccctgctgtccccccacctgctggctgagctcctcctggcctcgtcccctctcagctgtagctgcaccacccccgctctggctaccaggctctcccggctgggcactgcgtggcccttgcccctctcccgctggcagctcctcaggggaacaggggctaccagaggctgatttctcccctctcctgggccaggggaggggtattatccctgcctcctgcccccgatgcccaaagcagcatcttccagcactttccatcgaggacttgggtggcagagtgtgggtgcagcctggctgttgctcacccaagtgctagctctgcacttcgtgtctgctgagagcaaccagaccttccatgtcctcgggcagctgcaactccccgcgagaccccgcagctgggtgggatgaacaagcaacgcagaccacaagcgagtgcctgggagggagtggcccagggtggttctggagccattgtgggtgagggtcgagggccaccgaggtccccgcgcaccgctgcctgccctgcagtggctttaacagttagttttgccaaagcctctccactcaccagcaggcggtctctgtcttcagggattgtgcctgcgtccctcgggcacctgggcccccccgcttggctccctgggggaatggcccaggcgggcctgcggttcctccttagggccttctccccgacaaggagtccgacggggcggatgctgcatcctctgcctccctggtcgctgggcttcaccccacctgggaagggcagtgtgctctgtgggggcttgcaatcaataaatgccgggagcttgccacatc

SEQ ID NO: 283092 - DNA, 1000 bp, Homo Sapiens
aaaagagaagaggcatagaataatacagacagcatgctaactttgcatgagaaaggacaggagtttccctagactggtctccatgtagacgacagggaagcatggtggatgagaacagggataggagcaggctttcttcatggaaacctttctattgagttgttaggggttttgttgttttgtttgcttgcttttggggacagaaggggaatgatggagagggccgggccacgggctggccaggtagggagatagaggctggggagaaagcagagtggcctggccagacgctatggggatggggatggggcaaggagggtctcctccctccctctggagctgagggagccccaagtgtcccggccatggcacatggcccaggaaagcactaactgcagaaacccaggtgccacagcctctcgccccagtgctatgttatttttatttttgaatcgtgagaatgtattacctattcaaaaaactgaaatctaaattttacaagagggaggaagggaggaaatgagggagggaaagagagaaagaaaaatgaaactctaattgctgatgtgtggtactatagtagctggccaggatggatggggtagatagaataatgccctccaccccccactaatgatgtccacatcctgatccctgggacctgtggatctgttaccttacatgcactaggaaggaattctgtgggcatgattaaggtaaggatcttgagatgggaaattatcctggatcatccaggtgggcttgagtaatcacaaggcccttgtgagcgggagacaggagagaagagaggagagaagatgccacactgctggctgtgaagatgacagaaggggccacaagccaaggaatgtaagcgacctctagaaactggaaaagacaaggaaacagattttcccctagagcctccattaggaacaaggccctgaagacctcagatggtaagagaatgcaatggtgttgtttgaggccactaagtttg

SEQ ID NO: 283093 - DNA, 1000 bp, Homo Sapiens
ctggagggactgctgggctggggagggactggccatggagcagggagctggatgccagcgggacctcagacctggactgcagcatctctttggttatcggttgtgtgtgtgctcagaagggaggaggccttccccttgttacatctctctctccatatattctcccggactcatcagtttggggggcgaaaagtccaccacatggtcttggcgacaaaccactggggatgtcaccccagctgcagagctggaagcttgtgccggaggggaaactgggtgagcaagggaggggcgaggcctgcctgtgctctcctcaccactgctgggaccagaaaagatgggcacctgatagctcagctgggcagtcccaacgcattcccactcagccaagggcctgagccccaggccattctggttgtgtcttttcagagcagtgagacctaaaacagatgggaagaagtcatgaacttgggagtcaggccgcttcacctgtcttctcaccccacaggctcccctgagcctggcccagccagcagctcacccagcctcaggcctcctggggggcagcagccacactgcccgtggcgctctgcgccaagcactgtccagggatagtcccgctgatgttgtggatggcaccataggtctgctgctgctgctgctgcggagacagtgctgtcctctccgaggccaagccgttcagaatccgaggcacgtagggctgtcagcaaatggatttgtgcttggcctggacaggcatgagcttccacactgcatccctcccctcctgcccttctcccaacaggacacagacagtggccataaaggacatatgaagaaacaccgacatccatttaggacattaagaccgaaaatatgacacctgcagaatttcctagcagccagggcaaaagagaaagcacagttatacagttctcatgatcacagaaggaagcacaagagagcagttctcagaggaaactaaacttcctagccctgg

SEQ ID NO: 283094 - DNA, 1000 bp, Homo Sapiens; identical to SEQ ID NO: 206388

SEQ ID NO: 283095 - DNA, 1000 bp, Homo Sapiens; identical to SEQ ID NO: 206390

SEQ ID NO: 283096 - DNA, 1000 bp, Homo Sapiens
cacaatgtacccctccattctgatttggtggccagaagaattgagattcttgggccaggcacgatggctcatgcctataatcccagcactttggaaggtcaaggtgggtggatcacttgagaccaagagttcgagacaagcctggccaacatagcaaaaccccatctctactgaaaatacaaaaagtagccaggcatggtggcacgtgcgtgtaatcccagctacttggcaggctgaggcaggagaatcgcttgaactcgggaggcagaggtggcagtgaaccgagatcatgccactgcactccagcctgggtggcaggtgagactctgtctcaaaaaaaaaaaaaaaaaaaaaaaattgagattcttggatagcaagcccattatttaacatgtaagcaaattattcaaaaagcttaaaacatacctatcaaaggttagactccttattagtattccgcttaatcttaatttgttcaacaaaccattctgagttcaaatagaggtccaaatcaactgtataaaagataactttgagatgaggaaaatttaaatgggggctctgttttctttctttctttctttctttctttctttctttctttctttctttctttctttctttctttctttctaacttttttgccagtgacacaacctcagaagttcctgagaacatgtgtcccaattccatttcagatgctgataagaaattctagttaattttactaggtataatgatggcatggtggtgtagttattcttcagtgcttccttatgcattcgtgatagatgcaaacagaagtttagggtgaaatagcacaatgcctgggattaaccttaaaaaacttcagcaaaacaatttatcttataattttttataaatattatataaactttatataaataactatatatctatatatatatatcaacaagatcagcaaaatgttgagaattgctaaagctaagtgacagatacatgggagtccattatacca

SEQ ID NO: 283097 - DNA, 1000 bp, Homo Sapiens
tgagtctgacccgcccttttttttctttttttaaataaagcattccaaggtgagagtaacattgaaggcatcgtttagaataacgttcgagtctcagagtctcaaggacagggctagagatctgacctctttctgttgaagtccagacctcagtgaagagaaaagtctttggttaagatcaaagtcaaactcttagattccccaatcaagtgataccaaagggtcactgctggtggtccttcctggctctggagttgaccaaaatgcccatgggagacctggatgttgactccaaaaagaacacctgccaaacaccctgtaatccctttaccctgctttacttttcaaagtacctatcagcacctattatagactttatttttgtctctcctactaaatgcaagttccagctgagtaaaaaccttgcctgttttgttgagagactagcacagtgcccaatccatggtaggcactcactggctgaatgaatgaatgcatctcggagcttacccgggctgcaggccgtttcttctcatctcagaacactatccttttatcatctctccgtgccccgccttccccagctcccttactcttctccctgtcatcatgccttcggtctgtccatgcgcttgcatcacggtcctctcaatcagagtgattttgcccctgcaggggacatctgacagtgtctggagacatttttttttcgcttgtcacaacccagagggaggcgcggtgtgctactggcctggtaaatagagcccagggttgctgcacaacatcctataatacatagaatagcagcccctcccacctcccaacaaaaaactatctggccccaaatgtcacagtgccaaggctgtgaaacactggtctggacagaaacatttccagacccatgtgttatatggaaacatcccttagtccctgacacttcaaagttctgttcttgaccccatgggctccctagggacatctccatcaggaagatcctaac

SEQ ID NO: 283098 - DNA, 1000 bp, Homo Sapiens; identical to SEQ ID NO: 206973

SEQ ID NO: 283099 - DNA, 1000 bp, Homo Sapiens; identical to SEQ ID NO: 206975

SEQ ID NO: 283100 - DNA, 1000 bp, Homo Sapiens
ccagccagtggcagctgctgaccttctggccacagagaaaggacagacacatggggaataatttacaaacacaggccaggagacaaaatccatatcagcgaaggcagagtgcacgggcagaaaatgtaagtattgctgcgagggccaaaaataaaatgttggcatgtaattgtggcagccaggaagcaggctgcagcaaagggtgtggaaaggggcctggaaaagggcctggtgggctggaccggcccacgtgcccaagccatgaggtcctagaatgccaccacgactctgggcgccatctctgggaagccccaagtcctgggcaccttaaatctccagtagctcccagaacaagggaccttgagcccccctgcccttgagcatctgtcttggggtccagccctacccctaccccacgataatcgtgacctcactgccccaaacctcagactaagctcaggctcatggctgctgggcagagcagtgctcctctgctggatgtggacacgtcccaaatcctagcacacttatttaccaggctgtgcggtggcaccagacaaccgcattaaaggggaaccttcttcctttctgcgccaggatttgggaattcgtatgctctatgaagaggtgggagagaaaggaggggagttcagggtgaggggagctttttgatcttggagcctggagaaaaattccacatacttagagagtaattcaattgaacactcaggcaatgagcagttctgtagaggattcgtgtgcaggatttaaagttgaataaactgggtccctgtctgcaagccattgacaatctagtcagggagacagatgtgttctgataattaaatcagggcagaacaccattaaggatgcagagatgcacccgttacttgttattcattcagcatccattgaacaaatgtgtgctaagcagagcaattttttaaaaaaattcccagtttatgtgcaccttggatgcacacgatgcaacttattcttt

SEQ ID NO: 283101 - DNA, 1000 bp, Homo Sapiens
aaatttccgtgtagagatggggtctcactgtgtttcccaggctggactcaaacacctagcctcaagcaatcctaccgccttagcctcccaaagtgttgggattacaggtgtgtaacaaccatgcccagccttcctgggttttaaaatagcatttactaaattccaaacaaggaatatatgatcattgaaagagttggtggaatcatttgactttctttttattcttttcacctgtctaatctttagtatggaatctctctctagcaccatgttgggggtgagcagggaagatgtggcagatttggaataaggtagtatagaataaccgatgacctacgtggccagttaagttttatggcttgacccattcccttgaataaggaaataattctaaatccatataggttattgtaaattataccaaaaatacttagttttaattagtgtaatcttaaatttcaacttctgtcatccaaaaatactctgctcattacttgaggggcattgccatagccatttacggtaaagcattctgttacatgaaatgaagacaactgtacagtttatacgctgtataatgactttggtcaatgacagactgcatatatgatggtggtcccataagatcataatggaactgaaaaattcctgtctaaagacaaaggcatcgtaacatcttagcacaatgcattactcacatgtttgtggtgatgatggtgtaaacaagccgcacagtaggctgcatgtagaagtatgacacatagaattatgtatggtacatgatacttgataataaaataccatgttactggctatgtgtttactatttatcattattttaaactgtacccctacttacaggaaaaaaggtaactgtaaacagcctcaggagagtccttcaggaggtcttcccaaagaagaccttgttataggagatgacagttccctgcatgttatggcccttgaagaacttccactgggacaagatatggaggtagaa

SEQ ID NO: 283102 - DNA, 1000 bp, Homo Sapiens
ggcctgctcaggggctcctagcagcccaggctccgccccactccagagacgcgggagtggggagtggatagttgggggagctaaccaggggagttgatgcttcttcccaatccccagaaaggcgaatttggggtgtgagcacccagaccagcccttcccagagggactgagagtgaggaggctccctctcagggattagtccccactctgaggccggagtgctcctggcgccggggcggagctgagctccagaagtctgggcgcgcacagctggagggtcacgtggcacggcaccggtcccccttcctgccaacgctgcatttggctcgggcccggtccatggcggcccctcggaccctgcgctgagccccggaggccagggcgtccggggctgcgccacttccgagggccgagcgtgagtgtcgggaccccagggcccgacattgaggggatggcagggtggaagggattcggcctcagcgcgagggaggcgggcgggggaggggccgaggctcccagtctccctgcccggccctgggtcgcagtcctgggccggagctgaggccgcgggggagttggctacatgggtgaacttcttgtcccttcaggctgccggtcccggcggtgcgacacggccgggaggaggagaacaacgcaaggggctcaaccgtcggtcgctggagccccccccggggcgtggcctcccgccccctcagctggggagggcggggctcgctgccccctgctgccgactgcgacccttacaggggagggagggcgcaggccgcgcggagatgaggaggaggctgcgcctacgcagggacgcattgctcacgctgctccttggcgcctccctgggcctcttactctatgcgcagcgcgacggcgcggcccccgacggcgagcgcgccgcgagggcgagggagggcggcaccgaggcccaccccccggaccccgcgcgttccagttacccgacgcgggtgcagccccgccggcctac

SEQ ID NO: 283103 - DNA, 1000 bp, Homo Sapiens
acagtggtgtaatcatgtctcactgcagccaggaattcccggactcaagggatcgtcctacctcagcctcctgagtagccgggactacaggtgtgcataaccgtgcctggccagttttaaaatttttatttagggacagagttttgctatgttgtccaggctggtcttgaactattgacctcaagtgatcctcccaccttggcctttcaaagtgctgggattagaggtgtgagctgccacacccagccccgttctctcttttgcatctatattagtctctgtgctcttgggaaaagtggaccaatatcatttcaaaacttgatgaaaaagaaaattaaaatctcatcctcgggaactgaaatcacaaaccacccagcaaggtccacacctctaggagactggcatttagaagacaggaccacagttgaagcaacggttctttctttaccctccctgcctgtgacagactgcatgtgctgattatccctgcgttttctgcagagcttgccttcctggtgatacagtactttattttattctgagggccccttcctgccaggggatatctgtcaggggatacataaaactgcacaaaatggaacaagttataggtcatataaaatttcaggacattgttgagaaggagaagttgctaaattggagacaccatgatgtgaaatcccagggtcccagaatattgatggaactagtatgtttttcttatgtaatattttatggtgtctgggaaatggagttgcctaagtgaactcattttttatgtctaggggaatagcaacataactatcatctaacactaaataaagaggagcaaaatgtgctacatttagaaagtgatggtattatccccagctgaggcagacttagtgatggtgttagaaataaagtatggtaggaggctgaggcaggtggattgcatgagctcaggagtttgagaccagactgggcaacatggcggaaaccccatctctacaaaaatcca

SEQ ID NO: 283104 - DNA, 1000 bp, Homo Sapiens; identical to SEQ ID NO: 114993

SEQ ID NO: 283105 - DNA, 1000 bp, Homo Sapiens
agatgacacatagagaacatacacatacatacaaattagtgcatttgtaatttgttaaatttgaaatgaactattaccttgaaatatagtctttaaaaatttttaatggttaaagattaaattgaatgaaactgtagtctaatggtaactgatgatctgaatccgtctctctgataacctcctttccattttgaaaatgtgtcttattatacatggaagctagtaactacgtgaatgctgttggcaggatgagggtctgggtacctcagtctcttgtcctgtttccttcccccaaatccaccattgtgaagttgccaaccccctgccgccttcccctgccaagtacatgttgtcagagtcagccctataatgttcatttcccctcttgtttgtgggattatggatctctgcagaaatctgcatgccaattaacccatttctaaagcagaatccattttgcatgtcacaatcaagatgtacttggcaatctaagacacactgggagactgtaagaggaattaatatagaaaagctcttaattataataacatttggaagaaatttttcctttgttttgtaaagtggctaaggttgtaggagtgtgtggtatttattaccttttaaatgaactgtaaatttgccttagaaatttgtttaaaaggctagcaagtgagacccttgaggatgatcatatactaataaagattaccaaaagaaacttcttgtcctgttaggtcagtgttatgatttaatggttttaattacttaaccaattttaagaattgacaatttttaaaaatatttttttctaccattctaaagtaatgtcttttgttgtgggtttatgtgtaactacaggattttggaacataaacattttgaaggatagtcaatggtatttagtcttggatataaaaatagagaaaatttatagctttatgttattaaaataatttatcacacagagtgatttgaggttttcgcagagtagatttgtttg

SEQ ID NO: 283106 - DNA, 1000 bp, Homo Sapiens
ggaaaagctggcttggtcctaatggctgtttctctgtacctttcccctcccttaccaccttaagcccaatccaggtagagaatagggagaggcattctcctctctatggatttgaagtgaatcacccccacattattctcacatgcttttcttctctcacatattcctccctactcccccacccaatcattgtgcttatttgtacagatcttattgggaatattctttatttattttgtcatttcacttctattttaagaatgcataattgaaggagtagtcattttcagggagcaccaggtagaccctgggaacctaatgacttaatccttaaatatgttttgcccttgaaaaataggccttttccttccttccttagttataattgtggaagctaattaggatggcatggaagtgaatctaatgagttaggtattattaatgttcttggtatcgggtctaattccagttactgcttcattctctttttaaagctttatgaatacttcccccatcctccccaaggagagctcaatacacacatatttttattttattctctcaaaggaatattagcttaggaagataggaattcaacattgagcactgagttttcttctggctctgtcattgatacactgtcaaaccacagcctcatctcttaatctatttaattaaggtaacagtacatgttctcaagggtgttgcaagtaagtgtgcagctatcccttggagagcctctctggaaagctcttttagtgcagtgttgttatgctgaattgttttccattatcttatttgctgagtagaaaatattaatgaaattaagaattgttgagattatatgaattgggctagaatactaaggggaaaactatgttttgaatagagtttggcatttttgaccaagaacaaaattgagttttcattggaaagaaaggaaaccttgattcttaccattgctgctccaaaggaggcccaggttaagaggattagagga

SEQ ID NO: 283107 - DNA, 1000 bp, Homo Sapiens
tattattacattgtaatatataatgaaataagtatacaacttatcatcatgtagaaacagtgggagccctgagcttgttttcctgcaactagatggtcccatctgggggcaatgggagacagtgacagatcatcaggcattggattatcataaggagcatacagcccagatccctcacatgcaccgttcacaatagggttcacactcctatgagaatctaatgccaccactgatctgacaggaggtggagctcaggaggtaatgtgagcaatagggagcggttgtaaatacaaatgaagcttcgcttacttgcctgccactcacctcctgctgtgaggcctggttcctagcaggccaccgaccagtaccagtccgtggcccagtggttggggactcctgaactaaatgatgcaggacctaaaggaggaagcatgttgggaatacactagtggaagtggaagctattccatcagtagagagaaccctcagtgaggcaggtggaaccaggtcacagagagccttctataggatgacataatgggctttttagtttattctatttaattgggcagcattggagctttttacacactttctccctcatttagttttaaccggagcaactggttggctgggggtatgatttgcttgtaggaaggtggatgtgaggtagaggtaatgggatgaattgtgcagttttggccacacaaatttgagatgctcctcggatgtcccggtggggatatggagcagggcagttggttgcatgggtctggatcttggaagggatcagaggaggagaaatttcagaatccccagcatatagatggcgtttgaggccacgggaccagctgatatcatttagggagagaccggagagagagaaagggtttgaacattgagtgccggggtgttctgacatgcagaggtctgggaaagaaggagcaaaggaattggaggagtgacccctgaggtaggcacaggcagcgagtgtgtctgt

SEQ ID NO: 283108 - DNA, 447 bp, Homo Sapiens
agtgagtaccagcctatttgagtgtaggaaggagaaaaatctgtgctcctgctcctgggtactgggcaaagaaaccctttggttggggatttttgcctggtaccaactttataggtgccaacaagaaagaaagaaaaaaacacatacaaaataaacacccaacagggagattcgctgtgttaagaactcgagctgttgctattattctaagagactgggtagccagtcaaagggttaaaacagcccttcctacaaggatttgaaaactctgtgctctgctcttcctcagcagacttctcgttgaaaagcaggtgatattctcagtggagaccaggacaaggaacagaaagacccttactttgtggagaccccctatggttatcaactagacttagatttcctcaaatatgtggatgacatacagaagggaaataccatcaaaagact

SEQ ID NO: 283109 - DNA, 1000 bp, Homo Sapiens
caaattcaaagaaaaccctaagtgtggatgttcagaattttggaaaaatgtcactgaagtgattgaaagagtgcctggcatgcaaggataagaggttcttttacataacatttcctaaatgcttaataaacgtttgttgcacttggttttgacattgccaatggggtttgaaccagtgctctctctaaatgaagaattgctgataaataagtgaaaatgtagttttgacaaaacaactgagaatgtggggttttaaaggaagtcccaggcttgtgctgcacggaatccatggtgcagggcacatgaggacccccaggtaagcctgtcctgatggcactagctcgtggctctttcagcttctcgtgcattgtggagttgtagagaatgacatttatcgaaagttcaacctcagcagtggttccaaagctttattatgctttgattttcctaggtagggtagtaccaactttacagtcaagtttcaatcgacagaaaaatgagagtctgaaaaatgatatactttttcttttaaagaacactgtatcggccgggcacggtggctcacacctgtaatcccagcactttgggaggctgaggcaggtggattgcctgaggtcaggagttcaagaccagtctggccaacatggtgaaaccccatatctattaaaaatacaaaaaaattagccaggccgtgttgccgggcacctgcaatcccaggtacttgggaggctgaggcaggggaattgcttgaaccagcgaggtggaggttgcagtgagccaagatcgcgccactgcacgccagcctgggtgacagagtgagactccatctcaaaaaaaacaaaaacaaaacaaaaaacactgtatattaattttgatcagagaatcaaaatatagaggtgattttttttgtaaaaataagtattgtgttgctaagcagttcacattcaaccaagcacttgcaaggtcagtctcacgatcagccaccagcaggggccggtac

SEQ ID NO: 283110 - DNA, 1000 bp, Homo Sapiens
  misc_feature (1)..(96): n is a, c, g, or t
  misc_feature (478)..(577): n is a, c, g, or t
nnnnnnnnnnnnnnnnnnnnnnnnnnnnnnnnnnnnnnnnnnnnnnnnnnnnnnnnnnnnnnnnnnnnnnnnnnnnnnnnnnnnnnnnnnnnnnnnactttaaagtatccatttctctcatttgtagtaaaataagtcctattacatcaaaaagattctttacattaacctaataatcatattttctttgaaatagctattggtttaaaatatcctgaaaagtaacataaaaccatatggtgtccctagctattaatggaagaatgtttggaaacctacaaggcctcacaatgcacgtgggagatgaagtcaactggtatctgatgggaatgggcaatgaaatagacttacacactgtacattttcacggccatagcttccaatacaaggtaagagctatccatggcaattactcttgctctgtttgaaaatgttttaatacaagtgaagaaaatattttctcagagagacttatgannnnnnnnnnnnnnnnnnnnnnnnnnnnnnnnnnnnnnnnnnnnnnnnnnnnnnnnnnnnnnnnnnnnnnnnnnnnnnnnnnnnnnnnnnnnnnnnnnnngcaatagaatgagagatttttaaacatataaaaagcagaaaaatataaatgaatcaggagtaaagtaacattaaaaattggaatacatttaaagaaccatctactaatttctaaccatatattatttttaataatggtcttaaaatttctttttctatagacaccaaatctggctgaatgaaataaattggtgataagtggaaaaaagagaaaaaccaatgattcataacaatgtatgtgaaagtgtaaaatagaatgttactttggaatgactataaacattaaaagaagactggaagcatacaactttgtacatttgtgggggaaaactattaattttgcccaaatggaaagatcaacagactatataatgatacatgactgacacttgtacactaggtaataaaactgattcatacagtc

SEQ ID NO: 283111 - DNA, 1000 bp, Homo Sapiens; identical to SEQ ID NO: 195015

SEQ ID NO: 283112 - DNA, 1000 bp, Homo Sapiens
ctcttgagtttctttgtttgttgtcctgacctgccccagcattcttaatgctaaaggaagtgggtacagttcttcaacctgtgtcatggtggagaggtacaacttataagtctatctgggccccgtgtatggtttccagccatgctctccgctcttggtgcttcagctgccaggtgagcattagatgtcaggttagatactgggttggaatcactcactgttaccttagaagggtagggaggattgtgggtagaagacgtctggaggtcagacatgggaggtttatggatgagaggacaatggaagtgaacaaaaagccatgggagcctgaaaactgttggagaaaagcactttgcggctccagcactgaatgtatctgctgtactctacctcctaccagtgattgatcagataacagattcattgatattatggtgattcagcaccttgcccttgtgcctgctcctaactgtacctgagatactattacacagccagatgtggtatcaaacattcccctgagaggggtgtgaaagcaggaattctggcctctccagctaacctcagctgctaagggaaagggtacccattgggtttcaatactggcatgagagatagactacacactccatgtttcataggacactgccttgtatttgttcatctcatttgattccaaatgcatcccactaaaatcaagtggctgtatccccttttagatacaagaaaaccaaggtccgaaggagtgaagttctggctcaaataacagtagggagcagagctgagattcaaattcaaggccgtaacacgtaccctaagaagttccattaatttaaaaacactgctattaaagaagtgttgtggagttgagaagtggaagaatgaatatagttgaggatactctgttcataaacctgaccagggcctgctttgttgttttggaaatgagttgaaggcagaggttctgggggccacagtggggcttaacatacaaagcgat

SEQ ID NO: 283113 - DNA, 1000 bp, Homo Sapiens
atttgcgtacaggtttttgtgtaaacgttacttcatttcgcttgacttcagtttgatgaagtctagtttaatcagtttgttctttcatagattatgcttttgtcatatcttcactaagatgttctatcctaagagaaatcttcacttagcccaaagtgtaaagacttctcaagtttcagaattttttgttttatatttatgtctgtgatccactttgagttaactttatgtgtagtatgatataggtgttgagttttctgttttaaatgtgtccttattgtaaacacagacacacatatataaggcctaaataagacagttttcatttagataaattagggaaacaatttattgtgaaagggacacaactcagtaagtctgttttttgtccccctaccttttagtatgtggcatgaacacctggtcaggtgtagatacctagagctccttcctaaggacatttctgttgcctaaccatcttcccacagcactgagcatggtgcagtgagttcattcagatggccaagctttagggtcagaattctgcttttgcccttcccctatactaacgttacaatcaacagaaggcttagtgaacatccactaatgctgcgtgagtcagttcctcctcttgacctctgagcaagtacttaatgcagtacacaaggcactgagcagatggagatgactcaggtgaggagacacagacgttgacactgggtggcttccgtctagacagggagcagttggctaggaagggatgtggcagtaaatgcaggaaggccacctagcaggcagatggggagtaagttttcggttttcttgactcgcagtttgaaaaccatttactggatgggaagccaggctctgttttccgtccaatttgcagaaagcaaaccagagagctgtgtacacagatgcatccgggcacacgttactgcggctgcccagcagccctacatgtagagagtgacctggcactctgtttccaggctgctta

SEQ ID NO: 283114 - DNA, 1000 bp, Homo Sapiens
tgctctgagatcttttgagggcttttcagtgaaggagcacctctggagtcacacagtatcctcacatgagagtctgttaccctgtgacttaaggacgggcaagcttttcatcaagcaattcagccttgggagtggtatcttaacacttgtaccctggcagctatttggtacgtgagagatgatatggtacagaggggaagcctgctgttgcctctttggctgtgtcacttggcagctctatagttgggccatttctcttctcagtgctgaattatgacacctcattctgtacctttgaaaacaggtgtatcatatcatctggtgtttctgaaggaactgaaggactgagtagatgcctgtgaaagctctgtaaagcttatgacagggagctgacagttctccacttcaaaataatgagaagctgaggttaatggcctttttttttttctcagcactgagtgccttatggaaaaagatgttcatgaaaagcttcttgactgattgcttcacacaaaatagaagcaggaagacctgtattcagcagctcagcagtggggagtgggaggaacagtgagagacagacaacctctcaggaaacatgtataaggaaatttttattttgttgggaattttgtttggttgtgttctgttagctgccccttaatgtaaaggaaggtacaaggcatgtgtgttttggtggagtgttgtttttttcctgtctttccctccagctttctttcgtctcctcccttttcatcccttttttatgtacttattttatctccttctcaattacagggtaataaaccttggatttccctgcccaggggaaagggcatccgacttactattgctgaagagagagacaagaggctggctgccaaacagagcagtggctaaattacagtagtggcttattttttttctttgcacaaataaacaatgaattcttgtttcctaatgtgtatgtttttttctttttcccttgtggataatgata

SEQ ID NO: 283115 - DNA, 1000 bp, Homo Sapiens; identical to SEQ ID NO: 114994

SEQ ID NO: 283116 - DNA, 1000 bp, Homo Sapiens; identical to SEQ ID NO: 114995

SEQ ID NO: 283117 - DNA, 1000 bp, Homo Sapiens
ctgttacttggaggatgaatatatttaagatttaaaacacaataataaatacatgattaattcaaaaataaaaatctttacagctgcctatcaagggtctaaagcacttaatgaatgtttttagtctaacttatcattaactttttacaagtcaccatatttgaagatctgtagcactctgattttcagaaaatttttcattctgaataatttaaaaatggtgatgtattagaaaggcagtttgctttagaaaactaaatcacattgaacattgtattagagaattaaattaaaagtttcttacagagcagtattttccaaacatttttagcactagaatctttttagatgaaattttatgtataaccccaatacataaagcctgaaaactcaattttatcaatataaatgtattttgggttcacatttatgcttattcattttggctcattactaagcataataagattctgagttatttctgaataacacaaatgtggagttatacatagttgatgaaaccagcagccaatttatagctatgccctgttttatttgtatactatcaagaaaattttgattcacacaaatgtaagcaaaaataataggttttaaacatacatctcaggaaattctttaattagagatagctaaagttattcaaggtctatacaaaaataagttatcctggtagtggaagttaatacataagcagtctccagtgtggtaaagtagggtatgtaacacatcagaatgtgcgtttttattaggttttaaaatatgcacgtataaaaactaaatttgaatcaaacccttttaactcacctccaagaagctagactttggccaggaatgggctaaaaaccactggttaacgatgtgacagttatgatcttggagattggaaatctttcttccacattagagttctttaccttaattccttattctgaaaaattgtaagattttatgaaggtttgaatactgaagcacagttctg

SEQ ID NO: 283118 - DNA, 1000 bp, Homo Sapiens
gagaggttttttttttctttgtttctaaagtaccaaatgcctgggcactactttagagattctggtgtgcagctagcgtcatctttttctcaaaacatcacgtgattctatagtgcagacagggtttagaatctagtttaacttaaatataggtaaaaatatttttacgttaaaatgagtgtattataaagaaaatgtaataaacagtcaaggaagaaaacctcacctagctttctgcaggaactttgaggctgaacagtagaatttgaatacgatcttgtcgatatagtttgaacccttgctggtttcaattaaactgaatcaggttaaaaaagttctcataggccattcttaacaggccaattttttttttgtttttgcacaatattccattatataactcttctcttcagatttagttaacatagcctctctgaggactaagaataaactctgagattatgctctggtttgaggagagaaatggttaggtacaatgaaaacaaataaggagctgtgtataccagtcaaataatagaccagtgataaggcccaaatggcaaacaaaatgcaaatttccaaacagaggaggattagaagttggtagtagatcttgaaacatggcctattaatttcagttggccattcagcctttcctgtggtttgtggtacacttggtcagatggcagcagcagcagcagcaccagcagcaaagggtatctaaagtcaacatcagtcctctttctgcccagtgattactcaaggtaactcaccaagtaccctggggattccaaagtttcaggaatatgagtagtatgtgattttaattaagacttgtgaattcttacaaggtaaaatgaaagttggggtggggggaagcaacggaagaatgatggaagggtagattgatagagtctagaaaacatttaaaggacaaatattttgtcaaagtacatttgagattgtgatatccggttaaatgaactactcaagactgttt

SEQ ID NO: 283119 - DNA, 1000 bp, Homo Sapiens
gtagatatgaattcctatgtgtgatttctgctgtggagtcattacaatcggagtgattgaaaatatctgggactaacagccatttaattctggggactgctgctctcattcccaaccatgcggttctcccagggctgccaatacgctagtatgcactgaatgtgtctgggcgcaggcttaagcatgtgatccagactgggccaggtccttacctagggttttcctaattgaaactgaagaaagagaagcacttttattctaaagacaagctagagagagtcctagttctaaactcctctgaggtccaactgtattctttgcatagtttcattttcaaggtaacaaatgccactttcggcttaaggtaggtcaaattaggtttcttgattttcaaccaaagggattctagttaaaacagaaattgatccctggaagaaaaaaaaagtacatggaaataatcggtatttatgtgagtatcgggctcagcaagaaacagttggcaattcaagttagggtaattcaaaagaagtttggcaacaggacaatttagaaagttatggacaggaaaccataggaaatagtgtagtacatggggctaccaattaattacagggctgttaccacccctgcttaactcctcccttaagcttgagggagcagttaaaccagagggagagaattatgaataagatgtgatcttcatttagagcgagacagcaagcctaaggcaacttcgctgagaaggagccagaaaataaatactctcaccttgttcctcttgcctcctatctccttcagtggctccccattagccaaaaccaactaggagcaagagggcaagggagcttgatgccgtccttacagatcagcctccaggcgtagggtggaaaatggatctggacgacatatagaagatgtgtcacaaagagtgttggaaattattggtactttcctcaaagaattacaagaaagagatgagctcaggaaagaattagtgagt

SEQ ID NO: 283120 - DNA, 1000 bp, Homo Sapiens
gatggatgggaagaggggccagaggaggagtgaggggtgaggtttggccagccctgggctttctgggctctagggacagcgtggtggaggctcaatgacacttttggggacagcagggtggaggctcagggacagctctggagacagcagggtggaagttcaggggcagctccagggacagcagggtggaggctcagggacagctctgggctgagctcagggtggaggctcagggacagctctgggctgagctcagggtggaggctcagggacagctctgggctgagctcagggtggaggctcaggggcagcttcagggacagcagggtggaggctcagggacagttcctgggaggccagcgcccttcttcctctttgtcctgatactcccatctgctccaggaaactgagagttgaggctggagctcccagacagtcagtgctggaagtgaccatccagcagtgatggtggcctgtgaagggtcctgcttctgtcctcagcctctcatggggtgggcttggggaggagctgtggtctggagagagcggcagatggagcacaacatgcctgcatttgtttcctagggctgccgtaacaaagtgccacaaaatgggtagcttagaatcacagaaatttgttgtctcacagttccaaagaccagaagttggaaataaagatgttggcagtgttcccgactacatgttcttattctcccacgaaacagaagttgatacaaggccaagtaagtttcccagacaaggctttattaagtcttatgcccctaaaggctgggcagaaaagagacgtattaagtcttatgccctaaaggttggccaggaggaaggattcttggctggctccccaaggggagtgcgttgtggtgtcctgagggtgacatgcatactttatgagttaggtgagtgtcattacatgtatggggtggagtgaagggtgctcagatgcagtaaagaatcatgctaacacatacattgcgtgatc

SEQ ID NO: 283121 - DNA, 1000 bp, Homo Sapiens
ttattcacattaacctttattctatctggaatttatttgagtatacttttttctcaaataatcaattgtcctagaaccatgtgtttctcatttatttgaaaggccatctagtgagagatttctccaaatgttggggtagggaagggaggggaagcactttaaagtctgagcctttagaggtgattcctcaagaccctgcttaatcctaacaattttcctcattagtaaaagtcagcccaaactgggggcttgttaagatccttaccagccacatccatctgaaattatgaatttcaaagtatcttacaaatttggtgccacattatcttttttaagtttgttttgttttgtttttttgagacagagtctcgctctgtcacccgggctggagtgcagtggcgcgatctcagctcactgcaagctccgcctcctgggttcacaccattctcttgcctcggcctcccaagtatctgggactgcagtcgcccgccaccacgcccggctaatttttttgtatttttaatagagacggggtttcactttgttagccaggatggtctcaatctcctgacctcatgatccacctgcctcggcctcccaaagtgctgggattacaggcaggagccaccgcgcctgggcctttttttaagttttaagtacctataaagaacactgaaaggtgatgtgtgtggatgagctaggaagacctgaaataggctctctctaaattaatcaaattaatcctgaagccattctgcaatactgtctttaatgtatactcacttgttatagaagccagggttttttcccctaatttgtatcattgctatatgtgttattgtaccaaactacactgttttaattgctgtaaattttaatatgtcttagtatctgggtgtgggaatcttgaaagcatggagtttgtgttattcaccactgtattctcaaatatcagaagagtatctggcctactaagtgcacaataaacatagttaaaatg

SEQ ID NO: 283122 - DNA, 1000 bp, Homo Sapiens
cctgtttgggatataaaactctgatagaaaatatttaatgagtatcttgattataacctagaatatgtatacgttagtaaaataaccagatatactacagaactctctattggctcaaacaggttgacctcaatccaagtttactcttgatatcactctgttggctgaaggaggtaactcaaacctcagggtttgtttttcccgggacagatagtagtgatagtgcattatatttgaataagaaaaacaaaccagtataccttgagaaattttaaaaagcatagttgaggcatattttttcataattatatacttatctgtttattgcccatggaaaatatatgtgtagaagtatttcttctgttatttgttactatcttcttaatttgttccaaagaaaatgctgccatactgcattccctctggaaggaaacaaaacaaaacaaaactcactcaaaaccagcagtgctgctatcagataagtagatgtcaatgtatacttacaaggaaaaactaaaaaatgtaatgtgttaattcagcctttttctatgtaatatttccaagtcagactttcttacattcctggaatttactttgatataccaagaataataatgataaaatgtttgctttgattactgtggggggaaagatgaaatgttcaattatattaaaacaaacaagcttttcagagatactggtttcctgcccttgaagggtataaagaatttagatcatgcctgtaatcccagtactttgggaggccgaggcaggtggatcacctgagatcaggagttcgagaccagcctggccaacatggcaaaaccctgtctctactaaaaatacaataattagccaggcatggtggcgggcacctgtcatcccagctacttgggaggctgaggcaggagaatcgcttgaacccaggaggcagtgattgcagtgagctgagatagcaccactgcatgcaagcctgggcaatagagcgagactccgtctc

SEQ ID NO: 283123 - DNA, 1000 bp, Homo Sapiens; identical to SEQ ID NO: 114996

SEQ ID NO: 283124 - DNA, 1000 bp, Homo Sapiens
taggcacacctagcgggaggggtggctcctggaccccaccgtggttggagagctgagcatgtgtgtggctttagtggggtctgttagttatgggggtctgggcactggagctgcaggacacttgggatcccaggtcagaaagggccagatgagcaactaggaaagacttgggggccagggcggagtggggtcacctgacactcttgtgaggccccttctagtgcctgctcacaccggaatttcattcactccaagaagccatcaggggtaagataccttcctttaaacgtcactaagaaagaagaggcctgccggtgacacagtaagatgccattgatctaaagatgcgtcttgatttcagaaaggtccggaagtggaaagcaggtttcagggctgctgaggtacagggttctcctgtaggccccagggatggtctcaggggtgctgagtgcgtgcgtggtaaatggatggagcccaggggcgcctcctgccagtgtcctccaggcactcaaacctagcccttctgaagccgacctcacgtgacctcacagcccctcctgaaggcgcctcactgatgacggtgggtggaataacagcccccagagatgtccaggtttggaaccccaggacgtgggaaagtgttaccttgcgtggcaaaagggacccggcgcctgtgcttcagttcaggatttcgtggtggggagatgaccgtggatggttgaggtgggccctgagtaatcatgggggcccttataagggaaggggagtcacgagggtctgcgcatgaagcaaggaagcttctggctgtgaagatggcaagaaggcctggggccaggcgatgaggtggcccctggaggagctggaaaaggcattggattctgccccagagcctccgtggagaaacaaagccgcactgacaagacttcagcctggtgaaaaccattttggactcctgacctctagaactgtaagataataaattggtgtggttttcaacctc

SEQ ID NO: 283125 - DNA, 1000 bp, Homo Sapiens
aaatatgactagggtgtgacctaaggttttattctgtgaagatgagtaactggaaagaagctaacactgcagtgggaaggaaggaagagagttgtccaggtggtagttcgacgtgttttgaatctagtccttcctacatggaggataaaagctcctaaagtccactctgggtttgtgattttaatagaaatagaaagggaaactatagaccaatggagatgaaaatcaggggctatcgacagatggaggagaaataaggtgctacatagagaaaggaagagggcagaaggctttcccttcccaaactgggtgagctggggaagccttggttcaggagagtggcactgcccacaactgctttgtgggttgtgcacttccagccgcactctccccctccagttgctgccttcagagccgtactgaagcacgagcttcaataagacaagcacacttcatagtgagagggcagcggtaccaaagcctttcagagagactatggattagacagaaatgatttgtgagaggaagctggagtgaacagcatgaacagcgagtgttacctgacagaggcaagacagctagaagtggcttcagatttagaaacagctgaggggagcaaagacggactgtgtacacagggagggaggatgtctatgggcagagcccttggtgagtatcatcaccaagaaaggcagtccagagtagagatcagccgaatatggaggctgaggtctgtagaactgggccagagaggaccttactgccttagtagcataagggtctggaaaagaagtttctatctcacaacaaaggaaaaagtgaaaagcaaggtggaacttgaagatacgtcacgaaaatcactataaaagtctgatttatgtgtgatgtcaaatcaaactgaaatgaagaatgagattgagtatatctgtggtgactgacctctgtatactagaaacctcaacatctctagaagaggaaataaaagctgctttgcactctg

SEQ ID NO: 283126 - DNA, 1000 bp, Homo Sapiens
tcttgtaaacatccattgcactgaggccgtatcattccttaagacagccctacatcttgccttggtaatcccttagataatgtggaaactcaaaccgttaggctccagtcatcttagaccatttcccatccgttttgtattttctcgtcctgaaagcagctgaactgaaagtaagtaataatatgctggaccagtgggaacggatgtgggagtatttgtggtgtgctaaaatactgtaattatctgtgaggctgcctgacacgcttttgcaatcttgttttcatcattcattctgcaaacgtttatggagggccttctttgagcacagaggcaaaactgaaagcttcagggatttgctgtagctgaggagccctgggagcacagcccatcaagcaagggatgtgatggtgtcctaaatggagtgacagttctcctgggaaaagagatcacgtggattccggtcaaatcggctaaggcttgtggttctcttgagcaagtctgttccttctggaaaccaaaagtgcccttcatctttagagacattttactcttccatccaccttttcagactgagctgtctctactatttaggggttgaaaatccattacacagtcactttacgttaacattgggtcatcttatgtttgtatgagacggatgtgggatttgaggggaacattgtcattcccttaaaataactatcatgaaaaaaatagcaacagtatgtaaagggaccaagagtggcagcctttagggaaaatggagcagagaagagctgtgaacaaagctcatttatttgaaataagcgtgctttatttcacatagaggggcatcagacgttacatttcattcggacaaattactgaacagccgaagtgattgtttccaatgtaggttattataattattggatacaaagatttaactagtgtttctgggttggatttttgaaatagtatgcaagtcataagcacagtttcaataaaacacgtattctgg

SEQ ID NO: 283127 - DNA, 1000 bp, Homo Sapiens
tttttttaaaaaaaaaaggttaaggagattttaagacttataaatgtttaagaaattataaacaaggttagaccctttgaaaaaaagtttagaagatattcttaaagtaaatttttatagtgttaattttgtaataatttatgttttactatattacagagctaactgaccagaatagtttcagaaacaatatgaaacttaggaaagtttaagcaatgtttatatttttaaaatgttctttgaattatgtttttattgtacatttcttcagactgaaaagtatgtacatatctttgttatttttgcacaattttgtcttgttcggtttcagaggtctgttgttttttataatttattttgagttgtaaaacttgcaggagtaaaaacaaaaaacaaaatctccacaacaaaataaccctctgatttataaactcttatagtcaaagagggaaaacaaaggttgagagattaagtggctgcttctgagaaataatgtctcaaggactaaaggagcaattcaataggtttagacattgtagctctctacatcttgaattggaagctggaataaagagcccccaccccccccccaccctcatcgaatgctgcttactttgtcaaaagactggctatgaccaaggtgaggatatttctggaaaactgggcaaaaagggaaagcccacagtattcttccttggcagtcaaccacaggtttactttacaatgatgtattaaaaacttgcagcttgaaaaatggaatgcaaataaaaggttctctttgggtttgtcttaatggagttaaactggagcagcctataaaacatttttagggtgatgtcctctgggtccttctgttctgcacacccactcagtcttctctcccagccccttgactgcacacacccctctttgcctgaagatctcctgacttgtcgccagccatagaggctcgaaagctctggttgtgaagcataacgcaatgcatagacctgtcagccat

SEQ ID NO: 283128 - DNA, 1000 bp, Homo Sapiens
gagctgggccgtcctggggatcggtacagctccctggggtggtgacaggccctttgtgaaagttgtgtgcttggtcttccaccccagccccagacactgcttcaaatagcaccaaccagatgggagtccacatctgtggtggcaaaatgctgacattttcccaagaggtacacaaggtgggagaggcctgctgtagcagaggtgtgtgttagagaaagcaggggcctgatttagtagcagagaactgggtgagaaaaatggccagagaaagtgacctgccagctaccagtgtttccgaaaatgagggtgggatgggcccatttgcagagcaggacagcagtcatccccatagccctctgaggaggggagggatgcttagagcaggcagttctgtcagttctgacgtggcaggtgccattgcaacttgtgcggaggagtcttaggaagtgctgtcataattcataaggtcaagagcaacatctggatgaatgagccacctgaaatgtgtgtgggctgagccacaggaagggtgagtcctcttgcttgtggtgctttatggtgtgcaggttgcttgctttcccacattctctcatttgcttgaaggcagcctaacaaaagggagtccccaaagagctccatgagagcttaagaaaattcatctcctgaggacaaagagaacaaagatctgtcctgtggtcacactgttgaggctctgtcttcacagctgatgttctcctagtggaggtacagctgaagaacattcagccccagcacgagaagatacagagcaacttggaaaccccaaagggagacacacccttaacactgccgtgctgtgctgtgccgtgtcctgaaggaggagagagccctatctcctcctggttttgttgctgacattgcagctgatcatgccttgactccttcatctctaacagaggaagaactgtattatcaaaccttatggtctacccatgaataaataaaatatttgttcaagcac

SEQ ID NO: 283129 - DNA, 1000 bp, Homo Sapiens
actatattataggaaatatgtgaaattagttcattagctttattcactattatgcattcacatgatattaaaacgtacactcacatgttagaatgaaaagagcagtagttatcttagattttaaaaacatggatatcttcttgaattccttcaagattgaggtagagaataagagcaaatcattctggaagtaccttaaggaaacaaacagcagcagatatttaggttaaacttattttcataattgtttaataacttttgtataatcttcattgctattatgagagagaatgtatatatcaaatatgtgtaatgataaaatctgaattgtaaaatttttgtatattgttaaaattgtaattctaaattgtatttcaaaaatgattatttctgatattgtttttatgtcacccatgatgaaaactggactttatatatctaaacatacaagtatgaactattctatttaaaatttttaatagtttttttcttttttggtgcctataattgattggtcatttctgctggcttttctccaatgaacattgaaatcttcctgtatatgttaccaataagaaaactaccctggaacagtagaaaaacccaacaagagacttggcattcatcaagcacattatcagactttgagaacatattgaaggcattgactttgaaaatcatctctttttctcaagaagaaagcaatggagaagcaaatttgtttcattcagtgaatccccagtttggggcttgtggggcttagagacattgtgaaatcaaatcttgtgttatacttttctcctggctcactttttttgagaaggtttatgggctatttggctggtgagacacgatcccctcctaagaaaatgtaggtgctcagacaggtaaccactgctgctactgtttttatttgtttgtttgttcaattttatttaagatttgtttttgttgtactaggattttaaaaaatgtaatatattgcaggatttataaccag

SEQ ID NO: 283130 - DNA, 1000 bp, Homo Sapiens
cgccggaaggtttcagcctgcccttcacaattccccttgtgcacagcccagttttccatctctcagggcccacccaggaaaatggatttcaagtgggggttttcatccagagatttgtttaacacaaaacaagaaaagctgagaggcaaaacaggggagtgaggggcaacccagaggtggggaacaacaacagcaagccgcccccatcctgagactggctgggcaccaggggaggacgcgtcaccagagcctggggccaaggccactgggggacctgccacactgtggacctgtctggtgggggctggagcctcgagaagccatgattcttgtcagaaacatttccccaggcagagagagggggccccagcctctcccctcctcttggcctccagagtcctgcaggtgcctcacagtagtgaaacccagttggaagcagctgccctgggagcctgggacaggcgacccaccgggtcagtcccctgccactcagagcagagcagggggctgagggcaagcaggtggggctgtgcgtggcctcagtgcactcggtgtcatgtctgagcctggtgtttatgccccactgctgtcctaagtccctggcgaggggaggtggaggagctgccccgtgggtgtttggagattctgttttactctgcctagagaggaaacggctttggggagggagggggaagcctttattctttactgttgtccctgttttcctttgggggaatttactcagttagcagcccctcctcaccattccccccaggaaggccatgtcccagttttctgtccacccctcctgttcctctgcactatgtctctgattttccctgccagggaagctaacccagagcacgcacctgtgctcatgagtgtttccgcaggataattcgttctgagcatgataccacagtgtggattgtctgtctgtaaggagatgccatctactaaccaatttgtattgtgtttccaataaattcctggaaatttt

SEQ ID NO: 283131 - DNA, 1000 bp, Homo Sapiens
ggcccagctccaggcccggctggctgccctggaagccgaactgaaagattccggagagaagccagggaagggagcgtccaggcccgaggaccttcagctcattggccgcctgcagacccgcctgaaggagagagaggacatcatcaagcagctcacggaagagagaagatttcactacgcagcattccccagtgccatgtcccaccggaatcggtctttctctttcaatcctcacccgggatatttgaccccttccatgaagaaaaagaaggtggaggacgtgcccagccgcgtggtcagcgtgccgaacctcgcctcctatgcaaagaactttctgagtggcgatctgagttccaggattaatgcccctccaataactacatcacccagcttggacccaagccccagctgtggccggacctacaaacccaaccagtctacagatgcaaaaactgccacaaggaccccagatggtgaaacggcccaagccaaagaagcccagcagaaacagggctctccgcaccaggaatggttcaccaagtacttttctttctaagctaacctttgggatacatcacagaggatacttgaaaaacatttattttaaatcatccgattgaaggaatgaactaacaccaaccaaccaaataatatgcttatgatttatatatgatagctaaaacaaattttggcgttaacacttcatactgttctgccaggcacagcagctcacgcctgtaatcccatcactttgggaggctgaggcagatggactgcttgagtccaggaatttgagaccagcctggccaatatggtgaaaccccatctctacaaaatatacaaaaattagccaggcatggtggcgtgtgcctgtggtcccaggtacttgggggactgaggcgggaggatcacttgaacctaggaggcagaggttgcagtgagccaagttcgaactcctgcattccaaccagcctgggtgacagagggagaccctgtctcc

SEQ ID NO: 283132 - DNA, 1000 bp, Homo Sapiens
gtgggccctgctgtggcctgaatgctagcttcaggccttttggtgccctgcccttgtacctggaagaggcagctctgccaccggcccgggcaaactcgggtcctctagagcacctgagcacacagctcctacacctcctgacctgcattcaactctgccctacggcccaggagaccagcctgctgtggcctcggcacaggatgacctcaggtactactgtccacatactccgcttgctggagctgggctgggtgaagctgctcttggcagtggcccacctgggctgggctgggtctgtgatcttagggcttacagaacacagggaggtgcagtggacataggtgcagtgatcagtctccatcagacttgttcctgaggcccctggaagacccctgacatgggaaccaggcaccagtggctcaagttcagggaccaatcaaggggtggccaggtctgcagccaggaggagtcttcactctggaattggaggggcttgtgctgacacagctggtggcacctggatgggctgggttgccagtgccttgtgggcacgtttagccgccagtacagtcgggagccgagcttggatgaacagtttgcagcacaaggcctcacctggggagcttaggctggtgtgtgtgtgtagcctgctctcagaatgtcttattttgtaacaactgactacatttagtaataggtacacatgtatatggttaatatatggaaattcaatatattttatagttaaagtattctaaagtaactgatgtttctagcaaactgtagtgaccccagctatgaagtgttccttttgtaccacagtccttggattaccagagatgtgaatcttgtaacataagaatgtggtctgtgaccatcctgtgttaagagggtggggtggagggtatcccagcatgaagcctcattggtaaggaattgtgggcaacagattaaccactgtatctacaaatgctctaattaaaacatttacacaaactgc

SEQ ID NO: 283133 - DNA, 1000 bp, Homo Sapiens
aaaatatattgacttaaggagaactgacatctttataatattgaatcttcctgtttgagattggactttatgtccatattttaaagtctttgtttatgaccctaagtataattttaacgtttttatattaggcttatttctagatactttttgttaatatatcatctaactggttgttcttcatatatataatgactatgaattttttctcagtctttttttctgaattctcacatcatttgtgttatatttttaagttgattctcttgagtttttcaggtaaacaattatatcacctataaaaataatgttgccaccttaaattaagaaaatgtttttctattgtctaattgcatggactgttgcctcaggaacagtataagattgcttacaaaagccttgctttcttgttccagattttaaaaacaaggctttcaatgacaatctcgctagcaagaagctggtatacttacatacatacatacaaacagacagacacccactttctatatgtatatctagatagatttagatagacatatatgtgtgattcctgttaagatgaatctatttttggtatttaagattttaaaaatctagaatgggtattattatattgtattgaagctcttaagcatctatggaaatgaaagtatgattcttctctttcgactaattaatatgtgatccatagtattttagtaacagatttcctaatatcgaatgatctaggcattgattctagcagattatgtctatgggtattttatttaagattttgcatcagtattaataaatgaccatggtctatgggtttgcttttttgtgtgctatgtttgcagagtgtttgtagtttacaagagatttttgcaaacttctatttatgacaatatggtagattatatatctgaaaaaaaaaccttctcattacagaacatatacaaaactgctgaataaaacgaggcaaccaacattttaaatatatggttaataaggtttt

SEQ ID NO: 283134 - DNA, 1000 bp, Homo Sapiens; identical to SEQ ID NO: 114997

SEQ ID NO: 283135 - DNA, 1000 bp, Homo Sapiens
  misc_feature (876)..(876): n is a, c, g, or t
agaggatggcagggccacgccccagcccatgggccaggctgctcctggcagccttgatcagcgtcagcctctctgggaccttgggtgagtccacgttgccctgcagccccctcctggcagggtcatcccttgggcaggcattgcccttgcacggggatctcacggtgtctcacctaaacacgcttggccattcagcaactgaccactgcccaccttcgggctggaaaacttgaggctccaagctcttcagcctagagaagcttgagccctgaccacggggcctgagaataggagcgaaggaggctgtgtctagaggaaagaggatacacccacccaggactgaggcacccacaggatgcactgaggccccagaggtgtagtcaagagggttataggaatttggagaagagaggcactgctgacgtgtcacttgctctctgagtgtcactagtggacaaatcactggagccagctcctaccacttgaattttgtctgttagcagggggtcctgctggtggcttgaaatagaccacgacagaaatgtttacaccacagaaattggcaaacgctacacgtcaagcaccacagaccagagccgttgttatttttttatttaattcaatgtatatgtagaaacatgctctcactctgtcgtcccggtgaaatgcagtgatgccatcgtggctcactgcagcctcaacttcccaggctcaagcaatcctcccaccttagcctcccatgtagctaggaccacaggcatgcaccaccatgcctggctaattaaaaacaatttttttgtagagacagtctcactatgttacccaggctggtctcaaactcctgagcttaagcaatcttcctacctcggcttcccnaagtgctgggattacaggtgtgagccatcgcactggccaccacagccattgttaaacactgaccagcacaccattgcctgaagcccaggagacctcttactgtgtacaccaggtgcacacagta

SEQ ID NO: 283136 - DNA, 648 bp, Homo Sapiens
gagctcgtagtgactcagccaccctcagcgtctgggacccccgggcagagggtcaccatctcttgttctggaagcatctccaacatcggaattaattctgtatactggtaccagcagctcccaggaacggcccccaaactcctcttctataggaataatcagcggccctcaggggtccctgaccgattctctgtctccaagtctggcacctcagcctccctggccatcagtgggctccggtccgaggatgaggctgattattactgtgcaggatgggatgacagcctgagtggttgggtgttcggcggagggaccaagctgaccgtcctaggtcagcccaaggctgccccctcggtcactctgttcccgccctcctctgaggagcttcaagccaacaaggccacactggtgtgtctcataagtgacttctacccgggagccgtgacagtggcgtggaaggcagatagcagccccgtcaaggcgggagtggagaccaccacaccctccaaacaaagcaacaacaagtacgcggccagcagctacctgagcctgacgcctgagcagtggaagtcccacaaaagctacagctgccaggtcacgcatgaagggagcaccgtggagaagacagtggcccctacagaatgttca

SEQ ID NO: 283137 - DNA, 553 bp, Homo Sapiens
aagctttaaaaagtcatgcaattatcttctgctgtttcagaaaagtgattcatatgttctccacagctgaaggcctgctgacccagggtgataagatcactgctgatggacttcaggaggtgtttgagaccaatgtctttggccattttatcctggtaaagaagctgtgggcttaataagctaatatttcgtgtgatagtttctgtaaagctctgggcacagggcattattatagttgagcagccagttaactgatttaatctcatgtttgagttttcttgattgcatttgccttgtttattgtgagcatggaatacttctggaagctttcctagtagatttttctttaataaatgtactaatagtttttgatttacagaattactgcaaagatagtacagagactttctgtatgccctacacccagtttccccattattaacatttcgcattggtatgatgcatttgcaaaatagatgaatcaattctgctacattattattaactaaagtacacactttattcaggttctgtttttgcctaatgtcttttt

SEQ ID NO: 283138 - DNA, 1000 bp, Homo Sapiens; identical to SEQ ID NO: 201544

SEQ ID NO: 283139 - DNA, 1000 bp, Homo Sapiens
actataataaaacagaacaattatactgtaataaaagttatgtgaatatggtctctctcttggtttctctgtctcaaaatatcttatcgtgttgtaccatgggtaactgaaactgcagaaagtgaaattgcagataaggggggattactgtattgcattctgtactgcatttccatgaattcagtgacacacagtgatgtattccatgtcgttatagcaaataataatcttaggtgtctaaattagactgaattttttatttcaataggcataagccattttctgcacctaaatgagagtagcattttttttcctgatataaaaatgggcagatttttgtcctggtgtcatgctaatataaccccagaggtggcaagcatagtggctcaagccagtaatcccaggactttgggaggctgagacaggaggatcacttgaagccaggagtttgagataaccccagaattatctactttatttaaagtacattttagctgggcagtggtgtgcatctgtagtcccagatacttgggaaagtaaggcagaaggatcgcttgaacccagaagtttgagaccaggcaggacaacacagattcagtctctaaataaataaaatacctaagaacactcagagtggctgaaaatgtgttcagcaaaatctgttccactaatgtccctaataacgtcagtagagactagggattaatgagactaccaataaacacacatacacacacatgaacatacacacaatgtttactatcttgttttctgttataaggattgctaaatatttttgtatgatatagacagttacaatttatattttttagagaattcatagaaataatccttaaaatatttagagattggtactcctttgtcagataaataaatgcaaaagtgaaaattatttcaaaccaatagcacatatatcccatgatatccacaatggttttattttatccatcacttgaaagtaaaaaaaaaaaaaaaaaaa

SEQ ID NO: 283140 - DNA, 1000 bp, Homo Sapiens
ctttaggcccaaacccccaactatgaatacctcaccttagggagctcagtcttttgtttgttcataaaaaaccaatctgggaaccagaggtggacaggaaagaggaggctgacctgctgctcccaggttaatgtgatcttggctggtgttgacaagtgtattatggttcatagcatagcacaaacccttagagattccccttgccctcaccggggtcaccacaccaaaccaggtatcttcaggagtgaggaccacaaaaaattggagatctcaccagggtgggcagagatttctttgttaaagtctgaaggagagaagactcaggggcatctctctggctccaaatctctgaagggccaaaggcagaagtgctgggggagtgtcaagttttcatttacaacagggacagcctgacagtggctgccttatgtggcagtgagtttcagtcaacagtcaacagaggcccaacgactactcaccaatgggaccaggtggccatagagggctggggagggcagagcaaggacaaccccaccaccacccagtatgccagcctcatgcacagcttcatcctgaaggcacggagcaccgtgcgtgacatcgacccccagaacgatctcaccttccttcgaattcgctccaagaaaaatgaaattatggttgcaccagataaagactatttcctgattgtgattcagaatccaaccgaataagccactctcttggctccctgtgtcattccttaatttaatgccccccaagaatgttaatgtcaatcatgtcagtggactagcacatggcagtcgcttggaacccactcacaccaatccagtgaccgtgtgtgggctggcggctcttctcccccaccaacggaacccctgtgtgcaccaacctatcacctagcagataaaactatggggaaaacttaaatctgtgcatacatttctggatgcatttacttatcttcaaaaaaaaaaaaaaaaaaaaaaaaaaaaaaaaa

SEQ ID NO: 283141 - DNA, 1000 bp, Homo Sapiens
ctgaccatcaagatgtacctgtgtatgtcaaaatgaggggtgttggggagatgtatgaacccatttggaattgcattgactgtaaccacacagtttacaccatgaggcttgcaaaaataaattcttaagctttctgggtaaattgtaacaaagtacacagtctagcttcttagagtctacaggagaggagtgctggggtcatggccaaagaattgttttgaggaggggtcccagggaagtacttttcagactgatggatattcttcatgggagctgggactatgtcggctgtcagagattggcagttttctacagataacccacacagaggatatttcatgcgaggaaaagcaagagctgacatcagcataacaatgaaagcacaaactatgtacttatttacagacagctggccagggacacagtccctggcaggtgtgagagtcacaaaggattgacttggtgctgaggcataagccctattgtttctaggttggccacagtaggagaggagccctctagttcagtgataccagcgctctcactggaagaaatgaggagggcctttctccatgaaaatgagcgtgacagaaaactgcaggtgccggagccccagaggccgttctgtaagaagcaggtgagaggctgtggctgctcaatcttaccttggaagccggggggacacacgatgagagcttgctggaacgggtcaggccgggcacaaatctgggctgttcctgtctgcaggggcatgctccgctgggccactgcagccatggatgccgctgagggctggtagagtgtagatgggtagtttagtatggagacttcgggattggctaaggaaatagtggcactggtagaggagggagcctaaaggagtgatggggattaaacaaaaataaacaaaaataaaaaatgagggaggtggcatgttgggagacacgaatctaaatcaaataaatgaactcaaaaaaaaaaaaaaaaaaaaaaaaaaaaa

SEQ ID NO: 283142 - DNA, 1000 bp, Homo Sapiens
tttagcacttagttccccaaatattccactactgtttcattcagaacccaaggttcctagaaggacacaacagtcaacagttaactgaataataagagtaagagaatgcctcaaactgctgctaaactcacactaaccacaaaaaaaacaaactataataattaagtaattcctgctttaaagtgtcttctcatttcctataggcaacacagcataagactcacaacaccatctcttcaacctctctagttatttttcttcaacctaaccaccaaccagactgactacttctacattatctactgaacacatatctgttttactatttcctccactagaattctcattttcttcgtatataaaaaagtctttcaaggcacagctaaagaactacctcttctggctgggcgcagtggctcatgcctgtaatcccagcactttgggtttgttttggggggtgggagttgatcctcccacccagtctgcccctggtctctgcccatccaatcagagcccaccctcctggaagagacccccgtgttcagagtgctggcagccctgcacgtgtccagggacactgcatttcaaagaaccactgagtgggtgagctaccttgggcaaaccccccactcctgactctgactgccacgtgggtggcccgacctctgacctgctgtcatcatagaggtagaaagcaaacaatctggggctcagcacacctgggggtgctcccactcattcagtgtgtggggcccctgagcagaggctgggcattgccactagaacctgagctcctagagagcaaggacctgggtggcctcgcttactgttccagcccaggccgagcacagggcctggctcgtggcaaaccttgaataaatatttgttggctgaaaaaaaaaaaaaaaaaaaaaaaaaaaaaaaaaaaaaaaaaaaaaaaaaaaaaaaaaaaaaaaaaaaaaaaaaaaaaaaaaaaaaaaaaaaaaaaaaaaaaaaaaaa

SEQ ID NO: 283143 - DNA, 1000 bp, Homo Sapiens; identical to SEQ ID NO: 203265

SEQ ID NO: 283144 - DNA, 1000 bp, Homo Sapiens
  misc_feature (623)..(623): n is a, c, g, or t
  misc_feature (876)..(876): n is a, c, g, or t
  misc_feature (878)..(878): n is a, c, g, or t
  misc_feature (887)..(887): n is a, c, g, or t
  misc_feature (914)..(914): n is a, c, g, or t
ggcggccgctacggccctggaacggggccatggagaagctgcggcgagtcctgagcggccaggacgacgaggagcagggcctgactgcgcaggtcctggatgcctcatcccttagtttcaacaccagattgaaatggtttgccatctgcttcgtatgtggcgttttcttttctattcttggaactggattgctgtggcttccgggcggcataaagctttttgcagtgttttataccctcggcaatcttgctgcgttagccagtacatgctttttaatgggacctgtgaagcaactgaagaaaatgtgtgaagcaacaagattgcttgcaacaattgttatgcttttgtgtttcatatttaccctgtgtgctgctctttggtggcataagaaaggactggctgtgttattctgcatattgcagttcttgtcaatgacctggtatagcctgtcgtacatcccatatgcaagggatgcagttattaaatgctgttcttctctcctaagttgaaaatcagaaacttgtggaaaagagcacttgaatgttggtactctatgtttggtgaagtttgcttttccccataaaacactccaggaacaactgacgtgacagttgaagaccgtnttgtactaagtctcattttgtatactggtaaaaactacatgcttgattaaaccattaaatgcttgtaactttaaattcattatgtgtcattaatatacttttccaaagataagatttttaatcactgccagttgtaaattatttttagccaatttttaaatcttttcaaagcagctttgaaatgtgaatatttaaaggtagacctgtgctgcaagataattaaacttttttgcttttaaaaaatgtctgcatntntaagatttnttttactttaaatgtgaaacttatttnaagctaaaaattgcttattatatgtaataaaaataatatataaatctttacaattttgaaataaacccatccttggaaaaataaat

SEQ ID NO: 283145 - DNA, 1000 bp, Homo Sapiens
gctactgctgagggctttttgaattcctagcttgggctgtttgcaaagcttattccaacactgtctcagagcactgttgaggtcataccttcagggtaatttaaatggaacgaataggaaggtcataatctgaatccaatcaacagtctggtgggaggccagtgactgttctgaaacatggcattgagagcccagataaaatgtgttgatttctggtctgctttctgttataccccagccctgtaaacaccaggcaaataaacctcaagcacaacaaacttgaggcaaaacagacaaaattaattttatatggctatttatttaaaggcaattctgtgtgcaagagatctgtctaaacatgcttaaggaagtaaatcacatttgtggggcatcttgacctccctttctagctggagacagtttcataggaactagccttttagtacttggtgatgtgttttttaaggaaaaaaccaagtttaagggttgactgtgtcttttaatagaacataaatattttgtcagtttttattattttcaaaaggagggagatcacattttcaagcaagggagttttgtttgtcttcaatctgatttttaatatgcttagatagggacatttctaggtgactaaaaggaaaagaagaaatctatgccaggcttaagaagtatatcaatatatattgatacatatttgttttggaagctatagggccttggacaaaattactgtaaagtttctataattatgaagtcattttatctatttgcatcctaacaaaggtatactgtcatcaaaagctcagtggacatataagtggatgaaaacaaagtcattgtggcaagcacagtttgtgagagatgctgtcatgctgtagaagaaacattacccttagattgaaaagttttctgtccttatccatccatgttcttgctttttggccttagctcaccacttcacctctttcaatctgtttccttctttgtaaaataaaagctt

SEQ ID NO: 283146 - DNA, 1000 bp, Homo Sapiens
caggagagaagtctcatacatgcaatgagtgtggaaaaagcttctgttacatctcagctcttcgtattcaccagagagttcacttgagagagaaactctctaagtgtgacatgcgtggtaaggaattcagtcagagctcatgtctgcaaactcgtgagagagtccacactggagagaaaccattcaaatgtgagcaatgtgggaaaggcttcagatgtagagcgatacttcaagttcactgcaaattacacacaggagagaaaccttatatttgtgagaaatgtgggagggccttcattcacgatttccagcttcagaaacatcagataattcatactggggagaagccgttcaaatgtgaaatatgtggtaagagcttctgccttaggtcaagtcttaataggcattgcatggtccacacagcagagaaactgtacaaatctgaggagtgtggaaaaggcttcactgatagcctagatttgcataagcatcagataattcacacaggacagaaaccgtacaattgtaaagaatgtgggaagagcttcagatggtcctcatatcttttgatccatcagcgaatccacagtggagaaaaaccatacagatgtgaggagtgtgggaagggctacattagtaagtcaggtcttaacttgcaccagagggtccatactggagagagaccttataattgtaaggaatgtgggaagagctttagccgggcttcaagtattttgaatcataagaaactccactgccggaaaaaacccttcaaatgtgaggattgtggaaagaggcttgtacaccggtctttctgtaaagaccaacaaggagaccacaatggagaaaactcatccaaatgtgaggactgtgggaagcgctacaagaggcgcttgaatctggatataattttatcattatttttaaatgatatgtaagttgtacatatatatgggatatggtatgaaattttaatatgtgtatataatacgtaatgatc

SEQ ID NO: 283147 - DNA, 1000 bp, Homo Sapiens; identical to SEQ ID NO: 115000

SEQ ID NO: 283148 - DNA, 1000 bp, Homo Sapiens
aagtccctagtccccagccccagctccactatatcagcctctgctaggaagaaagccgctaactatggactttcgtcgccggggtttcgagcctaggacacacctgtacagacccccgtttgccccgcccctttccggaggagacgtcccctccaccaatgagcggcgccgtgggcgggccgcgggcgcgcatgctctgggcccgcagttgaagtggcgagagcgctcagatacgcgacgcgtagcaggcggggaccgaacgggtgcctcagtgtccttcccctcccctcgcctggcctcgccgtcctctccccgcagccggaccggaactatgtgatcccggaagttccggggcctttgctgtgtgggataaacagtaatggcggaggctgcaactcccggaacaacagccacaacatcaggagcaggagcggcagcggcgacggcggcagcagcctcccccaccccgatccccacagtcaccgccccgtccctgggggcgggcggagggggcggcggcagcgacggcagcggcggcggctggactaaacaggtcacctgcagccctcgcggcccccgctgccgccgcgttcccccagtcactgcgtcaacccccgctgggccgcggagccctcagcgctgtccgcggaggcctggcggtgcgcgattactgcggagccgcggggctgcaccgccgcttacacttccctgagcgctgcctgagctggctgcgagcgcatcggggagaggtgggctggctcctcccctgccgctggaaggatgcccccgccgctgcctccggctcccggggctcgggaggtggtcacttgaagccggtctcccagcgatcctctccgggcctagacaccccgccgagggccccagcgagcttgcctggctcccggccctctcctctctccgtgccatccgtttgtaacgtcttttcacgtccctccgtccctccgccccccatcctccgcccaactgtgagaagaagctt

SEQ ID NO: 283149 - DNA, 1000 bp, Homo Sapiens
aaaaaaaaaaagagagagaggttaaacaaaagcatcaattaatctatataggaatttggatattttcattgaaaatgaagtcttttgaaatttctgggtctgtttaatttaaagcattctgagtctgtaccaaagatgagcaataattgctcacaagggtactggggttctctgttgcattgtgaatatggaattgtagtggtagttagcaacatatagtccactggttctagctatgtcctcgttttccatggtttaatttttgcaagccctgtcaatatattttaagattaggaaagtcattaagaatcattttgtgtaagctgtcaggataggtgttttccaagcatagtatttttcatatttctatctgattatttttgatatttatttggttgtattctagaacagctttgacaggattttggagattggggtgaagcactgaaccaaagtcacagatatgcacatatccctctaagaaggtgaagttaacatttgtcagagggacctggaagatttctttgtaaccacctgtccaaggagtttggtatctctaaaagtgaacaggcagagcatgtctggttagttttggaaggggcgtgactaacaggtgatggagtgttgttcttactgttgaaagattttcttaaggggcaagtgttttattttctggtattcatgggacattgtaggggttaggatattttcagcttcatatgaaagaaacccactcaagttggcttaaacagcaaggacaaatacagtagttcccccttatccacaaagtatacatttcaagaccctaatgaatatctgaaattgcagatagtgttttttcctattcatacatacctatgacaaactttatttcataaattagatggtaagaaattaacaatgataataaaatagaacaattataaaaatatgctataataaaagttatgtaaatgtggtctgcctttgtttctcaaaacatcttattgtactgtagatc

SEQ ID NO: 283150 - DNA, 1000 bp, Homo Sapiens; identical to SEQ ID NO: 201540

SEQ ID NO: 283151 - DNA, 1000 bp, Homo Sapiens
attcctatgaagtgctgtcttgtatcccagcccccagccttccttataaccaaccaggaatatgttacactcttgttcgtttgcctgatgatgaccctacagcagttgcaggctcctttagctgcaccatgaagtttacagtccgggactgtgaccctaacactggagttccagatgaggatgggtatgatgatgagtatgtgctggaagatctcgaagtgactgtgtctgaccatattcagaaagtactgaagcctaactttgctgctgcttgggaagaggtgggagatacctttgagaaagaggaaacctttgccctcagttctaccaaaacccttgaagaggctgtcaacaatatcatcacatttctgggcatgcagccatgtgagaggtccgataaagtacctgagaacaagaattcccattcgctctatctggcaggtatattcagaggtggctatgatttattggtgaggtccaggctggccttagccgatggagtgaccatgcaggtgactgtcagaagtaaagagagaacacctgtagatgttatcttagcttctgttggataaatgcttactggacaagaggaaactgatgcacactacatggtcagtgggcttttaggctagtggcatcagtttcccagaatcagacttttgaagatgaatgactttggagaagcaaattaaacatttggccctgagccagcagatcacaagaaatgtctatctttgcgcatgggttgttttttttttttttctttttattctacttggtcagctttgggacgatagtgcagctttgggtgatcttgaaaatcaaatactatcctatactccagctgcttaacttcattttattctttaatgtgtacctgaaagctcctggcaatgctggaaaatttttatcccagaggggtgggggtgaggggggaggggaagccagagtccacttttgtcacaattcatttttattaatagaaaataaacacttattc

SEQ ID NO: 283152 - DNA, 1000 bp, Homo Sapiens
ggggccccgacattaagaacaccctagccataccagcaacctgagcagacaaacagccaacagaacatcagtcaaaataaaaggggtttatgtaacaaaaaacaaaaaaacaaacaaacaaaaaaacacagtaaaagataccacccagctagcagaaaggactcagcactgccttcagccttcacttactcagaaataactcatatctcaacctcagcaagccccaagcagtagaatgaggcttccctggaaagaggctgagactcacaggctggggatttaagaccctctcaccgtccaccttccttccttctttggtcttggaagatgaaaggctccatttttaaagggtggagaacagcagatcccctgctactgtgagacaagccagaaaagtgagtcaaggccagactcactatggggtcaccccaaacagcttcagatcaaaaagcctgccttgctgtgatgcccattgacagtggctgcaaatataaagggggggccacagggtctctggctttatttccacagggtagggagaagaccctgcagaaggctaggcagaggggccagccgggaatttcccagcttttctggttctcagcagaccaacgtggtctctaatcagaaagacgaagaggcaggagagcactggcctcagatatcccccatcttgtcctcttgcactgtgggccagggctgctgtgagctaggagaccagggttccagaggggctcactaggtcctgcgggaggctttcccgggcctcctgcatgcggcgccgggctcgacggaaggcctctgtaaggaaaggagatatgctatttggctgccatatggtatttctctctgcactgcagagagaaacaggcccatgctgacctggggtggccagctgggggaggggacatacctagcacattgtgaatggaactctgctggctgaacccttccagacggtccaacacactccgcatccttttctgaagggagctcgatt

SEQ ID NO: 283153 - DNA, 1000 bp, Homo Sapiens
tgggctccaagagcatcccttgaagtggggcacagggccccctgtacccttcagggatgtcacctccggctgccacccacagagcggccagcactcaggctcaccatcaaggtgctggctcctcgtggggacacctggtgccactgcaggaggccggccaggggtgagtatatggggtgcagatggtgctgtgggtttgagcagtggccttccccaccaccaccgtgtgtaccaccctgccctctttcaagtggcggctgtgtcacccacgcggcttgcctgtgcccactgaacatgggtcatcttttctgggtgacctgggtcatcacaatgaattggtcaggacctcgctgctgtggtctgcgggtgctggaagtccgttccttcttcccttcaattacgcagcatttgcctgacagcgtgtgcggtgctggggaggcagggacagctgagtccagatcacagtcctgctgctatgccacaccagcctcgcccctcttggtgcttcctgccccctgggggagccaggtgcccatcctgtggctcaaggaagcatttggtttctccccaggaagagaacacccactctggccgagacagcctgattttctcctggcttcaaaaacattttcaccgcctcccatgtgtgtgggtcctgggtggccgggcctgcccccattgtggtgggacgtcccagtgatccagggagctgcccgtagccactgctgggccctcccaccagcgcggtgctgcccctgcctgcgttccctgggcagcactctgagccccaacaggcccgccaggccttgatgtacccgccgcacccaggcctccatcctgccgcagtttcagtgggatgtcccacatgggctttgctgttcgtaacccgagcccaggccaaggctgcctagccctccaggctgaggggcagccctgcccctgcccctgcccttggaaagatactcgcagcctggggttccttcagggtcctggctggagg

SEQ ID NO: 283154 - DNA, 1000 bp, Homo Sapiens
tgctcttaatattttaaattcacaatacactatcgacaactataagtactatgttgtacaacagatctctataacttactcatctaacgtaactgaaactttatatccattgaacaacaacttcccatttcccctaccccccaggccctggcaattgccattctatcctctgcttctatgagttttgctattttagacaccccatctaggtggaatcatgtagtatttgtccttctgtgtctagcttatttcacttagcataatatcctccagattcttccatgttgtcacaaatggcaaggtatcctttttttaaggctgagtagtatttaggaatatgccatatattctttatccatttatctatcaatggacatttaggttattttcatatcttggctattgtgaataatggttcaatgaacactggagtgcagatatctcttcaagatcctgatttcagttattttggatacatacccagaagtggggctgttggatcatacggaagttttatttttttaattttttgaggagccttcatactgttgcccatattggctgtactattttacattcctatcaacagtatacaagtgttctaatttctccaaatccttacttacatttaattttttgtttttttggatagtagccatcctaacaggtgtgaggtgatatttcactgtggttttaatttctagtttcctgatgattggggatgttgagcaccttttcatataccagttttccatttgtatgttctctttggaaaaaggtctattccagtcctttgcccatcttttaattgggttattaaacgctttcttttattgagttgtaggagtttcttacatgttttggagattttcagatatatggtttgcaaatattttctccaatctgtagatgtttttcctttgctgtgcagaagtcttttaaaataaatattttcatgttaaaaaaaactgagtattaacaattatagcattcaagtagg

SEQ ID NO: 283155 - DNA, 240 bp, Homo Sapiens
  misc_feature (174)..(174): n is a, c, g, or t
  misc_feature (215)..(215): n is a, c, g, or t
ccgccttggctcccaaagtgctaggattacaggcgtgagccactgtgctcagcctggacatgttttttattgtcacagttgggggattgctactggcatcaagtgggtagaggccaggaatgctgctaaacattctacaatgcacagcacagacccccacaacaaagatttatntggtcaaaatgtcaacagcgctgaggtcaacaaactctggnctagatgactaacaagttctcttca

SEQ ID NO: 283156 - DNA, 1000 bp, Homo Sapiens
ctttgttgcccaggctggagtgcagtggcgcgatctcagctcactgcaacccccatctccgaggttcaagtaattctcctgcctcagcttcccaagtagctgggattacaggcacgcaccaccatgtgtggctaattcttttatttttagtagagacagggttttgccatgttggccaggatggtcttgaactcctgacctcaggtgatccaaccacctcggcctcccaaagtgctgggattacaggcgtgagccaccatgcctggccctgagagccctttctatgcagcaaatacttgcctaagattcttctggggctcctcagtgccctcaggatcaagttggtgctcctctgtggcatatgaggccctaagaggcctggccccttacctgcttctctaaattgggctcctgcctctcagtcccctcagcccctccagtctggccaggcttagcacttgcacttcccggaatggctatagacattattccgctatgcctcactaattcctacttaactgacagctctgtcaggtcatcaccacttttatgacctttctcggaccccataggctggatcagatgcctcctgaagaattacagacttcttcctctagacttggaggtgagggaccctctctggaatagagaaggtgttgggagtgtttgttgaatgaaagagtgaatgaatgaagtccttcagtaaggatccctaagcagttactgtgtgcccagtgtgatgccaggtgctgtgcaagctgagcctgggtagggatggggaggagtcctggggaggctgggaccagaactagggatatggactcaccttccacttgctcttggcaaagttcttcttgatctgctcactcaccgactggtggatattcttatctagagctgtatctcctgcaatcctaggatggggttatgtggtgggttgcctatgagggcagaagcagacctgagggccccaaatcccgccccagctcacaggttgtgt

SEQ ID NO: 283157 - DNA, 1000 bp, Homo Sapiens
ttgtaaattcttacctaatgtgcattctctaagaaattcatttatgtgtaacttttctcttgggaacctactgatagtttttcttaccaccattttgtctaatgtaatgagttgatgcgtttttattactatcttatttataacttctaacattagagttacaagggaattttatgttagggtagctataaaataaagaatgattctacaaccacacacgactcgtgcttattaatttagagtcatgacttcaaccttcctgaacattcaggagccaattattgtcaaaagtaaacgatgctgaataaagtagatgtggtaaccatttggcaatgttagcgctgacatttatgtgcctataacatatctgagcagcatgttaaacctcttataaggtccagagctcttcaagcagtgtttccaaattcttttgaacccatgacccaccaagcaagcagatctttgtgaacttttattttctttaatttgtatcatgaaaaacaaatgtgttacatatttttcaaatgcacaattaattataataatacattttttttttttgagatggagtctcactctgtcacccaggctggagttcagtggtgcaatctcagctcactgcaacctccgcctccctggttcaaatgattctcctgcctcagcctcccgagtagctgggattacaggcatgtgccaccacgcctggctaatttttgtatttttagtacagacggggtttcaccatgttggccaggatggtctcgatctcttgacctcatgatctgcccacctcagcctcccaaagtgctgggattacaggcatgagccaccgcgcccggccaaagaaatccattctatggcccactcttgagaatgccattcccctaaaataatcagtctttggagtgtatccttccaaccttttaatgtgcatattctatagagagattatcttttacataagttttatacattatcttattttctctgatatgagctc

SEQ ID NO: 283158 - DNA, 1000 bp, Homo Sapiens
acatttgaagagaactctaagaaatggaagagtaggactagcttcctttgcaaagggaatggaaaaaggagaggcattttcagccttgtagccattgggcttagaagagacttctaggactttaccgataccctggtctgagagcgaagtttgaaggggtttaatgtggacaggaagaggcagtaccagtgagctgctctagggtactctgaggttgtaacaaggcctgttgggggttttccttgcagctgatcagtggtgagtacatcggagccctggccatgagtgagcccaatgcaggctctgatgttgtctctatgaagctcaaagcggaaaagaaaggtgaggccactctcaacttgggagccaaaatgggcagaggtacagacattatcagggtaatggagcaacaattgtgggtggcccctgctgggtttccaaaactttctcaaaggtggacagcttcttgctcagcagaaggtctatggcctggctgagacaggccaagatggcttgagcaaatagccaacatcctgcccttaggaaatcactacatcctgaatggcaacaagttctggatcactaatggccctgatgctgacgtcctgattgtctatgccaagacagatctggctgctgtgccagcttctcggggcatcacagccttcattgtggagaaggtgagtataggtgggtgcagggccaggaggcttctgcctcctgacagtggtaccagagatagcccgttcactgatctcaaatggaatcagtgttgtgtgctctgcaaggcccccagaggtgggggtgaagcacagagcagactgcaaggagggtgaccaaaagtccaggaagtccagggcacatgggtcacttctgaagacggtggagccgtcctcagcgccaggccacacaaagaggtctagaaaggggaggactaaaaggaggtcaggacatgacggtcagggtaccattggtggatctgatgaatgtggccatggga

SEQ ID NO: 283159 - DNA, 1000 bp, Homo Sapiens; identical to SEQ ID NO: 206976

SEQ ID NO: 283160 - DNA, 758 bp, Homo Sapiens
  misc_feature (30)..(30): n is a, c, g, or t
  misc_feature (39)..(39): n is a, c, g, or t
  misc_feature (65)..(65): n is a, c, g, or t
  misc_feature (120)..(120): n is a, c, g, or t
  misc_feature (633)..(633): n is a, c, g, or t
  misc_feature (640)..(640): n is a, c, g, or t
  misc_feature (679)..(679): n is a, c, g, or t
  misc_feature (701)..(701): n is a, c, g, or t
  misc_feature (704)..(704): n is a, c, g, or t
  misc_feature (706)..(706): n is a, c, g, or t
  misc_feature (740)..(740): n is a, c, g, or t
  misc_feature (754)..(754): n is a, c, g, or t
tatgttttattatctcctcttgttatttgntgtggatcnacagagtgtcagctcccattagcgtnaagtagttcctgtgtcccccaaggacagtgcagtggtggagacgataaactttgnagcagaaaggcctgcttcaaaccccagctttgcctcttatcggctgcctagccttttgaagtcaacctctccaagccttgtctcctgtcactgctctggcctcccaaggcaggaatggtcctgacggccaggcagcacagacggggatgctgagcacagtgtctgcatctgcacttgcaggacagcgactatgaaaatccagatgagcactcggactcagagatgtacgtgatgcccgccgaggagaacgctgatgacagctacgagccgcctccagtagagcaggaaaccaggccggttcacccagccctgcccttcgccagaggcgagtatataggtgaggtcccccgcagacctgcgcactcggccttccaggcccatggggaggtgggggtgtccaagattgcagggtggggacaaacctggctgctgcttgagggcctctgccagccgccgctcccgcacctccaagcaggggatctgggctccgaggtaaaggatcccaagctgtanggctttnccattccaggggaagaggcgtccttcctagatgggaacnttgaaagcaggcataacaaacnaananaccaacaaactcaaacccagcataccctgatggntgtgctccctcccnacac

SEQ ID NO: 283161 - DNA, 682 bp, Homo Sapiens
caaaatctatagagaaagaaagtagatttgtggtcgactaggtcaaggaagcggtggatggggagtgactaatgggtgcaaggtttctttttgcataaaaatgtcctaaaattagattgtggtgatggttgtatatgtctgtgaatatactaaaagtcaccaaattgtacaatttacatagtagaattttatgatatgtgaattgcgtctcaataatgctttttaaaaaaatcactccctcccatacagtcaactatgaatgtacagcattcttctcattcagttttgtatttctgttaggctgattatgtggtccccgtggaagataatgatgaaaactatattcatcccacagaaagcagttcacctccacctgaaaaaggtaagagtttgtcgccttaagcacctgaaaatttttagcagttgatcaggatgtataagagtatttggtagtaagcactaagaggctcagaaatgacagtgcccaggactttctcccctgggccacagtgtgtgcttctttggctggttgggcagacagcatcagtgacaacccatctctgtgtatcatagcccttccctgcttccccttcctcttccatgctttaatcttcccatctcacattatgaaagcacctgggtagttctcttcagctgcctcgcttcaaatggatttctcata

SEQ ID NO: 283162 - DNA, 1000 bp, Homo Sapiens
gtagagtgggcgtacaccctgtgatattatttgtaatatcctagaaagatattgctcctaatatcaccgtggctctacaccctgtgatcttaattgtaatatcctacagagatattacttctaataatacagtgggtgtacaccctgtgatattattcataatatattacagagatacgactcctgatatcacagtgtgtgtacaccatgttggtacaccctgtgatcatatttgtaacaacttagaaaaatattacagctaatatcaaagtgggtgtacaccctgcgatgttatttgttatctactaggtagatattactcctaatatcacagtgagtgtacaccatgtgtgtacagactgtgaaattatacataataccctgggaagatattactcctcatatcacagtgggtgtacaccgtgggtgattttttttcctaatatccagcgggggagaggatgatattgcttccaatatcacagaaggtgtacaaccccctgtgatattgttcctaatatccagggaaggagaggatgacattatttgcaatatcactgggggtgtaccacctcccgccgggatattgttcttaatatccggaggtggagagaatgttactcccaatatcacaggaggtgtacaccacccctatttgtaaacaccccctgtgatattattccaaatggcctgtgaaagagtaaccatgactccctttatcgcagggggtgttcagccctgatgatattgttttctaaaatccacggaaggagagtatgctattactcccaatatcgaaggggttgtacacccttttgtgtttttgtgcccaatatccaggaaaatagaggatgatattactcccaatatcgaagtaatcgtgcagcacccctgtgatattcttcctaatatccagaaaggaaaagaatgatattactcccaacagggtaggaaacgtatacccgcgctgtgatatctttcccagtatccaggtggggag

SEQ ID NO: 283163 - DNA, 1000 bp, Homo Sapiens
ggggagcctcatcacctcccagggtatacctagtaatatgacccaggatgcaagagtggctcgcaaatttggaagaaacctacaccccaaccaacccaggacacaaaagtggcttgctaagtcagttaagaaacgaaaccgggagtggggaggtgtgtgaatgtgtgtgaaacagacgattccaaaaggaaccaacgtggggaatggtgtgtgtggagccacaggtctcttagcatagactgtatgctagggaggtgccccacagtttagtgattgtggtggtctgggtttgggactcaaaccctcctttaaagcttagcagtgtctgaaatactcctgtgagggagacagtctaatcggtctgaagtgaaagtaaaacagtgagtgaattgtgctgtaaatgggaggaaatgggagggaagttgttgaaacccaccccattagaatgcatgttaaacaactttaagaaagattatgtgggggattatgggatcaagttgacccccagaggttgagaactgtctgtgaaatagagtggtcctctttcagtattggatggccggccgaaggaactatagatggggaaataattggctgtgtatttaaggtggtgactgaggtcggaggacagcctggacttccaggccaatttccttatattgactcacggctgaatataattcaaactcgacctgtatggctagagccctgcctggcagcttattgcagaacactggtagctcgagctgagccaaaagtgaaagagaattcagctttactgtcagctacaaacagaaaggaaaaaccacaagaaaaaccagttttgcaggaaccaccagcggaaatagaaacccctctcccctatgcaccaatctatccacctttaccaagcctggcccaatagcagccagactcagatgatgatacacctcaggctaaccccaaagtgtgaaatctgagcccttgccccaggaggtcaaggaggaaggtcaaaatgatc

SEQ ID NO: 283164 - DNA, 1000 bp, Homo Sapiens
gaagtcttgatgaaacaagatagctgtttccaaatatttgaactatttactctttgtacgaagcagcaaacttacaattaaaaagtctataggacagactgggaccaaagcctgaaaattcagtcaagaaggaacactctaatacgacagaaggaaaaaaatactctctaatagtgaaggggctgccttacaagatgaattccctatcacagcacacattctagaaaagaccaggcactacttggaagaaatatcagataagtgaggtgctcatctagctgctactactttcccttcaagccttagggtctaagaccagcataagcttggagaggttcaacttctgacatgcagattgctgcagaagacaaattaagacattaaaaccaaatgccaggtagttagaaaaaacaaagttctgcatgagaacaaatctgcatgaccatcccctcctgacttaaaaaataataattaaataaagttctagacacatttgggctcccttggaaaaaaatgccatacaattgcattaacacaactgttgctattaggaatatttacctaataataataatatgtagaacaatcaaaatagggaggaaatagccagaaagtcattcttgcagatggtcacatgtctagggaggcagaaataagaaatgtttaacaagcagtcttctttaagttatgacaaatgatgctctgactttataaaaccccctggccaaggatctgaagtccatccccataggtggaaacaggaatgatagaatcataaaatgttacaatggagaacctctaattcagtcatgtctttccacagatggggagatagaagctcagatagcttagtggatttgctcaatgacgcacagttcattcattgcagagttggggccacaaccttcctcagacctagccttacgatccaggatctcttcctacagcaatgcaccaaattcatttttctagaattgaactaaaaaaaaaaaaaaaaaaa

SEQ ID NO: 283165 - DNA, 1000 bp, Homo Sapiens
aacaaaagaaatgaaagacttacactctgaaaattagaaagggaaaacaaaattgttgaaaaaattaaagaagacctaaatataaatgctcgtggggatggatactctattttccatgatgtgattattatacattgcatacctctatcaaaacacatcatgtactccatatatatatacacctactaaatacccataaaaattaaaaattataaaaataaagaatacctaaaatatagaaatacttcttgcattcatagattggaaaatgtaagtcattgaaatgtcaatgctacccaaaacaatctacagattcaatgtgatgtttattaaaattccaactgttttgcagaaatggataagctaaccctcaagttcatatggaattgaaagtggccttacatagcctgaataatcatgaaaaaaaacaaagttggaagattcatatttcccaatttcaaaacttactaaaaaggtccaattatctaaagagtgtgttactggtatagaaataaatatatagaccactgaattagaatttatatttgagatataaacccttaacatatatagataaactaattttgacatgggttccaagggtattcaatagtaaaaagataatcttttcaataaatggtactaagaaaactggacttccatattaaaaaatgatgtcagatcaccatctgaaaacatacaaaaattaattaaaagaaatcaatcacctaaatatataatctaaaacataaaactcttagaagatcacatagaggtaaaatttcatgaccttggatttggcaatgtatttttcgatatgacaccaaaaggtgacaaaaggcaaaaaaaaaaaaaaaaaaaaaaaaaaaaaaaaaaaaaaaaaaaaaaaaaaaaaaaaaaaaaaaaaaaaaaaaaaaaaaaaaaaaaaaaaaaaaaaaaaaaaaaaaaaaaaaaaaaaaaaaaaaaaaaaaaaaaaaaaaaaaaaaaaaaaaaaaaaaaa

SEQ ID NO: 283166 - DNA, 1000 bp, Homo Sapiens
taattagatgggaaaaggattcacaaggatgatatctggcgtgaagattttgttaaatcaaatgctataaaaatttaaagtaccacccttactaaacatcaatctggttagggaagaggcaaaagtacaaatcctctaattacccacaaaagattagaattcccaataatcagtgaaaaaatgttagtatagagattttccaacttaaaaatgagttgatggtgggaataccaagacacatttctcccaacagtgttataaaatattggtaaattctatgagtagctccactcccaagcctacttatccataatatgctaaaatgccattttttatgaaacccagctaataatatagttcagttaattaacagagaaaaactcaattaaaagtggtttttatatataatgaacaatggttcttatgcttaaggaaaagctgtttaattaaaggaatgaaaaggattaaatgaaacaagctagacatgtatatgtactaggcactttataagcattatacaaatttaatcctcacagccacctaagatatatttcttaaaagaataaagacagagagatataaatatggaatcacaaaagaatataaatagggcacgagttcatttttgcaagctttcaataatcatattttttaaatttcactctaagtctatggctcctccctcccatttacttctctattaaattcaggatggacaattctaaactattgctattgggaaaatgtgatgtttccattgcatctgagtgtcattcattcactcaacaaatgtttattgagctcctaaatgctaactgccttaggacaagtaaataacatacaaaaggagtttacaattaagaaaactaaacaagcagatcacaatcttgttgctagaatagatgaaatacagtatgtacaaggcaccatcaatttgtaagatgaaaagctaagaaaaagaatttgtaagatgaaaaactaaaaaaaaaaaaaaaaaaaa

SEQ ID NO: 283167 - DNA, 1000 bp, Homo Sapiens
attcatatattctggaactggaattatctttgttcctaagcaaccaagtatacatatgaaacggtctgtacattaatgcctcataatagcagctcttatttgggaaagggttatagtacatttaaaccatgtggttttccaagcaagttaagactggctatttgtgtttagtgtcagaatatgttgaattagaagttgaagagtttctaaagtgattttaagggcttgaggagagatgaacccttttgcttagagccagaacttagatatggggtgtaaatatttatattacactaatcattaagagtaatatatttaattttatccatttttttagtgccttttttgaaccaatcactgggctagatgtggggaggacaaacatgtaagcaaatcactgttagaagtaacttgtacaaagtgtgtaaaaggacacagtggtgaaaggggtgacttttaggagaaactttatagagcaaggaccagtaagtttacctaaaaggggaagaagaaatatggagaaattaagtgggaagatggggaggggaagtgtgctaatcacctaagaacctccgtgctacaagaaggagtttgggtttgaccattaggagaaacaattacaaagctgaagcagcatgctaaactgcatttcacaaataccactttggcagcatcaaggatcgattggaggaggcaagactggaggcaggaagactggttaaaaaaatgcatattaggaagatatgagagaaaaatgataatggccttatcaaaggcagcaataatgttccttgcaataggaatgaacagaagtcaacaggaaatattaagagatgggatcaaaaggacatgactgcagattgctgtttagagttatggaaaaaagtagaatccaaaggtaaatctcagatttcttgagtggtggtagagatgatgacacaaaatgtaactttaaaaatggtaattaaaaaaaaatgttttatgcaaaaaataaaaaaaa

SEQ ID NO: 283168 - DNA, 1000 bp, Homo Sapiens
aagaagagctcaataattcattgaaagctactactcagattttggaagaattgaagaaaaccaaggaacaatgaaggtgaaccctagtctcaggattgctagtctcaagatggtaccactgtaattctacctggaaaaggaggtgttttcattcctacagatatttttcataagataaatacccacagtgtatagtaatgaacctggataataaatatcttccagcaaatattttacttagaagacgattatattttttaaattttgagattaattgaatatatacaaacagaaaattaagtacaaatttattatgtttatggctcttatacaactatcaaggtaaaggaaatttaccaattaaatacaaagtagtaaaattcaaaatcacaataattaataatgttctgctgctacaaaatgagatgttgggtttaataatagaaggaagtagcactgttgaaatagaattaaatgggtcttgaattcatttgtgattggaatcagaagtcgcgagttctgaaagggtaaggtttactgcaacattgctaataaataatttcaagatgaaatatacaaagatgagatccaagctctaacatttacttgcaacatgaatatggtactgtgttcttctccgtcccccatcctcattccccctcctcctcctgctgctgtttggtcttcctttggaaattcatgatgccatatcagatggttttagaattctgcactttaataatgtaatgcatatgccatatataatatcccagagggatctgctataatattgcataatcgaattcatatttctgcagcaaaatgtgtggatactctcacaaggcaggataaatagagactatatatactgggccaggtgtggtgactcatgcctagaatcccagcactttgggaggccagggcaggaggatcacttgaggccaggaatttgagaccagcctgggcaacatagtgagacctcatctcttaaaaaaaaaaa

SEQ ID NO: 283169 - DNA, 1000 bp, Homo Sapiens
tggacctaggatacagagtggcttcacaaaataacacattaaataagggctttgagtcagaatttctgcaaaggaactatgcaataaaccaagatagagaacacaggatatttgaacaagaagagaattaagttgcatttagatgcaatcaagtaaggccctaatctcttgaaatcatcagtcatgttacattggaatgtaattgctagttttaactgatggagattccttgcagcttaacataaatatctggatatatttgagagataagaagctgtgtttgcagttacagaattttgctctccttaggatgttgggcttcatgagatttcagagcagatagatcacctgcccagacaagggtggcaatccagtcagactccacctcagacaggaactgccatcacctgcatggagtatgggcagaaacactctgatctgaagaggcactgatggtttcctgacagtttggacaaggacaagccagtagccccagtgagtcaccaaatactgcaaaaagttttattaggcactgtctgaaaacttaaactaagcagagcaggcaggtctataaaatacaaaaggatattcatgattattgcaagaaagagcatgaagcagacacagacacaagtattctgggtcatttacagttagttctctaggactgagaagctgcatctctctactacaactatattaaaaggctgaaaatataaatggatttctgggtcttgcattcaccctagatctcttatcgagctattttaaaaatggaagctaacctccactgcagaaagagttcacacagttagaattaatacagtggcagaaagttctaatagtaacacctttagaaattaattgagtatgctgatttcctcatcattttgaaaactggaattaatactatcacgactatagggtgcagattttatggaaaaaaggttttattcctgggaaaagtaattcaattgcttatgaaaaaaaaaaaaaaaaa

SEQ ID NO: 283170 - DNA, 1000 bp, Homo Sapiens
tcaacttgtaaaaaatggtagtaaaatacaaaaaacataaaatgttctatcttaaccatttttaggagcacagttcagtgttattaaatatattcacaatgttgtgcaaccattaccaccatccatctccataactctgttcatcttataaaactgaaactatggccgttttaagtccccattgcccttcttcccagtaaccactattctattttgtctccatgattttggttactctatatacttcatgtcagtggaattacacagtatttatatttttgtggctgggttatttcacttagcataagtccttaggattcatgtaatgtgtagtatatatcagaatttccttcctttttaaggctaaataataatccagtgaatggaaatagcacattatgctaaagtattcactgctgatggacatttaggttgctacattttagctactatgaattatcattcagccaagcactgtggctcatgcttgcagtcccagctatgcaagaggttaaagcaggaagatcgcttgagtccaggatttcaaggccagcttgggcaacacagtgagacctcatctcttaaaactgtaataggcccacttgctccctcctgccatctggctgacatgaagaactggaggtggcagcagtggtagcctgcatctgaggctcatgggctgcaagcccctgctcgtgcaccatggatgattttgccaaagaaagtttcactgtagtggattatgtcttgttagaaaattgccctaatatgggtgactatgtcgttgctcctcaatttatgaccgacaattatgttcgtgtgactcagcttaactgggatggggtgggtacgcaataaaaagattacatctaagtgagagaaatttagcaattcttgtggttctgagataagtttgaagaaatcacaacatcttgagttgatagaagatactgtggatttggcaaagaaagttgctgtaagtggtaaaaaaaaaaaaaaa

SEQ ID NO: 283171 - DNA, 1000 bp, Homo Sapiens
tccacactcctcactggcctcaggccccaccagccctgcctcgagctagcccctccacccgtcatcactcctgccagactccagatgtccaaggtgctccttggctcccacaagctctcctccagcaccccatcttcccctggttgcccctcggttccccacttccccagtttcccctcccaggttcaagcaattctcctgcctcagcctcccaagtagctgggattacaggtgcctgccaccacgcacagctaatttttgtatttttagtagagacagggttttaccatgttggcctggctggtctcgaactcctgacctttagtgatccatccgtcttggcctcccactgcgcccggccataaacttttaaactaaagcatgatctatcgatacattgcagagcttctttcctttagtatctgaaggtttgagtcaaagctgttttcccatctggaatcagttgcccatttggctatccgcccgagcgttgtggtttcctctcctgttcctggcctgcctttgtgactcactctggagatcaccttcgaggttaatggcttgtggaagagttccaagttttatctctgtcctagttggttaaacatcattttctctttttcaagcaagtgaaaagctttcaatagatagatgtttatttcctaagcactaaatgactcataaattaagtccctgtagatttggaaaaactccttaaactgtatctagaggtctagcacttcctagtaggatagacagtcctttctagatactgtaacttttttctgtaccgctttggagtacagtctttatgaagttgtttgtaagcaaaagggaatagaatttaagcctaaaggctgggcgcgatggctcacatctgtaatcccaatgctttgggaggccaaggcaggtggatcacctgaggtcaggagttcgagaccagcctgaccaacatggtgaaaccccatctcaaaatacaaaaaattatctgggtgtggtg

SEQ ID NO: 283172 - DNA, 1000 bp, Homo Sapiens
ctgattactctgtcgtgctgctgctgagacttgccaagacatatgaaaccactctagagaagtgctgtgccgctgcagatcctcatgaatgctatgccaaagtgttcgatgaatttaaacctcttgtggaagagcctcagaatttaatcaaacaaaattgtgagctttttgagcagcttggagagtacaaattccagaatgcgctattagttcgttacaccaagaaagtaccccaagtgtcaactccaactcttgtagaggtctcaagaaacctaggaaaagtgggcagcaaatgttgtaaacatcctgaagcaaaaagaatgccctgtgcagaagactatctatccgtggtcctgaaccagttatgtgtgttgcatgagaaaacgccagtaagtgacagagtcaccaaatgctgcacagaatccttggtgaacaggcgaccatgcttttcagctctggaagtcgatgaaacatacgttcccaaagagtttaatgctgaaacattcaccttccatgcagatatatgcacactttctgagaaggagagacaaatcaagaaacaaactgcacttgttgagctcgtgaaacacaagcccaaggcaacaaaagagcaactgaaagctgttatggatgatttcgcagcttttgtagagaagtgctgcaaggctgacgataaggagacctgctttgccgaggagggtaaaaaacttgttgctgcaagtcaagctgccttaggcttataacatcacatttaaaagcatctcagcctaccatgagaataagagaaagaaaatgaagatcaaaagcttattcatctgtttttctttttcgttggtgtaaagccaacaccctgtctaaaaaacataaatttctttaatcattttgcctcttttctctgtgcttcaattaataaaaaatggaaagaatctaaaaaaaaaaaaaaaaaaaaaaaaaaaaaaaaaaaaaaaaaaaaaaaaaaaaaaaaaaaaaaaaaaaaaaa

SEQ ID NO: 283173 - DNA, 722 bp, Homo Sapiens; identical to SEQ ID NO: 23185

SEQ ID NO: 283174 - DNA, 1000 bp, Homo Sapiens
ctcagcaacaaaggactctattttgaagagcaacatatcacaaagctaaatgtgattgtgccaaacacattaggtgcttatttggggtcatgctaggcctttatcaagtaactggaaaacttttcttgcagccacaatctcaatgtcgttagtaggaagataagaggggagaaaaagctgtagaacaaatgtttggggttaccattgaaaatctaatgtctgcaatatttttctcctcacaacttggaaacgttcccagttcattttcagtcctgttgtgagcacagttctgaagggtttattattgtcaaaataagttttgttttgttttgttaatgttgggtttttaatgttgtctcttgacccttaatgctcaggttcttgtgggagttaatcagccacatccaacgttaccttgagggggaagaagagggtgatgctcagaagctaaacaagacatgggccacatgaccctctattgattagccccaagtagaaagtcctgtggttttatgtttaatggaatagttgatcatatatggcataattttctatcagcttcctactcagttactataaacacagacttgaatagtgctttaaatgtgccaaacctaaatgtggtaaactggagggaactatttttaggtagttgaatttttgaaagtcatgatcagccacacaactgttttggacatacttattttctcatgcacttttctgtatgcaaataaagctataaatttactcatttcaataaactggagtggcagaatatcatgtggtaccatcggtttattctacctgctttgagttgacattagaggcaagctataaaacataccagtctgaagtggagaaaatgttagctataatagattctggattgtcacaacagtgaagagaaagtggaaatccatgaaataggaccgtgagtaaattaccgtctgatctatttcacaccttcttctgtctcaaacccacacacactcccttccgg

SEQ ID NO: 283175 - DNA, 1000 bp, Homo Sapiens
aaggtctctccctccctcctctcctgttttttttttttgaggcagagttttgctcttgttgcccaggctggagtgtgatgggctcgatcttggctcaccacaacctctgcctcctgggttcaagcaattctcctgcctcagcctcttgagtagcttggtttataggcgcatgccaccatgcctggctaattttgtgtttttagtagagacagggtttctccatgttggtcaggctggtctcaaactcccaacctcaggtgatctgccctccttggcctcccagagtgctgggattacagggggagccactgtgccggtcccgtcccctccttttttaggcctgaatacaaagtagaagatcactttccttcactgtgctgagaatttctagatactacagttcttactcctctcttccctttgttattcagtgtgaccaggatgggcgggaggggatctgtgtcactgtaggtactgtgcccaggaaggctgggtgaagtccccatctaaattgcaggatggcgaaattatccccatctgtcctaatgggcttccctcctctttgccttttgaactcacttcaaagatgtaggcctcatcttacaggtcctaaatcactcatctggcctggataatctcactgccctggcacattcccatttgtgctggggtatcctgtgtttccttgtcctggtttgtgtgtgtgtgtgtgtgtgtgtgtgtgtgtgtgtgtgtttgtgtgtgtgtgtctgtctattttgatccggcccaagttcctaagtagagcaagaattcatcaaccagctgcctttgtttcatttcacctcagcacgtaccatcgtcctttggggggttgtttgtttttgttttttgctttaaccaaaatgtttgtaaatcttaacctcctgcctaggatttgtacagcatttggtgtgtgcttataagccaataaatattcaatgtgagttccaaaaaaaaaaaaaaaaaaaaaaaaaaaaaa

SEQ ID NO: 283176 - DNA, 1000 bp, Homo Sapiens
ttcagtttcctcgtctgtaaaatggggatgataatggtacctaccttgcagtgttgttataaggattaaaggagacagtgcaagaaaaggccttggttggtgaagagcccaacctcggaggggagctgctgggatcctccttatcttgactgggatgtccctgtctccccctccccttgctccttgaacatggccaaggaaagtgaaaaacaaaaattattcactctgctagcacccttccccttgatgcctgggaataggttttgccaataaacgtatctgtgttggagtggctgccttgcctgaattcccgttcccagagtcgggggtcccgggggtcttggctgaactaggtgggcatggtgtgtgtggcacgggcctggcacagggctgcatctatgcagcaaggggagccaggctgaggtgtgaccctgagccctagggtgggaggccagcacccagagagtgggtagggagcaagagatgagattatgctctgagactccttcctctcctgaataagcaagacctgtgggggtgggaggagggactgtaaggggaccttgccccctgctccttatacttgtgagcccccaattccctttagatcagtggaccccttaccgggaagctggacagcacctttgacagagatgaccagagaagaaaacagaggcccagagagggcacatggccacacaggcacagcgtctcctggccagctttctgcttaccctcatcctggtcccctttggaggctctgtcccctacccccaaccacttccagcaattctagggtgttgctgggctaggtgtcccccaccccgggagaggagggttccaggactggacatctgccctccctagacttccaacgagaggtcagtgcagggctgggccgcctggcttcctgccctagatctatatttactgcctatccccagctgacccctcccaggctagccagggcagctgccaaagggtcagagagctaactctg

SEQ ID NO: 283177 - DNA, 1000 bp, Homo Sapiens; identical to SEQ ID NO: 115002

SEQ ID NO: 283178 - DNA, 1000 bp, Homo Sapiens
agccttttcgtctctgttctgggttctgagagctctgcagtctggaggcacagcagactgaggctgacctgggccctgtcctttctgcctggcagtcacaggatgttgtctctacctggagacaaagctggtttccggtcccagacagctggtcaagggagggtagtgtgggtcaacactggccctcagcactcctgagggggcaaagaggatgggcaaagtttggagcaggaggaatcctaggtaaaggtcaggatcatgttcactggatggtcaggcagcggtggctgaagaggtgactgatgacagatgggtcagccacagtagacatgtccccgaggtcatggtcattctgagcaatcttccgaagcactcgcctcatgattttccctggggaaccacagacctctagttacttggtgaaagcactgacccaccctagccctgccaaaggctttcatccacgcacaccccaccaccaccaggcctcagcccatcccaatccatggaggcctctgaacatacctgagcgggttttaggcaagccaggtgcattctggatgtagtctggtgtggcaatggggccaatcttttctctaactgtaaccaacaaatcatcaagcatttcttcagcacccttagccagacttttcaaaaatcaaagtagagatggctttgttccccacctgtttcctcctcaagtccctgcccacagagacagcctcaggttcactgcttctcttgctctcaacacacttgtctctttactctctcattttatcttatggaactcaggctgtagaatgagcctgctagagtttaaatgccacctttctagcagtgtggccttgggcaagtgatttaacttccatgagtctcagtttcatcatctttagcatgaaggtaacaataagatctgtttcatggaggtgactctagggattaagtggggtaattcatttaaagcacttagcctagcggtggcacaaagtattctaga

SEQ ID NO: 283179 - DNA, 1000 bp, Homo Sapiens
tctctgctctgctttttttctactgttttaatttatactggcatgctaaagccttcctattttgcataataaatgcttcagtgaaaatgcagctttactctaagctttatttcagcagtcaagcttgtaatggcaatttagtcatcagtaaatcagcaggttgcccttgggggaggaggggagcaaaactgctgattctcaggagagaccaggacagttcctgggaacgagcacatgagcacaggtgcatcctgcggcccggaatgcggcaatatgggtggtgtcacacacggcaagtgggccgggcatcccggctgggtggctgtgccttagacagagagagtggggcttggtgcaatacaatgtgtcaggatgggcccagtcttatgccagaaacagagagggctatgggaaaggagccctgcagcacggcaccagcttgtcaggtgcaggaaaacaagcgcgaaaggctggcctggcacccaggcatcagaatagacagcgtgtgagcagaaggtgtccggaagttatgcacagcagctgacgccacagtgcaaaatgtctcagtgcatagggtttgagggagggatggagaacaagtcttttaggcgtttctctcacaaaaggtggccctgtccctagcagtatttcctctaactgcagtggctatatataaggccccaattcaacaagcccaccaactaatattgtgtaaagactgaaatctataccttgacattttcaaaaaggaaatccaagaccatgactgttaaagcccctgaaaatttgggattccaacaggagccacgcacatcatcactaggcatatttaacaattcacaggcaactcataaggagaaggcatttgatttgtaactcagcctcaggggaattctgctactcactgggcttttaaaactgaaatctggttcatctattagtgaaagagagtgcctctcacatcgagggcttgtgctagaccaagtttcaaggtcagctg

SEQ ID NO: 283180 - DNA, 887 bp, Homo Sapiens
  misc_feature (46)..(46): n is a, c, g, or t
  misc_feature (55)..(55): n is a, c, g, or t
ctgctgctcctggtgctcctgctgcccacgttcctgctgagtcttntggggaacntgctcatcatctccactgtgctgtcctgctcccgcctccacacccccatgacttcttcttgtgcaacctctctatcctggacatcctcttcacctcagtcatctctccaaaagtgttggccaacttaggatctagggataaaaccatctcctttgccggatgtatcacccagtgctatttctactttttcttgggcacagttgagttcctcctgctgacggtcatgtcctatgactgctatgccgccatctgctgccccctgcggtacaccaccatcatgagaccttatgtctgcattgggaccgttgtgttctcttgggtgggaggcttcctgtctgtgctctttccaaccatcctcatctcccagctgcccttctgtggctccaatatcattaaccacttcttctgtgacagtggacccttgctggccctggcctgtgcagacaccactgccatcgagctgatggattttatgctttcttccatggtcatcctctgctgcatagtcctcgtggcctattcctatacgtacatcatcttgaccataatgcgcattccttctgcaagtggaaggaagaaggcctttaatacctgtgcttcccacctgaccatagtcatcatttctagtggcatcactgtgtttatctatgtgactccctcccagaaagaatatctggagatcaacaagatcccttcggttctgagcagtttggtgactccattcctcaacccctttatatatactctgaggaatgacacagtgcagggagtcctcagggatgtgtgggtcagggttcgaggagttttcgaaaagaggatgagggcagtgctg

SEQ ID NO: 283181 - DNA, 1000 bp, Homo Sapiens
ttgtatttttagtagagacagggtttcaccgtattggccaggctggtctcaaactcctgaccttgtgatccgcctgccttggcctcccagagtgctgggattacaggtgtgagtcacctcgcccagcctgtatgctacctaccttttcatattgctaattgaagttattctttcttcccatagattaaacccaacctcactaaacttcgcaaaatggcccaggcctggcgtctctttggaaaagcagagtgtgatacaaggcagagcctgcagcaatccatgcctccctgtgagccaccatgagaacagaatcactggtctaaaaggaacaaagggatgttcactgtatgcctctgagcagagagcagcagcagcaggtaccagcacggccctgactgaatcagcccagtgtccctgagcagcttagacagcagggctctctgtatcagtctttcttgagcagatgattcccctagttgagtagccagatgaaattcaagcctaaagacaattcattcatttgcatccatgggcacagaaggttgctatatagtatctaccttttgctacttatttaatgataaaatttaatgacagtttgattggttgcttggtttgttatttgaagggtgtgatttttgtttttgtacagttttttttcaagcttcacatttgcgtgtatctaattcagctgatgctcaagtccaaggggtagtctgccttcccaggctgcccccagggtttctgcactggtcccctcttttcccttcagtcttcttcacttccctatgctgctgcttcatgtgctacatctcagacttaaagagtttctctactacagtgaaaacattctctagggtctttcatcaggcctttagttattttagggataaaaactattgataaaaaggacaaggatagaacagagaaaatttaaagtcctgttccgggttttttgttatgttttctttaaaaactcagagactgatgttcaatatcc

SEQ ID NO: 283182 - DNA, 1000 bp, Homo Sapiens
atggtttgagctcaggcatttgaggctgtcgtgagctatgattatgccactgctttccagcctgggcaacatagtaagaccccatctcttaaaaaatgaatttggccagacacaggtgcctcacgcctgtaatcccagcactttgggaggctgagctggatcacttgagttcaggagttggagaccaggcctgagcaacaaagcgagatcccatctctacaaaaaccaaaaagttaaaaatcagctgggtatggtggcacgtgcctgtgatcccagctacttgggaggctgaggcaggaggatcgcctgagcccaggaggtggaggttgcagtgagccatgatcgagccactgcactccagcctgggcaacagatgaagaccctatttcagaaatacaactataaaaaaaataaataaatcctccagtctggatcgtttgacgggacttcaggttctttctgaaatcgccgtgttactgttgcactgatgtccggagagacagtgacagcctccgtcagactcccgcgtgaagatgtcacaagggattggcaattgtccccagggacaaaacactgtgtcccccccagtgcagggaaccgtgataagcctttctggtttcggagcacgtaaatgcgtccctgtacagatagtggggattttttgttatgtttgcactttgtatattggttgaaactgttatcacttatatatatatatacacacatatatataaaatctatttatttttgcaaaccctggttgctgtatttgttcagtgactattctcggggccctgtgtagggggttattgcctctgaaatgcctcttctttatgtacaaagattatttgcacgaactggactgtgtgcaacgctttttgggagaatgatgtccccgttgtatgtatgagtggcttctgggagatgggtgtcactttttaaaccactgtatagaaggtttttgtagcctgaatgtcttactgtgatcaattaaatttct

SEQ ID NO: 283183 - DNA, 1000 bp, Homo Sapiens
tcctgccaatcacctggaggtgggggtacttctgtttgatgtaatgcaccatggcgatctgatacaccaagttcccttgggacgagtccaagactatgatgtcgacgcccacctgggtgagcaggtccaggcgatatttgtcatcctcacgggtgcccacagctgccccgcacagcagctgcttgttgggaatccttggaggccagagggtagtcttggttcttcttcaggtcgctgccggtgataatggccaccagctcattgcgatcattgatgataggcagcttccctttcttgctacgctgcaggatctcatttgcctctttcaacgtcacacatgctggagctaccaccagctcgagccttggcgtcatcacctcactgaggagggtggtgtggtccttctcagcaagaaagttgatgtctcgggaggtgacgatgcccaccagcttgctgcccatggtgcccgtctcagtgatggggatgccagagaagccatgccgcatcttggcctccagcacatcacctacagtgtgggaggggctcagcaccgtggggtccgtgatgaagccctgttcaaacttcttgaccttccgtagctccttggcctggagctctggggtgcagttgtggtgaatgaaaccagtatctcccatcagagccatcgcgatggccacgtcagcctctgtcacagtgtccatgggggaggagatcagcggtgtcttcagcgtgatcttccgggtcagggctgaggtaaggtccacctcagctatgaagtctatgagtcctgggagaatcaggaaggcgtcctaggtgaggccttaggcgctggcgaagagctgctgcgcgatgagcccgtcctcgggcatgtagccggtaccaccgctgatcaggtagtccaccacgctgctgggagaccctgcgacccgagagaaacacccgctggaccgcccgccgccgccgccgccgctgccgcgctgctgccacgctgctgccacgc

SEQ ID NO: 283184 - DNA, 1000 bp, Homo Sapiens
gctccagctgtgtctcttcgccatcgtggaccaggagaacaacccagcactgccaggaacacacgcactggtgataggcatcctcgtggtcatcatcagggtgtaccatggcatgaacacaggatatgccatcaatccgtcccgggacctgcccccccgcatcttcaccttcattgctggttggggcaaactggtcttcaggtactgcccctgcccaggcccattcctttgagattttctgtggggcccctgtgtgttgaggtgtggggggtgatgtgaggggcagcacaggagggtcctgcagagcccccaggtggcctggggagcaggagtgagtcccaacatttccccaggccagtacagatacagatcctgcacctgcactgagtgtcaaccctgtccctgaatcgggctgaggctgaccagggccccgggttgggggtgtttcctgggttagcctgaggatgactcctctgctcaaccagtcttggcccgaggtggatgagggtgctgtcctgggcatcagccccctcagccggcctctgcctcttgcctgcagcgatggggagaacttgtggtgggtgccagtggtggcaccacttctgggtgcctctctaggtggcatcatctacctggtcttcattggctccaccatcccacgggagcccctgaaattggaggactctgtggcatatgaagaccacgggataaccgtattgcccaagatgggatctcatgaacccatgatctctccccttaccctcatctccgtgagccctgccaacagatcttcagtccaccctgccccacccttacatgaatccatggccctagagcacttctaagcagagattatttgtgatcccatcccttccccaataaagagaagcttgtcccacagcagtacccccacttcctgggggcctcctgtggctgggcttccctcctgggttcttccaggagctctagggctatgtcttagcccaaggtgtagaggtga

SEQ ID NO: 283185 - DNA, 1000 bp, Homo Sapiens
ttttacataacactgcaatgacaattttcctacataaccgtttcctcaaaaatcaattctgaaaactttctgctgatttttttgtcaccacaacctctgccttctgggttcaagcaattctcctgcctcagcctcccgagaagctgggattacaggcatgtgccaccatgcccagctaattttgtatttttagtagagatgggactcctccatgttagtcaggctagtctcgaactcctaacctcagatgatccacctgccttggcctcccaaagtgccgggattacaggcatgagccacagtgactggctgtagatagaatactctaacatggcacagcacaacaggctataatgctgcttcacacaaataatattgttggagttttcatataggaagagctagattctgtgtgctttgtgcctcgatcatactttgtatgtattttatttactagtgtcttattgcctttataaagtaaccagtttgaccaaagtagtaggtaataaccttcatttaaaatgtccagtgacacggaagatttgccagtcacttgtgttctgttactgtatttattcagaacagcagaatgaggaggtttgtggtctcttcttcctcttaaacaggtgaaatatgagaaaccttctcagattggcatagaaagtcaggggtcagaaacattagccattccatttaagtgaaagtgagagacaaaaggaaacaaatatttctcaatgaatgacccgtggtgtgggtgtctggagtgccctgttgggtgataacgtccacaggtagtgggggacctcttgtgttcctaatgtggtggcacctcagatgcactaagatgctcagcactccaggtgcacaaggacagtgattagcacagtggttatataaagtctttaaattactctacggatatccccctcagatagtggtttctcgggtatatacccagtaatgagatggctgggtcaaatggtatttctagttctagatc

SEQ ID NO: 283186 - DNA, 1000 bp, Homo Sapiens
gatgggttcagttgtgaccccgggagtcaagagcccggggagcatcccaggagatgctctgtaggcagcgttaggcgttaccagctcttactctgggatgtggactctgggaaggcccatccctgacccaggacacaacctggcccttccatgcaacctcccccactgctcggtgacccagtgtgtggagggtcatcgggagactgcccccagtgaactgctcctcagctaaacagatgtgtgctgtttgtttgcagaccaaggggctgatccccagccaggaccccaggatgtaggacgcccactggctctccctttcttctgagacacatccagcccccccacgtctccctcatatacacagacccaggattatgctgtgagcctgcaggctttggaagtggccctgtcacccgtgctgcacgggattcacagccccagccccatggcccctctccacacctcaaaactcctgccccataacgtcctccgcatccactttccagctcagcagccgcacccgaggctcagcctgaggggtgtgtgcccaggccctcccacttcccgagttgtctgcctctcctcaaatgctgtgtgctgcaattgtccaggcgatgacaatggtgatggctccagagaacacaccagctatttatgagcctctgcccccaggctgggcctgtcactggcataggaaggccagccccgcatctcccactgccaacagctgaagccgagcacagacctccctttgcacgctggaacagttactcacctgtggcttcttcccccagtgtaccgttccactgtggcccacattcttgtgcacgcgggcatttgcaggcacgctctcgcgtagttacctatctgaatgcacaccaagcacatgcgtgcacactctgcgtctgtgattcatttcatgtagtggtctaagctcctcccagggctgtgtggatctgacagggtataggaaaataaaaagcggagaaggtgtcttcag

SEQ ID NO: 283187 - DNA, 1000 bp, Homo Sapiens
cttgaggattggactcttgatggatttctatttttatataactatacagtaagcatttgtattttctctctctaggtataagttactagtttggaatgtccatcaggacctttaataaatgagttaaaaatttgtcttatgagacacacctatttaagcacagattttggctttattgcccaaaaccctcccgaaagggtacggagagtcccctctgtgggctggcagtgtgaatgagatctgtttagtctcgtgcatatagttgctgttttttaaatgaacacagttgagtatttgaagtgaatttgaaaaagaaatgttacttaatctttccctaagcccatgggttacagaatgctagggaggcaatttggttacctgcaatggctgcttttgccagcgaggccaccattcattggtcatcttggtatttgtgtgtgaatctcactttcctcaatgtaaaaaggaatcaagtatggatttcagaggtgctcttagattccccatacacccaagggtaataaacgtgtacaagtacagtgttcatgatacgtgccttggtgggagtccgtggtgccacagggaaggggctcccactgcttctggtctccagggacagtgctgctggaaaggctagtgatgagcttcaccctggagctcctcccgggaccttgcaagcctctccatccagcatcttctctatcttagttgaatgccttctttctgaacatttgttttaagaattattttataaagtcaacaatactttgcttgaattctttcttaatttacgattttttattataaaaaagtatagtgatacaatgggacatgtgaagaatacagaaaagtaaccactttaatgcaataactgttatcataatattgtatttcgtggtagtccttcctgtagatatttttaatgccatttaatgccattgtcaccttggatttatgagtgaaaagtgtttctaaaaatatagaaataatgtcagaaaaa

SEQ ID NO: 283188 - DNA, 1000 bp, Homo Sapiens; identical to SEQ ID NO: 201660

SEQ ID NO: 283189 - DNA, 1000 bp, Homo Sapiens
tgccaaaaaggttggggaccactggtttatccaggttcatccaggttggagtgggttcaggagaaatggggaaatttaggtaaaagtatacaaagttacaaacacgtaggatgaacaaatgggaagacctaatgtacaacatgagggctatagttaatgatagtggtattcaggatttatgctaaataagtagattatagctgctcttgccccaaggggggaaatgtgtaattataggagttgatggatatgtcatacaaataacttaaatacacagaataaaaactattttagtttaaaaaggaacaatatttataaaaaaataaagtgagctcgaaaacattcaaataactgcttaaaaattaaaaaataatatcacataatttaatagaaggaaagaaagagcaagacagcaagaaagaaaaggcaccataaagaaaaacaattttggcccctcctcatttgtagtctcaagctgcctatactccctcgccttgaaaagccacgggcttccgagggatggaggtcaaagccagagtaaagaaagttcccgggggaggccaatccccagctgatgactttccagttccagttagtgtcggagtcccagtttcctctccttaaccaccggacaaacgtctctggagtctctccaatgagcaagaaagcaagtcgggggtaggggaggggcctcacaccagggggtgggcgcagtccctcctccagctccttcaccctccagtagtctcgtgggtccccgagcgccagcgcgggaaccgggaaaaggaaaccgtgttgtgtacgtaagattcaggaaacgaaaccaggagccgcgggtgttggcgcaaaggttactcccagacccttttccggctgacttctgagaaggttgcgcagcagctgtgcccgacagtctagaggcgcagaagaggaagccatcgcctggccccggctctctggaccttgtctcgctcgggagcggaaacagcggcagccagag

SEQ ID NO: 283190 - DNA, 1000 bp, Homo Sapiens
cgcctttaacattttttctttcgtttcaaccttggagaatctgatgattatgtgtgttggggatgttcctttcgtggagtatcttcctggagttctctggatttcctgaatttgaatgttggcctctctagctaggttagggaatttctcatagatgatatcctgaaatgcgttttccaaattggttccgttttccccatctctttcagggacaccaatcagtcttagattcgctctctttacgtgatcccatatttctcggaggttttgttcattgcttttcattcttttttctctattcttgtctgccagtcttatttcagaaagccagtcttcaagctctgaaattctttcctccgctttgtctattctgctattagtacttgtgattgcattatgaaattcttgtagtgtgttttttcagttccgtcaggttggttacattcttctctacatgggctattttgtctgtcagctcctgcaatgttttatcatgatttttagcttgcttgcattgggttacaatgtactcttttaactcagtgaagttcatttctatccatattctgaattctacttatgtcatttcagccatctcagcctcagcccaattccgaacccttgctagagaggtgatgcagtcatttggaggaaagagggcactctggcttcttgagttttcagcattcttgcactgattctttctcatctttgtgggcttatctaccttcagtctttgaggttgctgacctttggattttttttttcttttaacagtctggccatgtttctgtagggctgctgtactttgctgggcttcttctccagttcctagtctccttggattttccagtacctggagctatcaccagtgaaggctgtgaaacagcaaagatgtcagcctgcctcttcctctgggagctccggcccagcgaggtacagacctgttgccagcccaaatgcgcctgcaggacaaggctggagaccctggttgggaggt

SEQ ID NO: 283191 - DNA, 1000 bp, Homo Sapiens; identical to SEQ ID NO: 115003

SEQ ID NO: 283192 - DNA, 1000 bp, Homo Sapiens
cgatggggagattgaaactaaactaattaagggtgatatttataaaacaaggggtggtggacaatctgttcagtttactgatattgagactttaaagcaagaatcaccaaatggtagtcgaaaacgaagatcttccacagtagcacctgcccaaccagatggtgcagagtctgaatggaccgatgtagaaacaaggtgttctgtggctgtggagatgagagcaggatcccagctgggacctggatatcagcatcacgcacaacccaagcgcaaaaagccatgaactgacagtcccagtactgaaagaacattttcatttgtgtggatgatttctcgaaagccatgccagaagcagtcttccaggtcatcttgtagaactccagctttgttgaaaatcacggacctcagctacatcatacactgacccagagcaaagctttccctatggttcaaagacaactagtattcaacaaaccttgtatagtgtatgttttgccatatttaatattaatagcagaggaagactccttttttcatcactgtatgaattttttataatgtttttttaaaatatatttcatgtatacttataaactaattcacacaagtgtttgtcttagatgattaaggaagactatatctagatcatgtctgattttttattgtgacttctccagccctggtctgaatttcttaaggttttataaacaaatgctgctatttattagctgcaagaatgcactttagaactatttgacaattcagactttcaaaataaagatgtaaatgactggccaataataaccattttaggaaggtgttttgaattctgtatgtatatattcactttctgacatttagatatgccaaaagaattaaaatcaaaagcggaattcctgcagcccgggggatccactagttctagagcggccgccaccgcggtggagctccagcttttgttccctttagtgagggttaatttcgagcttggcgtaatcat

SEQ ID NO: 283193 - DNA, 1000 bp, Homo Sapiens
ccctccatagtacccatggcctccttatagaagttaatttgtcttgttagtctctccctctagaatgttggcttcaaaaaggcagggattttcatatattatgtatctccattgcctaggcacattgtcagtgttaaataagtggggacagaaggaattaggctcagaagctgaacaagaagtaatatgcagtatcaactacatctttacttctacccattatttccaaaacacttcagaaacctttgctataatgctgagaattagtcctacagttggtcagttaaattctcaatgtcaaacaaccactttaatgttgaaagtaagccatggacttttgtgacagaacaagcattggcatattaccaaagctaatattcaagtcctggctatcagccctataaagaggtaagaggggaaagtaatggttaagtcacttttcttccactctcatggaacagagaaagaatgagagcttacaataactagaatacaaggaaactggctatttctccctatagcaaaagctcagtccttccagctggatttgagaatgggttgcctgagacgcaatgtttaaattcacccacgttgggtcaagtatttctaaaagcaggaagctctatgtcaagatggcttatcaccctcaatctttcaaacaagctcaaactatgaccatagtaaattagtaggacaggtgttgggacaaactcatcatgtggttaaataaccgtatcaaggtaggcaaaataatgaaaagacagagttcatacattatttcccttaggatataggcaggagtgtcattaaactcggaaatttgtagctgtttctttttccaccaagacagatttttaaaaatcaatttatcacactaatataccatgaggtaggccatgcatgtggcagtttagtgctatggttctttaaattctaatgattatgatctgattatgcagattatcctgagaatcattatctaatctacaggtaatctaga

SEQ ID NO: 283194 - DNA, 1000 bp, Homo Sapiens; identical to SEQ ID NO: 115004

SEQ ID NO: 283195 - DNA, 1000 bp, Homo Sapiens
tcaccgtgttgcccaggctggtgtcgaactcctgacctcaggtgatccacctgccttggccacccaaagtgctgggattacaggcatgaaccacagtgcccagccttgtgtctgggtctttctttgtgtacctctgagtgaacatcctggactgtgaccctcagatcacatctctgcatgttcctctgagcccctctctcagtgtactttgagtacacctccatgtactcagtgcatatctctgcctgccagccaagtctcacttgtgttcccctagggcaggcctcctccttaattcctggtaatgagctccctccttcctctttcctcttgattttgtttttctgaaaacctaggtggggcacttctaggcttggggaaacgtgggtggggtagagttgggtggggtgggaaggggagaagagggactactccacccagtacagggaccccaggggccagagacagcctggatccccgaggaacagtttgtgaggttgctggcctaagcagggcctcgaaccttctggctgggaggagggagcctgtcttgcgggtaggacccctgagctatgggccctgggaatgtggtagtacaaagaaaggaaatatggagatggagaccctggggccaccagggagactggaaggaggcttcctgggtagaacctcggagtctgacgggggcaggggaatgagtgcgtctgcccccagctagggatgggctcctcagggactcagcatctccatgtcccgggctttggcttttggtgccaggtttgtctgaggtaagggagggggtggcagtggaaacacagaggatgtgtctggtctgggcacctaggctgtggagggtgccaggaggggacacctcctctttgtgtaaaggcaaaactagagtctcatctagagtcacagagcagagcggcagagcctgcactagaccccagtcttctcaatcccttccccagagagcatttcgcaacatctcagggagtag

SEQ ID NO: 283196 - DNA, 1000 bp, Homo Sapiens
agttaaagcccacacggagcttagttttttggtaaacacatacactaatcatagaatcacaaaatatacataattataaaagctgatatgtatgaagtaaagatatgtgcctggggaatgtttaccaggaggatctgacctggctttggggtaggagatcagaaaagcttcccagaacaactgactttttgagctgagaccttttaagaaggtgtacgtggggagatattgcaggcagagggaatcatgtgtgttaagtacacagagcaggaaagtgcttgggaacaaaagcttagaaagccaatatagttgagtgatccttaaatccttaagccaaggattctgccacttaatggctatgtgacgttgggtaggcaacttaacttctctgagccctagctatctcatctacaaggtaacgattacaatagtacctgcctcataggggtgctttgagaattataaaactatagcacttggcatagtgcctcgcacaaagtaagcattcaataagaactaggtgtgttgacttgtgaagtaggcattaagggacagtaattatatagaggcccttgaaatcataggccacataaggatattaaggttagttgtactttattctctaaatcagtgtttcccaagcggcacttctcagtctttagtgtcatacaaaccaactgaagatcctgttaaaatgtaactctgcttccaggatggggcctaatatttgggttttctaagaagtttccagacaatgcagatactgctggtctagaaattacactttgaaaagcaaaaagctagagagctatagttctgtgagacattggtagttcagtacagaaagaagaaaagggctgcctgatcaaataaatttaggagatgacaaattcagcagaattccacaggtttcttctcttgggaatttctcagttctctaatttttctaatgtgcgttctgaagctccaagaaggacatatagtatgtagcatttttata

SEQ ID NO: 283197 - DNA, 1000 bp, Homo Sapiens
gcaagaagccagggccttggctgcacaggggtctccgcttctctgtccctgttcttatcacctgcactcagaggcaggtgggcaggggtactacaatttcaaggagtggagactgtgaggtcctggaatcccaaggcatctcctgtagggctgggcccttagaattatgtcactcagacccagtttgtaggtgtctgaagaaactgaggcctgacacaggtgatgcaggcaagaacacccagaaagtccactactgaactgggaccgggacccagtcctccttccccttgtggactcccccagagaccagtgctggggtccttggggaagcctgtttggcagctgtggagctaggccctgagaacacgaccaccctccctcttccctcagcctcaagccgctgaagccactgctgcttcgccgcctcgtaagcccaatggtcagagctggaggctagacccttcagtgcttgggttgagggccagggtgttagattggtttttggagaaggaacgagggcccaggattcttcagcttcttagtttttgacaaattgagctgaggccccatagtcctcgggagggacagggttgagtgccataagtcggcaaaccagggtaaaggtgacaggcagctcagccaggctgcagggggtggcatatacagaggacctggccactactttatgtaccttcttacactaattctgtgaggcaggctgtttgttagctctgctctggacgggaagaagtaggggcagtttggtaggtgtgtgtcaaagctaaacaggctgggtgggcatgagcaagtcagctggttcattcagcagccttaatagacacgaggctacccaacttcactgtggttctgggtgtggccttaggacaatgagctgggaacagtggtaggaaccactggaaaacataccagtgggtctcattcattctgatcacaggtagatcacttctctttggttcccaaccctttaatgcctattaag

SEQ ID NO: 283198 - DNA, 1000 bp, Homo Sapiens
gaggccctggttgggctaatctttcccagggggtcattttaaaagaagaacatatgaatatgtattgggcagaaactcaaggaatgttctggaagtgccccttcagaggcatcacaggatctaaggaccactctagaagagggtatttctcagaagggccactggaaggggtattagcttcagctgcgggagacccaggcttggtttcccttcctgttttatcccttggcaccaccgcctaccgtcccccccgtgtcctctctcttgctactccacggccagtgcttgttttccccaggagccccctgcccctcccctttctctgagaactcttagaaatcccaccaaaccatccccttccacctcaagacccacgcacgcgccatctcagtggtaagacatgtatggcctgtaaacgtctagttacttatttggcagtgattccgaggtctgcttttggagggaacggtgtcacgcctagcatctttagtcagtcatcagatgtttttgagcacttctaatgtgctgtgcaccatgctaggtgccacaggggaccctcggaggcaggctgaagtcctggcccagggagcttacaatctaggtgagaggacaggaagaaagataaaggttaagggccaagacttgtggagggaagaggacaggtaacatccagcaagctggagcagaagggcatctcagcggggctaagtcttgacagaaaggagaagccactggagctgagtgtaagagctgggagggccgaggcagccaccctggggcctgagcaagctgttcatccaggggtatagagaggcccagctgcaaagaagggctgggactgggatatggagctctaagggaccaggtcattgaacttgcttgaaatggccctgtggaccaaagggaactttcctgtgcagcgcgggcccctaattcttcactgaggcccagggtgacaggtccagcttgtcgatggctgagcaatccacgaagtcatagg

SEQ ID NO: 283199 - DNA, 1000 bp, Homo Sapiens
gcataaagcaagattactctataatacaaaaatccaaccaactcaattattgagcacgtacaatgttctagatttctttcccttcctctttgaagagaatatttgtattccaaatactctttgagtatttacaaaaaagattatgtttaatctttacatttgaagccaaagtaatttccacctagaaatgatgctatcagtcctggcatggtggctcacccctataatcccagcactttgggaggctaaggcaggagaattgcttgagcccagcagtttgagaccagcctgggcaacatagagagctcctgtctttaaaaaaaatttttttaattagttggtcttgatagtgcatgcctgtagtcccaactacttgaaaggctgaggtggagagatcatttgagctcaggaggttgaggctgcagtgagctatgattgcgccactgcactcctgcctgagcgactgagcaagatcttgtctctgaagaaaaaaaaagaaataaaaatgctgctatcaaaatcaagcccaaccagaggtagaagagccaagaagcctgggttctcatcctagctctgtctcttctgtctctatctttgtgatcttggactgtcaattccccttcctgtgatccattttactgcaaacataagggttgcagtaaagggttgtctcacgtcttctgctttaaaagcctataaatatatgacctgaaaactccagttacataaaggatctgcagctatctaaggcttggttttcttactgtcatatgatacctgggtctaatgaactctgctgagatcacctcaagtttctgcggttggtaaagagaacaagggaagaacaaacatcccttttattgctccaaatggtgatttaatccctacatggtgctgggtggacaatgtgtcactgtcacatgcctttactgtataaatccaaccttctgccagagagaatctgtggttctggccatggagggaggatagtggaaatgat

SEQ ID NO: 283200 - DNA, 1000 bp, Homo Sapiens
aacttcatcttagtcgaatcggggttttcacagtaacctcagtgttttctgagccaatttagatgtttggggatcaattcagaggttgttccttctcccttccaggagggcttttgtaatgttggggtgggcctcctcagtcatcagcagctccctcatgacattgctgaaagcaatcttatctggccttcgctggcgtgctctgaggcattgtatcctcatctggtcccatcatgggtttcgtggtggttttcacgcatgcctcactgtcctaaccagtcggtccctgtggggcctgctagctcttgcagctacctccatgctcatccctgaggcccagaaatcactggcagcctcactttcatgtctacttgactgctgtctccccatgacagtacacagagcttatggaggctaacaaagcttccagggtaccagagaagaaacagggtacatgtctccaaacctgaatagacttcgtagtgggcaaataatggtcacccaaagatgcccacatcctcatctctagaacctatggctatgttgttacacggcaagggtgaattaaagtatagtggaattaagattgctaatcagctgaccttgagataggaagagcgtcccaaattatccaggtgggtccagtggaatcccaagggcccttaaatgtggacgaagcagaagagtcagtgtgagagcaatacagtatgagaaaaacaccactggcctgtactgcctttgcgtagggaagtggacatgagctgaggaaggcaggctgcttctagaagctggcaaatgccagaaaaccgattctcccctaaaacatccagaaaggaatgcagccctgccaacatcttgattttagcccagtgacacccttgtaggactttggacctccagatctgtaagataatacatttgtgttgttttaagccatgaagtttatagtaatttgtttcagcagcaacagaaaacaaatacatttgtattgttatctcct

SEQ ID NO: 283201 - DNA, 1000 bp, Homo Sapiens
tattgtggaagaccctagacataaagtaaaatagtctatcatttactgtgtgaccttcagtaagtcactcaatctctctgagcttgttcatcctttgttttgaaaaaagtactcaaccagcccattacagctttaccgaggctaaatgtgatgatattaatgaaagagttttgccaactgggaagggcatcctaaatgtagagaacatgtgattgtttggtcaaaaatgctgaaggagatactcagggtcaagacacttttcagcatctccctaagataacatcatgggataccacctgttgctgggtgctctgtggcttttacactgatgctgatggtgtgagatccagaaaaacaagaagcagttctacatggccaccccacaacagggtcatcaaatcctgccagtgacacagaggctgacatccagctcccaccctccttcctcccaggctaggggagaaggtagagttgagggcattaggtgggcactgccagtgttgttatagagtggcacagtcctccatggggtgagagtggcacctgggagccttctgcaccatgcattggctcctagttacattgacaatggtgggtctaaaaaggcaagtaaaaatcaaaacataaacgtggaaccccagagtggcttgtgtcctggtggacctaaagtggtgcacatgatctgggtgacttccagcaaattttgactctagaatcaaggacttctatatatgctgatcaccccctctataatgtaactctgtgaatgtacatagtttgcactcattttagccagcagccaaaggctttgtcaaaataaagaaacttttcaaactttaaaaagagaaaagtttatgttgacggtttaattaataactgtgtgaggtgcactgacttagcacctccagaaagggcatacaaacaaaactctgaattaacttttttctactttataaatcatacatgctgccctgggattagaaagaaagtcatcccgaca

SEQ ID NO: 283202 - DNA, 1000 bp, Homo Sapiens
aaaatgtggccctaaagggggttagttgaggggtagggggtagtgaggatcttgatttggatctctttttatttaaatgtgaatttcaacttttgacaatcaaagaaaagacttttgttgaaatagctttactgtttctcaagtgttttggagaaaaaaatcaaccctgcaatcactttttggaattgtcttgatttttcggcagttcaagctatatcgaatatagttctgtgtagagaatgtcactgtagttttgagtgtatacatgtgtgggtgctgataattgtgtattttctttgggggtggaaaaggaaaacaattcaagctgagaaaagtattctcaaagatgcatttttataaattttattaaacaattttgttaaaccattgtcgaatttgttttatttgattccaccacatttccagtcaagagaaaagatgcatggagatggcctcagtcaaaacgtggagaaagaggccgggcgcggtggctcatgcctgtaatctcagcacttcgggaggccgaggcaggtagatcacttgagctcaggagtttgagaccagcctgggcaacgtagtgaaaccctgtctccacaaaaacacaaaaattagctgggcgtggtggcgcgcgcctgtagtcccagctactcgagaggctgagacatgagaatcacttgaactcaggaggcagaggttgcagtgagccgaggttgcgccactgcacttcagcctaggtgacagaggagactccatctcaaaaaaataaaaaaatttttaaaaaacttcatgctgaagtgacttctccagaagtttctatcattctactggatgaacatgggagaaactacattcacatggtaactttatttgaacagtatccatccatgtggcatgtgatgaaaccaataaaattcccatgtccacgggagactgtgtgggccaagctgaaggacgggacagagcaaagtttcaaacgatgttctcggggtcagcaagtgag

SEQ ID NO: 283203 - DNA, 1000 bp, Homo Sapiens
aggtagtttctaagcaaattacctagcatacagtcattacagacaaagaaatggaaaatatgaaagagattaagagatgcagaagatagaatgagaagttccaaaatatgtctagtaggtgttccctagaaattgagctcagtgagaatgggaagaagtaatatttgaaaaggtaaaggatgaatgttttctagagttgatgaatgacattaatcttgaagttaaagaagcacactgagtcttgagcagactatataaaaagtaaaccaggctttaatacatatgggaacataatatatgataaaagtggtatttgaaatcaagattaggatggactttcaataaatggtgttgataaaactgagtaatgatctgaaaaaatattttcataccatttatgaggatagactcccataaatcagaaagaaaaaaaaacatgggcaaagcaaggcctttttcatccattcaaaatccataaactagaaaggaaaaggttaataaaatgaattcgttaaaaaatcataaacttctgtctgacacaaagaagtcatgagtaaaaacaatcctatggttaatatcctcatccagtagttctcttagaatagtcctaaaagtgcttttgtggttcaaagagtaatatcttgagattttttgtgcatgttgtcaaattaccctttagaatgcctgttgcttttaaaataatttttcattttagcattttattgtttatccaattatggactgttttacatactcagtagacaacacaaagcctcacagttaccctgttctttttcttttaggcatcaggtatgtgaaaaagaagagatcaaggctttgaaaacattaagtattttttaccaagctgggaattccaaagctgggaagccaattttttatgttgcaaggaggtacgaaatactatgttttggtgtctcttaacagaattttttaaatgatagtaaatatagagagatggcaagtttggtttttcctgttt

SEQ ID NO: 283204 - DNA, 1000 bp, Homo Sapiens
aactaatacaaagtcaaagtagtctaaatagctaaaatagcatatattttgataattcaggaataaactaagttcagtaaaatttaagtaacagcaaaaaatcttaaaatgaataaattttccaacacagaaatttaaaatgttataattcctacctctcttggtaggaagagatgaagctgttactgtgccatttcccgcaccaagttcgctaaattgttagccagtatagttttttaaattaagaaatgtgtgctctgtttctgtttcaaagttggtttattttaaataaatgaaaattgtaactctttaggctaaaaaagatacaaaattttaatagaataaaatgagttttaaactgtatctcccactttatacgtgtgccaacttttaacctaaattttgtttatgtgactttgtagccaccattagcccttttaaactacttctagagagttaggtaagtcccagattctctccactgaccacaataagaatccacaaattactgtaagattcataactggcagtgtttatagctggtggactgaggtctgcaggttgaatcaaggaaaggtaagcctgatttgaagatgtggaaagtcatctgttttggaatccatctaatggggaaaaagaaatgtatttaacaaacataacaaagagttctttatgaaaggtaccattctacaaactacaaattcatataatccccccaatagctttcacaaaatagatactatcaatatcgtcattttaccagtgaggaaactgaggcaacaagaggttaaacagaataatcacacaggtcctcagtggtagagcccatgttcaaacctggagcccataaactaccccacttttgtggttttattcggtaatctgacatgtcactggctgttctcagccacactagctgttacaacacggaaatacttacatatctgtagttaaacaactatttctttgagtccccccgccccacctcaacctgcccaaa

SEQ ID NO: 283205 - DNA, 1000 bp, Homo Sapiens
ccaatctaaaggggaggtacattggagagctcgaccagaattacttcacatgctatgctccggtgattgtggagccccctgcagacctcaatgtcactgaaggcatggcagctgagctgaaatgtcgggcctccacatccctgacatctgtatcttggattactccaaatggaacagtcatgacacatggggcgtacaaagtgcggatagctgtgctcagtgatggtacgttaaatttcacaaatgtaactgtgcaagatacaggcatgtacacatgtatggtgagtaattccgttgggaatactactgcttcagccaccctgaatgttactgcagcaaccactactcctttctcttacttttcaaccgtcacagtagagactatggaaccgtctcagggtgaggcacggaccacagataacaatgtgggtcccactccagtggtcgactgggagaccaccaatgtgaccacctctctcacaccacagagcacagggtcgacagagaaaaccttcaccatcccagtgactgatataaacagtgggatcccaggaattgatgaggtcatgaagactaccaaaatcatcgttgggtgttttgtggccatcacactcatggctgcagtgatgctggtcattttctacaggatgaggaagcagcaccatcggcaaaaccatcacgccccaacaaggactgttgaaattattaatgtggatgatgagattacgggagacacacccatggaaagccacctgcccatgcctgctatcgagcatgagcacctaaatcactataactcatacaaatctcccttcaaccacacaacaacagttaacacaataaattcaatacacagttcagtgcatgaaccgttattgatccgaatgaactctaaagacaatgtacaagagactcaaatctaaaacatttacagagttacaaaaaacaaacaatcaaaaaaaaagacagtttattaaaaatgacacaaatgactgggcta

SEQ ID NO: 283206 - DNA, 1000 bp, Homo Sapiens
aattagctctgttcccacttttctgtttttcaagaattctcagaaaatcgaccgattagatggtgcacatgccccagagttgaccaaaaaagttcagcgacatgcatctagtggctccttcctatccagcgctaatgaacatcttaaagaagatctcaaccttcgcttgaagaaattgactcatgctgccccctgcatgctgtttatgaaaggaactcctcaagaaccacgctgtggtttcagcaagcagatggtggaaattcttcacaaacataatattcagtttagcagttttgatatcttctcagatgaagaggttcgacagggactcaaagcctattccagttggcctacctatcctcagctctatgtttctggagagctcataggaggacttgatataattaaggagctagaagcatctgaagaactagatacaatttgtcccaaagctcccaaattagaggaaaggctcaaagtgctgacaaataaagcttctgtgatgctctttatgaaaggaaacaaacaggaagcaaaatgtggattcagcaaacaaattctggaaatactaaatagtactggtgttgaatatgaaacattcgatatattggaggatgaagaagttcggcaaggattaaaagcttactcaaattggccaacataccctcagctgtatgtgaaaggggagctggtgggaggattggatattgtgaaggaactgaaagaaaatggtgaattgctgcctatactgagaggagaaaattaataaatcttaaacttggtgcccaactattgtaagaaatatttaattacattgggagcagttcatgatttagtcctcagaaatggactaggaatagaaaattcctgctttctcagttacatgttttgtgtatttcacaatgtcgtgctaaataaatgtatgttacatttttttcccaccaaaaatagaatgcaataaacatcttcaaattattaacaataaaaaaaaaaaaaaaaa

SEQ ID NO: 283207 - DNA, 1000 bp, Homo Sapiens
ctgcagcaacagccttcagctccagtaccactgtcaagccagtcttcattcccacagccacatcttccaggtggccagcccttccatggcgtacagcaacctcttggtcaaacaggcatgccaccatcttttcaaagcccaatattgaaggtgccccaggggctcctattggaaataccttccagcatgtgcagtctttgccaacaaaaaaaattaccaagaaacctattccagatgagcacctcattctaaagaccacatttgaggatcttattcagcgctgcctttcttcagcaacagaccctcaaaccaagaggaagctagatgatgccagcaaacgtttggagtttctgtatgataaacttagggaacagacactttcaccaacaatcaccagtggtttacacaacattgcaaggagcattgaaactcgaaactactcagaaggattgaccatgcatacccacatagttagcaccagcaacttcagtgagacctctgctttcatgccagttctcaaagttgttctcacccaggccaataagctgggtgtctaaaaggacagcttctcttccactcaatattgccatttttccaaagaaacatgttaaaaaaaaagattataagacatggactagtcctcattagcatgtttgcatagcaaccagtcaagagcatttacactatttctgctgatatactcaccttagaactgctcagaaccctggtgctttatttttgttttaatcttttgttgccagtgatgattttcctattctgcaaatagtgtatttcctggattacacatagtatggtttcctgaagtattctgataaatgtgttttttaaaacctcaatatactttttagaaaaggagcatctggttatgcataaagcagagctaaaactaaatttctttcatgtcctccctacttcctcagtgtcaatcagattaaagtgtgtaatcctaaaaaaaaaaaaaaaaaaaaaaaaaaaaaaa

SEQ ID NO: 283208 - DNA, 1000 bp, Homo Sapiens
attcctgcaacagaggctacagtcttgaagggccatctgaggcacactgcacagaaaatggaacctggagccacccagtccctctctgcaaaccaaatccatgccctgttccttttgtgattcccgagaatgctctgctgtctgaaaaggagttttatgttgatcagaatgtgtccatcaaatgtagggaaggttttctgctgcagggccacggcatcattacctacaaccccgacgagacgtggacacagacaagcgccaaatgtgaaaaaatctcatgtggtccaccggctcacgtagaaaatgcaattgctcgaggcgtacattatcaatatggagacatgatcacctactcatgttacagtggatacatgttggagggtttcctgaggagtgtttgtttagaaaatggaacatggacatcacctcctatttgcagagctgtctgtcgatttccatgtcagaatgggggcatctgccaacgcccaaatgcttgttcctgtccagagggctggatggggcgcctctgtgaagaaccaatctgcattcttccctgtctgaacggaggtcgctgtgtggccccttaccagtgtgactgcccgcctggctggacggggtctcgctgtcatacagctgtttgccagtctccctgcttaaatggtggaaaatgtgtaagaccaaaccgatgtcactgtctttcttcttggacgggacataactgttccaggaaaaggaggactgggttttaaccactgcacgaccatctggctctcccaaaagcaggatcatctctcctcggtagtgcctgggcatcctggaacttatgcaaagaaagtccaacatggtgctgggtcttgtttagtaaacttgttacttggggttactttttttattttgtgatatattttgttattccttgtgacatactttcttacatgtttccatttttaaatatgcctgtattttctatataaaaattatattaaatagatgctgctac

SEQ ID NO: 283209 - DNA, 1000 bp, Homo Sapiens
tttcaaaagcaattataaaaattcaaatgttttatggcaaaagttatatatgccagggatgtatgttaacatgtttgatatgatgtggggcggagccttcaaatattgacagttatgagaacaaagaacttcaaatggtttggtaacaggtcacctccaccctcatccctacccctaccccagatgagagcacagaatacaggcagatccaggaatacttggataaaacagaggtttggtgccggatgtgggggccccttgcaaattagggcatgtgagtgggagaagtaaaacataagcaaacatgcaaaggcatacgtgcatggtggccttcctggtaaaatgctcactagtgtgggggactgagaaaggttgtcagagaaagcaagaaagagacaattctccttgataacagatcagagaaactcttagctaagtacacaaaaagccaagagggatagccaaaggctcaccacactagaaaaacaacacataactacagcttcaacagagaatgttcctgctgtagggtgaagcacttatctgggatagtctaaatcagagagcaggaagcctggggactgtccactgcagtttgcactgggaggggctatggcttcacctctcaaaaacaagcccactgtccaaggattctcttttctccacgccctcattctttttttcttttttattattattatactttaaattctagggtacatgtgcacaatgtgcaggtttgttacatgtgtatacatgtgccatgttggtgtgctgcacccgttagctcgtcatttacattaggtatatctcctaatgctatccctcctccctccccctaccacatgacaggccctggtgtgtgacgttccccatcctgtgtccaagtgttctcattgttcaattcccacctatgagtgagaacacgtggtgtttggttttctgtccttgcaatagtttgctgagaatgatggtttctagcttcatccatgtccctaca

SEQ ID NO: 283210 - DNA, 1000 bp, Homo Sapiens
aaaataacatcaaaacttcaatggctaatatgaaggctctgtattaaaaacaaaacaacaaaaaacggtaaaattttatcaagagacataagtaaaacgacaaacataacagtccctaaacaggaagacacagtgctgttaaaatgacaattatgtttcagttatcaattgaatgcaatttcaaacaaaaaccaagcttagtttttggaacttgataaaaatattacaaaacacatctataaaaataaatggcaaatgcatggctagtcaaggaaattttgaaaaagaataatgaaagaagacagagcaccagaacagaatagaatgaccagagatcaacctaagtatgtcaaagaatttagtagatgataaaagagcatttcaaaatcatagcacgagaatggacatccataaccaatattgaaacaagatggtgatagtttggaataaaaaaaaaaaaattagctcccacatattgaaataaaattccaactgaactaaggaactaaactgaaatcaatgaataaaggaataagaagatgcgcacatttatctgaaccaagtgtaggaaaggcctttcgcagcataaaaataaactcataaaggaaaacatgcatatctgactttgcaaatacgaaaaaccacacaacaaaaggtgtcataggaggcagatactgtttaatggacacagagtttcagttcaggatgatgaaaaagttcagatggttggtggtgacagctgcctaacaagatgaatgtatttagtgccactgaattatacactgtacactgaatggtaaagttatattttaccaccaattaaaaaaaagatattatcaaacatttacaatttaagctgggaaaagtactttcaccatatggcagaaccactgtttgcaaagcataaaaaagtcttcaaataaaactcatatatttcaatgagtttatgcaactatggtaactagcacataactaaggtctcaaatgtatctcatgaaag

SEQ ID NO: 283211 - DNA, 1000 bp, Homo Sapiens; identical to SEQ ID NO: 115005

SEQ ID NO: 283212 - DNA, 1000 bp, Homo Sapiens; identical to SEQ ID NO: 203310

SEQ ID NO: 283213 - DNA, 1000 bp, Homo Sapiens; identical to SEQ ID NO: 115007

SEQ ID NO: 283214 - DNA, 998 bp, Homo Sapiens
aaaaaattaaaaactagctggacatggtggtgtgtgcctgtggtcccagctactcaggaggctgaggtgggaggattgcttaagcccaagaggcagaggctgcagtgagctgtgatcatgccactgcactccagcctgagcaacagaaggagaccttgtctcaaaaagaaagaaagaaagagagagagagagagagaggagggagggagggaaacttcagggagaggggacatggaggcctgtcgactcagccgctaccctttcccccactcatcatccctgaaagggcactgctgagacctctgcccctctgattgcacagctgggacagtccctgcagtcccaggaaggggttttgcccgagccgctctgctgctgtgtggctcagcctgactcgaaagagcctggggctccccaggctggggctccgagagtgcagggcagggccgggcggggtgcgggccgggcggggtgtgggcccggcactcaccaaggctgcttctcaccagtgcacggatccagacgggcgggctgtggaccgggcacgggcctggtgcgagatggtcggcatccagtacttcaggtgagggctcagccgccccagcccttggccccgtgccctggcgtggtcggactcaccgaccttcccctcccagccctagtgtggactttcccttccccaagggtctgctctgttccccaagcccaccctggtcctagctggcgtcccctgcccagcctgagcatcctagggtgaccccctcctccctggcccgaacagattgaacccccagctggggacggacatcatgctggatgaggtcagtgacacagtgctggtcaacgccctctgggagaccgaggtctacatctatgagcaccgcgaggagttccagaagctcatccagctgctgctctcaccctgagggtccccagcctctcaccggccccagctgacctcgtccattcagcccctgccaggccaagcccagccactg

SEQ ID NO: 283215 - DNA, 1000 bp, Homo Sapiens
cagaccgaaggctggtgaggggcgtggaaaaccgcccaggctctgctgcagggcaagggtccttgtcgtgacgggggcagccgcctcttgtcccgccggggtcgtgcagactaccggccccctactgccccccacttcctcggaccaggggtgcccatctgagtccctgggggcaggggcgccctcgggctttgacgacgccccctcccgctgggccaggtcgtccatccgcaacgtgcacagcatccaccagcggtcgcggaagcgcctcagccaggacgcctatcgccgcaacagcgtccgttttctgcagcagcgacgccgccaggcgcggccgggaccgcagagccccgggagcccgctcggtgagtgcagcggagagggcaggaagggcaagccgtagaggcggagtcagcgggagaggcggggccagaggtagggccagagtagcggggcgggaccagagggcggaatcagagggagaggcggggactggaggcggggtcagaggaggagccagcgcttagggggcggagcgatccctaagaggcggagtcagagggagaggcacaagcgggaggcgaggccagagcgcggagcaggagttggagaccgcggcggggcgaggccagagagcgctgtgggcggggccagtgtgcggggcggggcgtctgactcggccccgctctctgcccgcagaggaggagcggcagacgcagcgctctaaaccgcagccggcggtgcccccgcggccgagcgccgacctcatcctgaaccgctgcagcgagagcaccaagcggaagctggcgtctgccgtctgaggctggagcgcagtccccagctagcgtctcggcccttgccgcccttgccgccccgtgcctgtacatacgtgttctatagagcctggcgtctggacgccgagggcagccccgacccctgtccagcgcggctcccgccaccctcaataaatgttgcttggagtggaaaaaaaaaaaaaaaa

SEQ ID NO: 283216 - DNA, 1000 bp, Homo Sapiens
tctttgtttgttttcttgagacggagtctcgctctgtcactcaggctggagtgcaatggtgcaatctcggctcactgcaagctctgcctcccaggttcatgccattctcctgcctcagcctcccgagtagctgggactacaggcgtgtgccaccacacctgcctaatttttttgtattttcagtagagacagggttttaccgtgttagccaggatggtctcgatctcctgacctcgtgatccgccctcccaaagtgctgggattacaggtgtgagccaccgcacccggcctatttctgattttaattttgaaaaatcatccatggagctcaggggactttcaggacagtgaaactgctctgtatgatactgaaatgggagatgcatgacattatgcactgtgaaaacccggaggatgtgtgacacagagcgcacaccctaatactccacactcgtgcgagatgttaatggtagaggaaattctgtggggtgaggtttagggtgggggaaggagctatctgagaactcactgtattttctgctcaactttttaagaaacctaacactggtctaaaaaataaagtttattagtaaaagaattatctggtggctaaggagtaagaggtatcacagtcatcagtgtccccataaaatacccttgttgctgcttttcctccaggtttcgcagtctagggaatctatagcaaagcgagctttctatcaaagcaggtattgccaggaagagatccagaggactggggcttctgttccccaagccacttagaaatgtgctccaaattggttccgttcctggagccgggtctgctttggggttgattgagcagtgaaagaatttgaggatgtgagaatctcccaaactaatcacagtctcctgctggggactgaaacccacatgcattaccatggcagtgtctgaagacatcatgaacccttgaaaactatttcctggatgaatattacactaagtcattatcagtcat

SEQ ID NO: 283217 - DNA, 1000 bp, Homo Sapiens
atcgtaatcccacagacaggtcctgctacaggagcagggctgccaaaaagcaacattcttgttctcttcctttaggtcctgaagctcctgcccctccaccactgctgccagcgaccacagtagcagggggaattttacctccccagtatatggagaccatatatgctcaggaagtgcatatatgctcacagatgagcaaacctctcaggcctgattgatgcaagcagtccttagcattcttctccatcccagttttgatctgggaaggtcaaagccaccatttggccccgccttcctttactgcctagccaaatgcacatcttgaatgatgagcaacatatgcacacagcgtgtgggccaaggacgattttggtccctccaccagcagaatgtaattcctttccccaaatcacgcccatagctcacagttttggccctttcctgattgttttgttactaagcctttaaatagctcatctgacttctcctctgtcaatcatctattcaggaggcttggtaccaagttttcatagatccatagtaagtaaatttgaattaaaaagcatttatatgccacacttttgccaaggtagcaacagtggatggaaatgaaatacacatgcttctccacttacaatggggttatgtcctgataaacccattataagtcaaaagtgcacttaataccttgataaacccatcataaagtcaaaaagtcataaaatcgtaagtcaaaccattgttaagtctgggacctgtctgtaaccaaaagacaggcagaaagtagacaaatttgctctgtggatctgaaccttgtgatccagctatgctggtgctcagcctttattagccctggatccatggaagaaaccagagctcagcaaacagagacgccctttgggttccttctttctccttccacccttcctcctcacctccctccttcctctttctccctttctctctccctgtgtctatctcttctctctcctttcctttc

SEQ ID NO: 283218 - DNA, 1000 bp, Homo Sapiens; identical to SEQ ID NO: 115008

SEQ ID NO: 283219 - DNA, 1000 bp, Homo Sapiens
ctccctggttagagtgattttcctgcctcagcctcccaagtagctgagactgcaggcacctgccaccacccccagccaatttttttggtatttttagtagagacagggtttcactatgttggccaggctggtctcgaattcatgacctcatgatctgcctgtcctggcctcccaaaatgctgggattaccatgagccaccacgcccagcccatttagaatttcttttttttttttttttttgagatggggtctcgctcttgtttcccaggctggagtgcagtggcacgatctcggctcactgcgagctccgcctcccgggttcacgccattctcctgcctcagcctcccgagtagctgggattacaggcgcctgccaccacgcccacctaattttttgtatttttaggagagatggggtttcaccatgttagccaggatggtcttgatctcctgacctcgtgatccgcccgccttggcctcccaaagtgctgggattacaggcgtgagccaccgcgcccggctagaatttcttgtaggacaggcttgctagcaaccaattcagtgtttatttgggaatgtctttatttcagcttcattttttgaaggatagtttagctggctatagaattattaattgatcattcttttcagtgtttaaaagtgtcatcatgctaccttctgggttccattgtttctgatgagaagtcatctgtcaaattgtccctttgtacttgaagaattatctttttttctcttgatgttttcaagattttctctttgtctttggcctttagtagtttgtgatgtatctaggtgtggatctcttggtgtgcatcgtatttgggcttcagtaagcctcttagattcatagattaatgttttgttttgttttaccaaatttggagagtttttactcatcatttcaacaaatttttttcctgcccctctctcatctccttttgggagtaccactgcatgtatgttggtgtgcgttctcta

SEQ ID NO: 283220 - DNA, 1000 bp, Homo Sapiens
tgctaaatgtcatgcacaccttgtacacaatcctgctaaagacagatacattctgcttatctataaaattaaaggttttataatgaaagtttttgatgactttttaatttcttcaaaatatgcagaagtatgtagtgagtttttttttactttatagaaatgggaggagatagcctccttaacaggtgcctacaatatctatcattgttgccagccataggaaaaaaaatgttaaaatgtcagcctgccataaaaccataatttcaaagtgcggtatgagaagaatgtccttctgtaatttggaaatacattgagaataaaaatggagaaaaggatgacaataaaacagaaatttatcagctgttcctctaaaactgtttgaagaccattgaagaggtcatatggagcctcggaaagaatggactcattacagctgagctgttccatgttatgagtagatctcaacaaaaaaccacatggcaaaaaatgactcattcatgcagacatcgtaagactgcttcagaacaacaacaaaaaaagttaccaggaaaaggcaacaacatgaaataagacttcatcaatttctctaataaaactgtaacttatttggaatccaactggattcctatagcaatcaaaaagttcaaattacttctgccccttgggaccattttccctttgaaagagaagtttagcttgtggtaacatctatttattgggagttacgtaaggaaaaactctccacaaactgtgttcttcctctactctcaccaccaccaaaatcatcaacacagaaaacttctgtgaccaaatgtagagggaggtttccccacacaccaacagtggacaccagctgggtatcctctgattctccaaaaagatagtgtcagatcctacaggttgggggatcagtccccaagactgccctccccacaccagttgcaagtctgggcctccagaacttctggcctacctaccggcttcaagttggggttcccat

SEQ ID NO: 283221 - DNA, 1000 bp, Homo Sapiens
agactgaaaacaaaaagaaagcttcctttaaaagaaaataccaagaatcatacttaaattatgagttcattgtaacaagtgattcacattctccaagtctgctttgtataacatgtggccaccggttatctaacgaagtaatgaaaccttcaaaattgcttcactacgtggagacaaagcaccccacattaaaagacaagcctttgaagttttttcaaaagaaaaaaaaaacgtgaacatgaaaagaaccaattattgaaggctaccacttcatcgaatgtgtctgcattgagaacattattgtaagtggctaaccacattgctaaagctaagaagctcttttgtaagatgaagaattgaccctgcctgatgcttaggacatttgtcatgaacttttaggagaggctgcagttcaaagggcagcacatgtttctcttttggctagcaccataactagacaaattgatgaaatagcagaggatattgggcacaattgttaggattaatgtgttaccgtcgtatgcaatccaggttgatgagtctactaatgtcaactacaaagcaacagtgcttgttttctgggatatatttttcaggaggatgtgcatgaggatatgttacaaccacttttgttgccaaccaacaccacagttgcaaaactattcaagtcttttaatgattacatctcagaaaaactgaactggtcattttgtgtcagtatgtgcccacacacggagcagctgccatgactggacagctttctgatttcaatactcaggtcaaagcggtcacttctgaatgcgagtctatgcactgtgtcatccatagagaaatgctggctagccaaaacaattcacctgaacttaacagtgcttttcagttgtcaaccacattaaagtacatgtccttaactcatgtctgtttgcacagctctgtgagatggacacagagcacaaacatcttctcttatacatagtagtgagatgcctttctaaatgta

SEQ ID NO: 283222 - DNA, 1000 bp, Homo Sapiens
ggaagtatacacttgtgggagattgttttcagaataaattactaaaattgagtaatctgccacatgaaaaatgggctcaccactgttttggttacatttctttaatcatgatggcattgagcaccattttcacacttattggtaattcatatttctttttctgaaaactaactattcctgtcctttgttgatttttccatttgggtatttgtgtttttcttgttggtttgcaagagctctttgtatattaaggaaaatcacactctgattttcacacagtgttgtaaattttttttctagtttgtcatttgggagtttttaatggagtctctgctctacaaaaatagaatttagcattctgtttatggcttttatgttttgtgttttatttaggaaagattataaaataattcacttattttcatgggttctggaactatttgttttaggaaatgacctaaaaatctcaatggcacctaccattcattttctgcctaacacatagtaggggctctacatgattatctgtaattgttataattacaaggaggtgatggttttcctatttgatagttgatgaagttgaggctcagggaaggcaaagaacttacctaagcaacatagttctaagccagtggttctccaacttgagtatgcatcagaatcacttggaggacttgttaaaatacagatgtctgccgggcgcggtggctcacgcctgtaatcccagcactttgggaggccgaggcgggcggatcacgaggtcaggagatcgagaccatcctggctaacaaggtgaaaccccgtctctactaaaaatacaaaaaattagccgggcgtggcagcgggcgcctgtagtcccagctactcgggaggctgaggcaggagaatggcgkgaacccgggaggcggagcttgcagtgagccgagatcgcgccactgcactccagcctgggcgacagagcgagactccgtctctaaaaaaaaaaaaaaaaaaaaaa

SEQ ID NO: 283223 - DNA, 383 bp, Homo Sapiens
ccaggcatcgtcaagactggtagctctcaaaatgcagtccctggaccaggagcagtagcagcagttagaaacttattagaaatataaactctatttcagtaggcccaccccagatctactgaattagaaactctgaggttggagcccagcaatctgtgttttaacaaatcctccaggtgattccagtgcacactcgagcttgagaaccactggtctcggtactgagtatataacagtgagaagacaaagtcctactctccttgtggaatttgtattccagtgtatgtggtaggggagacagaacaagtaagtaaatattttatttattttattttattttattttattttattttattttattttattttatttgagacagag

SEQ ID NO: 283224 - DNA, 338 bp, Homo Sapiens
gacatcgtgatgacccagtctccagactccctggctgtgtctctgggcgagagggccaccatcaactgcaagtctagccagagtgttttaaacagcgccaacaacaagtactacttagcttggtaccagcagagaccaggacagcctcctaagtcgctcatttactggacgtctacccgggactccggggtccctgaccgattcagtggcagcgggtctgggacagatttcactctcaccatcagcagcctgcaggctgaagatgtggcagtttattactgtcagcaatattataccactcctccaactttcggcggagggaccaaggtggagatcaa

SEQ ID NO: 283225 - DNA, 1000 bp, Homo Sapiens
ctgcctcttcctacacatcgggcgaggcctatattacggatcatttctctactcagaaacctgaaacatcggcattatcctcctgcttacaactatagcaacagccttcataggctatgtcctcccgtgaggccaaatatcattctgaggggccacagtaattacaaacttactatccgccatcccatacattggaacagacctagttcaatgaatctgaggaggctactcagtagacagtcccaccctcacacgattctttacctttcacttcatcttacccttcattattgcagccctagcagcactccacctcctattcttgcacgaaacgggatcaaacaaccccctaggaatcacctcccattccgacaaaatcaccttccacccttactacacaatcaaagacgccctcggcttacttctcttccttctctccttaatgacattaacactattctcaccagacctcctaggcgacccagacaattataccctagccaaccccttaaacacccctccccacatcaagcccgaatgatatttcctattcgcctacacaattctccgatccgtccctaacaaactaggaggcgtccttgccctattactatccatcctcatcctagcaataatccccatcctccatatatccaaacaacaaagcataatatttcgcccactaagccaatcactttattgactcctagccgcagacctcctcattctaacctgaatcggaggacaaccagtaagctacccttttaccatcattggacaagtagcatccgtactatacttcacaacaatcctaatcctaataccaactatctccctaattgaaaacaaaatactcaaatgggcctgtccttgtagtataaactaatacaccagtcttgtaaaccggagatgaaaacctttttccaaggacaaatcagagaaaaagtctttaactccaccattagcacccaaagctaagattctaatttaaactattctc

SEQ ID NO: 283226 - DNA, 1000 bp, Homo Sapiens
ctgcctcttcctacacatcgggcgaggcctatattacggatcatttctctactcagaaacctgaaacatcggcattatcctcctgcttgcaactatagcaacagccttcataggctatgtcctcccgtgaggccaaatatcattctgaggggccacagtaattacaaacttactatccgccatcccatacattgggacagacctagttcaatgaatctgaggaggctactcagtagacagtcccaccctcacacgattctttacctttcacttcatcttacccttcattattgcagccctagcagcactccacctcctattcttgcacgaaacgggatcaaacaaccccctaggaatcacctcccattccgataaaatcaccttccacccttactacacaatcaaagacgccctcggcttacttctcttccttctctccttaatgacattaacactattctcaccagacctcctaggcgacccagacaattataccctagccaaccccttaaacacccctccccacatcaagcccgaatgatatttcctattcgcctacacaattctccgatccgtccctaacaaactaggaggcgtccttgccctattactatccatcctcatcctagcaataatccccatcctccatatatccaaacaacaaagcataatatttcgcccactaagccaatcactttattgactcctagccgcagacctcctcattctaacctgaatcggaggacaaccagtaagctacccttttaccatcattggacaagtagcatccgtactatacttcacaacaatcctaatcctaataccaactatctccctaattgaaaacaaaatactcaaatgggcctgtccttgtagtataaactaatacaccagtcttgtaagccggagatgaaaacctttttccaaggacaaatcagagaaaaagtctttaactccaccattagcacccaaagctaagattctaatttaaactattctc

SEQ ID NO: 283227 - DNA, 1000 bp, Homo Sapiens
ctgcctcttcctacacatcggacgaggcctatattacggatcatttctctactcagaaacctgaaacatcggcattatcctcctgcttgcaactatagcaacagccttcataggctatgtcctcccgtgaggccaaatatcattctgaggggccacagtaattacaaacttactatccgccatcccatacattgggacagacctagttcaatgaatctgaggaggctactcagtagacagtcccaccctcacacgattctttacctttcacttcatcttacccttcattattgcagccctagcagcactccacctcctattcttgcacgaaacgggatcaaacaaccccctaggaatcacctcccattccgataaaatcaccttccacccttactacacaatcaaagacgccctcggcttacttctcttccttctctccttaatgacattaacactattctcaccagacctcctaggcgacccagacaattataccctagccaaccccttaaacacccctccccacatcaagcccgaatgatatttcctattcgcctacacaattctccgatccgtccctaacaaactaggaggcgtccttgccctattactatccatcctcatcctagcaataatccccatcctccatatatccaaacaacaaagcataatatttcgcccactaagccaatcactttattgactcctagccgcagacctcctcattctaacctgaatcggaggacaaccagtaagctacccttttaccatcattggacaagtagcatccgtactatacttcacaacaatcctaatcctaataccaactatctccctaattgaaaacaaaatactcaaatgggcctgtccttgtagtataaactaatacaccagtcttgtaaaccggagatgaaaacctttttccaaggacaaatcagagaaaaagtctttaactccaccattagcacccaaagctaagattctaatttaaactattctc

SEQ ID NO: 283228 - DNA, 1000 bp, Homo Sapiens
tggtggagggctgaatgaatgcagagtctgctctttttgtgtacataggaagcctgcactctgaggagtgcagaggacaagctccggattgagttggggactgagcccactgcggacctgagcagtcagaggagatgtggggccagtatgaggccgtggtggagaccagctgccaggatgtggagcagtggttccaagcccagatgaagggaggctgcagagtagggaggactcggcatccacctgggcagggaggtaattgtgtctctctgtgctccagtctgaaggcatcagcctgcaggccatgtcctgctctaggagctgcagtgctgtcatttggagatcctggagctgagctgctcggtgaacaccctggaggtggagcttcaggctcagcacacgctggtgagtccctctgcatgtatgggagccccagcttggttcccactgcccatgagcagttccttggggtcagtacaggcctcacttagataccaaccagggagtcagcttaaaccttggtttcatctcctttggaggcactttcttgcagatgtggatggtgagtgaatcaacattaactcaggtgagggggctctgatcttaaaggtctactgtgaagacaagtaacacagcattggttcttctggctaaagacagccaaagggagttagattgctcctggacctggcacagtcttggggtgtcacaatcttaagaggctgagggcagagatccacgaattttagcttgcttctccctttccttggtattacagaaggactgtctgtagcactccctgtgtgaagctgaggaccactacggcatggagctggcccagctgcagagcctcatcagcagtgtagaagagcagctgtccaagagttaggctgacctagagtggcagagccaggagtaccaggagcagctggatatcagggcccaactggagggtgagatcaccatgtactggaaccttctggggaacaaaggctgcaag

SEQ ID NO: 283229 - DNA, 1000 bp, Homo Sapiens; identical to SEQ ID NO: 115009

SEQ ID NO: 283230 - DNA, 1000 bp, Homo Sapiens
tgtttttagaatattttttagtttttatgttacttacataacttataaaacctttgtacatgtaggttacttaattcttctgtagtaattatctgaaagaaatgtgtgggtttttttcatgtactttgtggtttaaagattccagaagagtttgcctgatagcactacttgatggagcttgcttgactagattatatgatatataagcctcatgaaaaatatgttcagtgtcatctagctgtggcattttcataagccaattgctagtgaaattttaatttactttaaaattatttttccacacaacttttcttttagcaatctaaaaaattggttaacttttaacagtattccaaacgttgttcactaaatgatgaaaaatggaggtaatagcgccgcactcttaactgattctaatgaagaaagtaagagcatctcaactgagcacagtgtctcatgcctgtaatcccagcactttgggagtccaaggcgggcagatcacctgaggtcaggagttcaagaccagcctaaccaacatggagaaaccccatctctactaaaaatacaaaattggccatgcaaggtggtggatgtttataatcccagctactcggaggctgaggcacgagaattgcttgaatccaagaggcaggggttgcggtgagccgagatcgcgccattgcactccagtctgggcaacaagagcaaaactctgtctcaaaaagaaaaaaaagaaaagagcatctctcttaggaaactgttgagatttcatgtatcttgtaaactcacttcataaaaaggctgtcttttatagtcataagctagcaaacactattaaggatttatataacaaaatcttaacttttatttctaggctctttcattatcatcctcatcttgatatagttccatgaatattaaatgagattatttctgctcttcaggaaatttctgcaccactggttttgtagctgtttcataaaactgttgactaaaagct

SEQ ID NO: 283231 - DNA, 873 bp, Homo Sapiens
aggaacctggcaatgagatggctttacctgagacaagcaggtctggtgggctgaccatttctggccatgacaactccatccagctttcagaaatggactcagatgggcaaaactgacctaagttgacctagactaaacacaccctctccgtttagtacctgaccacctgtttcaaaacgcaggtgtttctggtttagaaacttggaaggcggaatgtgttttcgtgtcttctaggaagggtctgctgaggaccagaccacgtaagcctgagtggatcctgactcagctgcagcccttacctgcctcgcgagacgccatctcaaaaaaaaaaaaaaaaaaaagaaaaaaaaaaagaaagaaagaaattgcataggaagggaggattactaataacatagtactgggacaactggttaattattggtaaaataaaaacagtgagatattcacctctcaacttggaccaaaggatagttcctatggattaaagaaacccataaaaatagtagaaaattcggttatgttatccggtttctagatgggaaagaacttcagaatgttacactcatttattttacaaacttgggatcagattacaataatctcttctgctttttttcccacctgacatgtaaggagcatttatctgtgtcattatttataaacatggtttaattttatattgtgtgtgctgttacaggttttctttattataaaaatgctataacatacctgtattcattttcattactaagaaaagttcttacaaagttttaaagtaatggaagaagtcacaaatcccttgacatatccttgaatcttaggtattttcaaatcaaagaagtttgaacacttaaaaacaagtcaaattgt

SEQ ID NO: 283232 - DNA, 1000 bp, Homo Sapiens; identical to SEQ ID NO: 219517

SEQ ID NO: 283233 - DNA, 1000 bp, Homo Sapiens; identical to SEQ ID NO: 115010

SEQ ID NO: 283234 - DNA, 1000 bp, Homo Sapiens
ggtgctggacagaagtgagagccaagaattgcctgcccacccctgccccggcacaggttctggtcagcaactggcggacactgacacctgtctgggggcgttctacgctggtgattgcccttagctcctgggtcgggggagagtgcggctgcccacaccgtcacccctaccctagtgcagggccaggcctggcccacgccctccactctcgcctctgcagatcacgcgatggaagccggcagccctgtgagcacatcccccgagccagtggagacctgcagcttctgcttccctgagtgcagggcgcccacgcaggagagcgcagtcacgcctgggacccccgaccccacttgtgctggaaggtgggggtgccacaccaggaccacagtcctgcagccttgcccacacatcccagacagtggccttggcattgtgtgtgtgcctgcccaggaggggggcccaggtgcataaatgggggtcagggagggaaaggaggagggagagagatggagaggaggggagagagaaagagaggtggggagaggggagagagatatgaggagagagagacagaggaggcagagagggagagaaacagaggagacagagagggagagagagacagagggagagagagacagaggggaagagaggcagagagggaaagaggcagagaaggaaagagacaggcagagaaggagagaggcagagagggagagaggcagagagggagagaggcagagagacagagagggagagagggacagagagagatagagcaggaggtcggggcactctgagtcccagttcccagtgcagctgtaggtcgtcatcacctaaccacacgtgcaataaagtcctcgtgcctgctgctcacagcccccgagagcccctcctcctggagaataaaacctttggcagctgcccttcctcactgcattgtggttgggtctttgatgaactgagacatcttgtctatcactttcctgggcatcaggct

SEQ ID NO: 283235 - DNA, 1000 bp, Homo Sapiens
cagtgggaaaatggaaaagagcacagccagggaagagactttccgggagcaaggcaagtggctggaccccctcagctattcagggaacttgtggggccatcttacatttctgcagctgtgctgggaagacctggacaaagcaaaggacctgaggggcctgtgggcaggatgccaggggaggggaaaggggggatcccctcttggtgttgatagatattgatacagagcactcctggcagctagcaagggcattgctggggcatttggtcaagctgagggactgacataactacactgcaaggagagagagaggagaggaggctttcctctggagctgctggccagaagcatcatctactgcctgctgctgttcatttgcgggcattgcaatggggctagtgatgtatcaggatgctggggagggattttaggactcagaaagcagcaatatttaaattgttatatacattagaatggtataggaagcttgtaaattgaaaactcctaggctctgcccctcagagattcactgctcatgttacaaactccagggtgattctgatgccaacagtcctcagatcagaccagacacacctacagggtgggttggaccaaatggccatcccatgataacaggctgcccttccagaagcacaggtagcttactttaaaagtgtcaattgggagccaggcgcggtggttcacatctgtaatcccaggactttgggaggccaaggtgggtggatcaagaggtcaggaaatcgagaccatcctggctaatatggtgaaaccccacctctactaaaaatacaaaaaattagccgggcatggtggcacgtgcctgtagtcacagctactcgggaggctgaggcaggagaatggcatgaacctgggaggcagagcttgcagtgagctgagactgagccactggactccagcctgggtgagagagcaagactccatctcaaaaaaataaaaaataaaacataaagcgtcaatt

SEQ ID NO: 283236 - DNA, 1000 bp, Homo Sapiens; identical to SEQ ID NO: 201492
  misc_feature (785)..(785): n is a, c, g, or t
  misc_feature (793)..(793): n is a, c, g, or t
  misc_feature (823)..(823): n is a, c, g, or t
  misc_feature (841)..(841): n is a, c, g, or t
  misc_feature (888)..(888): n is a, c, g, or t
  misc_feature (922)..(922): n is a, c, g, or t
  misc_feature (952)..(952): n is a, c, g, or t
  misc_feature (973)..(973): n is a, c, g, or t
  misc_feature (982)..(982): n is a, c, g, or t
  misc_feature (988)..(988): n is a, c, g, or t
  misc_feature (992)..(992): n is a, c, g, or t

SEQ ID NO: 283237 - DNA, 1000 bp, Homo Sapiens
tggccctgaagggagactctgaggtttgccagtgggacgaattttttagctctgagggtggaaataccaaggaagtggttccattcatttacagctgcacagctacaaagagggagccaattgacaagtcttgagtggaatcattccttacgccagacttgtcagagtggcagtcttattatcctcaccatagtgaaggaaccagaatgtgtcacctcaaaatatgtatctttgacataaatatatatcttttctttgagacagggtctcactctgtcacccaggctagagtgcagtggtgtgatcatggctcactgcagccttgacctcctgggctcaagccatcctcccacctcagcctcctgagtagctaggtctacaggtgtgtaccaccacacctggctaatttttttctattttttttcgtagtgatagtgtattagtccgttctcttgctactctaaagacatacgtgagagtaggtaatttataaaggaaagaggtttaatcaactcatagttcatcatggctggggaggcctcaggaaacttacaatcatgacagaacgtgaaggggaagcaaggcacctttttcacaaggtggcaggaagtagaagtgtcagcaggggagatgccagatgcttataaaaccatcagatctcatgagaactcactcatcttcacgagatcagcatgtgggaaactgccccagtgatccaatcacttctcaccaggtccctcccatgacatatagagattataggaactacaattcaagatgagatttgggtggagacacaaccaaaccatatcagatggggttttgccatgttgcccaagctggtcttgaactcctgagctcaagtggcccacctgccttggccttcgaaagtgttgagattctggtgtgagccaccgtgcccagcctgacataaatattttatcaagctaaaggcaattaagaagatgcaggggagttctctgctttccctgtgtttgcc

SEQ ID NO: 283238 - DNA, 1000 bp, Homo Sapiens
ttcttcttctcctcctttttttttttttttttttttttttttgagacagagtttcgcttttgtcaccgaggctgggattacaagcatgagccaccgagcccggtcaaggctttcatatttttaaaactttgaagtacagtgagaaacataatttagtaagcaactcagtatgcacacacggaatggaaaaagctctgttctatgttatttgttctattttgttcaagtctagctcaatttttcaaaatgctggtcacagctcgccaacttgttttaataaccaacttatgcctttccactgcaatctggagagctcagcctctcaggctgctggtccccctgtcaatcacgatactttggctactttgctttcttcaatcaacaaggctttatcaagaacttatggctcttttaattatctgacttcctggtcaatcagctttgtttgtggttttaaatgaccacaggatagtagaagtgaacataatttcctgcctgtgtaaaaggatgacatcaagaggaaaagaaagcagctcactgggtgaaggaccttgagaaagagatgaacatttcctctcttgagacacaggacaaacaaggtcacgcctgagctcggcaaacaaggacttcggtgcctgcctacggcgccattgcgccctctagtggctgctgaggaaccgctgtccagcccgaagctcacagagccccgttcaggctgccgcaacctacctaggcggccagaatggagacttacaggtgggcgggcatcccggggtgcacacattaccttctcggggctctccaacttaaggccaaggatatctttcttctttttcggctgctgagaaggtggagatagtgccattttcgaatgtgttcctaactcttgggcttctgagactgtcgcagtctgtccaagggtggtgagtggggatcagcaggccctgtttactatgtgctcgcaagaggggactgcggtcatagggatttcagagaggtg

SEQ ID NO: 283239 - DNA, 1000 bp, Homo Sapiens
gagtttcagcagctaccaatctaagctaacccactctaattaggtaatcccctgccctcccccctccctgctctagcagttgccaagccaggcacccaccaaggagccgcggctgaggccagccctccgctgacctctctccatttctcccagggcctcccgctgccggcctggcctccctccaacccacttcccacaagtctccagggcatgtcacttcctccaccctggttctcttcttccagcatcctcagctcctccattctcctgcggcttctccactatcctccctaaaggttcctctagctccctggccccttatcttctgcccacacctcccacccctgctggggccccaggtcagcgccggcccgccgcgtgggtccgctggtggcggatgaggtcggagctctgggagaaggcctttccgcagtcatcgcacttgtaaggccgctcgccactgtggacccggtgatgctgcagaagcgtggaggagcggcagaagcccttgccgcacacggcgcacctgtagggccgctcgcccgtgtgggagcgctggtgctggatgagagtggaggagcgattgaaggtcttgccgcagtcggggcagctgtaggtgcggcctggcaggtgggtgcgggcgtggatggccagcaccgagctctggccaaagcgcttgccgcactcagggcacttgaagggcttctcccgggcgtggctgcgggcatgggggataagggccgaccgctgggagaagctcttgccgcagatgccacagctgaagggcctctgaccggtgtgcaccctctgatggctgcgcagggacgagttctggctatagcacttgccgcactcggtgcagctgtagggccgctcgtggctgtgggtgcgctggtgtcgcaggaggtaggagctgtcgccgaaggccttgccacaatgtgggcacttgtagggcttctggccagagtgagtgcgctggtggcgaagcaggtaagagctg

SEQ ID NO: 283240 - DNA, 1000 bp, Homo Sapiens
ttcctcaagtatgttaatacattattctcaaattattttacaaaataagaaaactgaaacaagtatatattatcattccattcattgatttattcagcaagaattaactacctacctactattaattatgtttcagggactgtgctaagaaaagtgagagagatgtataagcgattcatcatatcaacgtaacaaatgcaaaaggatctataagaattgaatattccatttttaatagtagcatcaatttcagactatcatgtttcctaaaactttctataatgccagttatgaaagttttaggaaaatgcaggcatgaaaatgagtgtcttatcttctcagaacacctgctagttgtgctggctatgatagactcttggctcaaacctcatctatacatctttgagatgagaactgatctcatactattttttaaccacatttgacagagtcatagacagtgaactgtaatatgaagtgtaataaagaattcagagttattccttttaaaaaaattatcttgttgacaacatgtagtattttccagctattacattgatattttgaatgggcacaagagatataaagacctaagcttagaatgcatttatttattttttgtttatttatttatttttgagacagggtcttgctctgtcacccaggctggtgtacagtggtgcaatcacaactcactgcagcctcaaacccctggcctcaagcaatgccccaccttagcctttcaagtatttgggactacaggcacacaccaccacactcagttattttcttttgtaaaggtggggtcccactacatttcccaggcttgtctcaaactcctgggctcaagtgatcctcctgcctcggcctcccaaagcgctgggattacaggcttgagccaccatgccaccctgcctaagctagaatttaaacaatgagattcatgtttatcttaggttgagattcttcaaaagcaaagcctaagtcaagacattggtgc

SEQ ID NO: 283241 - DNA, 1000 bp, Homo Sapiens
tctcatgttaactaaataaaatcaagattatggcagagaggaggaaaaagtcaatgtttgtcaggtagacaattaacaatgttccctcagaaaagcacaattaggagatgattacgttgagatttttttaattcattgagacagtatataggaattttaggaacatgtgtttggcactagatgtggttttggcttttaatcacacataaaaccataatatagcctgatttttttcaactatgcattttctttgcactttttctttattgaatggtaggtaatacattttaaaatgtttttctttaaccacaccaatcttctggttacataacatactgaaatatgtattcctttctgttatttatcagctattttcctttgcagagtaatttatatttaaaactcttagaatttatgtttttaaaatgttaatatcttaacaagaacttatgtatatgttattattgagtacatttacttaaacaaacaaacaaaaacaaagagcaatattaacaaaatggtggagtaggcagcttcatgaattcattcttttagagaaatatcaaaaaataaatagaaactgtcagaatcaactttttcaggactctgaaaaaattcagaattttacagcaactaagcaaatgttgagtcaagaaaaaggcaactttgaaacaacagtaaagtttgtgatatttttacctgccttccccctacctcctcctggatgcagcaatgttttttttttttttttttttttgtcttgaggtagtggtaggcagtctacattcgtagcttgggcccttgggccctggttccatgggaagcagagatgaccttcctcacaaacagttgtgtttgtctgttttaatctgtctaagaaattccctgaaggactgatgcaaagcattcaactctgtttcacttaattttgaattcaggttggtaaagcagtggccgttgttcaaaaacactgttagctgaaataacaaccctcaaatgc

SEQ ID NO: 283242 - DNA, 1000 bp, Homo Sapiens
agtgcattttgtttctgtatatgattctctgtggttttttttgaatccaaatctgtcctctgtagtattttttaaataaatcagtgtttacattagaattcttggcagattgcttcggcctgtgatcctgccctgttgttctgagcctgtgcggtggcggggccgggatgtagtgggttctggtttcccgacggggctggggcccggcatcaggtcttacagagcagaacggtggcaggttgcccccagctgcccagggcctctgcggcctgggtgcccacagccatctttcaggcacttgccctgctatgctcggaccctttctgtacccttggcgcttacctgctggcagcctggccccaccggcatcactgggagtgggctgtgccaccatacaagccacatctgactggcggtatcaggctgtcgcagcgacgtggaagtggggtgaggaggtcacgtcccgtgcttcttgctggctgagggcaaatccctccccacgtgcgcctgttctctctccacctttccgccctaagcccccaggtgcccttactcactcatgttccttgagccaggtgtcttaggtctttgtgtggatgaggaggagcggaggtgtgaggtgtgctgggccttcagggcctgggaaggccatcccagactgagccccaccgccctttcccagctcagtccccaccgagctgacagcttggaaaggggcggttgggaagtgagtagcaccctctgataatgatactgatcaggccagcaggtttgtcaggggtgcacatcctgctcagcagagcatatgaagatcacagcttggtgaagctccactcgagagacctggagcgagactgctgtgcggtgggtgacaggtggaactccagccgggccggggctggtggagcccactgcgagcagtgccaggcacaagattctccccctctcatttcacagggacaaaaccaggctggggcccccaatttccttgccggttgaa

SEQ ID NO: 283243 - DNA, 1000 bp, Homo Sapiens
tggtgtctggcatgtagtggcctactgtattgaaggaatgaacctgcatgccacagagaaagtaggaagactacaaaactgctgtgttgtataatttccttcatgttcatcaatatacttggatacaggtatgtcaagtccttaaccccagtgcctagtctgctgtgagcactcagtgagtggttcagaagagaaagtaatcattctgagttggaatgtcagaaaggactacataaaggaattaggtcccaggaaagagtaacagcacccatcttactgagttgttaaaaggataagtgagataatctacctaaagcaaaatacatgtctggtgagaggcagaaaggaacatgggcatttaagagattaatggaaggaaatgattgatggatatgggcagattgtgatgagctttctgtgccttccagattgaagttagttttttacatgctgaaagtagtaggacttgaagagacaaagcaaggccagttagagaagcggaaatatccagacagtagttgttccggagcttctactttaatttttcaccgctttgtcttaatttttttaagcatttctactctgtccacttaatacatgcaggtctaaacttggctgtatactgtgctgactgttgctcttggaagattgtttcctttgtagtgtttcagtttgtgagcagatgttcagtgaggctgtatctgaaaattctgagattttgtgtggcaaatatcatttatcctcagccctgtactcaccaccactaccacctcctctgccaatgcccagtcccacgtggttggtcataattggtctaagacatagaaaatcctcttccatactttcctagtctcttgcagttaagccatatgacctaactgcaagagagttctagccagtaaattgaaacctcttgaggtttttctagaaaatacctcaagaaaacctcgttttcctaataaagggagattatcatctggtactgcttcttgagggtgta

SEQ ID NO: 283244 - DNA, 1000 bp, Homo Sapiens
atctgtcccagtctagtgccaccaccctgggcaaagccctctgctgcttcagggcccagttttatggtggccgagagctccttagctttggcgcttcatggtccctctggcttttccactctgctggtcccaggctggcccctccccttgccccaggctgccccatccacctgtacttgcagcgggcacggtcggtgatgagaggctggggaaagatgggcacttgctgccttcggggaaggcggggaccccggtatcctgggagctccagctccacggccgtgtccagcagggagaggtagcgacgcacaatcagagcatgaggggtgcctgtggggaggcggggactggggctctgggctgcaggccaccctgctcccctgcctctccagccctcaggggcccagccagccatcctggctgcgtaccactgatgtagttgatgaagccaggggaaaaaacaaagtgcagggctctgaagggcaggcaccgcagttggcacagtgacatcaagatgttgactgtagccaggggtgccacccctgcttcccgagccaggatcctctcaaggcagggcataaactgctgttccaggggcaggtagttcagtcgcccaaagggcaggaccaacttctgtaccacctgtggaggaagagcagttcattacccagtgtcaagtatttctgcagtcatcttttacaagctaagccttagagaggcttagccctcaggtttacaacactgctgtaaagacaggacagtccctccagcctcacagttcaacagcaaagcagtcacgagctgcacgtgactaatcaccagacaggcagaggggacatcgctgtggggtctggccctgaagacttcgagagggatgggtggagctaggatgctgctaagagtgctttgggaaactgcagatttccaggaatgcatgctgctgacaggaggtgggcaagccacagaaagggtgtagaaaagatgcaggtcccaggggaca

SEQ ID NO: 283245 - DNA, 1000 bp, Homo Sapiens
atgggaaaggctaaagtagagggccagggactcctgagtcactcaccagacaccactcatttatcttggagacattagggaaatcctgtttgcctcagtttatccagaagtaaaaatgtacatttgctcttgtcataaatgaatgtatttttaatgtaactctgtaagagtggaatcatatttctataggtgatttacatctggctttaggcagaagcagtgtttcacagtatcattgtttctgtggatagtatcccactttctggcagacttgattgaatcagtatgccttggaaataatagatgtaatttaggctctttagaatctttttttgtagttcagtaaaacaaaactaattgtaagttaattgtaattaaaagatttgtcatttgcattattatctgttgcaaatgtgaaggcaaatagggtgtgattttgttctatattcatcttttgtctccttaggaaaaaccacctccggtcaataagcaggagaatgcaggcactttgaacatcctcagcactctctccaatggcaatagttctaagcaaaaaattccagcagatggagtccacaggatcagagtggactttaaggtaaaggtgttcagtgatcataaagtatattgagtgtcaaagactttaaataaagaaaatgctactaccaaaggtgttgaaagaggaaatcagcaccaactgggggaatgaataagaactcccattagcaggtgggtttagcgctgggagagctttggtcagtgttgttaggtcactgtttgtgaactgactgcagaacatacataatgaaacattcctatccatcctgagcagtatcagaggaagtaattccttcacatggaaagtatcaaaccatgatgattccttgagtcagcaaaactgtaagagaaattcaatcccagtgtattttcgcaatatattcaatatgaattgaacaactaggtgagccttttaatagtccgtgtctgagattaaaacttt

SEQ ID NO: 283246 - DNA, 990 bp, Homo Sapiens
gcactctagcctggacaacagagctagactccatcccaaaaaaaaaaaaaaaagtagccgggcacgtggctcacgcctgtaatcccagcactttgggaggccgaggcgggcggatcatgagggcaggagatcgagaccatcctggctaacacggtgaaaccctgtctctactaaaaatacaaaaaattagcccggcgaggtgcgggcgcctgtagtcccagctactcaggagagtgaggcaggagaatggcgtgaacccgggggcggagcctgcagtgagccgagatcgcgccactgcactccagcttgggtgacaccgagactccgtctcaaaaaaaaataaaaagtttaggctttagcctgtttcttttttggtttcttccttgttgcttttccttctttgtggccccacatgttctagcctaggaatctgcttattctaaaggccatttggcgtaattattttttgaccccaacatcctttagcaattatttggctgaaaaatcacccttccctgtattcactattttaccttctcgaggccgttataagacaagaaaactacttaacctgttcaagtctcaatttcttttctgtaaaatagcaatggtagacagttctttgtaaggagataggtttaagtaagaaaatgtatgttaaacctttatatcgatgtctggcatatagtaagtatgtaatagctgctgtatctacatcataattatagcagttattttaacgttgtctaaatgtataagcatagtagattcacctcttttttttttttttttttttttttttttgagacagagttttgctcttgttgcccaggctggagtgcaatggcatgatcttggctcactgcaacctccacctcccaggttcaagcgattctcctgcctcagccttcccaagtagctgggataataagcatgcaccaccaatcctggctaattttgtatttttagcaggatggggtttctccgtgt

SEQ ID NO: 283247 - DNA, 1000 bp, Homo Sapiens
agtcctttacgagaaggagcagaaggggcccgtgactgccctgtgcactgcaaggccacctggtgtcggccatcagccagaagattttcctgtgaagcctgcgggccagcgagctgacgggcatggccttcatggtcgacaggcagctctacatccaccagatgatcagcgtcaggaacttcatcctggcagccgacctcatgaagagcatctggctgctgttaccaggaggagagcaagacgctgagcctcgtcatgtgatgccaagaccctggaggtgtacagcgtggacttcatggtagacaacacccagctgggttttctggtgtctgaccacgactgcagcctcatggtgtacatgtacctgcctgaagccaaggagagttttgggggcatgtgcctgctgcgctgggcagacttccatgtgggtgcccacatgaacgcattctataggaccctgtgccagggagccactgaggggctcagcaaaaagtcagtggtgggagaataagcatatcgcgtggttcgccacccaggatggtggcatcgggctgctgctgcccatgcaggagaaaacctactggaggctgctgatgctgctgaacgtgctgccacaccacacaggcctcaacctccgcaccttccggatgctgcgtgtggacctccgcaccctccagaatgctgtgctgcaagctgcacggggagctgctcaaccgctacctgtacctgagcaccatggagcagcaagctggccaagaagatcagcaccatatccgacatcatcctggatgacttgctggagacagatggcgtcactgcccacttctagctccatggatgtcgctgccaccaccacaccgcactacctcccaccaccttttttgaacaaaacacaaggaatatatactttctggaagaccatctgatactatgtatcaagaatctcaaaaatattcatatactataatgcaataaggccatttctaaaaatttaccctga

SEQ ID NO: 283248 - DNA, 1000 bp, Homo Sapiens
ttctccctgctcccttcctttttatgctcaaacagcgaaacccaaaacttaaaagatctgaactttcagcatgcattctgattgctgaaagatttcctgatttagtgcattctcaaaagggctttcccataatctaaagggaaatgtaagcacctatactcttgtgcctgtgggcacttcaataataaaaaccaactttttaaactaatcatcttttatcaatgataaagttgttttcagtcccacactaggagagttcctttaagtcagctgatcaagcataagatacttccgtaaagaaataaactaagaaaattttttatggcttgagaaaattccttgaggccaaattaatatatttttctttgttattttatttgagtcattttaaatttgttaatacaaaatttaagataatttacagagacaatttatccagcttccttctaccttaatacaatgttttgtcttcccattatcctctcttttctttatctgttggtagatgtaaaaaacttccatttagttaatcggaggtgtgtattttttaaattgaaatgtgcccagccccttcagctcacacaggaaacatgaactcttaaaaaactgactagtaaatgcaggagaggtggatacctgatgagacacagcgaaagtgacctgtatacacattacaactctggagtacatattaaagtcgtgctatttccagtggtaaatgtctgacttttaagacattcttttaaatatttgtatcattgttaggatgttttaatcagttgttttttaattccatgtaatatatgtagccctcatcagatttatatcaccatatttctccttgtgtcctaagagaattgatgacaattcgtaaccataaattgttttatattagctagtatgtatatttatttttacccaatggctttatctgtttcccaaaatttgtttgggatttgttgaaagcattgtgtaacttctataaacggctattttcttg

SEQ ID NO: 283249 - DNA, 1000 bp, Homo Sapiens
gtcacacctctgatataatccaacaagaagtgttcaaaatattttaaatatttgtgcattttataatcactaaattaatctctctctcttctctttgaacagcttagcagtgtctgcaaaaacgaatcttttcctacaacctgttaactgactggactgttggtaacaaagtaattgtgagaaccatgtcggtcaaaaatttggcatctgctgaaaaaaatgaatgccattttcaagttcccaaattacttctatactgatttcactttccagaaatggagatatgaaaagattctctggaatccttgaaagacttaatagagatacatgagactaagttaatcttggaacaaaattatactttttttgtctttcatgggagtgatactcagttattgcatatctttacaaaattgtaacctttggagaattacagtatttcatcaagaaattagagtttttacataatcaagagcatattctatggaattaacatttagtggactagaattacataagcaggccatcagtgatcacaaggcatatgagtttgtatttatttcctggaacatgagagctaatttggagtacagacagacaccctgctgagtagaatataaaagttaatgtaaagttctgaactataaagagtagtccttttaaatagatgcattgatttgtatatctttgaaaaagttgattatgattaaatgtgtgggtagttaattacaatttagggtaacaaccaggatgtatggattcttgaggttttggcttcttgagctttctcttgagtacttgatactgttttctgaatattttgaggtttctaattaatggtatgctagtttctactgttttatataaaaatttatctagtgttgtataaggactttagtattgtggatgatgggagtggctttttgtggcatatggttgttttaattgaaatattttttcagtttattacaagtgtgaaaaaacaaaaaaaaaaaaaaaa

SEQ ID NO: 283250 - DNA, 1000 bp, Homo Sapiens
gaatttattttcgatttttagcatactgtggggcttttagagctaatatgatctaaattcagaaaatttaattttcatagtaggccaggtgtgaattacttatgtttgctatagaatgcttatttagactaacaataaatttactttgctttctaaggccagtcagcgaatgtggggatgaggcaggatgttttaaatgagccagagatgatccacaaagtgaacagtcgacacagaggtctttgagttggatggttgcaaatatattgacattagagtgaaaactccttcctttgggtaaactaaagaaagataaagtatactaaaaaattttaagatgtgttatacaaaaaaaagtttgggtctaacgtgtccacaaagactgtcaagtgaagaatggtggagattcttggtgtttgagcagccaacctggatgagtgacttcagggacagagcagaggaaagcaaaatgaatttcctttatttacccaaaacttgttgactgaatttttgtataggtccgggaaaataagcctaaacaaatagttgtagccttagaaaaactgttttcccatttctttctgagttagaatcagcatagcctccctgtcgccttaaatgtaaaaatcctattttgattaataccccagcctaagagttatagcaatacgagagactgaatctatttttgtttcgggtctttacctcatagtatgaaattagtaagacactgcatagattttgccctgaatactggtgtgcccaggtatgccgtgctctctctctgtttccagtggtggtaattttaaggcctaaagaaagctggggttaatcctgaagctaaaagtaaatgtttcttgaattgattttgttctgtggtacaaataacatctatgaatatcatatctgtatatatctgaaccaagttgtgtgcagagaggttgatataactatatttacagaaaatgatttttacaattaaagttcacattttaacatg

SEQ ID NO: 283251 - DNA, 1000 bp, Homo Sapiens; identical to SEQ ID NO: 194996

SEQ ID NO: 283252 - DNA, 1000 bp, Homo Sapiens; identical to SEQ ID NO: 194997

SEQ ID NO: 283253 - DNA, 1000 bp, Homo Sapiens
ccataagagtctcctgtccctgccttggatgatttcatgctaatccaaggcagtttatgctaaaaaaatatgaaattcatcaggaattgaattaggttttaatttatcttattttactgcaaatgggccttatgtttagatggtgatggcacttggaaagtatttttatgtttgtttcatcttgaaagtgagcttttaaatacgtatttatgaatgtatattgaagctttattattaggatatgtctttcatttggttaaatgagatgtgaaaaggcaacatacttaatttcattctattttttaaatttctaaacattgaaattatgttttttgaaatgacgctttaaaatatttaacattaaataaatttgtctctgaaaatctagatgtgtgttatgtatctattttctctagacaggaatacatttctaatatggatatatatgtctttttttcaggcctggttgcagtatgcttgaaatctgggatgtggaagacccttccaatgcagctaaccctcccttacgtagcatcctgctcgaagatgccaggctcgaagatgccagtatttcagaatagtgtgtacagagtattgaaggttaactgagaaggaaactacccattacactatggcacaatgccgtgtgtcaaaaacaatcaccctttggcttatttacattaataaaaatcacaagctttaataacagacacttaaaaataagataaaaatggattgaaagtttttctgattactaaaaggtaaattacttttctgttcattgaatgtcagccttattaagcttgtcatataaattattcaatcatgtcatactgcataaacaaatgttcatttcagagttttaaagagaaatgtatataaaagaacaatgaattttaataaatcaagggtacgtaagtcccttttcatccacctaggtgaattgcttcagattttctctagtaccagagtgtacccgctcaaactctttgaaccactt

SEQ ID NO: 283254 - DNA, 1000 bp, Homo Sapiens; identical to SEQ ID NO: 115011

SEQ ID NO: 283255 - DNA, 1000 bp, Homo Sapiens
aggtttcatggctcccaaggcttggaccgtgctgacagaatactacaaatccttggagaaagcttaggctgttaacccagtcactccacctttgacacattactagtaacaagaggggaccacatagtctctgttggcatttctttgtggtgtctgtctggacatgcttcctaaaaacagaccattttccttaacttgcatcagttttggtctgccttatgagttctgttttgaacaagtgtaacacactgatggttttaatgtatcttttccacttattatagttatattcctacaatacaattttaaaattgtctttttatattatatttatgcttctgtgtcatgattttttcaagctgttatattagttgtaaccagtagtattcacattaaatcttgctttttttccccttaaaaaaagaaaaaaattaccaaacaataaacttggctagaccttgttttgaggattttacaagacctttgtagcgattagattttttttctacattgaaaatagaaactgcttcctttcttctttccagtcagctattggtctttccagctgttataatctaaagtattcttatgatctgtgtaagctctgaatgaacttctttactcaataaaattaattttttggcttcttatttatgtgatctattttatattgctttgtttccgtataccctttcctccttgtgaaaaagtttctgatggaagagggaaaacgcaggcatcttttattactggaatccaatacttagtttctaatactgtattacagtgaaatttttgatagcaggagactgtgttccattattttacgtgggaaaataataaggcattcttagtccatccaaaaaaagtttctttgaatatttctctaatattcttaaaacacctgtataacaatttccaaggatttggaacatagatgggtacatactgctttagttaggaaaaactagcttatgctgtagaaacacatctctaaatt

SEQ ID NO: 283256 - DNA, 1000 bp, Homo Sapiens
cctcccacctgtggggcgaactcatcttgggaaacatgaaggtgaaataaaactcaacggaaggcttggctttcctaacacatctcactcaagtcatcaaccaaggctctgtgggctgaacccacttccaacgtgagccttgctggggccaaggcctggccctggtgggaaatgcttgggtgcagcagttcaagccctgaacccaaggggccaaggtgggcagggacatggagcaggcatggaaggctggttcttgtcccccagcccaagccagtgacctggaaaaaatccacctggatgagaagtctttccgttggttgcacaacgaggaccagatggctgtggagaagctctctgacgggatccgcaagtttgccgctgatgcagtgaagctggagcggatgctgacagtgagtgttgtgtgtgggtacctacatatgccaagccctatgagagcccgggcctgggcgtcggggttcaagctgggcagagttaaaactttggtgagaccccaggtctcattcacgtgctgtccagcaagtggggcctgttgaggccatcccagggtggagggtgcatggcacccaggggtgcccccaggatgcttggtgggtcctggctcctctctggcctgtgtggtgactgtggtattggccaccctgtggccgtggcccccacacagagtgcagaccccacaagggcctccctccttccacatggtgccttgtgaggcttcaaggtgcacaaggtagggtggggagacacagctcgtgctctgtttgtttctaggaacgaatgttcaatgcagagaatggaaagtagcgcatccctgaggctggactccagatctgcaccgccggccagctgggatctgactgcacgtggcttctgatgaatcttgcgttttttacaaattggagcagggacagatcatagatttctgattttatgtaaaattttgcctaatacattaaagcagtcacttttcctgtgctgtttc

SEQ ID NO: 283257 - DNA, 875 bp, Homo Sapiens
  misc_feature (11)..(11): n is a, c, g, or t
atgatactatngggggcaacccatttaataagtacttatatgggccatgtaccatgttaagtgctttatgtacattttagtttaattagtaaacaatcgtgtgaggtacgtattattatccccattttgaaaatcaagtaaatgagtctcagtgaggttaaataatttagtcaaggttatgcagccagcatgagtcagaattgaaattcagtcttattctgagttttatattccctcctatgccctgttatactaccaaagtcttaaactctgagaaatttacaagggtgtttctagttaaacgcacgcatgaatgggtttagttttgcttgtgtgatagaacatgtgcaaaatggtcctttttcctttaaccattttgtaactgcctgtgataagcgacctttctgttccctactcactgaatgaaaacatacatgttttaaagaaaaataaaaccattctgtttagctcttggaagcctctgtttctcaaactgttttctttgtaacttatttatctttcttatatctcttctggcccccgatacgcctgtaggtgggctggatcctttccatcctggatgaactgcagctgagccctcagcctcctgtgggggtccttcctctggggactgggaatgacctggctcgaactctcaactggggaggggtaagaactgctctcggggactgcccatatcatcaaacaacaaaccggattccagatccactgatgttctaatggaagaggggggtactgctgctgctgtcccaggcataagttagagttgagaatcaaagtgcccttgagcccttattttgatctgggtagcttcttcagttttaaacttaaaatcagctagaagggaaaggaaa

SEQ ID NO: 283258 - DNA, 1000 bp, Homo Sapiens
ttagcattgccttggtgatgcgggctcttttttggttccatatgaactttaaagtagttttttccaattctgtgaagaaagtcattggtagacatctaagaatttttatgacattgaatcagtcagctgggctacacatcatcaatcagtatttcagcaattttatgcaataaaaataatattagattataaaccaagaactctcatttatgttttagtttattaaattgtttttgtctttattcagacataaatatcacaagtcactctctagcacctgttttacccttcaccatttgatctctaacatgatttctagatttattaccagtgattgtaggattcttacaatgttgaaagttctatgagatcataaaaagggacatagttccttctctaatgaaactaaatttacgtccagatgaaactggacaaccacgtgaaaaaaaaagctgtcaatgaagttataaacatagatctttttaaaagatcttttcttagtttaaaaaatatccactgaataagtgtgtgagatttgatcaagacatttacaaagctaggatcgattttgggcttagcattttatgaaggatgtaaaaaatttgaattaacctggaggaagaatggtcagagtggtatcatagttgataataaatagccctacttaattaaacatgcaattttaaaaacagctcttttgtgattaaagttccccattctacatgaagtcttctagaaattcttgaagaaatatgagtaatttcttcttgacatcatgcctccaaataagatagctcaggacacaattttctgtcaccattcccttactttcccaaaaattcaggaaatgttttctgagatccctccttgcacaaggcactcagctagcaagacattcttggacttgctcagtgcttgtttagtagttccttgtgtatatttacttcaatgtactctcatattttgaacttctggagaaaatatgtctgccctcattgca

SEQ ID NO: 283259 - DNA, 1000 bp, Homo Sapiens
actagagccaggctcttattgcctgaacttccctgtctcaagcctttgaggttttcccaaggcctgtaactagacccacagtcccctgccagaccctgaacctgttatctgcagctctagcctgcgctttcccttgcctgttctggctacacctgctctatgtccccatataactactagcctccctcaaaggtcacctgctctgcgtaacttccagctggttctctacctctactcccagggtactctgtattgtctctagagctctttgaattactctgcatggagtgtagtgtgtgtttctgtcaccaccactagataatgagggttctttacctctgtgtgccccacagcttctagcacaaggtctggcactacagaagcacttagaacattggtgtaattggattgacaggtagagccataactatcagagatggccatataggaagccttttaatttcttcctgttatgtcaggagccattgatttaaatgttaatgaaagtagaaagggcctaaacagaaaaaaagtcagcctcactagtgagggggaatgcaaattaaattgcagtgaaatgcaaatcaagctgaagtgagataccattttatacccactgtgagtggctactttttttttttctttgagacagggtcttgttctgtttcccaggctggagtgcagtggtgcgaacacagctcgctgcagcctctgaccttctgggctcaagccatcctcctacctcagcctcccaagtagctgggactacaggcatgcaccaccatgcccagctaattttttaagtttttgtggagattgggttttttgctctattgcccaggctggtcttgaactcctgggctcaagtgatcaccctgccttggcttcccaaagtgctaggattacaggcatgagccactgtcctagcctggatggttaattttatgtgtcaacttgactgggctaagggatgcccagagagctggtaaaatattcctgg

SEQ ID NO: 283260 - DNA, 1000 bp, Homo Sapiens
aagaccaaaaaacaaaaaaaaaacaaacaagtttcagaagattgtttcttttgaactgaagattggtgcctaaaagaacctacaaagttaaatgattaggaaaacattaagagattgggtcattatattttttgttttcaactatattaagctttcaggaagtaaatattagctgtgttattaaaatcatgacctggtgtttaaccaaatcagcagctttaaaaattttaactcatataacaacgtttaatactggagcttatccttgggctgatttggtcccatctgccttagccctgccatccccatagtttcacacaccctctgcctcacttgctttccttgtctgcaggtgttgagtttgtgacttttagcacattagttagctttgctaagggtcacaaatgctacagtaacgcccaaatctcagacttgatgacaaccaatgttttcactcagttgcatggcagtggttggctgcaaccctgctctatgtctttttcattccaggatccaggctgatgggcagcccgtttggaacatgctgttcttatagaaggaaattaaaaagctggtggaagcacagtggcatatattaatacatccactggctgagatgaatcccttgccaagcccagtgtcactgaggtggggaagtatatttctcttgcaggaagtaactgcaagtgatgttgcagcatgcaggaatgtattgttccacagaatggggaatgaaaaactgagtgcagtcgtactgtaagctgccacactcagtgtctgaaagggagagggagccttcagacaatgccagacaactctgcaacagaccccaatttaggccctgtaaaccagaaatgtaagaaataatttttgcctaatgctgccaactttggggatgctttcttacgataattaaaacatttctcaccaaggaaatttcccattgtctgtggccccggggccaagacttctctcctcacatctggccactcctctatac

SEQ ID NO: 283261 - DNA, 1000 bp, Homo Sapiens
gactctgtctcaaaaaaaaaaaaaaaaaaaaaaggtcatgatgtggctacagtgggttgggacagactaaagagcacaggaaggtggggcagaaatgagataccgtctccacttcctcaactcctatcactctacattttaatacattatgaaatatattcacgtatcggcatggcttacagaataataagaaagtctgcacctgtgcgtccatccgcccacccacaactgaacccaccccaagctgacttcccaccctctgagtcagttcctgtgaaggtcaccaggggcccccacaatgccacatccaacggaccgctctctgtcctcatcttcctcaacctctcagaagccccaaacatgagtaaccatctccttcgaacacttttttctagatttctgcctactctctcctcattcctcaaggcttcgctggtgccttcgcggtctgacctctatctgccaccaggatctgggggctgggtcactgtcttccttgccggcacactctccctagtgatcccttccaagcccatggcttcaatacacctataacggctgaaattcccacctctccatctgctatcgtaggcagaataatggccccccaaagaaggccacgtcctaatccccagaacctgtgaatatgttgccttttatggcaaaagggacttcgtagatgtgagttaataaattaaggatcatgagatgggggggttatcctggattatctaggtgggctcagtgaaatcacaagggtccttctatgagggaggccccgaaaacggtggcatgggcgagccgcagggactcagggggacgttgaggcaggcagaggggagaagtggcgagactgcagggaatgctgggagcctcccaaggaggcctctcccatcccagaagcccccagggctgtcctggctgggctgtaaagccccagtgtaatcacaaaagtccttctaggagggaggcaggagaatcagagtcggagaaagttgtg

SEQ ID NO: 283262 - DNA, 1000 bp, Homo Sapiens
atccagcttcagactgatatatactttcttcactttttatcttgattgattagggtccaccggggcttcctggcaagacaggaccaaagggagaaaaggtatggaccactactttcttcaacccttctttccttggcaattccagcctgttttctgggcatcccactgagaatttcctagttgagatttccaaacatgtgctaactctgccttggtgagaggctgggttccatgatggctgggctgctgcagcacatatgggataacactggtgtattttgacgtggcctatcgacatggcagaggggccgtgagcagcagccaagcaactgagccacatggccatgcccagtcatcagctctactaaggcttctgcttccagaacatctcttccaaagcagcctctccttacctgtcttctccatccatagggggagcttggccgaccaggaaggaaggtatggtctgcgctgttctgtgagtgtcacatgagcgtctgtgcttcatgtgtgtgcatgcactcctagggaggggggaacagcaatgcacttcagtggtcactgatacccaggtggacagtgatggtgctgctgtctcgatggtgacagtagtaaccttgccctttctgtcaacttctttgttcaggagcaggagcctgctactgccaggcattcagacttcttccgggggctgccaaacctggccaaattccacccctctcacttcccgccccaaccccagaccatctcactctgctacccatcagagaaacccttcatagctccaaccagtgacattgaatgactgtcactctctgtttgattaaatttgaataaagtgccagagcagacagaaacaaatggcttttgctttttggctcagctgaaataaatggaggttacttaaggtcacggtgactctgcgtgaaccaaacacatgttatcaaggctctcattagtgtcaggagggagtaaatcagctgcctattatatttgctga

SEQ ID NO: 283263 - DNA, 1000 bp, Homo Sapiens; identical to SEQ ID NO: 195012

SEQ ID NO: 283264 - DNA, 1000 bp, Homo Sapiens
cacaaattttaagttttataaagagcaatgcattaaattcacgtatgttaacaattttgtgtgaagagatgggatctgagcatgtgagtttaccgcttcatgctgaagtacgttggatatcaagagggagaatgttaaaaagattatttgaattacgacatgagattgaaatatttttaagtcaaaagcattcagatttggccaagtattttcatgatgaggaatgggttggaaagctggcctacttatcagatatattttcacttataaatgaattaaatttaagtctccaaggaactttgactactttcttcaatttgtgtaataaaattgatgtatttaagagaaagttaaaaatgtggttgaagcgcacacaagagaatgattatgacatgttcccttcattttctgaattctcaaattcatcaggcttaaatatgacagacatcacaaggattatttttgagcacctggaaggactttctcaagtgttcagtgactgttttccaccagaacaagacttgcgttcaggaaatttgtggataattcacccttttatgaatcaccaaaataataatctcaccgacttcgaagaagaaaagctaacagagctatcttcagatttaggattacaagcactatttaaatcagtgtctgtaactcagttttggataaatgcaaagacaagttacccagaactccatgaaagggcaatgaaatttttattacccttttcaactgtttatttatgtgatgctgccttttcagctttgactgagtcaaaacaaaaaaatctgttgggttctggccctgccctaagacttgcagtcacatctttaattccaaggatagaaaaattagtgaaggagaaagagtagcaatatgcacattgcttaacagtgaagtcaataatcctgtgttaagttttgtataagtatcctaaaagataatttcctaatgtggatttgtgttttcagtgattaaatgttttaataatttt

SEQ ID NO: 283265 - DNA, 1000 bp, Homo Sapiens
aggaaaactgcttttaactttcaagttagtgaatatccaaggaggatatacctgccctatccctaaactgagctgatgaggctctgatagggttcaaggttgtgtgacttctagttctgattccaacccaatagggccatctcacagccccatctctgcatattagtttctccggttggacccttaggctgaaacattgctatcttcctcctgtacatgcagcaggcctgttttttggctaaagaaagtaatgaaaggttcagtttagaaataacaggccaggcacagtggctcatgcctgtaatcccagcgctttgggaggatgaggcgcgtggatcatctgaggtaggagtttgagaccagcctgaccaaaatggtgaaaccccgtctctactaaaaatacaaaaataagccaggcatggtggtgggtgcctgcagtcccagctacttggaaggctgaggcaggagaattgcttgagcccaggaggcggaggttgcagtgagctgagatcgcgccactgcactccaacctgggcaagaagagcaaaactccgtctcaaaaaaaaaaaaaaaaaagaaagaaagaaaaaagaaataacaggccaggtgtggtggctcatgcctgtaatcccagaattttgggaggccaaggcaagcagatcatttatggtcaggagttcgagaccagcctggccaacatggtgaaacccccgtctctattaaaactacaaaaattagccaggtgtggtggtaggcgcctataatcccagctactgaggagggtgaggtaggagaattgcttgaacctgggaggcggacgttgcagtaagctgagatcacaccactgcactccagcctgggacagaccaagactccgtctcaaaaaaaaagaaaagaaaagaaataacacaggtacaagtcatcaaaatcctgaattataattgattatactaagtaatgtgttgttatgagagatttttaaataaaaacttttaattgt

SEQ ID NO: 283266 - DNA, 1000 bp, Homo Sapiens
cttttgttttttaacttactgtacttttactgtttatataacctatatttcaagagagagaagataatgctgaattttaaatttagcatttgaacatctgtccaatagtgaattaatcagtttttttaaaattgatttttaagttgttccagaaaaaaatatatatatatgttttatatatataatctttttatatatataaaaaatcttttttataaattttattttaaaaatcttttaaaaaagatttttatatatatataaagactatatatttatatatagtcttttctgttcataatggcattagtctctgagtacattttatattatctttgttgctacatgtcaggatacaacacaatagttttataaataacaactgtactttgattttaggtactaatttaatgctttagtttttactactttgaagggaggttcatctaagtattactgataacagggatccaacttaaagtaaaagttggaaagggcaagagtcttttaagcggaacttcaattctgttgtcatggttacttatatataatgaatataaatagacaaataggacttggaaaatgtggtatattctaagtcaagatgctatgaagttgttatagtttaagggacattcttaagaaggaattacttaagtacattactcttctcattttcaaggacatgaaaaagtaaaggatggtctggcactattttattttatttttttttgacttgtactgaatatatgtactttgaagatttacatctataactagaaagtatgctaatccgaggtctggttattaggccagattcttgttcagttattttttaaactaatgttgcctcctttttagtaagattctacgaaagttttttaactattaaagttatttcttaaggggtagctcttatacttcctctgctctctttttcagtttccataaaaagctgttttcttagctattactccaaataaagttctttggtttgctt

SEQ ID NO: 283267 - DNA, 1000 bp, Homo Sapiens
taacctatgtttgtttcatgtctaactgattatatcttaaaagcaactactaaggtgtttattagtttgtttgttttttaatcttatttagcaacagccaactcagtttataaatccagaaacacctggctatgttggatttgcaaacctccccaatcaagttcaccgaaaatcagtgaaaaaaggttttgagttcacactgatggtggtcggtaagaaattaatctatagtctccaacttactaaataaatatctcccctttccaatctctggagtatgataacgtgacctataaagaaagaggaaaatttggcagagtcaaataacttgagaatttgaacaaatatatgtgtattcattagaaaatttttctcaggagcaaaattatttttctgtcactttcttatttatatgtagtgaaagtttactcattgtgtcagctaggctccaaaatggcccccagtgattcttatctcctggtattcacaactttcttgtcccttcctgcattgaatagggttttacctgtgtagccagtaggacattgtggagatgaaagtgttgtcattttctaagactaggtcataaaaggcattatggccccccaccttgactcttctcaaattactcactctggaggaagccagctgtcatgtcaagagaacactcaagcagccttacagggaagcccaccaagtaaggaaccaaggcctgccaatggctgtgtaagtgacccgtttcagaaatatcctccaggccgggcatggcggctcacacctgtaatcttagcactttgggaggccgaggcaggcaggagttgaagatcaggctgggcaacatggtgaaaccctgtctctacagaaaatatgaaaactagccaggcatggtggcatgtacctgtagttcctctcacctgagtccaggaggttggggctgcagtaggctgggatcatgccactgcactcaagcctcaagcctgggtgaatgaaaccttgtctc

SEQ ID NO: 283268 - DNA, 1000 bp, Homo Sapiens; identical to SEQ ID NO: 197781

SEQ ID NO: 283269 - DNA, 1000 bp, Homo Sapiens
cggcttccacggccacttctgtgagagggggtgtgagccaggttcatttggagagggctgccaccagcgctgtgactgtgacgggggggcaccctgtgaccctgtcaccggtctctgcctttgcccaccagggcgctcaggagccacctgtaacctggattgcagaaggggccagtttgggcccagctgcaccctgcactgtgactgcgggggtggggctgactgcgaccctgtcagtgggcagtgtcactgtgtggatggctacatggggcccacgtgccgggaaggtgggcccctccggctccccgagaacccgtccttagcccaggggctcagcgggcacactgcccgcctccagcagacccacatcccggagcggtggaccagcgaggcactagtagaggcagtcccgtggagcccgcctctccagtcccagccagaggggaccctggcctttggtgaccactgagaaggacacttcacgggcccagagctcctggtactgcccttcctttgagggccgtggagggctgtggacagcccagcaacctgtcgctcttggaggctggtgtggccttgaggagggaagcctcgcatggccgctggaagagaggcgcctcctggcctggctctgcagaacccaggggcacgctctgggcctgggctgaggaagtcccgctctccccgcggctctgagttggactgaggacaggtgtgggcgccagtgtgggtgcaggcgcaggtgcaggcacagggccactgtcctccaggcaggctttttggtgctaggccctgggactggaagtcgcccagcccgtatttatgtaaaggtatttatgggccactgcacatgcccgctgcagccctgggatcagctggaagctgcctgtcatctcctgcccaatccccagaaaccctgattcaggtctgcaggctcctgcgggctcaccaggctgctggctccggtaccatgtaaacctaggaaggtaaaggagcaggc

SEQ ID NO: 283270 - DNA, 1000 bp, Homo Sapiens
ctatgttttctttccttctgacacactagtgcccctaaattgtgatttgcctatacgtttagggccggggttggaagatgttaacaaccatttaagattcatttctgcagtgggagtgggtggagtttcaccctctgggaaaggggcaggtgacaggtatttatcagtcagtgcctctctagctcttgtaggaagaagcacacgcaggatggagtctagaggatgagcgatattgactagcaattcatgggctccctccagcagtgcgagggtcagagtttctggagccttgggaggaggcatccctgtgagggggggttagggagatgggagggcaccaggaaaagtgattagaagtcaggtatgggaaggctaaataggacagagtcgagtacatctctgcttggaaaaacatatcaacacccttttttttgaacattatatcttgctcataaaagaaaactttccacattgttttaacaaaccccacagctgagagtcaggcctgaatctttgatgtgtgcccagtcacagagttgaccctattggtttgtggtggggcagggcatcaaagacatcattgactaatcacattcccctgaatagctcatatttagaaaatattcttagattctaaaaatgtactattaatttgtgatattcagtcttttaaatattttatacattaaacaggcatagttacaaatataaaacaaaaatatcccaaagccattatgcatggcactcaagattaaaatgggaaataatacatctaataaatcaaatgttccaagacttcaaaggtcttttggaaacaggctatgtaaaacagcacactggtttcaaactttggtaaattttaagaacaactcttacaaaggcatttaattcttatacataattttcaggggacctaagttaatcagctaatcatgaagacatgattttcattttagaaaacacttttgaaaacttgggataatctcatgccttaatgatc

SEQ ID NO: 283271 - DNA, 1000 bp, Homo Sapiens
tagtagtatgatactactacatacacataatataatgatactactacattataatgtagtagtctaatgtagtccattagaaatggactcagtgtaatgtgtcatatcaatgcaataaaaaagtctgataaaacctcaatacatgcagtaaaggcatttcataaaattcaacattctgtcacaataacaactcttagaaaacctggaatggaaggacacatgcttaatctcataaagtacctacaaaaattctatagcaaacatcacacttggtggtaaaaggttgaaagcttttcctttggggctgggaacatgccagtaatgatcactatcaccacttccattcaacactatactggaggttctaacttacataagaaaaagaaagaaaaggtataaggattacaaaagagcaaatgaaactatcattattcatgaatgatatgactgtacaggtagaaaatccaaaggagtccacagaaaacttattagaataagtgaattcagcaaagtcactgaatacaagatgaaaaataccaaaatcaattgtatttttatacaataagcaacagaaaataaaaattttaaaataatacctatgattgcatttaaatattaaatacctagtagtaattcaaactaaagatgtgtaaaatctcaacgtacaaaactataaaacacttttgagagtagctaatgatctacatgaatgaagagatatatcatgttcacagatgggaaaaatcagtatcgtaaaaatgtcagttctccagaaggcaatctatagatccaatgcaatcccaataaaaatcccagagaattttttgaggctgatttcataatttatatggcatatagagccagaatagtcacaccctgaagaagtaggatgacttatttaccagttatttttagaaagctagggtaaataaaatagtgtggtgttggtacaagatatcaacagagcactagaaacagacccacacataagaaggctccc

SEQ ID NO: 283272 - DNA, 423 bp, Homo Sapiens
  misc_feature (25)..(25): n is a, c, g, or t
  misc_feature (29)..(29): n is a, c, g, or t
  misc_feature (56)..(56): n is a, c, g, or t
  misc_feature (68)..(68): n is a, c, g, or t
  misc_feature (99)..(99): n is a, c, g, or t
  misc_feature (185)..(185): n is a, c, g, or t
  misc_feature (208)..(208): n is a, c, g, or t
  misc_feature (227)..(227): n is a, c, g, or t
ttttttgtatttttaagtaagaagntggngccttccacccattgtttgccccaggnctggtccccggnactccttgaacattcgtgatcctcccccccntcgggcctcccaaaagggctgggattaacaggcgtgagcccaccgtgcccccggcccaacacttatgttttttgactattaggatnccctcctcacagtcctaaacttncggagacctggaagtaacntgagttcctatcttgcccatgtccaccatgtaaggctctggggcttaacaggaggaggggtggaaatgtcactattcaagtcacaataacattcaggcccacatttctccctttctgagaacactatattaaagaatgggaaggcaagtttcatctctgtttaatggcctatggcttggatacccctagtggtata

SEQ ID NO: 283273 - DNA, 1000 bp, Homo Sapiens
gttcaagcgattctcctgcctcagcctactgagtagctgggattacaggcacccaccaccacgcctggctaattgttgtatttttagtagagacagggtttcaccatgttgatcaggctggtctcgaactcctgaccttgtgatccacctgcctcggcctcccaaagtgctgggattacaggcgtgagcaccatgcttggctttgatttcttaaattctactttcttcatttaacaatacgtctcggggctgggcatggtggctcatgcctgtaatcccagcactttgggaggctgaggcggacagatcacgagatcaggagatcgagactatcctggctaacacagtggaaccccatctctactaaaaatgcaaaaaaaattagctgggcatggtggcgggcacctgtagtcccagctactctggaggctgaagcaggagaatggaatgaacctggaaggcggagcttgcagtgagccgagattccaccactgcattccagcctgggcaacagagcaagactctgtctcaaaaaataaaaataaatgaaaatacatcttggacacctttctgaatcagtatacatagacctgccccattcatttgagtagctgcttagtactctactgcgtggagtacaaattaattaacctaacctaggtctttaagtaatggatgtcttgatcttttttttttttttttttttttttttgagacagaatctcactctgtcgcccaggctggagtacagtgctatgatctcagctcactgcaacctctccctcctgggttcaagtaattctcctggctcagcctcccgagtagctgggactacaggtgcatgccaccatgcccagctaatttttagtattttagtagagacagggtttcaccgtgttgccaaggctggcctcgaactgagctcaggcaatccaccagccttggcctcccaaagtactgggattacaggcatgagcaaccacgcccagcctaaaagctt

SEQ ID NO: 283274 - DNA, 1000 bp, Homo Sapiens
cttgagcttctggaagcccagagcaaatttaccaagaaagagcttcagatcctttacagaggatttaagaatgaatgccccagtggtgttgttaatgaagaaaccttcaaagagatttactcgcagttctttccacagggagactctacaacatatgcacattttctgttcaatgcatttgatacagaccacaatggagctgtgagtttcgaggatttcatcaaaggtctttccattttgctccgggggacagtacaagaaaaactcaattgggcatttaatctgtatgacataaataaagatggctacatcactaaagaggaaatgcttgatataatgaaagcaatatacgatatgatgggtaaatgtacatatcctgtcctcaaagaagatgctcccagacaacacgttgaaacattttttcagaaaatggacaaaaataaagatggggttgttaccatagatgagttcattgaaagctgccaaaaagatgaaaacataatgcgctccatgcagctctttgaaaatgtgatttaacttgtcaaatagatcctgaatccaacagacaaatgtgaactattctaccacccttaaagttggagctaccacttttagcatagattgctcagcttgacactgaagcatattatgcaaacaagctttgttttaatataaagcaatccccaaaagatttgagctttcagttataaatttgcatccttttcataatgccactgagttcaggggatggtctaactcatttcatactctgtgaatattcaaaagtaatagaatctggcatatagttttattggttccttagccatgggattattgaggctttcacatatcagtgattttaaaatatcagtgttttttgctactcatttgtatgtattcagtcctagggttttgaatggttttctaatatagtgacatctgcatttaatttccagaaattaaattaattttcatgtttgaatgctgtaattccatttat

SEQ ID NO: 283275 - DNA, 1000 bp, Homo Sapiens
atcctcccacttcagcctctggagtagctgggaccacaggtgcgcaccaccacacccagctaattttgtgtgtattttttgtagggttttgccatgttggccaggctggtcttgaactcctgagctcaagcaatccaccagcctcgacctcccaaagtgctgggactccaggtgtgagccaccagcctcgacctcccaaagtgctgggactccaggtgtgagccaccatacctgtcaatatgcagtttttaaaagtaaaagttttagtggtttctaaagaaaaacacttcccccttcgtagcctctccagaaggaatactttgtttgcttacctgatttttggtattttacctgctgtgtcttaaattaggctttttgttccagtgtaacttctgagttcagccattctcatcgacattcccagcatggacgatgagaggcttgctttcccgcttgtagccctctccacccaaaacctttctcatcccctcaatctgatggttttggtggactcagtttagtgccggcatgatcactactacataaactactcactggccttgccatgtagcaacaaaactgtgtttcctgcagaacttctggttttctttgggataattagtactttgcttactttcttatgtactgaattcaattgtgaactttttttttttttttttttaaggaagggtcttgctctgtcacccaggttggagtgcagtggtgccatcacagctcctaggctcaagtgatcctcctgccctagcctcctgagtagctgggaccacaggtgtgtgcaaccatgcccggctaatttttaaaatgtttagtagagttggggggggggggtctccctgtgttgcctaggctggtcttgaactcctggcctgaagccaccattccacctcagcctcccaaagtgctgggattacaggtataagccactgtgcgcggcctcagctgtgaactttcatctattgtctaaacctctcaagatatt

SEQ ID NO: 283276 - DNA, 480 bp, Homo Sapiens
ctcctgaggagaagtctgccgttactgccctgtggggcaaggtgaacgtggatgaagttggtggtgaggccctgggcaggttggtatcaaggttacaagacaggtttaaggagaccaatagaaactgggcatgtggagacagagaagactcttgggtttctgataggcactgactctctctgcctattggtctattttcccacccttaggctgctggtggtctaccattggacccagaggttctttgagtcctttggggatctgtccactcctgatgctgttatgggcaaccctaaggtgaaggctcatggcaagaaagtgctcggtgcctttagtgatggcctggctcacctggacaacctcaagggcacctttgccacactgagtgagctgcactgtgacaagctgcacgtggatcctgagaacttcagggtgagtctatgggacccttgatgttttctttccccttcttttctatgg

SEQ ID NO: 283277 - DNA, 1000 bp, Homo Sapiens; identical to SEQ ID NO: 115013

SEQ ID NO: 283278 - DNA, 1000 bp, Homo Sapiens; identical to SEQ ID NO: 197116

SEQ ID NO: 283279 - DNA, 948 bp, Homo Sapiens
atgtcaagcatttgggagacactgtttataagaattcttgtagtgtaattcataatggggactgtgggaaattgattcattgtattggttaatatcattgactgaatcaggaactgaaaggtctccctgattgattttattctcaactgcttggccatctccaggatatgtttcctgtagataacaattttagctacctctttcaatataggctatgagaaaatgcctgattctaagaatcttgcagtaagttttgacattctctggacaggatccagctatttctgcctgtcctgtaccacttgcctcagtgtcttctatttcctcaaggtagccaacttctccaatcccattttcctctggatgaaatggaaaattcacaaggtgcttctctttattgtactagaggcaacgatctctttctgcacaacttccattctgaaggaaataataattaatagtttaatctaagaacgggtaacaataaaaggcaacttgacatttaattatatggataccatgcatgatttcacttctctgtttctccttcagatgatgttcatccttccttttgtggaaacactggcttccattcttctcttaatcctctccttatggagccacaccaggcagatgaagctacatggtatttattccagggatcccagcacagaagcccatgtaaaacctataaaagctataatttcatttctactcctctttattgtgcattatttcatcagtatcatactaacattggcctgtcctcttctagacttcgttgcggcaaggacttttagtagtgtgctggtatttttccatccatctggccattcatttcttctaattttacgggacagcaaactgaagcaagcttctctctgtgtcctgaagaagatgaagtatgccaaaaaggacataatctctcatttttataaacatgcctga

SEQ ID NO: 283280 - DNA, 1000 bp, Homo Sapiens
atctgggtagagggcacaaggcactgtccaaccttgttggaccgcaggtgcatctgtgtggactggtgcttcttgggagtacatttcgggaagcacagtgggctgggggtgggaagctgcgctggcaggttagcagtgagaaccctgtctgactctctcatgtccatttctctcaccaaggcctgtgtggactgtgggagcagcacccaagatcctggtcaccctgatgacccactcttctcagagctggatggactggggctggagcccatggaagagggtggaggcgagcagggcagcagcggtggcggcagtggtgagggagagggctgcgaggaggcccaaggcggggccaaggcttcaagctctcaggacttggctatggaggaggaggaagaaggcaggagctcatccagtccagccttacctacagcaggaaactgcaccagctagactccattctgggaccatctccaggagtccatgagaggctttcttctcctatgtcccaattctcagaactcagatgtggctagaccaaccagtgggaaactgccccagcttctcccaccatagggggccggacccccatcaccagcctaggatccaggggctgcctctggcctcttagggagcagagagcagaactccgcagcccagcccaaaggagtgtcacctcccacctttggaaaggaatccttccctcccctggacaaagttgctgacaagctgctgaattggcctctccatattccagctgagcctgaatctgactcttgagggttggggctgcacttatttattgcggggagacagctctctctcccacctcctccccagatgggaggagagcctgaggcccaaccaggacccgggggttccaccccctacctgctctggattgggggaggttggtggaccatggattccctggtgctgcccctcaggtgggacccaggcgttctcagctgtaccctctgccgatggcatttgtgttttt

SEQ ID NO: 283281 - DNA, 1000 bp, Homo Sapiens
atgaagactctgtgtgtgtgtgtgtgtgtgtgtgtgtgtgtgtgtgtgtgtgagcaattttagtttttttttttttaagagacaaggtttcactatgttgaccaggctggagtgttgtggctattcacaggtgcgatcatagtgcactgcagcctcagactcctggcctcaagctatcctcttgcctcagcctctggagtaggtgagattacaggctcactaccacgccagacagatggtgcaattttagatattgtggtcacagacttcactgagaaggtgccatttgagtaaagacctaaagaatgtcagctccttgagggcaaggacttgtatctgttttgtttgaagttgtgtccccagcaactagaacagggcctggctcattgtaagctctcagtaataatgtgttgaacgaatgaaaggaggttagggagggaatcgtggataacttgggggaagagtgtttaaggcccaggaaacagtcagtgaaaaggctctgaggaaggagagtatctggtgagttcctgaaacaacaaagagaccagagtggctagagctgagtgagccccaggaagagaagagacagacagctcagggggatagaaggtatctctgggcccattttaaaggcttcagcttaactcagtgaaatggagagccactgaggggttttgagcagagaagtgaccagaatctgacttgtgttttcatagcatcattctggatgatgttggagaacagacagaaggaggcaagtccagaagcaggaagaccaattaggagtcccttccctcactgaaataaccaatattagtgctgggcattgtggaaactgaaatggataaattcgggaacctgcccagtacagtgaatgttaaattctgctgtgcatcttaatctcctgaaatacttaggttttaaaaatgcagatttcagaccacaccccccatcctgaaaaatcctagtttcctgggtctgggttgtgggtgttgggatc

SEQ ID NO: 283282 - DNA, 1000 bp, Homo Sapiens
ctgtaaggtggcagggcctacccatcttacagaggtgaagacgaggtccctctgcctctgctgcagacatggcgtctgcacccacccttccaccctcagggcctggccacggggtcctgggtcccccacaatactgtgcactcgacctggttgacccaggacaccctcctcgttgaacagccctggctacacctgcttcagtgcaactggagccctcaccggcgagtgcctgacacctcggccttttctcttccggaggggcgctcctcagtgtgtttggggtctccctcgctccacgccctccagggggccgcatgtgcacttgccctgcattgcctggcccccgaggttccagggtcccaactgtctactaaccggcttcccgacagggtgagggtgaggtcgcatctacaaccagagccagcgcttccccgccgccaccccttttcttggaatcccgctgcttagctacctgcgggtgtcattggccccgccccatttccccacgctttgaagggggcgagtctccacagacctcctagggggatagacagcagctggtgtgaccccacacacccagtgaggtctctggagccgcggtgcgggaagcggggacccgggtttgaatcctgcccctctggtgtggtgcggcctcttcccacagacttttggcctcagtgttccccgcctgggaagtggggactggccctggtacctggctccagagctgcacccagaggcgatcagcccggtgcgggaacggggcggggtggccgcaactacgggccacggatcctgacccgccctgcccacgatgactatccacatcctcatcctgctgttgctcctcgccttctccgcccaaggggacctggacactgcagccaggtgagaaacccgggtggcagcagggacagggcgggagggagaccgtaaagggcgagcgccctctcccggccgcggaacgggcaggtgatctgtaagcctccccgctggtctt

SEQ ID NO: 283283 - DNA, 1000 bp, Homo Sapiens; identical to SEQ ID NO: 201510

SEQ ID NO: 283284 - DNA, 710 bp, Homo Sapiens
gatttagtataaagaaatttgtcacatgattgagttttctcgttcttacatgaaaatattgttcatttttttctttctgcagggtttggtgggagctgcttccaaaaggatgttctgaatttggtttatctctgtgaggctctgaatttgccagaagtagctcgttattggcagcaggtattaatctctataggtaataatttctgtttagccaggcatagtggttcacacctgtaatcgcagcactttaggaagccaaggcaagagcatcacttgaggccaggaatttgggactggcctgggcaacatagtgagaccccatctctacaaaaattttaaaaattagccaggcatggtgttgcacacctgtagtcctagctacttgggaggctgaggtgggaggatcacttgagcctaggagttggaggctccagtgactgacttatgatcgctccactgcactgtagcctggacaacagagtgagaccctgtctctgacataataatagtaacagcaataataatagcagtttctgtttagcttctcattaagcatgtcactttttgtccatgaaatgtttttgatggaatttatttattccaggaagtcaaaaattagtatattcaatttgcttattttatgtttatttattgggtatctgtgtttttaatttatctttcctgctaatcaatgttgatggaagtttgtg

SEQ ID NO: 283285 - DNA, 1000 bp, Homo Sapiens
gcaaattgttttactaataataaataacttggtgtcttcctatgttttcataggcttctgtataaggaagaagagaaacataaagctatactgaacaagattagagtcaacagtagacagaaattacttagaacagtataagatgacttaccaaaggggttattcagacagtatctgaggtttttgttggtagagcagggtgtgggtggtacatgccacagccttctgaaaaatgagctaccgctgatttggtaagggtgttctgcatccactgatagaccttgaacaatttactgttgttcttttggtttgcactaggatgcaaaagaaagaaatccctgcgctttctgtctgtctttgtggcggcccagattgaattggggaatacatctttagcctggaaatgtaggctgcatgttaatggtaatgtaacttttgcagtgtaatgtttgaaaaatattaatgtagtttttgcttttacagtaacaaatgtggcaattattttggatctatcacctgtcatcataactggcttctgcttgtcatccacacaacaccaggacttaagacaaatgggactgatgtcatcttgagctcttcatttattttgactgtgatttatttggagtggaggcattgtttttaagaaaaacatgtcatgtaggttgtctaaaaataaaatgcatttaaactcatttgagagaatgccttttagtttaatgcatatttaaactaaattgatcctgtagtgttcctggagaagctagagcctgattgtaggctactactcatcaattaacttctacagtggagactacttctgggactggaatataaaaaagaatcaaaggttctgattttgagttgcaataaagggaaagaccatgctcatagcagtgccaacatctgaagtgtggagccttacccatttcatcacctacaacggaagtagttaactggaagagattaccaagagaataaaaagagactcattcagtgg

SEQ ID NO: 283286 - DNA, 1000 bp, Homo Sapiens; identical to SEQ ID NO: 198048

SEQ ID NO: 283287 - DNA, 1000 bp, Homo Sapiens
gaggggcactggcccaggtggaatttggggaaggggtaacatccccacactggaggagcaagatgtgtctggttgcatgtggagaggcagcatggtgcccagttgtgggctggcacttgccttactggtttgagctgcctcagtgttgccagggcggtgcccactctgtgccaggctgtaaggtgcttgggacatgtgccccagaagctcatgctttgatggttatgctccagggacccccctctgggagagccccatgagggcaggagagtgatggagagtacgcccagcttcctgaagggcaccccaacctgggagaagacggccccagagaacggcatcgtgagacaggagcccggcagcccgcctcgagatggactgcaccatgggccgctgtgcctgggagagcctgctcccttttggaggggcgtcctgagcaccccagactcctggcttccccctggcttcccccagggccccaaggacatgctcccacttgtggagggcgagggcccccagaatggggagaggaaggtcaactggctgggcagcaaagagggactgcgctggaaggaggccatgcttacccatccgctggcattctgcgggccagcgtgcccacctcgctgtggccccctgatgcctgagcatagtggtggccatctcaagagtgaccctgtggccttccggccctggcactgccctttccttctggagaccaagatcctggagcgagctcccttctgggtgcccacctgcttgccaccctacctagtgtctggcctgcccccagagcatccatgtgactggcccctgaccccgcacccctgggtatactccgggggccagcccaaagtgccctctgccttcagcttaggcagcaaggtgagtgcaggggcagagagggtacctgtggctctggcctagcaaagttgctcggtggtccccaagatgcccttccactgtgatgaaaagagaaggcagcaccgaggtagagggg

SEQ ID NO: 283288 - DNA, 1000 bp, Homo Sapiens
agtccaaagagtgtgtgggctttcctgtttctaaactttcgctactataaaaccaaaaaaaggaattgagatttcaccaaccccagtgcccagaagagggaaggggagtggctggagggagcagggggtgggacagtgtatcaaataagcagtatttaatcacctctggcgggggcctcgtgcaaggggagactgacaccaagaacagccagtaggttcttctcccctgcactctgctccctgcgcggtaaccccaccactcctgaagcctgcccaatctccttccttccctgcttggtgagtcgcgcatctccgtggttatccccgctgtctcctctccaagaacaagcagagcccgggccactggcccttttcccaaggcagggaagaaggatgtgtgtgtccaggaaggaaaaaaaggtggatcagtgattttacttgaaaacaagctccatcccttttctatatttataagaagagaagatcttgagtgaagcagcacgcgacccaggtgtgtgtgaattgaatggagacgtttcttttctctttctttaatttttgtttttgttctttttttctttaaggaaagttttattttactgttcattttactttcttggtaacaaaaactaaaataaggaatagaaaagctgtttttcaggctgacagtccaattaagggtagccaagaccttgcatggtagagtaggaatcatagtgtcagtgaggtcccgtgagtctttgtgagtccttgtgtcatcgttcgggcactgtttttttatgcaagggcaaaaatctttgtatctggggaaaaaaaacttttttttaaattaaaaaggaaaataaaagatattgaggtcttcctagtgttacttaaattaagatcaaggtaagaaacattgtaaaaaaaaattacaaaagtgctatttgtttcctaaaaacagtgatttctattaaaaaggtgtcagaactggagaaaaaaaaaaaaaaaaaaaaaaaaa

SEQ ID NO: 283289 - DNA, 816 bp, Homo Sapiens; identical to SEQ ID NO: 22881

SEQ ID NO: 283290 - DNA, 1000 bp, Homo Sapiens
ccggaggcccacctgtcctgacacatctgttgctggcagcctccccacacctccagtccccagacacaggaagagccacagcctaggcaacaacaggggacgtctctatgccaccctggggcccaactggcgggttccagttaggaattctcccagaacccggagctgtgtctacagccccaccggcccgtgcatctgttctctggggaactccgcagctgtgcccaccatggaggggcctctgagaagaaaaaccctgctcaaggaagggcggaagcctgcgctgtcctcgtggaccaggtactgggtcatactctcaggatccaccctcctgtactacggagccaagtccttgcggggcacagacagaaaacacgtttccatcgtgggctggatggtgcagctgcccgatgaccccgagcacccagatatcttccagctgaacaaccctgacaaaggcaatgtttacaagtttcagactggttcccgatttcatgcaatactgtggcacaagcatttggatgatgcatgtaaaagcaacaggcctcaggaagccggagcagctccaggtccaacaggaactgacagccacgaggtggaccacctggagggcggtgcggggaaggaggcagggccctgtgcctgaagcctgggcaccatggtggccccagtcaggagcaacagtggtagccctgagtaaaacccattgtccctctttggaggagcggccagaggatgacagcagccccagcaggcagcagtgcctgggcaggctgatccagcagagcactaatgggtcagtttcatgtattggcagatgtggtgtagcatggcaaggctacaagttttaaggatttttgtctgattttcagacctggaagaagggatttttcttcctactttcccccttttttatttctaatttactttcaaccaaatattcccactatgtgctatatgttataataaaaattgacacactgaaaaaaaaaaaaaaaaa

SEQ ID NO: 283291 - DNA, 1000 bp, Homo Sapiens
caaacctctcagaggtctgtcttaaataaaacttctttgctcagcccaggctgtccaaatcttacttgaagctctttctttcttacatttttttataatacatttagtttgataaatacttgatggaaccaagtcaaactgtcttttagaaatttatttaatgttaattactatgttcatctttaacatagattaagatttggtgtttcatatttttaattataataactttccttagacaattaaaatatttttataagcattacaacacatattcttcagttgtatgaaaaacattttaagtaaacaacttactttcctaaatatttttttttctatcagccgatccagtttaaatgccaaaatggaagagtgtgttaaactaaactgtgaacaaccttatgtgactacagcaataataagcatcccaacacctccagtaaccacaccagaaggagacgataggccagaatcccctgagtactcaggaggaaatattgtcagagtttctgctttgtaagacaattggaataaggtctaagagaattcgagccctggctgtgaaaagaatctcaacatagaagaaagaagaaacaataaatattctgcagattaatgcagcaaagaaagaaggttggtagtgaaacacaaagcttccaatcttaaggatgtgaataaaaccaccaaatggcatttctagacagtttgacctgttatacagagtaatattctgtggccctttgactttgtgaatgagcacaatgaaatgccgcctactgatgcttcttatgatcagaactcttttttaataaaataaataacataaatcgttgaacataatgttccagttgaatgcaaaacaaaaaaaatatggaaaacattttgataaaattttttcctgttaaaaccatgaacattggctatgatgaagattattacatatgaaaaaaaaactcacacaacatatttgtattgactgaaggaaaccatcataatgcat

SEQ ID NO: 283292 - DNA, 1000 bp, Homo Sapiens
aggctgggagacttctgaaatgcatgctaggaaaaacctacattgtcatgattggactgttaaagacaattctggttagggctcagaaggacagaatgagagctagagaaagcatcagtcttcttagagtaaacctatgtggtcacgatcagaatgttgatagaaatatggacagtaaaggccattatgatgagacctcagtcagaaatgtggaacatgttactggaaactgaagaaagcggggttcttgttataaaggggtaaataatttggctgaattatattcaggtcctagtgttttttggtaggtagaacttgtgagcaatgtaattgaatatttagctgacactatttcttaacaatgtgttgaagttgcatcttgaataatcttgactacctatagtaaaatgtagaaagtgagaagtgactgaaagccggaattactaattaaaaggtaaagagaactaaatacttttaaaatttgcagcttatctactttggaaaacatgcaaaaccctgtcctggagaaaacaagggtgtggctgaacaactgatttatgagattagtatggattgaccatgttgactcaaaccaggacctattgtccaagacaatggaagaatgaccccagaagtatttcacagatcttggaggctgctcctcccatcagaggcccagagcacagggacgtgggcaacagcagggacctttgatgccaggtgccgcctaacatctcaggctcagctccttgcatacactaccactgagagtatcaataaattttatcttttgtgaatgcagagtagagtaaggatacagctgtaattggtataggaatagccatcactcaattttcaagggggcattgaaaatttgtttggcactatgtggttgctcagtcaccttaatttttgtccaaaccaaactgtgaaacgtcagccaggtgcagtggctcacacctgtaatcccagcactttgggaggccaaggtgggcagatc

SEQ ID NO: 283293 - DNA, 1000 bp, Homo Sapiens
tttcatgatgcttccttcacttgacaaatgagtatgagtacctactgtgtgtcaggcactgccctggtcctgaaggtacagcagtgaacaaaacagagagcccactgtgggggctgatagtccagtgggaaggggcagatgcaaataacgaaatacacgaagtaattgcaggttataatctgtggtctgaagggtgtgggagtgagcagggtgtggtaagccctgtaaaccggctggtggcggaaggccttctgcaggaggggacagcgaagctgagagttgaaagataccatatgactcagcgaggctgtggtgtcccaggcaaaggggacagtaaatggaaaggctgaaaaatgggaacaagagggacagagagcagcctgggcaacatggcgaaaccaaaccctgtccctacaaaaaatacaaaaattagctaggcatggtggcctatgcctgaagtcccagctacttgggaggctgaggcaagagaatcacttgaacccaggagggggaggttgctgtgagccaagatcgcgtcattgcactccagcctgggtgacaagagcgaaattctgtctcaaaaaaaagaaataaaaatacaaaaattagctaggcatggtggtgcatgcctgtattcccagctactcgggaggctgaggcaggagaatcgcttgaacccgggaggcggaggttgcagtgagccgagattgcaccactgcactccagcatgggcaacagagtgagactctctcaaaaataaaataaaataatacaataaaatataaaataaaataaaatactagccaggcacgatgactcatgcctgtaatctcgatactttgggaggctgaggtgggaggatcgcttgagcccaggagttcaagaccagcctagaaaacataatgagaccttgtctctacaaaaaaactgtttaaaaaattagctgggtatggtggtgcatgcctgtggtcccaacttggaaggctaagacgggaggatc

SEQ ID NO: 283294 - DNA, 1000 bp, Homo Sapiens
taagtcgagtatttctgggttgaagacacgtgaatattgacaagtctgggactccccaagtttttttcttggcacaatcctcttaagttataaattaattctctactagtctaggcacgtggctttaataacgacccattctgttatgacacacacaatgtatcgtaaccttgaatcctttcgagaaaggaacacaacaaattaaattaggtgagttgttgggacgtttcacccatggtaacagggacaaaaaatacttactcccccactccacgactcttcgacacatgcaataaactcaaacagaccgatcagtcaccgactcggttcaaggttaggtccagtacactcggagacttgaaagactattttggacgtctgggggaattgaccctattatatcagtacgtaattcgttcttcctcttcatttatgtccgactaccacatcccctctttaagtttccctcttccggatcctccctctccctcgatacacacttgtcttggtttctaccggagacccttaaccttccagagaaccttaagcaggtttgactcctagtgttcagaggtgtaagactcatcctcctactcccagactcaatcctaaacccaggacgtcccgaacgattccttaggggactaccggatcctaaggtgcgtctcgtgtagaccacactctctcgagcgacgttcccacttcgaggcgggatagtctatctgttggtccggtggttctccgggtcgggaggtttgggacctaaacgttgtaggagtttcttgtcgttgcccggaactcgtcttaactcttcctttatgggggtggacgggagtcggcaattcacccttaacgataagtgttcccggagacccacaggactgtctctcccctctaccgtgtccgtggtccacgatcccacggtcccggagggctcttccttgtccacgtttcgtccgttaatcgggtcttccataggcaccccgtccgtcggatctag

SEQ ID NO: 283295 - DNA, 1000 bp, Homo Sapiens
gagagggtggactagaggctccagcagacagcacctctcctcacagggatagaagcccaggagaaagacaccagggcatcgtaagaggctgccccttagagagctcttttaggcaagtctagggtcagagtggaccccagccaggtgcctccaattagaccctgggagccacctataactaagagcttgattgtctccctaaatgggtgggaaagtgaagcaggagccacatggagcctcttcctggaaagtctgcctgccaagagccaaagggctttaccatccattgcccctgcagttcacgcagggctggccctaagtcctctggttgtcgaggggtaagtccccagggtctgggccggcttcaggggacaggagttcagtgtcaggcaactccaaggcctctttggctaaagctgtctcttccccctcctcttcttcctcctcatcctcttcctctgcctcctccagagtcagttcaaactggaatctgtcaggcccgtcccgctcggggttggtgaggtctgagggacttcgggggatcttgctctggtaccactctcgattgtcctccagcgtgtccagcaggtcctgtgcatctgggtggaccaggtcagcccaagtctcccacagtgggtgagcaatgtagtcaatgaaacccacctgtggcggggggtggggcatgtcggcatttggtgagttacagtgaaccctagactcaatccagcctccagatctttagccaagttgttccctctgcctggaatgccgcttcccaacaactgctcatccttcaaaacccttttcaaataactcattctctagaatgcctcccttaacccttctggcctcctccaaccccaaccctaaccccacagggctgaatgtacgtgtcccccagactggaagcccctccagggtcccgcatgtcacctagaacagatgtttccaaaccccagaagtgcatgtccctctccctgaagcccagagagaatggatc

SEQ ID NO: 283296 - DNA, 613 bp, Homo Sapiens
tggtcaggctaatgtacactgtaagcttgaaatgcaaatttctaatttcagagtctaaatatttgtttctcagatttcattttgatgatggaatgtatactagatgcagagtttgcatcaatttttgtaatatattcatttatttacttaactaattttaatttgccataatagcaggagctttttgtttatgtttattgttgtatccccagtgcctagaatagtgcttagaacatagtagcacagagaaacatttgttaaatgaatgaatgaatgatagaataatggatgaaacatggaatatgaattttagtggaggtgacaggtaataagtataaaaatcaataaataatgtaatttcagatggccttaaagacagcaaaccagatttaggtgatagagaataactggagagaatgttgggatggtttttaaaatcttcataataaccctatgaagtaggtattttttatctcccttttttagaagaggaatttcagacttgcctagggtcacaaagtagtggaaccacgctaatctgatttcattaatttattccttattaaacattccttgagtgccgttcatcctgagccagaatcaaaaaaaaaaa

SEQ ID NO: 283297 - DNA, 1000 bp, Homo Sapiens; identical to SEQ ID NO: 115015

SEQ ID NO: 283298 - DNA, 1000 bp, Homo Sapiens; identical to SEQ ID NO: 115016

SEQ ID NO: 283299 - DNA, 1000 bp, Homo Sapiens
agccacgcactagcctgcacattacctctccatactgcagccctttatatggaaacttcctacatcactttgctgtgtgtgtttacacaggtgggttttgttgtacttgccctaacagcatatgggaatgcagcacacaccccaacccacaccaactgccactgaagatgaagccatggtgggcacagaaccaaaaaccccacccctgctagcatctcacccttgaggtaatgctgtgcagaggaaaagggaccttcttataccctgagtgaccactgttgcttgggggggatcaaagaaggcaccttcactggccagccacccaccccaaaccagcactacctccagtgcaacagcacacacagcaggggccccctggcccacaccccagctgttttgcctccaccactgggtgaatgcccacagggaggcagggacttttgcatctggtagcattctgccacagctgccgcactttggtcccctcagtgcagtggactccaaacctcgaggagccagagaacaaagttgtggcccaatacaagttccccagagttaaagcacacagtccaagaattgggagctgcatgttggccccttaaaatcctccaaaaacaaaacctgttggctgaatccaccttacaccacaatcaaatcctcaaggtcatcagatataataaaggaaaaataccctgtccaaacgtcagcaacctcaaagattgaagatggataagcccataaagatgagaaaaagactctgtgcaagaacactaaaaactcaaaaattcagcatgccttcttttctccaaatgactgcatcaactctccagcaagtgttcagaactgggctgaggctgagatgtctgaaatgatacaagcagagttcaggatatgggtaggaacaaagttcattgcgtgaaagaagtatgttgtaatccaatacaaggaagctaaaaatcattgtaaaacattgcaggaagtaacagacaaaagagcaagt

SEQ ID NO: 283300 - DNA, 1000 bp, Homo Sapiens; identical to SEQ ID NO: 204036

SEQ ID NO: 283301 - DNA, 1000 bp, Homo Sapiens; identical to SEQ ID NO: 204037

SEQ ID NO: 283302 - DNA, 1000 bp, Homo Sapiens; identical to SEQ ID NO: 204038

SEQ ID NO: 283303 - DNA, 1000 bp, Homo Sapiens; identical to SEQ ID NO: 115017

SEQ ID NO: 283304 - DNA, 1000 bp, Homo Sapiens; identical to SEQ ID NO: 204040

SEQ ID NO: 283305 - DNA, 1000 bp, Homo Sapiens; identical to SEQ ID NO: 204041

SEQ ID NO: 283306 - DNA, 1000 bp, Homo Sapiens; identical to SEQ ID NO: 115018

SEQ ID NO: 283307 - DNA, 1000 bp, Homo Sapiens; identical to SEQ ID NO: 204043

SEQ ID NO: 283308 - DNA, 1000 bp, Homo Sapiens
agcatgctgtctaggggccgaaaaatgaatcttcataaatttaaataaattaaaatcatatcaaacatcttcccacatcataatagagtaaaattagaaatcaataccaagtagaactttggaaactgtacaaatacatggaaattaagcaacatgctcctgagtgaccactggttcaataaagaaattaaaaataaattaaaacattttttgaaacaaatgaaaatagaaacacaaataccaaaacctagggggtagagcaaaggcagtggtaagatggaagtttgtagttataaatacctacctcacaaagagtagaaatatttcaaataaacaacctgattacttgccacctcaaaaagctaggaaaacaaacaaaaaaagcaaataatcaaactcaaaattattaattttttaaatttaaatttttatttaatttagttattttttagagactgggtctccctctgttgtccaggctggccctcaagtgatcctcccgttttggcctcccaaagcactgtgattataggtgacagccactgcactcaacccaaactcaaaattagtagaagaaaataaatcataaaaatcagagcagaactggataaaatagagactaaaaatttacaaagtatccatgaaacaaaaagtgtttttttgaaaaaagataaacaagatcaataaactgatagtttgactaaccaagaaaaagagagagaagacataaaaaagtaaaagtaaaaattaaaaaggagacattaaactggtatcagaaaaataaaaaatatcattaaaaactgttatgaagcactatatgctaacaaattggaaaatctaaagaaaatggataaattcctagatacacataacctaccaggattgcataaagaaattaaaaatttgaacagatcaataagaagtaacaaaattgaagcagtaataagtctcccatcaaagaaaagcccagaacctgatggcttaactgctgaattttatc

SEQ ID NO: 283309 - DNA, 1000 bp, Homo Sapiens; identical to SEQ ID NO: 204044

SEQ ID NO: 283310 - DNA, 1000 bp, Homo Sapiens; identical to SEQ ID NO: 115019

SEQ ID NO: 283311 - DNA, 1000 bp, Homo Sapiens; identical to SEQ ID NO: 115020

SEQ ID NO: 283312 - DNA, 1000 bp, Homo Sapiens; identical to SEQ ID NO: 204047

SEQ ID NO: 283313 - DNA, 1000 bp, Homo Sapiens; identical to SEQ ID NO: 115021

SEQ ID NO: 283314 - DNA, 1000 bp, Homo Sapiens; identical to SEQ ID NO: 204049

SEQ ID NO: 283315 - DNA, 1000 bp, Homo Sapiens; identical to SEQ ID NO: 204050

SEQ ID NO: 283316 - DNA, 1000 bp, Homo Sapiens; identical to SEQ ID NO: 204051

SEQ ID NO: 283317 - DNA, 1000 bp, Homo Sapiens; identical to SEQ ID NO: 115022

SEQ ID NO: 283318 - DNA, 1000 bp, Homo Sapiens
aaatttccagattttaaaaattaacatcgaatttaaaagtttcgcacaacactgagccgactcacatccacaggcctggtctgtcgtgggctgcagcttatggcctgggacatgccctattccatcaggatgcggggagggcacctcaagctccagatgcagccatttcatgggtggtcactggagctctgatgggggctgtattctttccccatcttctttcctctcagccttcctgtcctatctttcacctttctctacttttctgcatgaagtccttgtcttagtcttttggggctgctataacaaagtactctaaactgcatgacttatacaccacagaagtttatttatttctgtttctttttttgacaaggagtctcactctgttgcccaggctggagtgcagtggcacgaccttggctcactgcaacctccgcctccagggttcaagcgattctcctgtctcagcctcccaagtagctgggattacaggcatgtgccacaatgcatggctaatttttttttgtatttttagtagagacggagtttagccatgtcggccaggctggtctcgaactcctgacctcaagtgatccccctgcctcagcctcccaaagtgttgggattataggcgtgaactaccgtgcctggctcagaagtttatttcttacagaaatttatttctagaggctgacaattccaagatcaagatgccagatttggtgtctggtcagggctcattcttctggttcatagatagtgccttcttcccatgtcctcccggggcagaaggggtaagtgatcttattgggccttgggcctattgtataagggcatactgatgctattaatgatgggtccaccctcacttcctaaaggccccacttcttaatattattgcattaggaattaggtttcaggatattcatttgaaagggaaggcatgaacattcagaccagggcacccttcagaatttcactgtgggtttaatccagc

SEQ ID NO: 283319 - DNA, 1000 bp, Homo Sapiens; identical to SEQ ID NO: 115023

SEQ ID NO: 283320 - DNA, 1000 bp, Homo Sapiens; identical to SEQ ID NO: 204054

SEQ ID NO: 283321 - DNA, 1000 bp, Homo Sapiens; identical to SEQ ID NO: 115024

SEQ ID NO: 283322 - DNA, 1000 bp, Homo Sapiens; identical to SEQ ID NO: 204056

SEQ ID NO: 283323 - DNA, 1000 bp, Homo Sapiens; identical to SEQ ID NO: 204057

SEQ ID NO: 283324 - DNA, 1000 bp, Homo Sapiens; identical to SEQ ID NO: 204058

SEQ ID NO: 283325 - DNA, 1000 bp, Homo Sapiens; identical to SEQ ID NO: 115025

SEQ ID NO: 283326 - DNA, 1000 bp, Homo Sapiens; identical to SEQ ID NO: 115026

SEQ ID NO: 283327 - DNA, 1000 bp, Homo Sapiens
atcccagctactcgggaggctgaggcaggagaatcgcgtgaacccgggaggtggaggttgcagtgagccaagatcgcgccattgcactccagcccgggaaacagtgcgagactccatctcaaacaaacaaacaaaaattccaggaataaagaggttgaaatcggggcagggacccggataggatgctccccccatctaatctttavccccaccccctgaaaagtcgccctgcctctcagactcctcccctttctgagaaggtcacgggggaagccaaaatgggcatgcgccgctactgcgctattgcgcacgctcgctgtgcttgccccgccttccctccgcccacccgggaaaccggaagccgcctcccacttggttgctcgtacgcggctagtgggtcctcagtggatgtaggctgggcgccgcgatgttcgacgggacaccggcggagagcgacctcggggttaaggggtggggctggacgtcaggagccaagatggcggcggtggtcgcactctccttgaggcgccggttgccggccacaacccttggcggagcctgcctgcaggtgagtcctggagcctcagagagggaaaagtcaggaaagccacagagactgcctggagctgatggggctgcggagagactgaggaagcatagggcaaggcctcagggagatggaggacctcctccccctggtgcagtgctttggtttggcttcgagcatccctgtcaagttatgtttctgcgcctcgcagcagcttgtgagttagggcacgggcaattttttacagctaagggtgcggggggggggacgttcagaaaggggacttgaattgctcaaggtcacatggcaagcgaatgactgctggaaccagaatttgaatccagacattggagttccaagccctttttctgccacccaaactatcgcctcttgtagaaaagggagacctgcggggtgtgaaggatgggaattgggaagcgaggtaattcctca

SEQ ID NO: 283328 - DNA, 1000 bp, Homo Sapiens; identical to SEQ ID NO: 115027

SEQ ID NO: 283329 - DNA, 1000 bp, Homo Sapiens
atttgggcactggctgtggaaaaagcaaagaaaatgcaaaagcagttgcatcaagagaagcattgaagttatttctcaagaaaaaggtggtggtaaaaatatgtaaaaggaaatacagaggcagtgaaatagaagatctagtactccttgatgaagaatcgaggcctgtaaacttacctccagcactaaaacatcctcaagaattactataatgtgtccaaaatatcactgcatacaatatctggtatttgaagagaaaaactgacttttgtatagtataaaacacaggctttcacaaattttgtattgctttttttccagttttgcagaaaatttacattctagttctcttcacacagtagcagttgtaaataatttatgaatgacagtacacattaaaaggtatgcattagcagcatattagtatgctgttttatttgctgaagaaaatactgtcttctatttttaatgatacattaggtacgatgtgtagttcggtagagtcctaaaatttttgtactactttcaatttggtgaaaatgtattaagttgtctaccatgttttcttttctagctgaataaaccacatcaaaggaaagggaccacagtatttgaatgtttgaaagtctgtaaagcttaaggttttaaaaatgttgcccgtaatgttgaacgtgtctgttaaaaaataaaagaaaaaatagttgcttcaaactatttttatgagaagttgtaagcattttttagatataaagcagtataaagtacttgttattttactctgaagttgtttaaaattcaccatgactttgaccgctgaagattctttaagcgggttaatttatgttttgaggtggaatacaatttacacttttttcttaaaaacatgaatgtgggtttctatattaagcatattttgtgactactattaacagattgatttgtttagatattaaatgctttaagctattttaccttttcaaaaaaaaaaaaaaaaaaaaaa

SEQ ID NO: 283330 - DNA, 1000 bp, Homo Sapiens
gtttggcatgtgacaggcaattctttttgcatgagtctcagttacaaaacataacacagtttctacttaaggataccttcttttcttgggtcctgtcaagcacttagtttaaaaaaaaaaaaagaattgcagtggttggtccaataatagacatttgcttcagtaatatcaaattacatcctgctgcttgaattccatgcctttctgcatacataataacttctcgtttcaatgccaaaccatagtgtaatcttttaaaagacattttaaatggcaattaaactcacatgtaattgcaacaatgtatacaactcaattaaagtgctaacaacatgaacaactgagaccaagttcacccatgcccaggtcttgatgacctcaccatggcagctccctggcccagggtgattataagatgccagtgattgcaagacttggcctgatttcagaagtgatgatgtggcaacacagacatcttagaattaaggaaatagttttaattcttggtgctctttcttggcattctgaaagtgttcctccagtttgccatctaagatattccttagttttctgccatgtccatttcactcatttactccttcctatatgacttttaattattgtttaataatttaattttcttgggaatatctttctcttgttacaaccagtttcctttatatcttttcttggactccattggccaaattctctttcataagcctgaagcccctaatatttaccctgagactgtattctagttagtagaatgtgaatggaggtgatgtgtgtgacatataggacttccccataagagcctttaatgagttgtcctctgttctctttcccctcttccagctgagtgccatgagaggacagtgacaaccttggggcctcatggtgaaggtggcagaaactttgttagcctgggtgctcagggtggacagctgctcttgccaaccgggaacatttgccttgagctcttttgtaagtgacagat

SEQ ID NO: 283331 - DNA, 1000 bp, Homo Sapiens; identical to SEQ ID NO: 205911

SEQ ID NO: 283332 - DNA, 1000 bp, Homo Sapiens
caaggcctcccaaagtgctgggattagaggtgtaagccactacacccagcccaggtaacttttagacatgtgttgggaactcaggcttaccacacctgatgaagtaggaagcaaagcctgtgctcagagtggaaaaccaggagtggcccggccgtgatggcagtttggggtttccacctagaggttgctaaacaggcttagcagcatcacagagagaactggtcacatggcttgtagccacatagtttgagccccactgcaaaatgaaaagcaaagttccttactgataaattattaagaatttcaaaacaacgaaggcacagcagtgaaacaattataagcacaaggtccttccccatgtggagcctcgtgagactacacaggtcacatggccatgaagctggccctgatgagaagtcacaggtaaaaatattctataaatatatgctggtggcaggaattagagtatgccactccaaaatataccactttatcataaggattattttgagctgaagataattaagcaatagcaggtgcaggaaaagctctctgccttcctcctttctgtctaaaagcagggtgtaaatttccctttgtaaaggcaatgtaaatatccatttataaaagtgtctccccctcccacaccaggaagagaaggatgctgttaatcaccagagacaactcttatcaatggagaaggcaacaactggagcctgtgtaacaactcttgctaaataactctgctgtggtctgaaagtttttgtccccccaaaatttatctgttgaaattcaaattcctaaggtgatggtgttagattattaggtcatgaggtcggatccctcatgaatggaaataatgcccttacaaggaaaccccagaaagcgcattcactctttcctccacgtgaggttacagtgagaaaacagccattgttaaccaggacgtgagccttcaccagacatcaaatctgccagcaccttgatcttaaacttctca

SEQ ID NO: 283333 - DNA, 1000 bp, Homo Sapiens; identical to SEQ ID NO: 115028

SEQ ID NO: 283334 - DNA, 1000 bp, Homo Sapiens
cctcctttcagtggtgtctttcttgcatactcacagaacaatcagcacacactctctcattatgagcccataaaagccccagactcagccatacttggagagagactagctgcctttgatcaagggaccacctgcttctccactgtgagctgttctgtcactcaataaaactcttctctgcccttctcacctttcaattgtcagtgtaacctcattctttttggacacaggacaagaacttgagacccatcgagtgcaggtacaaaaaaggctgtaacactgtggctctctgtcctctgccagaacccagcagccactccacatgatgggaagcagcagtggttccaggccaatcctggagtcgtgggccagagtggagcagtgggactgaaagagcagttagcatgttgtaacacccactttggggctttgaggtcactggcatccctgttcgggtgctgctgtgttccccttgtctggatgccagcatcccccatgggagttgcttgtggcatgcctgatccagccacaagtcctgcacagagcccactcctatgccagtgcttggagtggccgactggaccctgcactcacatgctcacacacccactaccaccacaggctgagcgcacagttgtagtggccacaggatccatgctggagcgcaagatgggcacagtctggggggccgagtcagcaaggcacctcttgtggcaagccacggcctgagtgagtcctgagcggacacgttgccagccacattggcctccagctgacaaagcagcaccaaaaagaaatcctgcaccaataataaagatactaaggactttttaaaaaaacttttgagttaatatttatgattcaaatatatagaactaataatacaataaatactaacatatttttacaccagtttgcaaaaaggtagtaaagtgaaaattctgccatttttcagagaacaacaatgttaaatatacagatttatctcctaatccatcaa

SEQ ID NO: 283335 - DNA, 1000 bp, Homo Sapiens; identical to SEQ ID NO: 115029

SEQ ID NO: 283336 - DNA, 1000 bp, Homo Sapiens; identical to SEQ ID NO: 115030

SEQ ID NO: 283337 - DNA, 1000 bp, Homo Sapiens; identical to SEQ ID NO: 115031

SEQ ID NO: 283338 - DNA, 1000 bp, Homo Sapiens; identical to SEQ ID NO: 115032

SEQ ID NO: 283339 - DNA, 1000 bp, Homo Sapiens
agcattccatggtgtatatgtgccacattttctttatccagtctatcattgatgggcatttgggttggttccaagtctttgctactgtgaacagtgccgcaataaacatacgtgtgcatgtgtctttgtagtagaatgatttataatcctttgggtatatacccagtaatgggattgctgggtcaaatggtattttctgggtctagatccttgagggatcgccacactgtcttccacaatggttgaactaatttacactcccaccaacagtgtaaaagcatctctatttctccaaatcctctctagcatctgtttccttattttttaatgatcgccattccaactggtgtgagatggtgtctcattgtggttttgatttgcatttctcttatgaccagtgatgatgagctttttttcatgtttgttagctgcataaatgtcttgttttgagaagtgtctgttcatatccttcacccacttttttgtggggttgtttgttttttcttgtaaatttgtttacattctttgtagattctagatcttagccattcgtcagatggatagattgcagaaattttctcccattctgtaggttgcctgttcaccctgatgataatttcttttgctgtgcagaagctctttaatttaattagatcccatttgtcaattttggcttttgttaccattgcttttggtattttagtcatgaagtctttgcccatgcatatgtcctgaatggtattacctaggtttggtttttttctagggtttttatggttttaagtcttatgtttaagtctttaatccatcttgagttaattttttataacgtataaggaagagatccagtttcagctttctgcatatagctagccagttttcccaacaccatttattaaatagggaattctttccctattgcttgtttttgtcaggtttgtcaaagatcagatggttgtagatgtgtggtgttatttctgaggcctctgttctgttccat

SEQ ID NO: 283340 - DNA, 1000 bp, Homo Sapiens; identical to SEQ ID NO: 205920

SEQ ID NO: 283341 - DNA, 1000 bp, Homo Sapiens; identical to SEQ ID NO: 205923

SEQ ID NO: 283342 - DNA, 1000 bp, Homo Sapiens; identical to SEQ ID NO: 115033

SEQ ID NO: 283343 - DNA, 1000 bp, Homo Sapiens
caataactgtcaactcttgctgttctcattatcattcatcacattgtttttatggaatgttaactttgtactagctctttgattctttcaatatcttcggttttatgctttagaaaataaaaaagctaccgaagtctttgaactaccatgagaccgagagtagagaagaatggattaagtcagaaatgtgatggttacctacaattaaggagcaaaaggagaaagcaaaattagcaaagaaaacaaaaaagcattatctgggaggtaggaagaaaaccagataaagacgggcagttggaatctgagctaggaaaaaatgttttagccattataacaaaaataataataataaaaataataataacaaatactaacaaaaataataacaaaaataggccattaacaaaatcagctattgggggaagaaaagaagcagttgaatttgagaagtatgacgtcattcacagcaacccttaagggaatttcttcagggtgactgaagcagacactagattgcaagaaatagagaagagagaaaacagtgaggaaagggaagcagtatagataatatactcattcttttgtatttactttctgtgactgaacatgcatgtgtttataggccactgaaatgacagccaacacctaaaggcagcttatctctcttaaagataggtcatagacatctattgttttttctgtcctacatcatccccaactcgttctttaaactacttctacctgtacctcaaacattgaaggtgacatgagcaatatatggatttctcttttttttttttttttttccctgagacggagtctcgctctgtcgccaggctggagtgctgtggcacaatcttggctcactgcaacctccgactccctggttcaagtgattctcctgcctcagcctcctgagtagctgggattacaggcacgcaccaccacgcccagctaatttttgtatttttagtagagatggagtttcactatgttggcc

SEQ ID NO: 283344 - DNA, 1000 bp, Homo Sapiens; identical to SEQ ID NO: 205931

SEQ ID NO: 283345 - DNA, 1000 bp, Homo Sapiens
attcataaaatggactacactgcaacaaatatgagtaaactactgccacttgctacaacatggatgatttcccatatgtcaacatggatgatttcccatatgtcaacatggatgatttcccatatatcaacatggatgatttcccatatgtcaacatggatgatttcccatatgtcaacatggatgatttcccatatatcaacatggatgatttcccatatgtcaacatggatgatttcccatatatcaacatggatgatttcccatgtcaacatggatgatttcccatatgtcaacatggatgatttcccatatatcaacatggatgatttcccatatgtcaacatggatgatttcccatatgtcaacatggatgatttcccatatgtcaacatggatgatttcccatatgtcaacatggatgatttcccatatgtcaacatggatgatttcccatatatcaacatggatgatttcccatatatcaacatagatgatttcccatatgtcaacatggatgatttcccatatgtcaacatggatgatttcccatatgtcaacatggatgatttcccatatgtcaacatggatgatttcccatatatcaacatggatgatttcccatatatcaacatggatgatttcccatatatcaacatggatgatttcccatatatcaacatggatgatttcccatatgtcaacatggatgatttcccatatgtcaacatggatgatttcattgagtgaaaggagctagataccaaagaatacacagagaatgactccatttatgttaagctgaaaaacacttaaaactattccatgatgtaagaggtctgaatagtgattatctttgcagatcataataaagataactgggaaggagcatgaggggattattctctggaaagctctctggtatgctagtaataatattctatttctcaacccagttgtggtaataagggtatgttcattctataataatatatcaagc

SEQ ID NO: 283346 - DNA, 1000 bp, Homo Sapiens
ggatatgttagttatttataatatgattaggtttattttcatttttatttaatttagatatgcctcctcatctttgtggacttaattttattatttaaatacataacagattaaaaaggttctaaaaaccgaaactaacaaaaaggtgtgctcagacaaggtcactccctcttctatccctttaccctgtttccacccattgtattagtttcctgttatccttcatttatttttgttggaaaaaagcaggtacataatgtatataacgtgtatgtattcatatttaaattacttcctttcctccttacattaaggtaacctgctataaatgctctctgttcttttttttttttttttttttttttttttctggagacagagtcttgctctgtcacccaggctggagtgcagtgacgtgatctcggctcactgcaacctccatctcctaggtttaagcaactctctgcctcagcctcctgagtagctgggattacaggcacgtgccaccatgcccagctaattttttgtatttttagtagagatggggtttcaccatcttggccaggctggtcttgaactcctgacctcatgatccacccttctcggcctcccaaagtgctgggattacaggcgtgagccaccgtgcccagcctgtttttttgtttttgtttttgtttgagatggagtcttgctccgtcacccaggctggaggtgctatcttaggtcactgcaacctccgtctcccaggttcaagcaattctcatgcctcagtctcccaaatagctgggactacaggcgcccgcgtgcccagccaatttttgtgtttttagtagagacagggtttcaccttgttggtcagactggtctcgaactcctgacctcaggtgatccacctgcctcggcctcccaaagtgctgggattagaggcatgagccaccgcgcccagccgtaactaccatatttccataaatttcttagaattttcattaccagggattcc

SEQ ID NO: 283347 - DNA, 1000 bp, Homo Sapiens; identical to SEQ ID NO: 205939

SEQ ID NO: 283348 - DNA, 1000 bp, Homo Sapiens; identical to SEQ ID NO: 115034

SEQ ID NO: 283349 - DNA, 1000 bp, Homo Sapiens; identical to SEQ ID NO: 205952

SEQ ID NO: 283350 - DNA, 1000 bp, Homo Sapiens; identical to SEQ ID NO: 115035

SEQ ID NO: 283351 - DNA, 1000 bp, Homo Sapiens
ctctgcgcctgcgccggcgcgccgcgcctctctgcgcctgcgccggcgcgccgcgcctctctgcgcctgcgccggcgcgccgcgcctctctgcgcctgcgccggcgcgccgcgcctctctgcgcctgcgccggcgcgccgcgcctctctgcgcctgcgccggcgcgccgcgcctctctgcgcctgcgccggcgcgccgcgcctctctgcgcctgcgccggcgcgccgcgcctctctgcgcctgcgccggcgcgccgcgcctctctgcgcctgcgccggcgcgccgcgcctctctgcgcctccgccggcgcgccgcgcctctctgcgcctccgccggcgcgccgcctttgcgagggcggagttgcgttctctttagcacacacccggagagcatcgccagggcggagctgcgttcttctctgcacagacttcgggggtattgcgaaggcggagcagagttcttctcaggtcagacctgggcgggcgggctgagggcactgcgagggcggagctgtgttctgttcagcacagacctggggggtaccgtaaaggcggagcagcattcttctcagcacagacgttgggggtactgcatggctttgggacaactcggggctgcatcgacggtgaataaaatctttcccggttgctgccctgaataatcaaggtcacagaccagttagaatggtttagtgtggaaagcgggaaacgaaaagcctctctgaatcctgcgcaccgagattctcccaaggcaaggcgaggggctgtattgcacggttcaactgcagcgtcgcaactcaaatgcagcattcctaatgcacacatgacacccaaaatataacagacatattactcatggagggtgagggtgagggtgagggtgagggttaggggttagggttagggttagggttagggttagggttagggttagggttagggttagggttagggttagggttagggttagggttgggttagggttagggttagggttaggg

SEQ ID NO: 283352 - DNA, 1000 bp, Homo Sapiens; identical to SEQ ID NO: 205912

SEQ ID NO: 283353 - DNA, 1000 bp, Homo Sapiens; identical to SEQ ID NO: 205913

SEQ ID NO: 283354 - DNA, 1000 bp, Homo Sapiens; identical to SEQ ID NO: 115036

SEQ ID NO: 283355 - DNA, 1000 bp, Homo Sapiens
taagaaaatgtggcacatatacaccatggaatcctatgcagccataaaaaatgatgagttcatgtcccttgtagggacatggatgaaattggaaatcatcattctcagtaaactattgcaagaacaaaaaaccaaacaccgcatattctcactcataggcaggaattgaacaatgagaacacatggacacaggaaggggaacatcacactctggggactgctgtggggtggggggagggggagggatagctttaggagatatacctaatgctaaatgacgagttaaagagtgcagcacaccagcatggcacatgtatacatacgtaactaacctgcacattgtgcacatgtaccctaaaacttaaagtataagaataataaaataaaaaataaaaaaataagatataatttaagaaacactggcaaaaggattaatagttggcatttaaaaaaatagtcccaaatttttttaaaaagtggatacatggatagaagaaaatatacaaatattatgttttgacaaagaagaatcaatataataaaaaagaagataagagaaacaaaaaagcagattaatctcattttctgatatatagaaaataaatggcaaatagtgcaattaaatattgataatcaggtattaaaagactaattgagaaaatagggacttaagggcaattttaaaagccgtaagaacagaggttacaactggaatgaaaatagaaactttcttaaatgttgatgtaactttaaaattacagaagaaagcacatgacatagagaaataaagattaaatcatgtataataagcatagtaagtataatgtaaactaatgtaaaatttaagacacaatatatcagcttatctacatatgttaatgaatctaactcatttattgaaagaaaaagaaatctaatcataagatagatcaattgatcatttaatagatcaattcaaaaggaaatgaactattcaaatactagaagaaaacaaaggtaa

SEQ ID NO: 283356 - DNA, 1000 bp, Homo Sapiens
aattttatatggctaaagccctgtgggcaggaaagacaaacccttagccggaatagatactgatctcatcaagaagaatcactgacctttcagattaaaagtagtaatacctaataaatgtgccaacaggttttgggggttcaacattgatttattctattagatatttgaacattaggcttgggcagtaaatagctatgatttctgctactatggctactctgttatgaattatttagccaatatgcaatgacagaggtttgctgatgcctgtcaactatgccattctgtttacatggttgcttagtacctgtattagtccattttcatactgctataaacaacttccaaagactgggtaatctgtaaaggaaagaggtttaattgactccctgcagggctggggagacatcagaaaacttacgatcatggtaaaaggggaagcaaacacatcctacttctcatggcggcaggaagggaaagaatgagtgctgagctaagggagagcacctgataaaaccatcagatctcatgagaacacactcactatcatgagaacagcaaggaggaaaaccactcccatgattcagttacctcccacaaggcctctcccatgacatgtggggattatgagaactacaattcaagatgagatttgggtggggacacagccaaagtgtattagtgcccactccaactctgaaaattgtgtatcatcccaattggtgttcttatctgaattgcagaattaaaaaaaaaaacaaaaacaaaaactctacagaaagagtggaattattaggttgagaacccaacatgtcctggaaatattctacacttataattaaattttgtgccttattttaaagtttctgccctttaagtaccaaaaataaatatctttttcaaggcagccttctcactttcacagtcacttaaactttgattaacaatgtcagtttctccttatctttctccaacatatatttgtaggacttaataa

SEQ ID NO: 283357 - DNA, 1000 bp, Homo Sapiens
tagtttgatagatagtggaaagacagtattttgctttggaagtactaagagatatgaaagtcaatagtgccatctttgtaccatttatctttaactatttcttctgtcagatactggtgacagaaaaaatgatcaagatgtctttcttccctcagaaaatctagagtcttattttcatgttccctattttctgtccttctctcccaaacatattttccctgcttgccaatatttcaccttcgtttctggcaacagacacaagcacattcatacagcagcattgtagaatttccttaaagcgaccttgattgtgtcaagcatgtcaatgacaatacttttgtggtagtctctttacatcctaagtaatctaggactagctgtagtcagagataattcatttataagaataagaaaatgcttaggagtcgatgtgttttctctaatgaatagttcaaaaattcatttgttttagaaatagatgtgttcatttatgcctttattcactttagaaatatttataatctgatctatctgggctgaacactctgctatgaatttaaaaatcagaggatatgagtctaaagtagagacaattaagtgaacaagtaaaatataaagaaaaaaacggctacagaaaataatttcagacagggagagtgtgccaactctttctgcagtgttgcaagaaagcttctgtgaggaggtcataattgagttgattatttaaggttgagtaggattttaccagatggtacctcacattggggatgtgggaggggaagtcacttctgccagaggagaaatcacatgaaaaagcgtagaagagagaaaggataaaaattttagagacttgaagtatataagaagagacttgtgtgttaacactaagatacataaatcctagacaataggaggtatttaaaacataaagtaaggaaatgtcatccttaatttttgtttcatattttaacttttaaatccttgagtgagcattttaatt

SEQ ID NO: 283358 - DNA, 1000 bp, Homo Sapiens; identical to SEQ ID NO: 115037

SEQ ID NO: 283359 - DNA, 1000 bp, Homo Sapiens; identical to SEQ ID NO: 115038

SEQ ID NO: 283360 - DNA, 1000 bp, Homo Sapiens; identical to SEQ ID NO: 115039

SEQ ID NO: 283361 - DNA, 1000 bp, Homo Sapiens
aagttttcagatttgttcacatatatttatagcattctcttaaaattttaatgtgtctgtattgtgcgtataacaatattttttctccctgatttccttagctgaattataagaattttttaaaaacttttaaataaaaaccttctagatttatcaattctactagtttttgctttacattttactaatttctatgccatatttaatactgcagtatttctaatttgttgttttctctttactagcttatgttattaattatcacagtctatctttcaggattacgttatttcaattagagtataagaacttttcaaggtacccttttgtgtttccattaccaaaaattgtgttatttttgtcataattattattttcagtgtgttatgaaaatttctctccattgttgttattttcatttcaacagccaattatgctttaaggagactgagataatgatttagaattgtatacatataggtagtattttctgtgctcttgattcatttatatgaatccatatttctatacagtatcattttctttttgtctgaaggatttcttgtgacatttattgtgtgacaagtcttctggtaatgaattctttcctcttttacatatctaatactgcctttgtttcatgtttgttgaacagttttttgatatagaagtctatactgatagtttatttttccattcagtaacttaaaagttttattccaccaccgtctgtctgacgttatttctcattagaaatctgctgtgatctagttctatgtatatcagtctttttttctgaatttaaaaaatttctctttatcactaccttgcacaatttcatttcaatgtgctttacattcattatttaaaatattttcttgcaattgggtttttttttgaagcatttgaaactttgtagttttcaccaaatttggaatgttttctgttattcttttttttttcctttttcacctctcttttttctttctttaggaactct

SEQ ID NO: 283362 - DNA, 1000 bp, Homo Sapiens; identical to SEQ ID NO: 115040

SEQ ID NO: 283363 - DNA, 1000 bp, Homo Sapiens; identical to SEQ ID NO: 115041

SEQ ID NO: 283364 - DNA, 1000 bp, Homo Sapiens; identical to SEQ ID NO: 205919

SEQ ID NO: 283365 - DNA, 1000 bp, Homo Sapiens
gtctctataaaaacacacaaaattagccgggcgtggtggcaggcacctgtaatcccagctactcaggaggctgaggcaggagaattgcttgaacccaggaggaggaggttgcagtgagccaagatctcaccactgcactccagcctgggtgacagagcaagactccatctcaaaaaaacaaaacaaacaaaccaaaacaaaaaaacacaacatacacaatatacaactatgaatgtcttacagtccataagtaggtatacagtacgatcaaaattttaatgacatttagctaattaggaaaaacatctagaaagactacttcttagaagagcaacaatgaaaaaagttgaaaaatactgtattaaatgaaccatgtaaattcaggaggtaggactcgaacacagatttttctgattgagctagatgtcatttcctttatgccatcatctcttcagcaattaaaagaaaaaagagaaaaaatttacaaacatgtcttctctgaaaacaaagataattcagaagctattttatatgaagatatttccttgtgttttattttgtcttttgttttcctcgaccactcaaaatttgctaagcttttatacatacacatacacacgcactatacatacagcttatttagatgaaccctaatgatatggctaatccactttacatgatgagcaagccaatataaagtttatccttatttgtatttaatcatttaatttgaaacacaatcatatgggccaggctttgcagatgcctttcttgctatgtagggagttgacaatggtaattatctgatttgctccaacaaagttaacctcagctgaggatttccagcccattaacaatcacctacagtttgcagcgcaaatggatctcccactgtcaaatcggattagcgctttccttggcctttttgaatcattccctgacaaaaaatcaattggtagaactgcattacagctgtctgtcatccatttgaatcagcttc

SEQ ID NO: 283366 - DNA, 1000 bp, Homo Sapiens; identical to SEQ ID NO: 205921

SEQ ID NO: 283367 - DNA, 1000 bp, Homo Sapiens; identical to SEQ ID NO: 205922

SEQ ID NO: 283368 - DNA, 1000 bp, Homo Sapiens
tagaagcatataaacatcttgagctctggagccagatggattgggttttaatctcactttagcagtatattagttgttgaccttagacgggtttagaaagtaccctgtgtgttagcttcattctctctcttgggtgacccactaatggtacttacctcatggcattttgtaagaattaaatgatataaaacatgcaaagtgattagaatatgtgcttgacatatatcaaaggaccagtgattgttagctaactttattgtcctcattgatattctgggattgttatatacttttacttatgagtattctagtaatcagtgatatatatatatatatatcacacatatatccatatatatatatcacacatatatatatatatggagagagagagagagagagagagagtcttgctgtatcacccaggctggtgtgcagtcatgctatcaaagcccactgaagcctccatctcttgggttcaaatgatcctcataccttctgactagctgggactacaggtgcacaccaccacccttggctaatttatttatttattacttatttatttatttttttactttttgtagagacagggtctcactatgatgccagggcttgtctcaaactgttgggattacaagcatgagccaccacaccagccaacaagctttgatattactagacactctttatgtgggagggaagaggaaacttcctaaacataaaagaaaaaaaatcactcagcaagtgtgtgttagagttactttttatgccaccttcaatttgctggtttccacacatgtgctagataatctataggtttctccctagagaaacatgaattgggattaagtttttaaaaactgacaatagacacaaaatctctcaatattcctcaacatatagcaaaaacttattcccacattttatttgggggccaagaaagacatagtgtggctttcctccaaactgcttgttgattaaagcaatgggtttgcgg

SEQ ID NO: 283369 - DNA, 1000 bp, Homo Sapiens; identical to SEQ ID NO: 205924

SEQ ID NO: 283370 - DNA, 1000 bp, Homo Sapiens; identical to SEQ ID NO: 205926

SEQ ID NO: 283371 - DNA, 1000 bp, Homo Sapiens; identical to SEQ ID NO: 115042

SEQ ID NO: 283372 - DNA, 1000 bp, Homo Sapiens; identical to SEQ ID NO: 115043

SEQ ID NO: 283373 - DNA, 1000 bp, Homo Sapiens; identical to SEQ ID NO: 205932

SEQ ID NO: 283374 - DNA, 1000 bp, Homo Sapiens; identical to SEQ ID NO: 115044

SEQ ID NO: 283375 - DNA, 1000 bp, Homo Sapiens; identical to SEQ ID NO: 205934

SEQ ID NO: 283376 - DNA, 1000 bp, Homo Sapiens; identical to SEQ ID NO: 205935

SEQ ID NO: 283377 - DNA, 1000 bp, Homo Sapiens; identical to SEQ ID NO: 115045

SEQ ID NO: 283378 - DNA, 1000 bp, Homo Sapiens; identical to SEQ ID NO: 205937

SEQ ID NO: 283379 - DNA, 1000 bp, Homo Sapiens; identical to SEQ ID NO: 205938

SEQ ID NO: 283380 - DNA, 1000 bp, Homo Sapiens; identical to SEQ ID NO: 205940

SEQ ID NO: 283381 - DNA, 1000 bp, Homo Sapiens
tctcaaaaaaaaaaaaaaaaattccataaacatgtaaaagtatattcattactagatatccatcaacattgggagagaatctaaagcaacttatcccccattcttttacccagctgtattttctgctaagccacctatctcaatctgagattatattacacatttaaaattttctggtttatcatcccttcctaaaatgcatacctgaggagggtggggactcatttggtcttgcttaccagtgagcctctggtggactgataacactccataaatacatgtagaatgaatgtcaagtaaataaattcagaaaatgggcatttatgtttctaagttgaatatgtattcacaatttcagttaatacccacttgcttttattatttatcttgtgagatatgacatttccaatgcaagccttgccctactgaaaccatcatttgctgaatgtgtaattttcatcaaactgtactttaatattaatcaaaatgaaaagaatcctcttctaaatatttgttgaccttgagcttatatcatgtttgcataatgagatttaagtagaacatactttaaggtgcaaagagatattttttcatattctgtgttacaaacaagacacaatagataaactcagattaatccaagaaacaaaaataaaaaaatgaaagatcaagaaaaagctgttttttttaaaagattaacaaaatgcacaagcccttggtgtgattatcccagaaaaaaaataggacataaagaaataatattaagaatgaaaaaagttatctaatacaggattagtaaagatttttaatatcacaagagaacataattttgataaatttaaatcttagtttagacaattttctagcaattataattttacaaaactaactcaagaagaaataaaaatgtgaataaactactaattgtcaaaatattatatacaaactcgttctaagcctagaaaaaaaactgggagaagtcctcaacttattctatatg

SEQ ID NO: 283382 - DNA, 1000 bp, Homo Sapiens; identical to SEQ ID NO: 205942

SEQ ID NO: 283383 - DNA, 1000 bp, Homo Sapiens; identical to SEQ ID NO: 115046

SEQ ID NO: 283384 - DNA, 1000 bp, Homo Sapiens; identical to SEQ ID NO: 205944

SEQ ID NO: 283385 - DNA, 1000 bp, Homo Sapiens; identical to SEQ ID NO: 205945

SEQ ID NO: 283386 - DNA, 1000 bp, Homo Sapiens; identical to SEQ ID NO: 115047

SEQ ID NO: 283387 - DNA, 1000 bp, Homo Sapiens; identical to SEQ ID NO: 115048

SEQ ID NO: 283388 - DNA, 1000 bp, Homo Sapiens
ctggggtcagagaaggggctggggtggtggtcaattgagtgacctggatcagggatgtagagtgggtgggaaagatggggaggagaggtctggttcatgacatttaagaatctttgagagtcttgtcccaagaatgtttcacctgccagatgggtgaaaacctcttctgagaaacaggtgtcttgttttctcaaccagagagtcaataattatcatcttgccataagcatctgggtctcaaactttctgctcttctatccttgacctccaacgatgagcaagattcccatcgaagctgagctgctccttcaggacctgggggtcacccctgggagaactgtcactcatgcccacggctttggatgttgaccagtctggtgtcatgaagtcagacctgagtgtcacgcagagacaggcggtgagaagtaagggtaggccctgctgtgactgcaacttaggagtaaatgcgtcacctggaccgacggcaggaagtgcggacagtgggaggcccataggtaaggtctcagatgaccctgggccatcctggccctgctgtttgctatgtggacttagcttcacgcggcctccccatctacggctcaatttcccctccaggagacaggcatcccagcctgcctggtgactctgggcagggaaagcagcagagctacctgcccccggctctgcgggggtgggacgtgtgaatctctggggtgttttgagatgactttttgtgttgttggtgatctgctgttaacatgggagacagagttgacgttttctgtcccagacctgggacgaagctcttgggcgcggacacagcgttcctcagtggctctttgatcgcagccctgcgccccactgtgtagcgttgagaggccacttccaccagcctctgtccagctccacttgtgaccaggtgcaagaggttcccgagccagcatcctgaacgacattttgtcccatgtttagagtcgaatcctgtgatgtctttgggtaa

SEQ ID NO: 283389 - DNA, 1000 bp, Homo Sapiens; identical to SEQ ID NO: 205948

SEQ ID NO: 283390 - DNA, 1000 bp, Homo Sapiens; identical to SEQ ID NO: 205949

SEQ ID NO: 283391 - DNA, 1000 bp, Homo Sapiens; identical to SEQ ID NO: 115049

SEQ ID NO: 283392 - DNA, 1000 bp, Homo Sapiens; identical to SEQ ID NO: 205946

SEQ ID NO: 283393 - DNA, 1000 bp, Homo Sapiens; identical to SEQ ID NO: 205950

SEQ ID NO: 283394 - DNA, 1000 bp, Homo Sapiens; identical to SEQ ID NO: 205951

SEQ ID NO: 283395 - DNA, 1000 bp, Homo Sapiens; identical to SEQ ID NO: 205928

SEQ ID NO: 283396 - DNA, 1000 bp, Homo Sapiens; identical to SEQ ID NO: 115050

SEQ ID NO: 283397 - DNA, 1000 bp, Homo Sapiens; identical to SEQ ID NO: 115051

SEQ ID NO: 283398 - DNA, 1000 bp, Homo Sapiens
tatttaaggatgatataatacaatgtctgaaatttacatcaaaataatttggcagttgggggcaataaggaatgggaagaagatatatgaaacaaatgtccccaagagttggtaactgatgctttctgatgggtatgtggggttttgttacacaattctttctttgtatattttttaaatttccatgattttttttaaaaagtagagcattaaagacaataattaaaacaaagtataaacaatattaccataacaaatgagccaaaaaaaaggctcataacaatttttcttacagaggacatttacttaccttaatccctgcaagaacaagattctttgctagaaaggcaaaagaaaaaggaatagctcaatattgggaatacacactagatatgtcttcacagagcttagtcacatatctgactgcatacttttaacttctttttttactacttaatacaagttccttgtcttaaaaaagttacaaaatacaggttaaaagtgaaaaaattaaaatgtgcataatcacaacacccagagataatcactcctaaaatttcaacgtattcttccagatatgtttttatgaatacagtatatgtatgtgtgcttataatgaattaatggatatagagaatgataattaatggctattaacatcacaaaaagaagcaatgagtcattattggttctttgtggaagaatataacatcacgaaatagtcttgacaaagattaaaaactcaatctgatcaacattttggatctaacttcctttataggaaatataaggggatgaagttaagttatttaaactatcttcattgctcaaaagtgtcaaaaattaggaatataaatattgcttaccaatttccaaaccaagaccacccatcccacttaagaaaacatgggacttggccatcttctgcattgctgtgtctccaagaacgtacctctgtcgactacacggaaaacacaaaaaaaaaaaaaaaaaaaaaaaa

SEQ ID NO: 283399 - DNA, 1000 bp, Homo Sapiens; identical to SEQ ID NO: 201504

SEQ ID NO: 283400 - DNA, 1000 bp, Homo Sapiens
aggcgaattctggggctgctggatgcttacttgaagacgaggacttttctggtgggcgaacgagtgacattggctgacatcacagttgtctgcaccctgttgtggctctataagcaggttctagagccttctttccgccaggcctttcccaataccaaccgctggttcctcacctgcattaaccagccccagttccgggctgtcttgggcgaagtgaaactgtgtgagaagatggcccagtttgatgctaaaaagtttgcagagacccaacctaaaaaggacacaccacggaaagagaagggttcacgggaagagaagcagaagccccaggctgagcggaaggaggagaaaaaggcggctgcccctgctcctgaggaggagatggatgaatgtgagcaggcgctggctgctgagcccaaggccaaggaccccttcgctcacctgcccaagagtacctttgtgttggatgaatttaagcgcaagtactccaatgaggacacactctctgtggcactgccatatttctgggagcactttgataaggacggctggtccctgtggtactcagagtatcgcttccctgaagaactcactcagaccttcatgagctgcaatctcatcactggaatgttccagcgactggacaagctgaggaagaatgccttcgccagtgtcatcctttttggaaccaacaatagcagctccatttctggagtctgggtcttccgaggccaggagcttgcctttccgctgagtccagattggcaggtggactacgagtcatacacatggcggaaactggatcctggcagcgaggagacccagacgctggttcgagagtacttttcctgggagggggccttccagcatgtgggcaaagccttcaatcagggcaagatcttcaagtgaacatctcttgccatcacctagctgcctgcacctgcccttcagggagatgggggtcattaaaggaaactgaacattgaaaaaaaaaaaaaaa

SEQ ID NO: 283401 - DNA, 1000 bp, Homo Sapiens
gagataggatatatgactcacttggcaaaggtcaggagtctgaacatttgggtaatgagtaccttgtcctaggaagataaactgagcacagtgtccctaggacttgcacgatcgaagaatccccttggttggggcttggacctttgccagctcatctgcaaaatcttttaagttgtcctgatcagccaaagctgctatcacctgaatcttggttgtttttactattaataatatagaaatattttgccaagaaaatcttttgtctttttgtgggacaggtttcagaaatggtccacagtctctgtagatacctctagtaattggtcgcagaactcattgcctttaatcagccctggggatcagtgggtgacagatcagtgcctttatgaaatggagttactaggaatggtgtgtcattgcctgacgtgcctccttatctgccataatggagttccttatatatttcctgcttgtcttgtatgcctttggatctagtaaggaaataaggagaggttgagaaaatacagagtaaagctttagcaggtatcttcccgttaagtgacaggcagtgatttgtgcttctttggtttttatcatcggtctaatgtgagtcattcttgtgcgtcagggttggatctttttgcctttcccttctcttctcctgttgacttgacctggtttctttagtctgagaaattggacgtatttttctttctttgaggaaagggctagtggataaagccctcccatagagagtgtaacgtgggtaatatttgggtgccctttcagggttaggtcccactttgttcaaggaatgctgtatgcatgggtagattattaataagatggtggccccagtaaatgttggtgtatgtgtgagacttggtgggaagagctgcttgctgtaaatagtggctcctctgctcagcagttttgtgaagtcagttgacttattctttaatttcatcccaccacccaacataaattttttggttcattc

SEQ ID NO: 283402 - DNA, 1000 bp, Homo Sapiens
cttatagtaaaaatactacttaatttaatttttagagacaaggaaaaacattttgcagagtttggctccactattgaaaaagggatgctttaggttgaaccattgtagcctcagattctatcttttcctaaataaacacattaaagcctcatgtgtgaaattattttttaaaaatatttatctggatttaaagaataacagatcaacagatacctctcaatgtgtttgctaattaataaaaatcagtttcttacaactaatgtttgtaagaaaatgttcattttaagtgctaaatagtgaagaaaatttatcacctaaaatacacccatcaatataaggcaagaaaaaatcttaacatgcagccattcgcttttgccatgccctgtcctgtttacttcttaagaggtttatttttgtacttttgcagaataaactttagtaatctagaactggaaggtactatatatgtatgtgtgtgtatatatatatataaaagaaaaacatatatatatttcaattacttgaaatgtaaaaacttaccgaatacaaatggaaaaagtgatgtgtattatatcatattgctttttgtccatctttgtgatttatttactcacttcatgtttttcatttacaaaattgtcaagctagccaaaataattcttgttttcttaattgggagagaagagacctgacagattatctatactcttcatatgttaaaagaccatttcctgtaaaactgacctagtgcacaaactgaatttgaaatagactgtgaagtaaactataacttgtccttttaattttgtttaacatggttactgacttacatgatgtattgaatatcaagataaagaaaaatgtgtctaaaagctaattagaattctctgggtcaccaagtcaaggtgctattgatctgggttaatctgagtaacttattgtctagcctataaataagttccaaaatatcgaattcaaaaaaaaaaaaaaaaaaaaaaaa

SEQ ID NO: 283403 - DNA, 1000 bp, Homo Sapiens
gcttgctttctcagtggagaggcttggagcctgagacaagttttcagccctgctcaccggctgcctggaaataaactcagtgctattggggtgcacagtgaaagtgagaccagcctttcaggctgcgttggagctggatgaggcctgtcactgcggcctttcccacttccctggccacctgtatgatgcagaagaggcagccataatccccctgagaacacaactccactgggctgagaaccacaaccccataccccacaggggctgaagcaggccctgcccaagaagagtctgagctaaaacatgcctaaccctgccctcacctgaaggtctctctctacctgccctggtagccaaagacaaagaacatagtctcttgggaactctatgccccaaaccacagcctgagacacccaaatacttatccaagcaaccctagggcaagcttgtattctccctatactactgcagctgatgctctcttgaaagcaccacttcctggctggaggccaaccaacagaaaacgagtatgctaaataaaaatacaaccaaggaccctcacagagtccacttcactcccctgctacctgcaccagagcaggtgctggtatccactgctgagagtcctgaaaatggatcacatcacaggaaatggatcatatcacaggactctttgcagacactccccagtaccagcccagagcccagtatctccactaggtggctagactgagaagagcagtaacaatcactgcagtccagctctcaggaagccctatccctaggggaagagggagagcaccacatcaaaggagcaccctatgggacacaagaatgtgaacagcagcccttaagtcaaatatcttccccctgacataatctacccaaatgagaaggaaccagaaaaaacagttctggtaatatgacaaaacaagattctttaacacccccaaaaaaatcacattagcttaccagcaatggatcaaaaaaaaaaaaaaaa

SEQ ID NO: 283404 - DNA, 1000 bp, Homo Sapiens
cacgaggagcgcaccaagagtgaatggaaatgggattgcagcaggtgcagggcagatgtctttgtgaaactgcaagagaccaggcccagtggccagtagcattcaagggctatgcataagagaggaagaaagggataccttggtgcagtgtctcagataccctggtgctttctgggtaatgggtcagtattcaggcagcatggggtgatgtaatatctgagtcccatgctataggcagacagaagtaatgtacacctagctcctaaaagtggcagaattggagctttctgactcttaacactctttcaaggcgtgaataactgatctggtttgttgactttttctcccaaatggttcaggtaaaatttagttggaggcttttggattctctggtattttgatttgagttgggaagtgtaatgttagctttattgaggaaagacacttatgggttgggcggacatatggccttcagcttgccaaacacatgggaagtaacctttaggggtttgaacacagacatttatttcagtgcaagtctcattcactgttctgtggcttgtgttagattcttaggggtttgaaaggattaagcaaactactttgagactgcttcagtaagcaaggtttcctagaatcttggaaaacgatttcccttttgacagttgaaaattaagtcttgtcagattttgctaagaaataaatttcatcatgttgcagaaataacttcaattatcactctgtgggcttcacgtaatgtgtagtgtggtacctagtatgatttcaaataaaaggttcgctttggtagcttgggagctttctgggttgattagttttcttcttttgtcgatttaggaagtatcttaatgcagccattgtatgttcgaataataagtttgagtggaagtgggaatcttgcctaaacataatgagggcggagcagaacaccaaattttaagtaatcggaatccgttaatataaatattaaaaaaaaaaaaaa

SEQ ID NO: 283405 - DNA, 1000 bp, Homo Sapiens; identical to SEQ ID NO: 219661

SEQ ID NO: 283406 - DNA, 1000 bp, Homo Sapiens
ctttgcatgctacacacaaaggaaacatttacacttctagtccacaaaagcctatcctaggattgtgccaggggcacacaaggatttcaaagtacagaaaaaactgggcatacacatgccctacaaagcagccaaaagacattccccagtctctctcaggaaatgtttcaagatgaaaagcaaaagtctgaagtcccttggaatcttgggttgatttcttcattattctcaaggctaggttgttttcccccagcatactttgttgggcaaaaataaaacgtttccaaataaaagcaactcctcagccccaattttcaatgcaatatgcttattaaaagttcaacatttctcaaggtctagacttatagtgtgatcatattacagtactcgggaagagcattttctttgttgttgaccctgctagggaaacaggtcttgactcagccaaagtggcgttcttgtgggtgattaatgacaggcctagatctcgccctagtgacatccatcccccaccccccacccccactatactaaaatcagccgtgtctgaactgaaggaggggctgtagcctcgcctcaaaccacccagtcccagagttaatagctgcaaccaatcgattacggcaagcacacatccagattggggtgaaatgtgaccctttcgcctaaatttacgaataatatcgtcctctctgatcatttccgctggggctccagcgactacggaaacaattccaatcattcggcccaaagaaaaagatgtccctgttctacccaatacgggcaaggcaaagcccctacccacctccaaacactatccccttgacatcagcccatttctattgtgtcttattaggtcctcgggctacgaggacctagtgaaaaacgtggctgccctactactttgctaagaacaagaaccacacagtccggcacccccaccccaggggccgcatcccacaccccaggacccctgttcccagttctctccactaccccg

SEQ ID NO: 283407 - DNA, 1000 bp, Homo Sapiens
tataataatctcttacaatcttgttcatagtgccacctatggtcacgaccaattagagctggtaagacagctgtactgtttgcttcagccaatgagggtaaatgtactatgttgctaaaactctcagcccatgagtactctcctgagctatcctcagccaggcatgcactgcaagatgggtcatttgtgcttctttggcttaactttctgccattgactttgggttctagggaacagattgaccccaaacatctgacataacctacgtaagtgacagtgttggcttagaataaagaaacaaagactatcatggcatttttttaataaagcaagtgttacagtgacctgttttggggactgccagagattaggtggcagttgccttctagatctagccacaggagaaaaaattaaagagccatatgactgtgaggcagatcctcatcagggaggaggcgcagtgtctttttaaccactttgaagaccaacagccaagacatcttgagctagttgtggtggacagagagttccaaacacctcagccaccaggaaaagggagtggccaggaagaggctgcaggctcaagggcagggattctcccacccacctaaggaacctactgagcatcgaaccactccaacttgccttgggaggaggacttgaatgctaccaaagactgctcgacaggcctgcaaggcaggactacttttgtgagaatttgaagaccatgccgacctgtcatttaaagacacccatctctgcctgagctgtcagatttgccaagttctgggttgtctcataattatttactcagtacaaaataataccagccatgatcctcagtggtaagtagcagaaatcaactgtatttgtttgctaaggctgtgctaataaagtgctgtaaaccaaaaaaaaaaaaaaaaaaaaaaaaaaaaaaaaaaaaaaaaaaaaaaaaaaaaaaaaaaaaaaaaaaaaaaaaaaaaaaaaaaaaaaaaaaaaa

SEQ ID NO: 283408 - DNA, 1000 bp, Homo Sapiens
tattatttctaaaatgagggccatgaattagatcacctcgagtgtccctgctggtaaatgtatttctgaaactgtggttctctgcccatggcatcacagcagagcagctaagaaggtcgcctgtagaatcagaatgcctcgatctaaaaccctgccatgccatgtgtttatgtatattgttggccaagtttattagcttccccgtaactcagtttccttgcttgtatagtgggaattatacaagtatccaggtaataagattgttgtgagaattatatcaccttctgataaataccattacctcattagattacattttagttcccataaacctactttactcaaatccctatataaataacactcaaatttcaaataacaaggaatttatagattgcacatcaatgactaaattacctttcctactctagtaattcttcaaggctccatccagtcatctacttcctgtttaatgataatctaacaatcatagtacctacatactaataattcactcactctcaaccacctttctggcaagctaacctttaatgaaaaaatgtctcagctatcccaatgtttgctgaaaacctaagtgaagcgatgctcttgatttatttttccatcctttcttcccatgtaccattctgcataatagcagcaagggtccagtacaaatcttcctaaatcttcctttttcacaggttttcttttattcaaaattcactaagcagaatgaaatgaaaggactgattgagtcataacttcattattcccccatctccatctactccagtcatatacgcaaaacttgaatgtgatttagaacaccctgtcctggctgtccccatctaagaacccactttcactattctatgttctgctgctaaactctgggaatttctaagacccaaagcaaacaactgctctaattcaatactgcctttgatacgctaatagtcctatgaggacttcgactatcagctaaaaaaaaaaaaaa

SEQ ID NO: 283409 - DNA, 1000 bp, Homo Sapiens
ttaagagttagaagacatgtccatccacgtgcagtggtgaaagacaacatgcaaagtaagaaaaatgaagtggaaaagcaggaagactcagagaaatcatgctaccccagggtagtaagaaaatagctgcatggggctgggcacggtggcctgtaatcccagcaagttggaaggacgaggcaggaggatcacttgaggccaggagttcgaggccagcctggacaacacggtgaaaccccatctctactaaaaatacaaaaatgagccagccatggtggcatgtgcctgtaatcccagctactcaggaggctgaggcaggagaatcacctgaacccgggaagcggaggatgctgtgagctgagatagcaccactgcactccagcctgggcgacagagtaagacgctgtctcaaaataaagaaagaaaaaaagaaaatagctgcctgggttataaatttccagttcctggtttcccttccccttcatgagtcttggctgtacttctatcatcgggtactgtgaaaactccagcatctttgcctaatgggaactaatttccctttttgggtaagccagcttacattttttaaattgtccattactggaacctatgatctgaagagcgtcctgggtcaactgggcatcactaaggtcttcagcaatggggctgacctctccggggtcacagaggaggcacccctgaagctctccaaggccgtgcataaggctgtgctgaccatcgacgagaaagggactgaagctgctggggccatgtttttagaggccatacccatgtctatcccccccgaggtcaagttcaacaaaccctttgtcttcttaatgattgaacaaaataccaagtctcccctcttcatgggaaaagtggtgaatcccacccaaaaataactgcctctcgctcctcaacccctcccctccatccctggccccctccctggatgacattaaagaagggttgagctggaaaaaaaaaaaaaaaaaaa

SEQ ID NO: 283410 - DNA, 1000 bp, Homo Sapiens
tttttccttaaaagagcctccaagtgtattgtgatcattttcacactgatcaaagagagcacccttctgtcaacaggtatctgcagttttcaggacctggcagaaattcttctatgttctgcctttaaaggtcaggtacaaaagcagagacagctgccaggcccctctgcccagagctaagtgtctgggaccatgagtgggaaggacaggcttgagcctccttggtcctccagacagcatggggcgctacttgccccttctgcagctgcgcgcggcaaagctgtggcctggccgtggcctcctgccccatgcaacagttggtggacagaccgtacctggcacacggcgccttgtgcactttccaacattttgatgccaaccgtcgctagtcactgagccctgacatttgatctctggccttgaccgcagatttcggaaacttctggcagcccagtgtctactggaaggcccaagccgcttgccagaaagctgcgccccgcccaaaagcactgggttctgcagtccaggcccttcctcagctcccaggtccaggagaactgcaaggtcacctacttccacaggaagcactgggtccgcatccggcccctccgcaccactcctcccagctgggactacacccgcatctgcatccagagagagatggtccccgcccgcatccgcgtcctgagagagatggtccccgaggcctggaggtgctttcccaacaggctgccgctgctgagcaacatcaggcctgatttctccaaggctcccctggcctacgtgaagcggtggctttggaccgcccgccacccccacagcctgtccgcagcctggtgaccgtgaaaatcgccccgccagagagcagaggaagcccgacgcccaggccatctgccttcaggtctgtgatgagaaacggagtggcctgctccgttgtgcccaggtctaggccgctgagcagagccctcactcccaggcagagttgtctgaatccttcctg

SEQ ID NO: 283411 - DNA, 1000 bp, Homo Sapiens
acagaattaaaaagcagtcacaaattactagggggacaaaggatttgagatataaatcaaattttacacgtaagtgctaaagtatagcatactctttatatatgtaccaagatattttgctcttgctattgttttttaaccatcccctgccagaaacatatacacagatacacaaccacagtaagaaaccattcttaggatatgggttaaatgggatttaaaaaacaataataaaaatgaatttttatgaacttccactgaagttcttcacaaactgtcttaatttagacaaacttcacaaactgtcttaatttagacaattacatgctcatgcatgctatttcctacccttgtgaacttggagcacatttcctctgcttcttttatcatatttgctcgaagcatgtattttgcacatttggaattgatgaatctatcagctgtgtccaaagactgtgcttcatccatccactttgcagcttctttgagattacctatatgctataaaagataattaaaggaaccacaatttataatcaagagaatatgagtacaataaaatggaaaataatttacacagacaaaaaagaaatctgtcaccatttctgtcaaatttatttagaaatcaaaattacagttcacatttactaagagctcaaatgattacacatctaattacacattgattatacaattaatataacatgaaactacacaggattattagaaaaagattatcagggtgccctagaacttgtttccacaaagaaaaaactccaaggattcttaaagtagctgaattcttcaactactcaaaaaacaggattcagattttaccttgtaaatttttgctttcatatagaataattctattagagttggagtactagcaattgcagcattaatataatccaaagccaaagaatactgtccaagtttatcaaagtgctgtgccagtaaatataaacccattatgttataaaaaaaaaaaaaaaaaaaa

SEQ ID NO: 283412 - DNA, 1000 bp, Homo Sapiens
cgagaccctgcctctacaaaaaattaaaaaattagctgggcacagtggcatgtgcctgtagtctcagctacttgggaggctgaggtgggagaactgtcagagcccaggaggtcaatgctacagtgagccatgttcatgccactgtattccaccctgggtgacagagaacctgtctcaaacaaaccaacaaaaaattgcagagctactggttttgtaacaagctttgtagaactgtttgacttttctaaacaatgtgcatggataattttaataaaaacaaaaactgtatttgaaagagacagaacacttaccaatatacttttcttgctttttgaatagaggtaacagtctgaacttcttttaatgtttgctttgttttcttttctgctgacttgaatgcctatttatagaaaagagttttaaaaacaatttgttaagaatgtatttaaataacaccaaagtaaataatggggcaagaatttttttaaatgtcacaaaatggcacaatctacacacacacacacaaacacacacacacacaaatacgcatacttgaaagtaatgaagaaatgaaaatatttttgcctgaagtattaaaataatctaaactaaagaattactacatgaaaatatttgcccaagacctacaaagtaataaataccttgtcattttctagatactgagtacctatcatatgcttggttctaggctagatgccattagagatataagagtgaacaagatggacaaagcccccactcccaccccactaggtctagaagagacaactattaatcatataatcctttaaataaatatataatggtgagtgcttctaaagatgctacaggaatataacaaggaaacccgatttacactgggttatggtcaaagaaggtatctctaaggaaatgacatttaagctgaatcctcaacgactaacggggttatcaggcaaagaataggaaaaagggcattacaagcaaaaaaaaaaaaaaa

SEQ ID NO: 283413 - DNA, 986 bp, Homo Sapiens
actggctgtattttccagacataatttctcaatgccacacctctatggggcacctacaggaatgtcaatcatttcgcaggcatgcctggccccaaatgcatgactggatgtggacagccgaggtaaaagcccttaatgagtggcatattagtcatcacatggtaccctgggctgatcccctctccactccccgtttctccatcttcagctgaggtaggacacttcttgaaatctcaaggtagcacatgctctagcctttcatcttgccttttcttggcagggctgctgtggttgagacagagtagctctttgaaatagagtaagagtgggagagcaccgttctttcgggaggatgaaacgaaccagatgagaaagttgagtgtgtgtgctgaagggacatatctggatatcgtgaaagaatgctgaaagtctctcccaagcagccaaaaaaaaaaaaaaatcattagtattttgttctcagaaggaacctggaggcttttggcccaggcaaacttctttggggtgaattttatacctccccagtggatttttagcaggaaagtaaaaaataaatgctcccgaggctgagacctatacactgagaatcttaaaatttgcattttctatcaatgaaattgacttcattatttaatccatcctttgtacaggatcattagcaacttctctcttacatcccgctccccttgttgcttagagaagacacatgagcagcaatggttacatcttcatttgaccttctctgtgatgatgcggcaacatctgaatatgccaggccagcctacaagggtctatttgccagatgccatgaatgttttaaggggcagcacataggtacacttaaaaagtgattactttctattctctgataatatttaaataagtcaggtggacagccttacattttagcggctatagattcaggcacacattaacaccatgaaaggaaagcaaatgatcccttttcc

SEQ ID NO: 283414 - DNA, 1000 bp, Homo Sapiens
taggctgttcactttgggcatttgccctgaactaaaatccctaagtccctttccccaaggtgaaactaagatagagttttcatatttatcctgtcttattcttttcagggaaaagattttacatctgttgaatttcatccttggtttaaagttgttcttttaactactgagatcttttgaaaatcttgatggctatttatctgattaatggtatttcctaattgattgtcatccacagaattgatggtgtatgtattccatgccttcatttcgtcaatgacaaaacattttaagcaggttaatactgatgacagatttctgaggttgcctgtagagaccattctcttcctcgatattgctcagaagttgaatttggtgtctcagcccactaggaattcgtctaacagtgttattacgataaaatgttactacaaacttgattaaacttctggtggaaattccatcacattttatgcaattttcaatttatttctccaatttatttttaatgccacatggacattatattccttaaccattcttttgcatgtgattaacatttgtgaaattaaccacttaagcaagtgtttttgctttgatgaaagaaaaatgtttaaaatcctactggatatgaaactgaaagtaatgttttgtgttttttgtttcaaatgaaagtgtaaattaagaatttgttggcagggcgtggtggctcatgcctgtaatcccagcactttgggaggccgaggtgggcagatcacctgaggtcagcagtccaagaccaccctggccaacatggtgaagtcccgtctctactaaaaatacaaaaatcagctgggcatggtggcgggcacttgtagtcccagctactcaggaggctgaagcaggagaatcacttgaactcaggaggcagaagttgcggttagccgagatcacgccactgccctccagcctggggagacagagcgagattctgtgtcaaaaaaaaaaaaaaaaaaaaaaa

SEQ ID NO: 283415 - DNA, 1000 bp, Homo Sapiens
ccttctctcctttttcccacattctgtaactgaaaaaaatgaataatgatagtgcaaaaacattctgatgatggtttagaggaaaatgttaaattagaggagtaaagaagcaagatatagagtaagtcaaataagtcaaagaaatccaagggaggctcaatcaattcaatataccctgagaatatttttccacttttcaaaaaaaaaaaaaaaaaaacgataaaacaagaaaagaaagacaaaaaggtcaccagctttttaaaaggatctagagtcagagaaatagaaccccatggttcatctgccttctgatcaccacaggcaaaatagctaagaacatctaaaaatgaaaatgtcctgcaaagaatgaaactagtcaaactagagaaatagaaaataaccataataatacatatcttgtctttgtgtaacacgttcttagttgacaaagcattttcacatgtatctcatgtgattctaaccaaaactttatgaggtaggcataacaattcttaatgatcacattttacatatgagagagtggattttcagagactttaaatggccttcgatggatctgggaccagaacttacacatcaggctctggggcctatgctggttttccttatgtctggcaccgaggtgtacacaatcagcagacatagataaagaaggcttcatactagtaagataatgcagaatatgtatctttctcccaaaagacacacatacaaaaatgtaaatatttaattttctattatcattattgtgataaatatatttgatcattaatgtgataaataatgtccttcataaagtgaaggatggaaatcatacaaaaatgcaaaacagctgggcgcggtggctcatgcctgtaatcccagcactttgggaggccgagacgggcggatcacgaggtcaggagaccgagatcatcctggctaacacggtgaaaccccatctctacaaaaaatacaaaaaaattagccgggcgtagtg

SEQ ID NO: 283416 - DNA, 1000 bp, Homo Sapiens
gctgggtttgcaacaacttctctcccggagacagaccaaggaaactacaaaactgcaggaaggattgaagggccgggcacagtggctcacgcctgtaatcccaacactttgggaggccgaggtggattggatcacctgagatcaggagttcgagaccagcctggccaacatggtgaaacctcgtctctgctagaaatacaaaaataagccgggcgtggtggcgtgcgcctatagtcccagctactcgggaggctgaggcaagagaatcgcttgaacctgggaggtggaggttgcagtgagctgagatcgtgccactgcactccagacttgggcgacagagtgagaatctgtcaggtggattctgagggtactctgaccccacgaacccagcatgaaatcttccaggcattaaggaacattgaggatgtggaggattggaaatccctccagggaaaatacacttctcttgagcagggtcacgaggggtgggggcaatgtgggaggtggggcaaatccaaagacaaggtcaacagcaataataataataacaatgacaggcatttgttgcttgttggctgggcctcttgcatacagttctcccaacatccctgtgaggtggtgatgcttatccccattctccaggggaggaggctgaggcccagagaggtgaagtcgtgtgccacaaaataccccagccatatggtggtagaaccaagttttcagccagactcaccagctcacagcagagctgccctggactctacagccattcagtgtatagctgggccactccatcattcaaggcagttcaacgtcaagattcctgatttgcctcaacctggggcctctagaagataccatcacccccaacaagctgaagacgtgtgtccggaacactcagacacacacaaagtgctatggatacaccacaccccgacctagctgtctcttcctgatggacctcactgggtagaaatgcctggcaccgctgcctcagatc

SEQ ID NO: 283417 - DNA, 1000 bp, Homo Sapiens
ttgtgttggaagtcaggtcctaaggccagctgctctggcttgcactgagccacaggcagactgatttgccaggaatgataaaaaggggtgaatgtgaggggagaattcagtgtgcaggctatgggaggctaatgcttttttccttcttctaggttggaaaaagactatgttagcaagtgtcacgccatggtatgtggttggttggtctatttcagtctaatctattatgctttctggttaaaaatgtcacctttctcattatctgatggatttacgttgcaatgcataactttcttaggttctaataactcaccttggctgggccatgtgagttatcagaagagttactcaccattttggcagtgcttcgaaccattgagttaccatgtgagttaccatgtgagaaggagagaaatattgcctctgaaatgcctttttagctttggatttgctttttgcttttttttttttctttgagagttttgttcttgttgcccaggctggagtgcggtggcacgatcttggcttactgcaacctctgcctcccaggttcaagcaattctcctgcctcagcctcccaagtagctgggattacaggcgtgcaccaccacgcctggctaattttgtatttttagtagagatggggtttcaccatgttggccaggctggtctcaaactcctgacctcaagttatctgccggcctcagcctcctaaagtgctgggattataggcatgagccactgtgcctggcaaaacaaaaaatataaattttttaaaaactgtatctttttgaatagacaatgcatttatatgattaaagctccatatatttaatatatacaaaagtatatatagtggaatgtctcctttctgctgagggcagatttaaaaagtaacctatggcatcagagatcctcattggcatatatcccttctaaggctctgtatctaattttgtatttttttggtaaaagtgctccccaccaagacctgcaggca

SEQ ID NO: 283418 - DNA, 1000 bp, Homo Sapiens
gatacagaacagttcataaaacaatttaggttaacaaaatattttaaaatacacatccatgtaaccatgaccccaaggttatgaaaatagtatgttgtgaggccgggtgtggtggctcacgcctgtaatcccagcactttgggaggccgaggcaagtggatcacctgaggtcgggagttcgagaccaacctgaccaacacggtgaaaccccatctccactaaaaaaaaaaaaaatacaaaaattagctgggtgtggtggtgcatgcctatagtcccagctacttgggaggctgaggcagaagaatcacttgaacccgggaggcagaggttgcagtgagccgagatcgtgccactgcactctagcctgggcgacagggcgagactgcctgggcaacagagcaagactccgtctcaaaaaaaaaaaaaagaaagaaagaaagaaaaaaagaaaaagaaaatagtatgttgcagaagcttttgtgttttgccgttaatgtttagatctacaatccacctgcagtttatttttgtatatggggtgaggtaaggccaaggttaattttttccatatgaatatgcagttagctcggcaccacttatggaaaagacggtccttccacctactgctctgcagtgccttctttccaatattatgaactggatgtaaaaatacatctaaggctgggcgcagtggctcacgcctgtaatcccagcactttgggaggccaaggcggcagatgaactgaggtcaggagtttgagaccagcctggccaacatggtgaaaacccatctctactaaacatgcaaaaaaattagctgggcatggtgacgggcgcctgtaatcccagctactcaggaggctgaggcaggagaattgcttgaacccgggaggcggaggttgcagtgagccgagatcgtgacactgtactccaacctgggcaacagacagagactctgtctaaaaaaaaaaattcatctagaaaagtataagactgaaat

SEQ ID NO: 283419 - DNA, 1000 bp, Homo Sapiens
ccagacagatgaatcacaaaaaggaagaagcaaaaccattgactgtacagacaaaaaggtgttgtgacagataagaatattgggttcacaacttcttgcagccaggttgaaaaggcatcactaaaactccagttctttttatcaaaacaagtgcagaacaggtccccatatggagcagtcttttcgacattgaattcctaaggaaatttctcacgttggactgtggatagagacatagagtcacagagggatcgtttttaagcatcattttttatttcagcctgattcttagttggttgttctcggaatgttcttcttaaaacccaagagcatgacaccaattcaatgaagcttggtgatgtaagggtatccagcactgtgagataagagtcacccaatggtgtacttgacaggcacagcaatgtccttatgatgtcaatggggacctctgggtccactgaaaccttagataagataggcttagactccctgaaacagtgcaagatctccagaaatttccacagaagcctgaggagcttatgtgttcgtggtctcctttagtttttgccatctgcctttccagttcagtttagagattatgatctcactactccacactgtaagatgccatattattccatggctgtaagatgccgtattccatgtgaaacagctccaattacacacacacacacacacacacacacacacacactcaacagcacactaacatgctatgtcattagggattacctttgattcaaaaagtcctttgtcccttggaacatttctcctctggactccatgcagtcccagacttcactccatctcacagatcattcccttccttctctgcatcctttccttttttatcaccaactcccttgaagaagtaaatccactttgtatttcctcacccctagcaccctagccattcgtctcattaactactcccttctgaatgtcacacatcctttctttcctgcaaagtttcctcttc

SEQ ID NO: 283420 - DNA, 1000 bp, Homo Sapiens
agaggccttgtcatcctcccttgccccaggccaggtagcaagagagcagcgcccaggcctgctggcatcaggtctgggcaagtagcaggactaggcatgtcagaggaccccagggtggttagaggaaaagactcctcctgggggctggctcccagggtggaggaaggtgactgtgtgtgtgtgtgtgtgcgcgcgcgcacgcgcgagtgtgctgtatggcccaggcagcctcaaggccctcggagctggctgtgcctgcttctgtgtaccacttctgtgggcatggccgcttctagagcctcgacacccccccaacccccgcaccaagcagacaaagtcaataaaagagctgtctgactgcaatctgtgcctctatgtctgtgcactggggtcaggactttatttatttcactgacaggcaataccgtccaaggccagtgcaggagggagggccccggcctcacacaaactcggtgaagtcctccaccgaggagatgaggcgcttccgctggcccacctcatagccaggtgtgggctcggctggagtctgtgcaggggctttgctatgggacggagggtgcaccagaggtaggctggggttggagtaggcggcttcctcgcagatctgaaggcagaggcggcttgggcagtaagtctgggaggcgtggcaaccgctctgcccacacacccgccccacagcttgggcagccagcacaccccgctgagggagccccatattccctacccgctggcggagcgcttgatgtggcggagcgggcaatccacttggaggggtagatatcggtggggttggagcggctatgatgcacctgtgaggccatctggggacgtaggcagggggtgagctcactatcaggtggcacctgggcctgtcccaccagctcacgcctggacccacccccactcacatttgcgtgcagggccatctggcgggccacgaagggcaggttgcggtcagacacgatcttggccacgctgg

SEQ ID NO: 283421 - DNA, 1000 bp, Homo Sapiens
tgggagtttgagaccagcctgggcaacatagtgaggccctgtgtctttaaaaaaataataatacattatttattattatatatatatatattttttgagacggagtctcgctctgtcaccaggctggaatgctgtggtgcgatcttggctcactgcaacttctgactccctggtttgagcaattctcctgcctcagcctcctgagtagctgggattacaggcacgcgccaccacgcccggctaatttttatatttttagtaaaaacggagtttcaccatgttggtcaggatggtctctatctcctgacctcgtgatccacacgcctcggcctcccaaagtgctgggattataggcgtgagccactgcgcccggccaataaattaattttaaattttaaattaatttttaaaaaatttaaaaagtagccggcatggttgcatatgcctgtggtcccaggcacttgggaggctgaagtgggaggattgcttgagcccatgaggttgaggccgcagtgagccgtgactgcactgctgcactcatcctgcgtgacagagtgagaccctgtctcaaaaaaaaaagaaagaaggagagagagaaagagacagaagaaagaaggaaagaaagaaagaaaaagagagaaagaagaaagaaggaatgaaagaaaaaagagagaaagaaagagaaagaaagaaagaaagaaagaaagaaagaaagaaagaaagaaagaaagagaaagaaaggaaggaaggatggagggaaggaaagagaaagagaggaaggaaggaaggaaggaaggaaggaaggaaggaaggaaggaaaagaaagagagaaagagaagaaagagaagacagaaagaaagttacttctctgaatagacctccctttggagatccctgtttcttcacgctgaccctgccttaccctgttgctaggcctgggggaggggagtactgaattttaagtcccttgaggggaagaactatcttgcactgccatctg

SEQ ID NO: 283422 - DNA, 1000 bp, Homo Sapiens
ctgatgcttcattgaagacttaggtttacttgacataatagcatttgtgattgtcgtgaacactttaggccatttgttacccatgaatcaacaaagaaactgacctttttggtaggaggaaacataagcactaaacactaagctgttgcaacagattgccttgtgctgtttgggcagaataaagacaagtgacttgagcggggtggtcagcagtgtacataatattccagtaggaaactgcttccaagtttaagcatgagctccccaaactggagaaaacatattttgctattctgagacaacaatcagaatacagactttggattccaggtcacagtttgctttttagacaaggtaaagcaaagaaagccacattgtgccatcttcagctccagtggctttagcagtgactgtttgacataaaacatgtaagaattgcttgttgggaagagtgctttagggacccactgttttcatttcttcttggagtttaccttgtttcagatgcagccatgggtaggtcagagatggattgttggtgcaataaacccaagaatcaatgtagcctcttaatcccatcaagatgtagtttgtagcagcaaagtgtacagtctgaaaccgtatgttttatccttatattttagagctttcagcagcctttttaagagaggccacttaccaaagttatttctataagctcaagagtgtttcggttggtaagttcttccagctgaagccactttttccttatagttaatacaaatgactatttttactttaaaaggcacagctgtcctggtgggaaatgaaacctgcagcagttcaggatgactaatgaaagcaattagcttgaacatttagaaaaaattcatatatgatctaaatttttatattatcatttctgtgccttctaattcctgcatcctgttcaaaacatctttccagacattaacttacacattgtataaaaccgaccaaaatgatttcctaaagttcatgc

SEQ ID NO: 283423 - DNA, 1000 bp, Homo Sapiens
tcaggcttgaacattggttctgatttgtatatcaacatatcagaagaattagtcaactaaagtttgaaaacctatgtagcagagatctggttcagaaactgcttctatactatacatttaaaaattaatcagcaattgatggtattatttttatattaagaaatgataggaacattgacactaatgtggaggaatttgccaaatattttatttcaaaatttagcctctgatatcataaccacaagatattttaaatcaacagtttctaagcatactaccacagtttttatgacctctccatcatcttgtggtttctagagattgacagatactatgtttgttttatagatatggtaattaatgaaacaactttaaattgtcttccattctttcttcctcagttcatttctttttgtcttcccactgatagtctttggcagctcttgaataaattctacctgttggcatcaaggggaagaaaattagcctggaaatttttatctttacataaagccaattatatagcagtttgattatgaattctaggtggaagaattagaatagtctttggaatgggttttgggtaacagccaaaatagggaaaagggtattgttaggaaagttgtcttgatattaagtatttactgtgagtccagtaagccaaaggaccaaacaaaataggttcagggtttcattttaatctcaaagattctgattcttacccatatgtcatcagttcagtttgggacatgtggtgcagcatgtgtgaagaaaatattcattaaaatgtaaaaataaacacttgaaattgtccacaacactgagcaaatattcgttataattaggatgcctacctttctgggatatttgtaaggtgctgtagtttttttaacatgctcctgaatctcctttattagttgttcttgatcatgtgacttgtaatcaggatttagaacgacaaaagcctttactacctaaaataaatatttgaaacaccagg

SEQ ID NO: 283424 - DNA, 1000 bp, Homo Sapiens
ctcgcttccttccagggaaagatctgaccgaaaaagaaatgatccaaaaattagacaagctggaactacaactggccaagaaggaggagaagctgctggagaaggatttcatctatgagcaggtctccaggctcacagacaggctctgcagcaaaactcagggctgcaagcaggacacactgctcttagccaagaagatgaatggctatcaaagaaggatcaaaaatgcaactgagaaaatgatggctcttgttgctgagctgtccatgaaacaagccctaaccattgaactccaaaaggaagtcagggagaaagaagacttcatcttcacttgcaattccaggatagaaaaaggtctgccactcaataaggaaattgagaaagaatggttgaaagtccttcgagatgaagaaatgcacgccttggccatcgctgaaaagtctcaggagttcttggaagcagataatcgccagctgcccaatggtgtttacacaactgcagagcagcgtccgaatgcctacatcccagaagcagatgccactcttcctttgccaaaaccttatggtgctttggctccttttaaacccagtgaacctggagccaatatgaggcacataaggaaacctgttataaagccagttgaaatctgaatatgtgaacaaatccaggcctctcaaggaaaagacttcaaccaggcttccttgtacccacaggtgaaaaatgtgagcataatacttctaatattattgataagtaaggtaaccacaattagtcagcaacagagtacaacagggtttctatttacccaccaactactatacctttcatgacgttgaatgggacatagaactgtcctacatttatgtcaaagtatatatttgaatcgcttatattttctttttcactctttatattgagtacattccagaaatttgtagtaggcaaggtgctataaaaatgcactaaaaataaatctgttctcaatgaagtacggaaatgg

SEQ ID NO: 283425 - DNA, 1000 bp, Homo Sapiens
tcctcctgtgcaccctcttcatcaggtatggccaggtctggattctggggaaggatcgtgattgagggccctgagccagagtgaggggagggtgtgggagccaggataccaaactggaacgtgctcttcacattcaatatatccaggtcttgcattgtgcgggaggggaaactgagtccctcagagggcatggcatgagtgggcaacagaggcaggcgtgaccttgcctcctggctcacagccctttcctgcatactgggccagttcagttgggtgcagacggctgtggggtcagggaaggagcatggactggggtcagtgggtccagggtctgtttctcccctgctgtgcggcttggggtaagtggcttaacctttctgagctcctgtttcctcctcagtaagaggatgacaacctccactgtagtggatgtggctgtgaccccacactctcccccgagagaaggcagctcatgctgaagttcacatagaggttcttttcaaaggggcatcttagtaggtgcttatccatgtggactcaaatgcctgcatttgagcctggcattgccacttactagctatgtgatcctgggcaagtcacttagcctctttgggcctccatttccttgtctgtaaaatagagataaaaatagtaccttcctcattggattgttgaagggctatagatgaatcagtatgtgtaaaacacttagaaaggggccaggcatggtggctcacacctgtagcccccagcactttgggaggccgaggtgggaggatctcttgggcccaggagattgagaccagcctgggcaacatagtaagacgctgtctctttttaaaaattaacaaaacaaaacaaaaacacttagaaaggaacttggcaagtagtaagttatttgtaatccaaacactttgccagactgaagcaggaggattgcttgggcccaggagttcagggccagcctgggcaacatggtgtccccaaaaaaaaaaaaaaa

SEQ ID NO: 283426 - DNA, 1000 bp, Homo Sapiens
tccccatggaccctggatgtcccccactgagcactgtattgtaatcatctgtttacttagatggtgaggcagggaagttagatttaaatgccctgacccatggtctattctatctgttgttgtcacagtctaatccctcattgagtgctgttgtccccctacatcattctcaccaaattgtgacccagcctctatcttcataccttagacaataaagaacctactacctttcaagactgtcatcttattgctgaataattgaaagtgtatcctaatagtaattcccaatctttcttcctttcttggccctggtctgcctttgggggccaccactttcagaatgacaggtaggtgcaagcagctcacatcccaggctgatgtctcctaactactcagtctcttttggattcatatcttcttggccaatgagatgtgcaccttcatagaatatagacctcttcctttctgaatgagaaatgtgtgatgagaaaggcaaatccatgagggaagaataaatctcttccaagcctagcctaggaggttgggtctgggtctaggaccctgccccaactctgcaggaattagggtattaactatgtattaatatctggaatcagaaggcctctgctcctgtctaggttttatgaaagctcccagaaactaagtggaggcaaactctgcatatacctttaagaagtccaggctgggtgtggtggctcacgcctgtaatcccagcaccttgggagactgaggtgggtggatcacggggtcaagagagcgagaccatcctggccaacacagtgaaaccccatctccactaaaaatacaaaaaattagccgagcgtagtggtgggcgcctgcagtcccaggtactcgggaggctgaagtaagagaatggcgtaaacccgggaggtggagcttgcagtgagccgagatcacgccactgcaccccagcctgggtgactgagcaagactccatctcaaaaaaaaaaaaaaaaaa

SEQ ID NO: 283427 - DNA, 1000 bp, Homo Sapiens
tcaactagcatgatgctaggtgtcactcactgttttttaattgtgggagattgatgcgtcagtgcatgaagtggggggtggtcaccagcatctaactcaaagtgtgattatagctatcttaccacattttttttttctttctcactctgtcacccaggctggagtgcagtggtgtaatctcagctcactgcagcctcgacctcctgggctcaagcgatcctcctacctcagcctcccaaatagctgggaccacaggcgcatgccaccccactaagctaatttttctattttttgcagagacagggttttgccgtgttgcctaggttgttctcaaactcctgagctcaagcctgcctcagcctcccaaagtgctgggattacatgtgtgagccaccatgcctggccgtcactaatcttcaaggttaatatttggaggacccatccagagtccaaaggtggtcttcgagggatagcacgaggtggtctgacaggactaacacttaccagcctctatgcactatataataactgggagcacatgaaaggctccttgctccaacagtcactctgaagattttgccaactcatgaatggaggacacttcagtagtcatctagatccttttataagacagtttggagttattctctctcttctacctacaattagtttgaaaaattggagattttgatttgctgtgatgaaaatcctggatggctgaccaagactggcacttgttccagccattagtgagttgaagccaaagccctttggtgactcactgagtaccatggttctgttctcctctggagatcttgcacgtatctgttttcctcccccatgaactagaaaaccacttactcccagaattcaggtcgtgcttgttagtactatatcaccaagtccattcatttaatgatccaaaactgtaatgttgcactgtattccaaataaagggtaaaaacagaaccaaaggtataactccaaaaaaaaaaaaaaa

SEQ ID NO: 283428 - DNA, 1000 bp, Homo Sapiens
ccatgcaagataatgccaaattggtgatacactgatacacatttccaccagcaaagtgcaatagttctctttgcgctgcaggtttatcaactctgacaatcttcagacttcttgatttttcctaatctatgggtataaaaatagtatttcatcatggttttaatttgcatttcctaataatgaggttgaacaatttttttatgtttatcttccattctcatttctgtgaaatgccttttttttgttatttgtccccctgcccccaattttgttttattaggggttcttatgtattgtggatacagatgccttttgtacatatatgttgcaaaaatcttctctctgttaatgacttggttcttttatggtatattagtgaaaagaactgaatttaaatggtagttaaatttatcagtctcttatatgattagcactttttgtgtcatggttaagaaattactttctgtcccaaggtctcgaggatatctttatttttttttcaaaggcttgcccttagtgttccaaatttatttggaattgattctttgaaaagggtaaggtagtagtccaatttcatttttctccatatggataactatttgttttagtaactttattgaatagtccagtggctagagtgccatctgtcatttcatgattctttttttgcctagttctgtgttgggctcttccattctattcatcaagttgtctatctctgcacaaatagtacatgatatagttttaattactataattctaatgagtcttgatatctagtaggacaagtatctgtattttcattaggagctgcctgacgcattcatataaaatgagaatcagcttatcaaattccttggaaaagtattcttgtggttttaattagaattttattgaatttgagaaattagaagtagaattcttaaaaatgttgaattttctttttcataaacatactgtatcaccctcatttatttaggaaaaaaaaaaaaaaaaaaaa

SEQ ID NO: 283429 - DNA, 1000 bp, Homo Sapiens
gggaggcggaggtgggagggtcacttgggcccagaatttcaaggctgcagtgagctatgattaagccactgcactccagcctgggcaacagagtgagacctccaactttaaaaacaaacaaaaaaaatattaaaaaactaaataactgaaatgctagtagtgtttatctctgggtggtaggattgtttatttttatacttttctataattgatttttcgcaattaatatttactacatttgtattttttaatgcactttacaaatatttttagcacagacacaacaaatgaaagcaaagtgccaaagagctgggaaagtcaagagactgataatatatatgtagtatatttgatgctaatgtaaatttcacaactgcttgttactacgattatcttggaatcttctgcttaggaatttagatcttgctctttggaatagtgaaagaaatgggatttacccagcaatactacttttaaaacaatttttctcctgtagatctttgccgccgttcattatcagaagacactgtaagtattccatcattgttaaacctaaattttacacttctgactatgatagattactgaggcttcattgtactatttattgactttttttagaagatggcaattcattaagtaggaatcacactagaaaccaccctctagtatcagttatttgatgaagtctactagagtgagaaatcacaatacaaaaaattttgacataaccttaagcacttgattatacatttatataatgtaaatttattcccccattttaggatgtaggactaaggtctttgaggactggtctgctcctaggagttccatgtatatttcttatgtagtgacataattcaacattcccaatttacacttttggttttttctttttaagtgtaacaatatcttaaatacagttggtaagcacttccattatagagtccttatgttttttttttgttgtttgttttttaccaatctcttaccatttttc

SEQ ID NO: 283430 - DNA, 1000 bp, Homo Sapiens
agccaagttgcaacatatgctttgtcacttgtgacattcatatacaaaaatatgacattttgtttctaaatgtggcattcaggaacaaaaataaagacctgtcttaatagggtttcggctcccatggagaatttttttaaactattcggttgtcacaggcatcctgtgctcagactcatttcagaacatttcagggccagctgacagataagttttcacagatgtaaggcctattagtaaccttagtgataaacagattcggttttctatatagtaaagagcccaaaatacatcttttaaaaaatccatttcaaccgagccttaggatgagcatagaagctcagctgtttgctagctgcgtgatctgggggaatttacttcacttctctgaacctcagtttctgtacctatcaaatggagaatggaggcaatcataatgtcaccagggccagaactaggatgaggccactggggtgcctgcttgcctcacaggagttttgagaggagtcaataggatatgtataaaaatactttgcacagtgatgctgcacagtaaatggtcagaaacgatagctgttggtattaccccatctttcagaagtaatcaccactgtatcaggaagcaacaatctcccagccaatcaggacatccaccaaagagtgctgagactggggtgctgtagaaagagctgaagttcacctaagacctcggcaagcctcaggccagaaatgcagggctgtgcccatttcggggcctgggtaggctgctgacagcttctctgcttctctgctacgctgctacactgactgcttcagccacatccctgatttcatctgattttcccctccaacaactttcaaaccaccatttataatttaaaaaagaagccaaacaaagcactgaaggagccgcccccaaatgtcaccattcctcagtgagttcttagcagtgttaagctcatagtgtgtcctagtggaaggggcctgagaagtgggattc

SEQ ID NO: 283431 - DNA, 1000 bp, Homo Sapiens
gggttttgtttatcttttttaaagtagaaaaaagtgaggctcaaactctctctttctccttgtcataactattggtttacagtctttatttgtttaaaagtaaagcacattgtatgtatttatttggcaatacatgaggccattaaaaccctgagcctaaggtaccacagttagtctcatttgcctcttgtcctgtgaactccacttagaatgtcattgaacttgggcagacataattctagtgtctgttccaaacgcactgtgtcacagaagctagaattaccattagaggcacaaacccctgagaatacacaagggggcacgcttccagtagatgtgttggggaaggaggagggcagaggggacaggggacaggattcagctttgtggtgggtcctgagggttcctaccaggggtagccaggatctgggaaacagatcagcgactctagtctgaagtggctgcctggttcgggggctgccttcagcaagattcaggcaggagagacggaaatagccaccttccaggcgtgagtcctggagataaaaatggattttaacctaggactgccgggagctggccctccgcggctgctcagactagggctgtgtgtgctggctctcgcctgtttccggtgtctaactggcttgtttctctttatggcttggcttcattccgacctggggtggggccacatccaacccactgcccactggctgtccgtctggcctgccccgcggttccaaccacagtggtgaagcagcgcttgcagatgtacaactcgcagcaccggtcagcaatcagctgcatccggacggtgtggaggaccgaggggttgggggccttctaccggagctacaccacgcagctgaccatgaacatccccttccagtccatccacttcatcacgtatgagttcctgcaggagcaggtcaacccccaccggacctacaacccgcagtcccacatcatctcaggcgggctggccggggccctcgcc

SEQ ID NO: 283432 - DNA, 1000 bp, Homo Sapiens
tactgatttctttggggcattgtccccataaactatttgtaaagtatcaatgatttcaccattcttccacatcacaactttcaccatcaatttgatgtttgtccttgctacaattttagcagaattgattttgccttgatagggactctttgcaaactgatgtcctatccttcttagtgcctcaaactagatcctgttcagacatgttataacaagttagtatgagtttattttggtgcaagaaaatttatgttctcacaaaactatatttttttcaataatgaaaaacaaatctctccttaatttgagaagcatctggttttcctgaacttattttttcttaattcaagttgaactaaagtatcagttacacttaagtctaatagaatggaattaaaagtcacaatgtagaaacaatgtagggtttgggacaatgccttgtcccaattagggaacccgcaaagattttgacaaaatgaagaataaatgcttactggacatttcaagctctaactagcatgtttaaaacagatttcatcatctttaccaaccagtggcttttcttgacttgccaaatcagtgaatggtactgctcgttccctctttcttaaatcttgagtatgtttcattttctttcttcttcacctctataatcagagatcaaatgctgtcaagttttcctccccccaccaaaacaattccttgctcacctattcctttctctctccagttcctactctagtttcatctcatgctgataccacttcaacagtatcttgtctccctacttccaattcctgtgtcatttcttcagttacaatgggcattgtttctaaataattttccaacactgtattttgtttatgacatgcctttctgtgcctattcaaaaactctcagcaaaagtaactaaaattaaaagggaaatctgtatggaaaaatatgtgcagcaagttaccactataataaactcaatcaattaagaaaaaaaaaaaaaaaa

SEQ ID NO: 283433 - DNA, 1000 bp, Homo Sapiens
atttatcgtccctcatatcctaatacagctttatgatactgaatcaggatcctgtaagcattcctcctttgccagctagttgaaagttaagcttcatcaatagaggacactcgagtgatggtgaggtgcttgatgcaggaaggtgcatcccttccaagactcacactttagttattcagtaatgtttatcattaatattggagtttaagaatatgaatgttaaagaatatatttaagaatactaaagaatatactttgagaaggcaagaggaaaacttctaatagcacatttgttttaccttttattaaatattgcattctgcatagaaattaattcagaaaactcctacataaaccatttatatgagtcttttgtaatcactgaaagaaatagactgttgacagtcaccttttaaaagggtgtataccattcaactcttaggtataccatttattattttgtttcctgcaaactcaaagcatctaggagtgagattacaaaaataacaacaacaacaaaaaagcagtgttggctaatttgtcagcatatggaagttaaatttcttacagacacacaacttctgtgtaaatgtaaatcacttggccattctagctctattatcaaatttatagtttcccagagacaaacattgctttggcttttgtctggttttggatagttggttgtcttttctcttcatgcttccttatctcctttatttcatttatttttaattaaaaaacaaagagacaggaattacctatatttcattgttgaaggttaaattttgtttgtatttgtaccttagttccacacttttttctttctggaaacgtatatgataaacatatgcttgaaaacaaaggattacatggatattctgaactcccaaaaagagaatctcatgactaagccaatttcacatttctaattagcatacttgctttcattgagtgttttgaaatttaactaaacataaaattaaaaaaaaaaaaaaag

SEQ ID NO: 283434 - DNA, 1000 bp, Homo Sapiens
ctaatcaatgtatgcatcatagaggggtattatcttcctcaatcaccactaggagattaggagaaaaaaagaatagtgactgaacagacgtgtaagaatgatacacaaaacctcatagtaaaagtggaaaagaagaaacattttgtaaacctgaaatgtcttggaatataattttccatgtggaatctggctcaaatggcatgtcagatgccaactggagcagccacaggcatgtgagctacagcactgtctaaaggatgccactagtctcaatatatttccagtaacagtgagttggtggaaagagctgttctggcctagtaactgaaggcaactaccaggcagttaaatgacagggcttcatgactgagactgctattgaaaaagaagaaggtttgtgtgtctgatgggtgaactcatgcaataatactaatatgggggcgggcatgggccgggggagttgaaaatgagaaaaagcattatatgaagatatcaagcaatcaatgtgaataagatagactcagagtagcaaaatgaaaagtaacaaggaatacaagaacagaagtctaggtgagacttcagtacatgatttaagacagaaatcttacacttttaatcaaaatgttgcaatattaagagttggaagaaaaaatgtaccttgttttgtgctgctaaaagaaatatctcagttttcataactggctctacagacttccatcactttctaaattggtaatgcacaaacaaaaatggcaaggaatttattcacttatttatttatttatttagagacaaggtctcctgctgttgcccaggctggagtgcagcagctgcaatcagggctcactacagcctcaacccctctgctcaagcgatcctctcacctcagtctcctcagtagctgggaccacgggcatacatcaccatacccagctaatttttcattttttgtagagacaaggtctcattatgttgcctgggctagtcttgaaaacagatg

SEQ ID NO: 283435 - DNA, 1000 bp, Homo Sapiens
tattatatcacaaaaatattataaaaatcctcaggttcctttctatcttccacacctaattttcaaaaccgatcaatttttttaagccacttaacctgtgtgtaattactactgtggtctcctagcacagacaacagctgctgactgctgtggtattggcacggatcatgtagtctatagagaatttgataaaaagactccaaacaatttcatgccctgtgctgttacagaggagaacaaaatgctttcagcaaggatttgaaaactcttccgtccctgcaggaaaggattgatgctgatagaagagcctggacagatgtaatgagaactaaagaaaacagatggctggagatgacatttatccagggtcactttgtcaggccctaggacttaaatcgaagttgaactttttttttttaaccaaatagataggggaagggaggagggagagggaggacagggagagaaaataccatgcataaattgtttactgaatttttatatctgagtgttcaaaatatttccaagcctgagtattgtctattggtatagatttttagaaatcaataattgattatttatttgcacttattacaatgcctgaaaaagtgcaccacatggatgttaagtagaaattcaagaaagtaagatgtcttcagcaactcagtaaaaccttacgccaccttttggtttgtaaaaggttttttatacatttcaaacaggttgcacaaaagttaaaataatggggtcttttataaatccaaagtactgtgaaaacattttacatattttttaaatcttctgactaatgctaaaacgtaatctaattaaatttcatacagttactgcagtaagcattaggaagtgaatatgatatacaaaatagtttataaagactctatagttcctataatttattttactggcaaatgtcatgcaacaataataaattattgtaaactttgaaaaaaaaaaaaaaaaaaaaaaaaaaaaaaaaaaa

SEQ ID NO: 283436 - DNA, 1000 bp, Homo Sapiens
agagctggtgctccacacgggctggaaatgctgtctgggtgctaatcgtgagatacacagactagatgtcagggaagtgagctgtatcacaacatgtattgggtgtgccatgaattcctcttgtttcccagtcttctcttcacccttcctggccttatttccattccatgtcacctgccaaagtgttcttgctgaggtttacttccttgagatcacagacagcctctttatgaggttttctaacgctctgaaagtcttacctggccttggtttgggttagttgccatctcctgacattctcaagccattcctctagaatctttcggagtgtcttcctggtcgcttctgatgctcattggccataagggcttgtgtaagtgtttgtggctgcatgttccctttctccacatttccccatgtgctgcatcagattcccccaaatacagcaccttctcctgctattcattttgcctgatgccatcattttaaggcctttttccattttagctgtcctccaagtattccgatgattctgtggctttccaatccagtaaatatatcctagatcagagatgagaccaaaagtaaaagaatcaacagccaaaccgacacaggtgttattaaaggacttactgtttaaacatgcctaaaccctgtgccttgagtgtgcaagctgacttattagaaaaggacagggctggctgacctgtccctatcagtcccaagtcatgcaccctgtgccccgggaagtgggcggtgaccctatgctggtggtgtggcatcacaggcccggggcagggagtgctgtgtaaacctgggatgtagagccgcattcccccactccctgtgcatgctgggcttggccccacattatgccaagggaagcgggacctcttttgtcattggccatcctagccacccctccctgccttgtgcctgcatgaggttgggagacttgatgaataaagaatccctgaaggactctgttccttcttcaaaa

SEQ ID NO: 283437 - DNA, 1000 bp, Homo Sapiens
catcagatgccagagtcctcagggaatgagagaaagtgatggcaatcatgctgatgatgatgaagataaagatgagagcagacatcagagagtatcaactgttctgtgcgtgtaccaggcatgtgaagtgcagcgagggcttaaccctcctcacaaccaccctgggagatcggtaccatctcttcttctttttacagatagggaaatagcacagaaaggttaagaaacttgcccaaggtcacacctaactgggaaatgggacccggtccagggatttggactcaagggtccatgctcccaacccttagcaagaggagctggatttccatcaggagggggaagtgaaagaaacattcggtaaagaggggaagatgtaagggagcttgttaacaaggaacttccacaaggcccactggaaaaatgagagaagtgggaaagaagcaatggaaagctgggtcaggaaagagaaagcaggaagaaaatcaggatccccatttgacaagtaaggacatgaagaagctaagtgtcctgcccaaccagtaagtcaaagactggaatttgaaccccaagatagttctctaagggtgggaaatccatctcagtaggaacttgagggaaggttgagggaactttagggaaggtttccagttcaacaaaaaaaaaagcggctgggcatggtggttcatgcctgtaatcccagcactttggaaggccaaggtgggaggatcgcttgagcccaggagttcaagaccagtctgggcaacaaattgaggcccccatctctacaaaaaaatacaaaaaaattagccaggcatggtggcatgtgcctgtagtcccagctactcaggagtctgagctgggaggatcactcaagccctgggaggtcaaggctgcagtgagctgcaatcacaccactactctccaacctgggtgacagaccgagaccctgtctcaaaaaaacaaaaaaaagagagagagagggagaaaaaaaaaaaaaaaa

SEQ ID NO: 283438 - DNA, 1000 bp, Homo Sapiens
aagactctatatctgtaagatattgtgcagagtaaaagcaggcctgacaatactaaccttagaaagccagcatgcttgtaaggctggctcctgggcactttgatttctcgagggttcccattaccccctgataaggaatggttcactatgcctgaattagttatgaaacaatatggtctacactgaacatctgccttcctcccaggagtctggaattttggtacatactaggtaggcggtgcctatgtgaccagttccaaataagaacgcagggcagagtttctaaggagcttgcctaattcccatgtgttgttacagttcactgctaggggaattaagcacatcctgtgcaactctgaggactttgtaagcttgtgcttgttttccactggacttggcctcatacaccttttccatttgctgactttgctttatatccttttgctgaaataagccagggccataagcataattatatgcagagtcctatgagtcctcctagaaaaatcatttaaactgggagtggtcctgaggactccaacacaaagatatagaagataaaaactcagtttggttattcctcttatgtgtttaaataacctgtaaggtattaacacaaatcgttacctcttccttctttatatctttttcttggtgtggaaaaaattctaccttcaggcttcctgatgatggctgctctggaggaggtaggtaactctttgtattcacagcatcaaaaagtttttccacaaatatctgtgtctctttctgaagaaatacatccagctgatcaatacataatgcctttaactctttttcacttttgtctttctttaccaaagccagaacatattttgctagggcggatggatctgcatcacagatgggctcgagagtcttgctgagccaggacttgagtgcctcgaagttttcaatgatcattttagaaaccatccacagcggccctaaggcccgtcacactcctccgcccgcccaggtc

SEQ ID NO: 283439 - DNA, 1000 bp, Homo Sapiens
ccattcgacaaccaaatgttatggggaagccagtctcatgagctccaacacattcttcagtgcaatcagtggcaatccctgcccacttaggacttttcgaatagtgctcatccctgacttctggataaacttctttgcagaagcccatttgactccaaggacagaaaaaaagagtgcaggttgttattatgcaaagccacagcattaaggagctcaatattcttctagatatctgccctcctgtctgagaatcccatacttagagtatagcaggtcccatctccatttgggatggtggtggtggaaaagggggcgtctctgatgagcagagcatctttaatgcctgctcaggccagagcccctttccaaagacttcgagactgccgtgggcctgctgactcctctcacgctttcaagctacagtgcttcccatcacattgcagaaggccgccttgggtcatatctcgcaaaggaagagctattaacaaatattccatttgtatttcctgcgtggccctccacctggaaatatcttttatctggcaacttttgcaaaatgaaccaaatcttgaaggaggtcttggcaggtttatgctagcctctctatcactccaacaagtcatttccatcctcgccttcacaagggtcaagcaattgtgacttgggttgggagacggggctggcacggaatggtagcaagtcatctaggctctgaggcatctttttaaccctgaaaacgtccacttggagggcaagagccaaatctaaaaaattattatacacactgtctctcagctcaaatatgtatgctctcactccaagttcagatcacaatttacaattccgcattttgtaattgttaagtgcagtctggcttccccaaagacctcaagctcattctgcccaggattaaatccaagagccttcttagcccagtttctggcatgcaggaagcatacaataatggaagggaaagaaagaagacaaaaaaaaaaaaaaa

SEQ ID NO: 283440 - DNA, 1000 bp, Homo Sapiens
gagttctaaaatttgactctggctggtcattttatcacttctctctcttagagtagactatagatctatatctgaacatttagcttctaattgatttgtattgataataggtgaaaaagaagttaattagcctggaaatgactacaccataagatcagactttggttaaaaatttaaccacattaattttgataatcttttacattcatttaatattagctttgttttatgttaaatttgcaaactttcacatttttatcaatgttcttgagagggaggcaaagaaattctcaatttatgatgcaaaatggaacttcaggtcaattatttgacctctgtgatttagatcacacatcttataagtgggggagcaactgctcagtctgattcctggtatttttttctgttataaagcacactcttaaaaagaaagaattcaaagttgcttccaaaagtacaatataagaaaaataattttaggaaaggtcaaaaatgattagaagaaggaagtgagaattctgttaatttagtctggctttgagctttctgtttgttagccaagacataaagggaaaactttggctcatagaatacttatctgattaaagaaagcacatgaatttgcatggagtacagactttttttggcattgaattctgtgaagaatatattatatgatcttactaggggatatctgtaacaatgaattataccttcactgctaattttgtaaaagatataaaagtaaacttcaaatgagcatttttcttactcttcttaaccattatcacatgaactcattgccaaggttttaggtatgatgatatcagatgaaaaggtacaagatatatgcttaagtgaagcatttacactaggttttagtgttgatgcaatgtatcttttttcattattttacttttaacctattagtctttatgtttaaagtgattttcttattataagtatgtagttgggtcttacttaaaaaaaaaaaaaaaaa

SEQ ID NO: 283441 - DNA, 975 bp, Homo Sapiens
gagggcgggagaggcagatgagtaaatggatccttacactaagtgtgatgagcagaaacccaggcgctctggggcatgagcagggatacctaacccagccctgggggctcaatctctccccacccctgcaggagaggcttggggtgagttttgggaataaggaccatccagccacatgacgaaggggaaggaaaatccccatcaaggcaaaaacacagtccaaggctctgaggcccaaattccggggagaggggtgaaggttgtttgtcgcacctgggttaaagggtgggggtggagagtaggagaagaggctacacaggtgagaaggtgtcagatcacaaagggccttgtatgccaaactaagaagactgaacttgaccatgaagttaggcagaccctctggagagttttaaagcaaggagtcgtgtggatgaacaaacctgtgatgggctggggttaccaaggagggcttcctggaggaggtcagacttgagctgagggaaggataggatttggagagctgacattctgatgagcggcttcggttaaagctcacaaaaacccttccctcccccatgccctttgaaatcatttgaatcaaagattgcgtgtgttaaagacgtgtttgtctgttatctgaaagctgtggtttctctttaacagattcagggcctcatcctttgactcggaaccaggaaggaattaggagcgagtcctcctgcccagagagctaattactgaaattcagtggcctcaccagggcgagtggcgtcaccggcctgcatcccccaacagctcctaatttctaactggtcaaagttagacatttcagtacatttttatgggctgcccaaagccagctggaagctttttttccataaactctccctgagacaagtagccaggtttcacatattaaaatgaaaacgtcaaaagcgttaacaggaaaaaaaaaaaaaaaaaaaaaaaaaaaaa

SEQ ID NO: 283442 - DNA, 1000 bp, Homo Sapiens
cacaaataaaattttaaaataagccacagactgggagaaaatatttgcaatgcatatagctagcaaagaattagtatctagagtatataatgaacacaaaaagctataagaaaaatgattcaatagaacaacaaaggacacaaacaggcaaatcatcaatggtcaataaacatacaaaaagatgctgaataacactagaaaacagatgtaatacaaaaatgacacttaatacccatcaagctggcaaaagttaatgtgtgactgtgaggtgaggatgtggggaaatggggaactcacacacactgctgggggagtgaaaattggtccaaccactgtggaaaacaatttggcaagatccagttaaacttgaaaatgcatataacatacaactcagtaattccactaagtatacatgccaaacaaactctgtacatttgcaaaaatagatattaggatattaatttcagcactgataataatgaaaaattggaaacaacctaaatatccaactgcaggagaatggataagtagttgtggtatatgccacagttataatgaatgaactaaatgaacacatatctgtaggaataaacctgaaaagcagacttctgaatgaaaaaaattacagaaggatacaggtaatatttatgtaaattataaacacataataagcactactatgtatcatttatggatacaaatgaaatgaacatctaaaaccaagaaagggaagatgcacatcagcttcaggatatttagatatgtctgggaaagaagagtggggaacggtatacacgaggatgtttcaactgtttctgaaatatttttgaataaaaacctgaaaaacaagcaaaattttcgtatctgtttaatctgtgggtgatatttacatgggtgtttatattctctgaatgcttgaaatattttatcattaaaacaaaaatgtataatctcaaaatattaaaacaattataactaaaaacacaagagggtctcattc

SEQ ID NO: 283443 - DNA, 1000 bp, Homo Sapiens
aaccaacctgagagtcagaaaactgaattttgggcccaactgtcttacagtgaaagcctgtgcaaattatctgcttcctcatctgtaaaatgagaggtttgtactagattgcttccaagatccggttcagctctgtaattcttagtttatggaactgaagcagagataagcaacttgcccaaggtcacacagctagttaatagcaaagtaaagactatcctcagatcccaactacaatcactttctcccctataccatactgcttctactacttcataacaatattcctgtaatttattttaagattcttgaaaattattaacaagcatgaaggagtttatgaaactacatgactgatttctacagctcttctataggaaatgagctttaaatccaaatgcaacaagtacatgaggtctcaagctgggtattattacttactacacttattaatattaaattgaccccaagaaagttatgagaatttatgcttaaattcccaccacctaaaaatccaactcacagaagagattatgtgccatgcaaaattaaaatatgaattgttataagtaatgatacatattataggtataattctaggaataagatgagaatttaaattcttcattttatgttctagttatacttaatatgcattttaaattcaaaagagatcaatttaaacacttttctttcttcttccctcttttcagactctctagctttaaaaacattagaataacttaagcatattacttctgaaatcacgtaaacaattacaaataaaagactatataaactatgctcataatttctcttacaaaattgaaaatcagcccccatagtattctaaaattctgtgctgaaatatattacaactctactaaactgtatcataaacagcatttggttctctaaaatgtcttaagcttattatatttcacagggaatttagcaggatttcatgaagactgatcttgctgacacaggaaaaaaaaaa

SEQ ID NO: 283444 - DNA, 1000 bp, Homo Sapiens
ttattatgttcaatttgtatccttattacctggcacacagtatgtactcacatttgagacagaaaaatgactaaagttagaatcagaattactaaataaatacttgttgattcgactcatctactaactctaagagcattttttcctttagaattctaaatattacttactgaccattatctcacctagtacattattgctctttatgttgcttataaaaccaccaaaaagggaagacagttttcaggaagatacacatgtaacttagaaaacaaatccttaagcgccttagcaagttaaaaaaaaaaaaaagttaaatatttgtgtaagatacagtcttaccccaggatgttttagtgcgctctaattctctgaaattcttagatggtatccataattctgaatattcaattatccagcatatagttgcttatctacccaggatagaaaggaattttgctatattcaaaatatcactttctgcctaaatatattcaaattttgcataaactgaagttctataaagaatcaaatatcaaaatacaattaagctagattattggcagctgcagtaacagaataagatctctgagtaacacaacgcatggcatatcagagccagtaactttgtctctataaataacaggaagttccatgacaatgctttacacagtgctatgtagaaaaactgaactgagatacagagatgtttggtaggtcatagagatggctatactctagaacgtgaacacagggatagacacaaagtacacgtaacaaatgactaactcattatgttttttctttcaaatgcagtacaactatggaatatccaaaatagaattaactatatgataaaataaacctacagaccaagttaaaaattacaaccaaatcaatgctggattttcacttaaaactaaatttaaaaattcttaatacttacaggtcccataattgtggcttgccaatgaaacactagaaaaaaaaaaaaaaaaaa

SEQ ID NO: 283445 - DNA, 1000 bp, Homo Sapiens
ttaagtggctgtatagatttccactttcacaacagaattagcagattcccaaaacttgaatatttaattttaaaaaaaattcttaataactgatattaaatttatatacgcaaatctgacacattacttccttaggataaattcctgtacgcacagtctttccattttaagcctattatactatgaaggagtctgaatcaacatctaagagctccgagagttcaacaccagcctgggccatattgtgagaacacgtctctacagacgatcaaaaaattagcttggtgtggtggcgcgcgcctgtgatctcagctacccaggaggctgaggtgggaggatcacttaagcccgggaggtcgaggctgctgtgagccgtgagccactgatcataccactgcactccagtctgggcaacagagcgatcctgtttcagagaaaaaaaagatccaagacctctgtagaccacactgacagcactgctactatttgcaactggtcacgacctatctgggctttaaccttctcttctataaaattagggatttgaactacgtgatgctcctaaaatacgacaccaccgttgcactcctcagtaaaaaccattaactgacttgtaatattagcgtttacaaactctaaaagcattagtaaaaaaattagtatgtttaaagactaaaacaaatgcacagatcaagggtagttaaatccttccaagttagttcaaaatgtgatataaaagctgtacacggctgaaaaatatataaagatgataaagcgaaacttctgtggaagttccagtgttctctcttattccacttcggtagaggatttctagtttcttgtgggctaattaaataaatcattaatactcttctaaaaaaaaaaaaaaaaaaaaaaaaaaaaaaaaaaaaaaaaaaaaaaaaaaaaaaaaaaaaaaaaaaaaaaaaaaaaaaaaaaaaaaaaaaaaaaaaaaaaaaaaaaaaaaaaaaaaaaaaaaaaa

SEQ ID NO: 283446 - DNA, 1000 bp, Homo Sapiens
tattttattattaatccaagtaaatattctctattgaacatagattagcagtttacaaattagataaaaacagaaaacaaatcacttcaacagtattaactagaaatatgctagctactccttatttcagaataaggtgtcacaattcttccttttaaaatgttgtattgtatcatacttaaaaatatataaataattcctgaataaaagcatccaatatttatcattttattagtattagcctttgggaaaaaatttgatagcatgattttataaagctcttgcatttgctttaaatttagctaactattttgaccacaaggtggagctgtgatgtcacaatttggcaagatttgtaagatacaaaaactatgtaaatacagacgaaaataatttaataaaataggataatctcatcttgcaaatatgcactatttaaaattaatcaattctccaaacattaattatcagaagaaaactatcatttaatttgtccagttctcacttagcagttattgagctttatcatatataaattgtcttcagtagatgcagaattattctgtcatttcacatcacgatcccagatttagtgactttaaaccagtgttaaaatgtctttcaaaattattttgtaattaatcacagaataattcattaaccattacaaaatgtaatggttacattacatccttattttgttatccaatattgactagaggatcatccattatatcttctaaaataattctttcagttgattatttgtgttttgtattgttaaacaggcagaaacttctaattttcaaaagagagtattcagattttgagtcaaccaaatttcagtgaagatagactagcatgctaaactcatcgtctcttgaattattaaataaacaaacattaccaccacttcaataatatctgtcaggaatgaaaccacttttccaaatgaatgtttcctgatctattttaatatattaagaataaaacaaaaaaa

SEQ ID NO: 283447 - DNA, 1000 bp, Homo Sapiens
agcatactgtggggcttttagagctaatatgatctaaattcagaaaatttaattttcatagtaggccaggtgtgaattacttatgtttgctatagaatgcttatttagactaacaataaatttactttgctttctaaggccagtcagcgaatgtggggatgaggcaggatgttttaaatgagccagagatgatccacaaagtgaacagtcgacacagaggtctttgagttggatggttgcaaatatattgacattagagtgaaaactccttcctttgggtaaactaaagaaagataaagtatactaaaaaattttaagatggtgttatacaaaaaaaagtttgggtctaacgtgtccacaaagactgtcaagtgaagaatggtggagattcttggtgtttgagcagccaacctggatgagtgacttcagggacagagcagaggaaagcaaaatgaatttcctttatttacccaaaacttgttgactgaatttttgtataggtccgggaaaataagcctaaacaaatagttgtagccttagaaaaactgttttcccatttctttctgagttagaatcagcatagcctccctgtcgccttaaatgtaaaaatcctattttgattaataccccagcctaagagttatagcaatacgagagactgaatctatttttgtttcgggtctttacctcatagtatgaaattagtaagacactgcatagattttgccctgaatactggtgtgcccaggtatgccgtgctctctctctgtttccagtggtggtaattttaaggcctaaagaaagctggggttaatcctgaagctaaaagtaaatgtttcttgaattgattttgttctgtggtacaaataacatctatgaatatcatatctgtatatatctgaaccaagttgtgtgcagagaggttgatataactatatttacagaaaatgatttttacaattaaagttcacattttaacatgaaaaaaaaaaaaaaaaaa

SEQ ID NO: 283448 - DNA, 1000 bp, Homo Sapiens
agcaagcatacatttaagttgaaaacctatgtattttactttccataaatttctttgcacaatattctgaaaggatatactgttagtggctatgagttaacgacatttcagtatttttgctaccaccaaaaaatgcaaaccaagataaggaggctactgcccaatggctgatgtttgtgaatgaagctgtatgcagatgggcaaaaaagggggtatgtgtatcaacaattcctcaccaaaggaaccagatctctttagaaaaatggattccattgttagagcaggaaaaggacaagatgaatttagaacatcttgtaacagaatttaagaggtgctcataaaaagcctgggacatgtcaaaaggacacaggaggtggcctgaaaggggcttccactgaccaaatatgaaacattaacagaaaacttattgcatagaataagaatcctgacttcaaactgatacaggaaagggacaggtcttcctcaaagtataaagctaactaaaaaatacagaagaaaaaaaggggttaagaaattaccattttccatctatcagagcaactgatttaggcaagaaactatcactgatactaaaactaaaatggatcaaagtttgataagatgtttatacagcctcaaagtatctccccacaaataacttatttattataaaggggaaaatagtaatatttcagtggagaaacctggcagacatcaactcaccaagtgatcaaagttaacatcacacatacacacacaaaaataaaataaaataaaataagtaaaaacaaagttaacatcacctgattaaactggcattgtatgcttcatgatatgatgcataaaggaggatatatcacttatttaataatttatcacttatttaatattatgaacttaatcataaagaaacatcagaaaaacctaaattaagagaaattctacaaaataaatgttccatcctattaaaaaatgtcattgtcattaaaaaaaaaaaaaa

SEQ ID NO: 283449 - DNA, 1000 bp, Homo Sapiens
tgcaaatagttggaaaatcagcatcagaataatgtgcacaatctacagtgttccaagtgtaattttcagcgtggaattttagcatgaacttttaaaaccttcaggcattcaagaaaaaacctaatcagtagagtaagtcaaattctaagaagccacatctttattgctaatctggaggcttcccagacacttaattttctcttcttccttcctgctgctctcattagcacctccgaaagaaagaggaggtaacgctcaagtcaatcaaatcactaactcttagaagctatggcttttgcaggtaaaaagctagaatcatcgcaaaagtattaccaaagaatttcaacattccactgcaatcttggaagaatgttacaaaggaaagacgttagagaatcaagagttcttctatccaaataaaggagcaatgaaaatatagagaaacaatttaagattgttatgtccaacttgtgatagagcataggcagtgagggaagagccttaggcatctcaactgtgggctagaatggtgaggttctttgacggaggccaaccttttccaatgtacaaaggtccattggatggaagatgtattccgcatagtcagggtgctgttccaatggaacgggcttctggaatgcatctgtctataaaagagaagatatgcagaggaacgaacccatcattactatggaaaaccaagcattaatgctaacaaaaggcttgaaaaattgagacaatttttcagacaatatagttcccaagaattaaaaaaaaaaaaaaaaagaattccacttgatcaacttaattccttttctttatcttccctccctcacttcccttttctcccaccctcttttccaagctgtttcgctttgcaatatattactggtaatgagttgcaggataatgcagtcataacttgttttctcctaagtatttgagttcaaaactcctgtatctaaagaaatacggttggggtcattaataaagaaaattc

SEQ ID NO: 283450 - DNA, 1000 bp, Homo Sapiens
ccgggacctgctcctaggggctggcctgcacagccggatggcctgtgggcggggtggaagtgcccactcccactccagatgggcctgctggccactgacccacctgtgctgagggagagcgccagcctccagcttaggtacacggcgcccacccccagctccacgggaaacccataaccaccagaaacatctcaatcaagagacgggtgtgtggggtggcactaactgcacagagaccactccacgccggctgaggtagaaagaaggcaactgaacacacagcagctagggcaggggcagggaggggctgcaggtggtgtgaagaagagcccagctgtcatctaaggcaaactgcccccactgaggacaagcgtaaggccctacctcccccaacctgtgcgcatctcaatcacagcagacactgtgacggccacaggggacccagatggtgcctaccaccttgcctccaggctccactcaccagacctcaggctgagggtctggcagtggaggtaggggcagggacccttggtgctttcagaccccacggcaggtaaaatcaggactgcctgagaacccgtcaccctctgcctctcaggtcaccccccagctccaggaacctgcctcctgctgtccattgccaggtcttccttgcaccctgacacctgtgctgaggcgctctggcagctggaggaggctgattgcactccacaaacaggactgtctggaccaagggaaactggcaggagggaggtgggaaaggaagagggcaaacgtttggcttttataaagtcaaggacgtttatttcctgaggtcatgacacaggaagtggaatcctagccacggctgcggagctctcgtgatgaaggccagagtgctgactgacatgccgggtggaccaggagctggagtctgttatcttagcacgaatgctcatgaccttggtttagtgttaaacagtggagcaggtcctgagcgggcacggccaggcctggagga

SEQ ID NO: 283451 - DNA, 1000 bp, Homo Sapiens
cctaattaacacagaggttgtaaaagaagtggctgtttggttctgtttgggtttcccagccagtatattccaaagccttttttcactcaacagatgagttatgtgctttatattctgtaaggaaatgagaagtaatcagttgaaaatgtgttactaatggtacatgcttcacattgaaaccatcctcctgacacaaacataatactttgcccttcactgtcccccaaagtggcagtaggatttctctaagtaattttctttacttatatgagtgcaggatagggggtgttttgggccaaaaggtagctttttggacatgaaaacggaaatgcctgttcccatttagggctgcaggtcttcaggcttgagggtggggcctttgcccaggaactaccctcttctacccagtgtttccctgtctcctgtccatatcaccagtattcacagtctcaaggagtcttgagaaagtgtgcccaaggccgtcagattcagtttggttctgtatgtcacagggtctaagaagcgtaaacattgtgccttgttgaaatacagcctctaggtatggaggatgtgttgaacaacttcctaccagtcatttggcatatgttgatttcctgtcttcatgatacgtaagacgactagctaattatcattcatatgtggtaagtcacatagatactgacttcccctatctttccagctttttcttatcaaaagtcacctgctctctgtcccaggaacgactggctaaagtaacctatatcagtgtctgtaacagtgggcacctatcatagtgcacatgcttgaacatatcattgccttttatcatcacgagcctcacatccagatgtgacagactcaagtgctcacatcacctcactctgtcactgtatacattgttaccgtgtcacaaatatttaacagtctgctgtgtactcagtctttagctgtgtgccctgagggagacagagtaagatactgccttgacatcaaggagctc

SEQ ID NO: 283452 - DNA, 1000 bp, Homo Sapiens; identical to SEQ ID NO: 115053

SEQ ID NO: 283453 - DNA, 1000 bp, Homo Sapiens
accctccaggggatcgacttcaaaattcaccttgttgtaaaacgggctacctcagtgtcccagccaaaatttttattgtaacatgctgtcaggtgtgtcactctttccaagccagtaagcttttccggggatttcttcaagtagccagcattcagagcagtcttcagcattgcagattctgagaattggctctgagcctgtcaccctcgagaaacctaacagggctgcattgattccatgtggccctgggtctatggagcagtacatgagctcccagtgctcaaggctcttcagccctaggctttgaagggagtgatttctcagtatcttaactcttctgatgacacttgtacctgtgaggggtctagagagaaagagtagtagactcctacttttactacaattcagatgcaggggcatgagaggattccctctctccgtccaaggaagaagcttttggcgtgcacacatccctgacgaggaagtgcttgtctcagcagatacataggccgtttctgcccatgccggaagcaaaggcttggctttcatgatcaacggtctgggaaacatgcaaaatttccatgtctcgtcccaaactctgcccccgacagccaaggaccacctgcagcccgcattgccaaatgcggtgccgtttgcatgaagattcagtagagttcctagaaaggtgctacctcgtgagctcactttccaatgaggaatctgatctgttgtgtttctctaaggtgtcaggtgaaatatttccttgttcaatctacagttctagaatgggaggaatctgttgctttggtgtttgtttgttggtcggttttctcacatccatctgcctatggataaggaaaagagaacggtcgtaattctcatagactcctttctggttgtgtcacaaatggcttcacatgtttctctatgctcagagatactcagcttgatttcccgtgttttcatttcagcacccgactgagcaaaggcctggggtgac

SEQ ID NO: 283454 - DNA, 1000 bp, Homo Sapiens
tgtactatggcactaaagtataattttaggccatttctgctaaatctgacacaagatatatacatggttcataagaaacttaagtgtgaaccaatgaggacaatatttggggacccctaagtatagtgctgccaagtgtacagcctcagtgattcttgaatctctgcatggatgcctcctgcccacctactcagccctaaaagtgaagccagaaggcaaaagtcagtgctaacagcccatctttgaccaacttctagaatctttcttgtcctcagggacctaccatccacacctgcttatagggtgggggctgcagaagttcttctaattaaggtagcatgagcatgccaggcagtcccctggggtctttttcaagaagtgaaacctggtaaggcagaaactttttttgcacctccttcagctatggtaagtgttaaaccaaagtaattggagcgaagcccagggtagcagaagctactgatttcctgtcacctgatgtctatcagcgatttcatcttcaggcctggactacaccactcaccctcccagtgtgcttgagaaacaaactgcacccactgaactccgcagctagcatccaaatcagcccttgagatttgaggccttggagactcaggtaaggaatcaatttgctttctttaaatgacttaaaggaggtgatggataaggtatagaatggttttgaagactggaggttcttgatcttaattctagagtttccctagtcagacttcctaatagttctatgacttaaggaggggtgacgatatcaaggcttgctgcccactcactcctctaatcagtctccctctcaacaattaccctatgcagtcaactgtgaatcattccacaaaagtagtagattgcagcatatatattaaatcatggtttctaaaccattgggttcgaactggagctctaccactaacaaacaatataaccttgggcaaattactaacctctaagcctcagcttcctcatc

SEQ ID NO: 283455 - DNA, 1000 bp, Homo Sapiens
cttctgaggtatcctttagccaaagttgattcatgaattagaagaaaatggatgacaaagaaaatgagaatctgtgcagtcatcaacaaaagggagaacatggccaatagtcatatgtgaagacagagcagatcagtctttgtcaatgctctaacaaattctggccctagatactttaacccatgaggatgattcagactttccttcttacaaactaatatcactaaaaatggagcagatctgtgaaatagctaaatgatggaaacttaaagtttagcccttttcatttaacttaagaaattcactatattttctggacttatagagtttcaataaaatctagacatcaatttacattattcatagtaaccttatcaaatgtcacttttcaacttccctaatttatttatacattcgataatttgacaacatgcagatttttaaatgtttgcatttagtattcattttaacatagtacagggctagttcatgaatatctgaaattaaagggaaaaatattacagaaacattttatttattgagtaaaaataagattttagacatacatgttaactgtattttaaaagttgccataatgtttataaaattctgagatgatttttatatcttagaaggtagataatcatcactcaactttaatgtaaaataaacctcaaaatatctgaaattattaattaaggagaaatgtagattttaagataaatccaactcttatcaactcttccagcctcccacatgatgggtggaaaaaggcaaaagcccagattaagtaactgtgaagatacaaactaacatacaattaaatttgaaaagtatagtcaagacaaagcaagtatttataattagattttgcttcttctctgacgcttttaagcaataaaatctttttgaacattcttgtttataaactactcagccatgtcaagcaaatcattcaagcaaaatctagctgaaaagtctgaaacattcttaaaagctt

SEQ ID NO: 283456 - DNA, 1000 bp, Homo Sapiens
tctcacatagtcagctggccctgagaattgttggttttacactcagaccttggtggctttccgggttctgggggctcaggcaagagggccataggccagattcattccctgtctccaggcctcagtttacccgtgtgtaaatgtggaactaactgatttcccagggctcgggcgcctcacccgggccaggtggcgctctacccaaggggcgcgaccaaatcagtgacgtcactcggggcggggccggcaagacacgctgcggaagcctcagagggtgtctgggctcagcccggagccggcgtgtgggggcgggggctcccgggagggtctcctcacctccgggccctcctgagggctgggatgatcctgctgtcctccgcaggcgaaactgagtcagagcggggcgtgcgtgggccggaggctttacacaccaaagaagccggcgcctcctgcccaccccgggcgaatgcgggccccccactcccgcactcctcgccagtccccacctccaccccaccccacccccgaccctgcggctgtgagtcagcgaccgaccgcgcccccttggcccacttcctcctcaccttcccggggcgggcggggtggggtgagaggggttgggccctactcccccgacttccactcccgtgcgggtgggggtctcgcccccttagtaacctctccgaaattgacagaagagaaacgctggggaggggcggtgttccgaagatgggatttcagggagaaaatctgagaccacttgcttaacttgagggtcctcctcgacccccaaaattgagcggagtacgagatggagaagtcgatggggaaagaaatcgcgccccttccgagaccctcctcagaattcccacagtgggagcgaactaggaagcaagggaggtccccttccccttcaccaacttgcccctcaggtgggggtgattcccagggtgcacccctgggctacaacattggggagaggagcgagatcctaagcttg

SEQ ID NO: 283457 - DNA, 1000 bp, Homo Sapiens
  misc_feature (987)..(987): n is a, c, g, or t
tagtcattttctactggttatagtgtttgttaatgtacccattatgtttaatttgtattatattaagaattaagaaatattaatatatgaaaatatataaaatatataaaaatatatgaaattaatatagcagacttaagttttctttcttgatttaaattacagactaactggatcttctgggtttgtgacagatggacctggaaattataaatacaaaacgaagtgcacgtggctcattgaaggacagtaagtagaaatggctgacttaatttttgtttttttagcatagaagtcagtgtgacattagttttcccacaagtaaaattaacaatctgtagcataaagttcttaaaacattacttgataacctttcatttgacaagtgaattttatcttagccttcattaatttaaaagtttcatgttgatttaatgctgcaaatgaattgtacacaccacaaatttgtgtatttccaactgtaatagttcagaaacggttacacacacacacacacacacacacacacacacacacacatatatatttatttatttttatgggacagagttttgctcttgtcacccaggctggagtgcagtggcgtgatctccgctcactgcaacctccgcctcccaggttcaagcgattctcctgactcagctcctgagcagctaggattacaggtgcatgccaccacgccaggctaattttgtatttttagtagagaaggggtttcaccatgttaaccaggatggtctcgaactcctgacctcaagtgatccgctcgcctcagccttccaaagtgctgggattacaggtgtgagccactgcgcccagccacggttccatattttaatggtttgcttaaagcatagaaaatgcaatattgtgttatttttctaagtatctattttggtgtggataagaaaattgtaataacctgtattggctaatgatccctttttggaccactgggtcctttgntgttggctttttt

SEQ ID NO: 283458 - DNA, 1000 bp, Homo Sapiens
caccccatccctttggagtcgggaggctccagtgatgttgtccttgtcagctatgtcccatcctcccagcgacagcagggtgagcagagcaggtctgcaggggaggaggtgcccgtgcacccaagaagtgaggccgggagcaggctgggagccatgcgggggtgtgcgagggagatggatgccaccccgatgcctcctgcaccctcatgcccttcggagcgagtgactgtgtaaccgaccacctcccatgacccaccccagccccctgaacccccttcatggacagatcccccacagcctggggcagaagaggcgtcgagggcgccagaagtggcggcagcagcagccgcagcagccaaagagaggcaagagaaagagaaagcgggcggtggaggggtcccggaagagctggtccccgtggttgagctggtccccgtggttgaattggaagaggccatagccccaggctcagaggcccagggcgctgggtctggtggggacgcgggggtgcccccaatggtgcagctgcagcagtcaccactagggggtgatggagaggaagggggccaccccagggccattaacaaccagtactccttcgtgtgagccaaccccacccgctccaccctttttaaaccccccagccctgctcgtgagattgggctgggtagggacagaggaggccgaaatccctcccccatgcttcctgacccttgttggccaagggcatctttgatggtacaagcagaggctcgggagaggctcccgtcacacactacaggtcccctccccagggcaggggatttgggctccatgagctccttgaggggctcttctggtcagccccaccctgggggccatttccccattaactacccccagcccgaggcagggtgagggggaagggctgtcagttacattaaggtggttgttgttgttgttttaaacaaaatggagaagcataaataaataaaaaggtttatctcggttcaaaaaaaaa

SEQ ID NO: 283459 - DNA, 1000 bp, Homo Sapiens
  misc_feature (148)..(148): n is a, c, g, or t
  misc_feature (260)..(261): n is a, c, g, or t
  misc_feature (330)..(331): n is a, c, g, or t
  misc_feature (344)..(344): n is a, c, g, or t
ctcactctgttgtgtaggctgagtgcagtggtgcgatcatagcttactgcggcctcaagttcctgggctcaagcaatcctcttgcctcagcctcctgagtagctgggaccacagttgtgcaccaccggatacccagctaattttttanttctttgtttttagagacagggagtctcactatgttgccaggctggtcttgaactcctggcctcaccctcctgagttgctgggattacagtcgggagccaccatgcctgggnntcagtctcagctccaccacttaatatcatgtgtcctggggcaatttacttcacatcccatgcctctgtnncctcatctgtaanatggggataataatagcacttatgtcctagtgttgttattaggactaaatacggtgaaatatatggaaaccactttgaagagagctgggcacatggtaagtgttacagaaatgtttgctgttattattattacaatgtaaccaaattataaaaagacttccctactggtatgctaaactagggaataatttaattctgggaatggattctagccagacagtttctcctccctttcattggaattattctacctcaagctggaggccaacttagtgcagagaaaccacccctcaagtctgcaaccctttccacagaggagggcagggcaggtgcttggagccagcggtaacgacatcatttgcaaattaaattttctaggaatgagtttgaaaaaatctgcagaaaggaggtgaaaccattaggattaacagtaatgagagatgtgaccatttcgaaatccgaatatgctccaagtgagaagatgatcacgaaggtccaggatttccaggaagataaggagctcttcagatactgcactctccccgaggtcagagaccacccttgctttgcgtcggcttaattgccagtgtgtatgtctgcctgtaaaacccgctgatttggccgggcgcagtggctcactcctgaatggtcatagc

SEQ ID NO: 283460 - DNA, 1000 bp, Homo Sapiens
ctgtgtttatccttcttcagagagaaacaattccaatagtttaaatcgaatgaatggtgtgatgtttcctggaaatgcaccaagctatactgagaggtctaatataaatgggcctgggacacccaggccacgtaatcgaccaaaggtttctctgtcagcccccatgacaacaaatgggtggcctgagagcacagacagcaaagaggcaaatttgcagcaaaatgaggagaaaactcacagtgactcttcgacatctgaatcagaagtttcctcagtgagccctttgagaaataaacatccagatgaagatgctgtggaagctgaggggcatgaggtaaaaagactcaggtttgacaaagaaggtgaagtcagagaaacagccagtcaaacgacttccagcgaaatttcttcagttatggtaggagaaacagaagcatcatcttcatctcaggataaagacaaagatagccgttgtacccggcagcactgtacagaagaggatgaagaagaggatgaagaggaagaagaagagtcttttatgacatcaagagaaatgatcccagaaagaaaaaatcaagaaaaagaatctgatgatgccttaactgtgaatgaagagacttctgaagaaaataatcaaatggaggaatctgatgtgtctcaagctgagaaagatttgctacattctgaaggtagtgaaaacgaaggccctgaaagtaagtggttcttctgactgccgtgaaacagaaaaattagtaggaaccaattcccagtaaaactggaaagaatctttccagaatcatcccatggataatgatgacgaagccacagaagtcaccgatgaaccactggaacaagactatttagaaacatttacatgcagtattttacacacagttctggttttaacactgtataaaacttttatgtaaaaaagtgcacctttagttttacaagtaaagcaggttgtaaaataaagtactttatggataattcctgaaag

SEQ ID NO: 283461 - DNA, 1000 bp, Homo Sapiens
tggcccaggccccaaaagccctttgcctatctatgacttacctccttctatctgttttctcttcctcagattgatgaggacatgactgcccgaattagcatggctgatgtcaagttctctttccaatgtcctggtcgcatgtatgcacctgcctgggtagcccccgaaggtgagtgaagtcatcatgtcgggaggtaaaaaaggaccacctcagaagtagtggaagggggcagagacaggacaggcaagggggccagaacagacaagccctatctctccagctctgcagaagaagcctgaagacacaaacagacgctcagcagacatgtggagttttgcagtgcttctgtgggaactggtgacacgggaggtaccctttgctgacctctccaatatggagattggaatgaaggtgagagcacaacagcatacatttgtgttgcgggagtggttggtgatggtgaaaataactgtagtgggccttggctcctcacatatttgttcggatatacagtaatcctgtcccaagggccagtggcttctctctacatgacagactcaaattgtgaggctgctttttttcttgtattcgcaggtggcattggaaggccttcggcctaccatcccaccaggtatttcccctcatgtgtgtaagctcatgaagatctgcatgaatgaagaccctgcaaagcgacccaaatttgacatgattgtgcctatccttgagaagatgcaggacaagtaggactggaaggtccttgcctgaactccagaggtgtcgggacatggttgggggaatgcacctccccaaagcagcaggcctctggttgcctcccccgcctccagtcatggtactaccccagcctggggtccatccccttcccccatccctaccactgtgcgcaagaggggcgggctcagagctttgtcacttgccacatggtgtcttccaacatgggagggatcagccccgcctgtcacaataaagtttattatgaaa

SEQ ID NO: 283462 - DNA, 1000 bp, Homo Sapiens
gaatactcttcagtggattcaaaccatgaaaaaataagtcaccaggggaggatagctgaaataattcctaaggcggtgcctgttttaatggagaagatatggggtggagcctgcgttttaaacaaacccagatctgatgcaggatgtacttaactacgttgagaaaaactgatctgcgcaattgaggcgttactgaaatattaggtggtggagatttgagaataagggttttcgtcttttacctcatgggaactctggaagtccttttgttaggataaatcctaataagaccaagatagtactgtaaaatgaagtttaattatcatgggtccccgcttaagaaactgaagaacttattttctttttttgcccccggggtgaataataattggtttactattgctttagggggaaaccttagatattttaatttaccttctctctggatagtagtgttgttaagagagcagaaacccatacttgaaaatgtgcttttcttttttgttttctaggatgggtttgtggagttcttccatgtagaggacctagaaggtggcatcaggaatgtgctgctggcttttgcaggtgttgctggagtaggagctggtttggcatatctaataagatagccttactgtaagtgcaatagttgacttttaaccaaccaccaccaccaccaaaaccagtttatgcagttggactccaagctgtaacttcctagagttgcaccctagcaacctagccagaaaagcaagtggcaagaggattatggctaacaagaataaatacatgggaagagtgctccccattgattgaagagtcactgtctgaaagaagcaaagttcagtttcagcaacaaacaaactttgtttgggaagctatggaggaggacttttagatttagtgaagatggtagggtggaaagacttaatttccttgttgagaacaggaaagtggccagtagccaggcaagtcatagaattgattacccgccgaattc

SEQ ID NO: 283463 - DNA, 1000 bp, Homo Sapiens
gggatattatttgaacttggaatttcttacattcgcaattcaactggtgagagaggagagttaagctgtggctgggtgtttcttaagcttttcgatgccagtggagttcctattccagcaaaaacatacgaactcttcttgaatggcggcactccttacgaaaaaggtgttgaagtggacccttcagtgtccagaagagcacagggcagtgttttccgtcagatgataagcgtgcgcaggcagcctcaacttctggtgaaacttcggtctctgaacaggaggtccagggccatgctcagtctgctgccagaaaccctggtggggagtatgtgctctgctcacttactgatattttaccgacaaattcttggagatgtgctcctgagagacaggacaaacctgcaaagtgccgatttaatcagtcatcccgtgctggccaccttccctctgctcctggagcagcccgacgtgatggatgctctcaggagttcctggtctgagaaagaaagtacactaaagcgagcagagaagagagacaaagagctcctaaaggctgagttcctcctggtctaccatgactgcgtgctccctcttctgcactcgacactgctgcccccctttaggtgggccgaggaagagacagaggctgcaagatggaaagccattgctgacttcctcaagcagagccgggagaacgagggttccctgaaggctctgctgtcaccagatggagttcacaaaccatttgacctttcggagcagacctttgacttcttgggtgaaataagaaagaactcaggctaatggcgaccatgctccgattcccactggacccagggagcttccaggaagacttgcctcaaacaactgagccaaagacagactggttagaacgtagtcatatgcttttgtgtgcaaataatattttcaaagaactaataataatttgattgagtgtaaaacaataaaataaattttataaggaacaaaaaaacaaaaa

SEQ ID NO: 283464 - DNA, 1000 bp, Homo Sapiens
aaactactaaatcactacattttgaatgctaaagaaattgacagtaatctaattagaaagacaatgaatatccagcactctttaactgacctgtccctaccctacccctaaagtaacccctttgtctgatgagttacgtaggttcactatttaatgtctctaggaataattataagatatgaactatacatgagaagactgagatctactaaagaaaccacatctgaggaaagtcgagtttttcagagcagtggttggctcagtcctcattcatttgtagaatcggccaatgaaaatgcattaaaacctcctcaaacaatgacaaccatcactggcttggagccatacaccaagtatgagttcagagtcttagctgtgaatatggctggaagtgtgtcttctgcctgggtctcagaaagaacgggagaatcaggtaaagatcaatgttttaaattctacttttaaaacctctgaatgcaaatgtttcctcaaattaaagtcaaagtactgtgaaagtacattttgaaaagcaagaattagaaacttccatagaccaaggaaaattttcatatatatggatttgttacataaacaactcaaggtcataaagtacttgcagcaagttctagggggcaaaagtaaatgctttagttattaattcatggggcgaaaatggcttaactatagttatagtcttctgggaatgtttgtcaaaaatagcatttggtttccactcctgaagtggattggacacatgtctcatcttgctccatatacagcctaatttatgttcaatgaaagagataactgtcaccaattccacaaatttgtctttgtttttatttatctttccaaaataaatagtttagatactagattgtacataatgacagaatcgtggacatcaaaatctataattcacaagtgtgcttgtaagcagttggcatgatgataaggaaggaggacaacatatctaaattttctggattatcttcattaa

SEQ ID NO: 283465 - DNA, 1000 bp, Homo Sapiens; identical to SEQ ID NO: 115055

SEQ ID NO: 283466 - DNA, 1000 bp, Homo Sapiens
gtagaataaaaatagaaagcaacaccaagaggaactctcaaaaccacacaaatacatagaaactaaacaacctgctcttgaatgatttttgtgcaaacaatgaaattaagggagaaatttaaagaaatctttgaaatcggaaaatagacacacagtataccaaaacctctggaatgtgtgaaaagcagtgataagaagaaagtttatggtgctaaatgcctacatcaagaagatagaaagatctcaaattaacaacctaatctcaacctaaaggaactagaaaaacaagaacaaactaaatccagagctagcgtaaaaaagaaataactataatcagagcaaaactaaatggagacccagaaaacatataaaggatcgatgaaatgaaaagatgggtcttcgaaaggataacaacattgatatactgctagctagattaacaaagaatgaaaagagagaagatccaactaagcacaactgaacacaacatatgtgatattacaactgattccacagaaatacaaaagatcctgagactactatgaacatcactatggacacaaactagaaaatccagagaaactgaataaatatctagaaacacacaaccttccaagattgaaccaggacaaaacagaaatcctgaacagactaataatgagcaaaggaattgaatcattattgctgatcaacccaaaaagctgtggaccagatggactcacaactgaattctattatatgcacaaagaagagctggtgcagatcctactgagattattccaaaaatttgaggtggaaggactcttccctaactcattctataaagcagcataatcctgataccaaaatctggcaaagatacaacaaagaagaaaactataggccaatattcttgatgaacatagacacaaaaattctcaacaaaatgtaaccaaacaaaatccagcagcacatgaaaacattagttcaacatgatcaagtaggctttattcctggaatg

SEQ ID NO: 283467 - DNA, 1000 bp, Homo Sapiens; identical to SEQ ID NO: 115056

SEQ ID NO: 283468 - DNA, 1000 bp, Homo Sapiens
tatatagcaaaaatagtagcaatgtactgtgtgtttattttacaaaaatatatgataaaatagtgcggatgacagcagggaggatttggagaaaaggacatacatatatatgcaaaggttctctacctagttcatgaacctgctgagataaaacacacaacaaatcaagaaaagcagatttgttactcatagacatgcagcaatgagaaacagaagcctggggttcatcacaagcccattcccacagctcaggaaagctgcccaggctgaatgaactctcactacacatgccccacattgtaccacagcggagggacccaaaaagcactagtctttggaaaacagttagacagctaattataaacatacatttatcgtgtgacctagcaatcctatacttatgcattttcccaaatgacatgaaaatttatgtttacgcataaccatatcatgttaaaaatgaatattatctagggatagcttacatgcccaccaaagtttgtgagtgaaaaaaaaaatacagatccagaaaattaacctagtatgatgcacagtagctaagcaaggactagttaccagtattatccaaggaaattcaaaaggcagatgtgagacaagttgaggtgggatgtgcagaaaactggtgagtacaaatagggaagaccgatgcattctatagaacagtgggtttcagtaatgattagaatcattatgtcattgttaaaggccaaatatattattgaccaggtgtgggtaaaattcatcacatgtttcattcattacaattgcattgaatactcatcctatttaggtgctgtgttagtttctggacacacaacaaataaaaaatctgaaataatttgagaccaaatctagtttatagatacttgtaggaaagaatgacaaactatatctatgtatatatacataaatgtccacaaacacataaattgccatacatattttgaagagaagcaaaacatacttcagagataaaaat

SEQ ID NO: 283469 - DNA, 1000 bp, Homo Sapiens; identical to SEQ ID NO: 206016

SEQ ID NO: 283470 - DNA, 1000 bp, Homo Sapiens
tattccaagttatgttggggatacaaataagctgatccaccttccttttatcttacctcaagtagacccagcatgagaggttgtacttgcgcagattaacctcgctccttatacccacatctactcctgataatactcaccatgtttaaccatcatctccattcagaaagctgaggactgtcctaatcaccacccttcccttttccacacaaagacagtgcctcctgaaattctctcttcctgtcccctccacttcatgctttctaccaacgcccaactactgactgccattaccatcctctgtgatcaccacaaggcctcctaactaatctgtctccttttggttgatcttagtctaagtcttcctcctggatgttgccattacacttttttcaaaaacctgttcatggagctgtcctgcgtaaattcctcaatagctcctcggaatcttaaccataatatttaactcatttgtaagttgaatatgttagtatttcatagagttgccatgaaaattaaatggcttacttgtttgaagagtttgaagtagcatttgacaaataggaaaccctcagtagatactagtgttattagaagttacagttatttctttttcattttccccaaattagcaagtttaaatttctaagaagatcaggggcaggggtggaggggcttcaatctaatatttctggatttgtaaacaagtatgtgattatcttaaccttaactttgtaagtattataatttcccttccagttgctcaaacggaattttttatgctctttcaaaatctttcttgaagtgcattgaccaaatccatgcactgctgcatgtattatactaacacaggtgtggattaagttgaatataattttcagttctgcctctaatcctctaatccctttcctgaagatgctcaatattttacttctccctccggtcatagtagctcatccaactaatatatctagaaacaatctgcagtgacatctagatc

SEQ ID NO: 283471 - DNA, 1000 bp, Homo Sapiens
ctggggtgcacacacatatcaaatgtaggatagttcatgagcttaggagacagacgataggcactgatttagtgcttgctgggacataggtcagtgcatcatgggacagacaataggacagacacagatttagtccacagcggaatctggagaccagtgcattgtgggatgctggggtcagtctcaagctcaaggcatgatgggaaactctgagggagaaatgtgggccccatgggaccctaccctttgccctccgcaatccagttccccctccacccccagcccagtccagcaagcccagctacgcctacgctcctctccccaggagctggagcgccaggccttagccaaacacgtcagggcagaggccctgagctccacccttcggctggcccaagacgaggccctgcgggccaagaacctactgctgacagacaagatgaagccagagtgaggaaggaggctgagggcatgggaggagggtgagatcttggggaaagggcctgatctccccttccactccaacaccccagcacctagccatgccgccatcaactccccgctgcctcatgacagggagaagatggccactctggaccatctacacttgaagatgtgctccctccacgatcatctcagcaacctgccacttgaggggtccacgggaacaatggggggaggcagcagtgcaggaacccccccaaaacaggggggctcagcccctgaacaataaatggcctctcatgctagcatgaattctgtctgctttttgggaccagagtcctagtgaattgcacacacaccatgcactccctctatgcccaatgtgatttatttattttaattaattaattaactttattattctttttgagacagattctcactctgtcgtccaggctgaagtgcgtgtgatctcggctcactgcaacctccacatcctgggttcaagcaattctcctgtctcagcctcccgagtagctgggattacattcgcaca

SEQ ID NO: 283472 - DNA, 1000 bp, Homo Sapiens
tgattttccaaaatagtaccttagaaaaataagattatcaatgaaaagttcaagtatttaaaaaattgttacactttttaaaaaaagacctacctgcggccaaccatcacatgaagaaaaaaaattaacatcacagatcattagagaaattcaaatcaaaaccataatgagatagcatctcacaccagtcagaatggccattattaaaaattcaaaaaatatcatgatgttggtgaggttatataggaaaggaatgcttatactcttttggttggaatgtaagttagttcaaccattgtggaagacagtgtggtgattcctcaaaaacccagaggcaaaaataccatgaaacccagcaatcccattactgggtatataacctaaggactataacttgttcttttataaagatccatgaacatatatgttagttgcagtactattcacaatagcaaggacatgcaataaacctaaatgaccatcaattatggaatgaataaagaaaatatggcatatatacactacagaatattatgcagccataaaaaagcaaaaatatgtatttttgcagggataaggatggagcaggaggccattagccttagcaagctaacataggaattgaaatccaaatgtgacatgtcctcacttatgagtggaaactaaaagatgagaacatgtggacacatacatggcaacaacatacactgagatgtattggagggtggagggtgggaggaaagagaggatcaggaaaactaataaacaaatattagttttaatacctgggtaatgaaacaatcagtacagcaaacccccatgacacaagtttacgtatgtaagaaacctgcacgtgtactcctgaacttaaaataaacgttaaaaataaaagttaaattaatttaatttaaaaaataaaaatattctaaaaaagtataaaaacttataaggagtcattgtaattccagtgtgaaaaaacagtaactatttagtaatgacc

SEQ ID NO: 283473 - DNA, 1000 bp, Homo Sapiens; identical to SEQ ID NO: 115058
  misc_feature (649)..(649): n is a, c, g, or t

SEQ ID NO: 283474 - DNA, 1000 bp, Homo Sapiens
aattttaaactatgctatacataaaagtagtcaaaagcaagtgaaatatataaggttgaagaatttgagtgagtacacatcaagaggtcctatgaataacgaaacatcagcctctttctatcctccagtttctctttactctattgatactttttcccaaattatttcccgcaaagcttgagagggatagatgtttgggtgttttcagcaaaatttcagagagaatgagtttggaaaagcgggaatgtagtcagggtgggtgagataaatgttttattcttttatttttcttcaactcaaacaatttttattcccagttctttccaagcttgaataataattaccaaaaatatttttgtttcaatactaatttctgacaagaacagtgagaataaactattaagtgccctcaaacttgtttttttaaaggtccctaagacgagataacttgacaatcagttccatggacatggtgaccacagccagctggaacctgaagtctaaacaccattcctgctctccagcttcctttcccattatccagaatcaagtccaaataaacaaaaagggagtaaccaaagagagtatggaccagagtgaatagatcctaagtcccaaatggccagtgtaaaaatgtccttatgtctgatgctgtctcttgctcttcaatgattaattgaggggatgttactcataaaacagataatcaaatagatcttctccaggattcccaaaaagcttttggcagtgatgagtaaatacagagtaaacatgtcagtttcttaatgtagacactatgtcttcaatcccaaaaattataaaactgaaacccatgaagcaagaatagatgtgagaaatctatgtaaaaaaataattaaagaaatgcatgtgtgtaaagtagtaatatgatgattttaggtagtgctttttattttaaaaatagtctagttagtaatgttgtatccttgcatgaatattattcttaattccttttgcatgt

SEQ ID NO: 283475 - DNA, 1000 bp, Homo Sapiens
tgccacttgctccctgccaactttctggagaggtgccaaacttggtgtggccaggaaagggcagtcctgagggagaagacaggattcagggcagtgctccgaagctgtgtgctcacctggttggctcatcaaacctggcaaccctgtggcctgtctgccggagctgactggatccactcatcaattcttcgtccccactactaagactgggcatgttttgctggtgtggtctctgcacttcaggaatggtcacaacagggggtagccctcaaaagcactcctttttctatacctcttctcaaggccatgtaagttgcccatctctacctggctgtggacaaaaggttatctgctcttggccatctggtggtggtggcggcccagagtctgaagaaatggcacagggacagtgaatggtagtgttgccaccctgtgctgaggcctgaggcctcttcctcagctttatctccctttccttcactcaagggccatttccccagtccctatctcccccatcccctcccggcttataggccccacaggtgctatttgttgtgctggcccaggcgtggggctaccaagcaaaggcttggcatataccaaaggccagctgcatgcccatcagtctggtctttttcctctgcggtcatgttggctttcatgctggatcaaatgttttactttcccagactggtggcatctgagttccccatcctaccactctcaccccactttcctgccccacctaaaccctcgttttagtaatttgtagtgactgttcccttccctctgttgcagggaaccaggaggaaagggaaagatgttgccatatttcctactctttaggcatggactctcctttccctttgttagtgtcctgggttcccatggactcagggatttgttggctaaggtttctctgtgcatatatatatatatatatgtatatatatttaaatacacatatatattgtacagctcgtgccgaattcggcacgag

SEQ ID NO: 283476 - DNA, 1000 bp, Homo Sapiens
ataaagattaacatgacccagaaatagctggcaggagagtttgaaagctcagctttagagaaactgaacagaagtggttcctgatttgaataaaattgaaggtatgcccatggaggtgagtggagatggtgtactaaacggtgtatcaaaaggagaaaaggacagaggaagtagaaattgaatgatttaagagactagggggacaccattgacatttcaatgaaaactgggagaagtgagattgatgggggatattgagaagagaagggggacctggtcaaacacgcctatctgaaaaggcaggcaaggggtggggtagagaaagcgaatgatggccacccgaaataaatcacccaccatccaggacttccccagagccctgtttccttgggtgcaggaacatttttaccacacactgagttccccacctgtgagggaaagggggactagagaatctgggaaggtcagcaatactgagagagggcacaatgagctggaaggaacacagactgaaaatcacaacatctggttctgatcctggctttgtctataacttctctaaacccccgcttgtctgttaatatctcaggacctaagttttcttatgtgaaatacagagatagcaaaacctgctttacttcaggtgaaattatatatgtgaaaacacttggctaaaactaaagcaccaagcaaatccaagaaaaagatatgaacatatacagctactaattattgagcaattcttagtgtgccaagcacttgtaaatgatctcatttaatggtcaaaatcatataaggtatatattattattatcctcatcttaaatatgaggaaactaaggcttaaacctttgaggcctttaaccccttgcccaaatcaaacgacctctaagcggtaaactcagaatctggagcccagtctgacctaaatcccacgctttcactcaggctgctagactagagcatctctgatttcaacctgaccataaggagcaggacc

SEQ ID NO: 283477 - DNA, 1000 bp, Homo Sapiens
cttcagggctagcgtttggggaaggcaaggctgcggctactcttggagcttcagtgtcccgggaggaagaaaggcccagccaagggtcctcacactggcgtggaattcggcgcgttcgtaggcgatcgaccccagagacgaaagctgcttctcaagctgggggagggagaggaaacggcgcacaaaagcagtacgacctgtcccttatcggcgtctaaggggaagggtggagaaaacgaaaacagaagcgggccgggagcctcggctcccgccccagcgccttttaaactgcgtttctacctcctctcgctcagcgcggcggctaatggaacccgcgcgagccgtctcgccaatcaccgccgcgcttcctcccgtcgcccgccaatggcggcgcgcgttcttggggcgtgggcgaagcaggctgctcgcctcctgcctgtagtgtgtgggctggggttggtgcgagcttccagcttggccgcagttggttcgtagttcggctctggggtcttttgtgtccgggtctggcttggctttgtgtccgcgagtttttgttccgctccgcagcgctcttcccgggcaggagccgtgaggctcggaggcggcagcgcggtccccggccaggagcaagcgcgccggcgtgagcggcggcggcaaaggctgtggggagggggcttcgcagatccccgagatgccggagttcctggaagacccctcggtcctgacaaaagacaagttgaagagtgagttggtcgccaacaatgtgacgctgccggccggggagcagcgcaaagacgtgtacgtccagctctacctgcagcacctcacggctcgcaaccggccgccgctccccgccggcaccaacagcaaggggcccccggacttctccagtgacgaagagcgcgagcccaccccggtcctcggctctggggccgccgccgcgggccggagccgagcagccgtcggcagggtaaggacgcggggccggggctacaaaggc

SEQ ID NO: 283478 - DNA, 1000 bp, Homo Sapiens
ctcttcagaggagcatcagctgtctgtcatctgctgcgatccggcagcctctcttcactgctacatgtgctggaaggacaaataaataattgtggttgtgttcttaatggggacgagcagacacactgatctgaacatctggcccaagtgaagcatggcatatagtgcccttggaagaaaattaggcctcaaatgacagtagcattgaagtgtttgctgcagagttgagggaaacccccagccaccctcccggaatccgagatagggtggcacatctgtcctgacagacgaggagtgtaactgaaccaggaatatttcctccattcctgctctcccactgcacacagggtggtggcacattatccctctggggggtggggacgcctgttgttttggctcaatttgggtttgttggtcacatggagctcttccatttcgtttagctgaataatgagttgttcctagaggagacagcctgtctctccttgttgcccccaaagcccatgccctgccgtggtggcagctggggctgtggatgggaggggtccccaacatggatgtgttgcccctcctccgcatgccaacgcagttcatgtacaaggcccctctgcaactggagagaaaattaattcctatcccgtgagtggattgtgagaaattccacccacgtggagacagcttactgcagcactgttggtgttcggagctcttctgtgccctggctccatgctttcacctacacaagcatcaccttcctaatcaccgcggggcggggagcgtgtggctctgccccttctctttaatctcatttaatttttattaaacatgctcagtacctgtgttgagaaaaggctttctttatcctaaagattattacctttttaaagtgctcttatattttcatgagtttttattttgtctctgagattttgtattccacattctagggtattctgtaatttggctccttaccaatattattaaaatcttattaaaatct

SEQ ID NO: 283479 - DNA, 1000 bp, Homo Sapiens
cttcttgtccaaactgtgcttttttatttccagtttcagcattttggtcttctcatctctaactcttatagggagtgtcaataaaccttttaaaaaagatcatgtaagtgtcaagaggaagtgaagaacctagataatccaccaaccggataatcagctcttgcatatttgagagttgactgcttgacctaagcatctcctcaataaggtaccctccctcccaggaccttcccttttcaaacctctcaaggctcttacctggggccaggggagataggcttttcaaagtccattgaattgccaagagtctctgtcaagaaggcagtcatggtgcctggagaagggaacttgctgggagccccttcagagcctggtacttatagagctagggaaaagatcttgatgccaaagcagggtggactaaatacagactaataaatgagacaggtgctcaagagggcccctccataccatcatctcctccggatttggacttctactcactttgcttttacattccctcttcccgatggtgtctttggtgagcagggtgcttttcacctgaaacagcctctgagctgaaaagaacagtcaccaccaaatcaattcctcatccattaacaggttgtctctctgttcttgagacacaggcattacctggttagacctgttttgtttgaacactaacgtgtgagttggccaaatgcaaatgagccaatgtttgtaatcctttattttatttttttaaagggctgggtagccaatcagaagagggggaagtgacttagggaattcccggttggtggcttattgcttaacatcctacaaaatgatttaaaattattgttatatgcatttatcttcactctgatgagggctcagacttgataacgcccgtggtgccccatccctataggagctggtgagattgcagcctgctgcctcccctccatcagccacagctattggatttcccacccagaatctttaggtaaatgag

SEQ ID NO: 283480 - DNA, 1000 bp, Homo Sapiens
cccttagtatttctgcatctgataattgatctctgttttgttgttgaaaattcatttgtatacttttgtttttatctaggacttcatgttttttgaaagcactggcagccaggaacaaaaatcaggagtgtggtagtggattagtgaaagtctcctcaggaaatctgaagtctgtatattgattgagactatctaaactcatacctgtatgaattaagctgtaaggcctgtagctctggttgtatacttttgcttttcaaattatagtttatcttctgtataactgatttataaaggtttttgtacattttttaatactcattgtcaatttgagaaaaaggacatatgagtttttgcatttattaatgaaacttcctttgaaaaactgctttgaattatgatctctgattcattgtccattttactaccaaatattaactaaggccttattaatttttatataaattatatcttgtcctattaaatctagttacaatttatttcatgcataagagctaatgttattttgcaaatgccatatattcaaaaaagctcaaagataattttctttactattatgttcaaataatattcaatatgcatattatctttaaaaagttaaatgtttttttaatcttcaagaaatcatgctacacttaacttctcctagaagctaatctataccataatattttcatattcacaagatattaaattaccaattttcaaattattgttagtaaagaacaaaatgattctctcccaaagaaagacacattttaaatactccttcactctaaaactctggtattataacttttgaaagttaatatttctacatgaaatgtttagctcttacactctatccttcctagaaaatggtaattgagattactcagatattaattaaatacaatatcatatatatattcacagagtataaacctaaataatgatctattagattcaaatatttgaaataaaaacttgatttttttgt

SEQ ID NO: 283481 - DNA, 1000 bp, Homo Sapiens; identical to SEQ ID NO: 201666

SEQ ID NO: 283482 - DNA, 1000 bp, Homo Sapiens
aagatatggaaacacctaaatatctattgacagaataataaataaagaatatgtgagatatatatataataaagaataggtgagatataaaatacatattatatattatattatacatttatatatttatattcatataatataaatatgtttattaatacatatgtttatgtaatatcaatgtatttatattatatatataagtaatattatatataatatataatattatttagtcagctaagaaaaggaaatcctggcatatacaacaacatagatgaatctggaagacattatgttaagtgaaataagccagtcacagatggacaagtactacataattttacttataagtggaatttatagcagtaaaactcacagaaacagagtaaagcggtggtttcccgtggctagaagggagagaaaatggggagtagctgtttaatggacataagtatttagttatgcaagatgaacatcttgtagacatcttctgtgcaacgtcgtgcctatagttaccaaatactgcattgtgcattcaacaatttgatgaaagacatatttcaccttgaatattcttaccaaaatattaactaattaaaaataaaaaagaaaaaataaaatttgaataaaataagaattaattttattatttattcatttatttttgagactgagtctcactctgtagcccaggctggagtgcagtggcgtgatattggctcactgcaacctctgtctaccagtttcaagtgattctcatgcctcaatctccagagtagctgggactacagacaggcgccaccacatccagctaatttttgtacttttagtagagacagggtttcaccatgttgaccaggttggtctcgaactcctgacctcaggtgatccacctacctttgccttccaaagtgctgggattacaggcgtgagtcactgtgccagccaaaaaaaaaaaaaaaaaaaaaaaaatttaatgaataaaatagaactttct

SEQ ID NO: 283483 - DNA, 844 bp, Homo Sapiens
gtaaaatggagctcttggccttgcccttcacctttgtgcgcctccaaaggctcgttttcttttcagtactcggacggcccaacacggacggccctgagcgtcttcccattcttgcttgaagcataactgtcactaactgaggggtgagacgagtcctgcgtattccagaggctcaggacgctgtaactgcaccatctcctgacatggctgtctcctgttctctcagccactcaacatatctcaagagacaaaaccttgtctgttatcttagaaacccacactatggcagccttatttatgctgatggtcatggagaagtgtggacagactggaatgacatgtccaagtttttacagtacggatggagatgcaccactaatgagaactcctattcgaaccgtaccctggtaggaaactggaaccaggaaagatacgacctaaaaaatattgtaaagcctaaacccttgccttcccagtttggacatgccttcgaaacaacatatgatgcaaactacagcaggaagaagccacaatcaacacatagatttaaacgagagcctcactggtttcctggacatcagcctgagctggatcctcctcactacaaatgcacagcgaagtcaacttatatgactaactactcagaacctcagcccactcattactcctgctgtgtatatgatccaagcgtgagccagtcttagggcccgggaatctgaagaagaagaagtagcttcatttttgtctagagtagactgtagaaaggaacacatgctaagcagactcaacatcactctcaacatggctgctgtctaaataaagcacagcacaccaaaaaaaaaaa

SEQ ID NO: 283484 - DNA, 1000 bp, Homo Sapiens
aggagatgaaagatgagagtgcaaggatgtcacaagaaaagcaagtcaccgtgctagagctctttagagtgtccagctaccgacagcccatcatcatttccattgtgctccagctctctcagcagctctctgggatcaatgctgtgagtgtgatactttagggtcaaacgtgtcttaaagtatttcacttaaaatgccgggcatggtggcggtgtgcctctgtagtcccagctactcaggaggctgaggtaagaggatcacttgagctcaggagtttcaggttgcagtgagctataattatgccactgcattccagcctgggagacagagtgagactgtgtctctgaaatttaaaaaaaggaaaaaaaaaaaagaccctggaaggacactggcaacttcagagtgaactgactttaccagtctgtttttacaactagtatagcgagcatggtagtttaaagagggcatgatagatgatagtttaaagagggcggcacaacggaagctagcatttggcaggtagcccttgtattccatgcaaatatcagcttcctgcatttgactgtggattgtaggaagagagtattcctgtgccttctagtcaatatggatattaagagcacccttgtcccacctttttaaatactgattcatcccctaagggttttcagatagtctttgatcaatgggattaaattattttgtaacaaagcattttgcaaaacttactattttgagcattttgatgctcaaaatagtaagttggttcttggaacttttctcctacctagcacaccaggatatttgtatttgaagtggcagtgcttcttatgaggggttagaggctgttatgtcagaatctatgaggagccaagtgtggtggctgctcatgcctgtagtcccagctactactcgggaggctgaggtgggaatatcacttaggcccaggaagtcaagcctgggaaatatagtatgccctgctttaaaaaaacttgggagg

SEQ ID NO: 283485 - DNA, 1000 bp, Homo Sapiens
taatttttagaatggacaaagaatgaaataagaactatttgagggatttggggtagttctctgataaaagtgttgaatgatacagtatcctttacctcataaatagggttatttttaccaaaacgtttgaacaattcactgtttcctccaaaggtctctcattaattggatattcaaaatacccatcactcatcatccaagtggatttttttcacttcaacttaactgatttaaatcgtttttcattggctttgacatattgaaatagttatccaataccactttcaactttatgaaatcctgtgtattttccaagatttataattctacattgcaattaatttcttttttttattgttaacattcaatagtcaacagaggaccagtgatatgatggacaataatacgtgctattgtttagcagaaaggggtttttgaggaggactaattttataagtggttaatttactggtgaaaatttctatggtataagggacttttctttactatacatcataacttataagcactcagaaaaaaattaaaaataattgtatatacacatacacacatgcacatgtctacacatgtatatataaagtcttgtgagatagaggccccaaattgcaggatgaaagttgatttttatatttttcttatttcctgtgacattttctgatttttttcttatttcctgtgaacattttttgatttttctattactggtcatgcatgacttgtataaataaactatcatgacttattaaatgaaagtaggctttgaatagtgtttgaaaacaatgaggtttatagtccctgtctggtgacagctttcatttgcatttgtatcacaaactgtcaactgaaattagaccttggtagtcatgtaattctagagtcattaagcccaaaattacagggtaccagttgctagggacaaataacagacttgaaactacaatatgagagattaaggttatatttactaaagaatattctg

SEQ ID NO: 283486 - DNA, 1000 bp, Homo Sapiens
gggtgagggttggggttggggttgcggttggggttggggttggggttggggttggggttagggtttgggtttagggttggggtaggggtaggggtggggttggggttggggttggggttggggttaggggttggggttggggttggggttggggttggggttagggttaagggttagggttaggggttaggggttagggttggggttggggttagggttagggtagggttagggttagggttaggggttaggggttagggtagggttagggtgagggtgagggtgagggtgagggtgagggtgagggttagggttagggttagggttagggttaggggttaggggttagggttagggttaggggttaggggttagggttagggttaggggttagggttagggttaggggttaggggttaggggttaggggttagggtagggtagggtagggtagggagggttagggttagggttagggttagggttagggttagggttagggttagggttagggttagggttagggttagggttagggttagggttagggttagggttagggttagggttagggttagggttagggttagggttagggttagggttagggttagggttagggttagggttagggttagggttagggttagggttagggttagggttagggttagggttagggttagggttagggttagggttagggttagggttagggtgagggttagggttagggttagggttagggttagggttagggttagggttagggttagggttagggttagggttagggttagggttagggttagggttagggttagggttagggttagggttaggggttaggggttaggggttaggggttaggggttaggggttagggttagggttagggttagggtgtggtgtgtgggtgtgtgtgggtgtggtgtgtgtgggtgtggtgtgtgggtgtgggtgtgggtgtgggtgtgtgggtgtggtgtgtgggtgtggt

SEQ ID NO: 283487 - DNA, 1000 bp, Homo Sapiens; identical to SEQ ID NO: 115059

SEQ ID NO: 283488 - DNA, 633 bp, Homo Sapiens
ttttaactgcccctctctaaacctgatcttcattattatttcttaataattgtgtgcttctgagccagtcacttaaacactgagcctccctttcttctgctaggagctgaggagtttaatacctatgtcacagaatggctgtgaggatccaaggtggtgggataaattgggtgtctgtgtctgtgcctggcatgtatcaggccttccagaagcttggtggccggttcttgggctctgggaaggtagatagagcccagggagggccctgtgttctttctgtgcccacagatgcagcctatccacgaggtgctgcggcacacaagcctggggcctctggaggccaagcgccagaacctgcgccgcgccttggaccagtatctgatggaattcaatgcctgccgatgtgggccttgcttcaacaatggggtgcccatcctcgagggcaccagctgcaggtgccagtgccgcctgggtagcttgggtgctgcctgtgagcaaacacagacagaaggtaaggtccgtgcatccccacccagttccagcctgtcccagctcaaaggggccagtgcaaaaaggacttttggggttcccggcccctccttttggagctctcctagccaatacccaggagcc

SEQ ID NO: 283489 - DNA, 1000 bp, Homo Sapiens
gaaggtggatccccgcttcggagcctacgttgcctgtgccctgttggtcttctgcttcatctgcttcatccagcttctcatcttcccacagtgagagccctgcctttactctcttagcttctctcttcaccacttcccagaagcttcctaaatacccacacaagcccacaatccctggagcctgcatccctgcttgttccagagggtgggacaagaatgcccagatcttccagaattaaatgatttttctggccctgttctggggagctccaccctgatgcttgggatctatgccagcatcttcctgctgctgctaatcaccgtgctgatctgtgctgtgtactcctgtggttctgtacgtaaggggatttctgaggctgttggggagggcaggctggactccagacagggaggaggtcacatggggagagggagaaggccatgcctcttccactgggccccatccctggttgccattcctccttggctgatacaaccttcaactcttggtctcttgatgcctctagctgttccctaaggccctgcaacgtctgtcccgcagcattgtccgctcacgggcacatagcaccgcagttggcatcttttccgtcctgcttgtgtttacttctgccattgccaacatggtaagggtccagtgggaattctcccacctctgctctgtgccaagcactgtcctggacactgggagtacagcggagaaaaggacatattttctgccctcagggagccccctcccagaataggggaaggttaactccggttctccttccttgttctcccaacctcttgtcatccctgagtgagtactaaggcccatggggtataaggtacctgggcatagcccaggttagggtacatggcttcaccaggtaccttgcaaccctttccctccttggttaccctgatatacccctccacttttgcagttcacctgtaaccacacccccatacggagctgtgcagcccggatgctgaattt

SEQ ID NO: 283490 - DNA, 1000 bp, Homo Sapiens; identical to SEQ ID NO: 115060

SEQ ID NO: 283491 - DNA, 1000 bp, Homo Sapiens
aaaatcatataaacagtctctcagacaacagcacaataaacttagaactcaatattaagaaatttattcaaaactacacaactacatggaaattgaacaacctgatcctgaataactcttgggtaaataataaaattaaggtagaaatgaagacattttctgaaactaataagaacaaagagacagcacaccagtatctcaaggatgcagctagagcagtgttaagagggaaatttatagccctaaatgcccacatcaaaaagctagaaagatctcaaattagcaacctaacatcacaactaaaagaactagagaaccaaaagcaaacgaaccccaaagctagctgaagacaataaataatcaagatcagaggagatagagacatgagaaacttcaaaaatcaatgaaagcaggagctgtttttttgaaaaacattaataaattagatagaacaccagatagactaataaaaaagaaaaacaaatcaaataaatgcaatcagaaatgataagggaatatcaccactgaccccacagaaatacaaacaagcaccagagaatgctataaacaccactatgcacataacttgaaaaacaaaataaaattggtaagtttctggacatattcacccttccaagactgaaagaagaaaaaactgaatccctgaataaatcaataatgagttctgaaattgaggcagtaatatatagcctacaaaccgaaaaaaaaaaaaaaagcccagtaccacacagattcacagctgaattctaccagaggtacaaagaagggctagtaccatttctactgaaactattccaaaaaattgaaaaggaggtactcctccctaactcattctatgaggtcagcatcatccagatacaaaaaccaggcagagatacaacaaaatgaaaactttaggcaaatatccttgatgaacacaaatgcaaaaattctcaagaaaatactgttaggcctaatccagcagcacatcaaaaagctt

SEQ ID NO: 283492 - DNA, 1000 bp, Homo Sapiens
atgacatctccatactttatttttaggagacagactttcaaaaccagagaaatcaggtgccttcctcaaggtcatgctccaacccaggccaactattaaatgcttgcatctgttagctggattagtctctatgtatactgaactgtgatgaaaatctatagctttgttttagaaaattattgttgatggactattaatattatattaacaatttctcagtaagtgtgttttttcctcattgaatctaggaatgctgggctttaagttgataactgtgtcatttcaatcaagtacaaggattttgaggcagattttgctagatatcttagtaatcccccacaatgttttatgtaactcttctcagaatatcaatacattaattattttagatgacatattaaataatctatgaatattaatgaaaacaatacagttgaagtgagtgttgtttaacatgatagtagctgaggataacaaacctcaaaaaatcaaagtattaattactcctttccaagtatatgtatagagcatgtgtcattgcttttataaaacggcacttaatagctttctttctaaaaggcaactgaactttctaaaaggtaaataaactgaacttgatattagtggttcggtgattccaaagcaaaaagctgagggattaagaaagaatagcttaagaatgaaatttgtctcatgttgctgggacaattgggatgaaagaagtagagaagaatgattcttcaggtgatgaccgttgctcattggttcagtcccaccctatgtcccaccatgctgtacctttagatgccttcacatttcatgatacatttgtgtcattacatcttccacacatcagagatctcattcctgtctaaaagccctttgccaaatttcacataagataatgttagtcttgaaggattctggtacatccccttcatcctagtacaatctcagcctgctttcagcaaggcctgaggaaaccggcattaatagccag

SEQ ID NO: 283493 - DNA, 1000 bp, Homo Sapiens
gccctgaagactcggctactgccttctgtgggagtttcgcttcgtacagaggacaagtttgtgctttggtttccagtgttttactttggagtttaggtgccatatcctgaggttttttttgtttttgtttttgtttctcctttatttaaagtttgctgtgtttgtaaccagtgtgtgttgagaaggaccaacaccaaaccaccctggggaagggggacagggaaacatttaacacagacgatgatcaggatttgccccaaaccaccccaagagagaggactgagtggaacaaaaaagtgacccccagaacctctcttagtgtgagggtgggtagaatgagaactgacacctgggagctgtggggagcagagcggctttggggaagagtggagtgactagacacctaatgccctggcagctggagactcaaactcctgtacagctaccttctgggaaatagtttttgacacctatttttcagattcttgtccggaatttctgctggctcttttcaaaaaagggcattaacaattctctggaaataaagcacctgttagcctgacatatgcaaaaagcagggcggcatcacccattacgagctcccccagccagcagtcagtattggattggccttgcctggctggtggcagtttgggagaaacagccaaagaggttagtttatttcaacaccaaattagaccatggcccatttccaacgggtctctttaaaggcctctatggaatacattgcctggtttccttctttgcagttcaccacagcaaggaatgtcacctccatcccaagccaccattttctcatgaaggcaaatccaagaagggcttgcagttcttgctgaagggggtaccatttgtgggcagagtgatcaataccatctagttgggggaggaggagcttatttcttggtgtacttgaatcagaaggtccctgcaagccagtatcgcttttcttacctaatcacagagtttgtgtagtgaattt

SEQ ID NO: 283494 - DNA, 1000 bp, Homo Sapiens
ctctttgaaagacctaagagccttgttcttcatagcaggtgctgatgcccaaagggcattataagaatctatagctccccccctcccggcacacacatgagataataaagtaaatacagagaaaatggatggaagggagggaaagcactcccagcctttgattcttggtagttatgttcaagtggggcacttctctttgaaaagtgaaaatgtttctcacggtacagaatttatgggcagacaaggagcaagacttaactgatcccagcaaacagttccttccttttcctaatccctggctgcttattttagccgcttctccgccccgccgggaataccattcggatcttagtccaggtagatctgacgtcaagagatggctttcgtcgatttgacgtgtaaacactcatttccattctggctgggaagggctggggctccactcagcctggagaccgaagcgcttcactgagcgctcgccgccgcccagcctctcctctcgcgcctcctagctcttcgcagagcaaccaggagccaggagtggtccagagcccgagggtgggaagggggagtctgtctggcttttctcctatcttgcttctttttcctcttcccttcccactcttgttcaagcgagtgtgtgagctatggagcgaagagcctggagtctgcagtgcactgctttcgtcctcttttgcgcttggtgtgcactgaacagtgcaaaagcgaaaaggcaatttgtcaatgaatgggcagcggagatccccgggggcccggaagcagcctcggccatcgccgaggagctgggctatgaccttttgggtcaggtaagagtttccactttcaagaaactttctggggccccaggggactggcgggactggagcgcggtcttccaagtgggagcccccaggtgcactctccagagcccagagtagcaaaagagcaaggagctgctccagcccctcgcccctgtcgcgcttggagagagagaaagctt

SEQ ID NO: 283495 - DNA, 1000 bp, Homo Sapiens
cacttggctgccgagccgagccgaatggctgctggcagtgcgatcgattcagcccgaggagaaggagcgcattggccagttcgtctttgcccgggacgctaaggcagccatggctggtcgtctgatgataaggaaattagttgcagagaaattgaatatcccttggaatcatattcgtttgcaaagaactgcaaaaggaaaaccagttcttgcaaaggactcatcgaatccttacccgaatttcaactttaacatctctcatcaaggagactatgcagtgcttgctgctgaacctgagctgcaagttggaattgatataatgaagactagttttccaggtcgtggttcaattccagaattctttcatattatgaaaagaaagtttaccaacaaagaatgggaaacaatcagaagctttaaggatgagtggactcagctggatatgttttataggaattgggcacttaaggaaagcttcataaaagccattggtgttggactaggatttgaattgcagcggcttgaatttgatctatctccattaaacttggatataggccaagtttataaagaaacacgtttattcctggatggagaggaagaaaaagaatgggcatttgaggaaagcaaaatagatgagcaccattttgttgcagttgctcttaggaaacccgatggatctagacatcaggatgttccatctcaggatgattccaaaccaacccagaggcaatttactattctcaactttaatgatttaatgtcatctgccgttcccatgacacctgaagatccttcattttgggactgtttttgcttcacagaagaaattccaatacgaaatggtacaaagtcatgatgattccctgagtaacaaagggaaatgaaaactgtttgtgatcttccgtattcactgaaaaataaatgcttgtttagtatcaaattttatttcacgaaagtttttttaaagaacagaaacttttccaattaaaaaaaaaaa

SEQ ID NO: 283496 - DNA, 978 bp, Homo Sapiens
tttttcaagatccagggggaaaaccaaccctgattttgtgtgagtatggggattggtcttgagcccctgaaagtgaggttcgggtctcacaagattgctgtgaagagttattgacccacctagaagagaagcctagcccagggcctggcgcacagttgatgggtttgcttcctggttattcttctgtccttgtctggagccctgcacgcctcttcgtagcttaggaagaacaagcttttccctgcggctcagggtgaggaagtgggagagaacaccagctccagggaggcttctagcaccagtcagcctcagttaacatccttgcaccttcattgactagctgtgtgaccttgcacgaataatcccccctctctgtgcctcagtttcttcatctgtaaaatggggatcataatagtacctctctcaaaggattgaggtgaggatgaaaggagtgaattccagggcatccctggaagaggcaggaaatccctcctagacaatagctatttttgcagccagacagatctgggtttgaattctgccaccagtgctaactactgtgtgatttggggcaagtgccttgacctctctggacagctgtttcctcatctggaaatgggcttggtaacagtcctggcttccaaagttggtagtgttcttctagtaagcaacctgtgtgaaacggtggaaccctgcccctggtgcagagaaaggcatgatgaccgtgttagggtctgtcctctctggaaccccctcctgggaatggcagagggcagtggggtgctctgagacagactgctgccctgtccccactccccctccccagctgccccgccccagctgtgacgaccttgtccctccctgtctaaggggcaggaaggaagtgaggagggcagccagcaacttccccttctctgccctgctccaggcaccaggctctttccccttcagtgtctcagaggaggggacggcagcacc

SEQ ID NO: 283497 - DNA, 1000 bp, Homo Sapiens
tatttatttgctttatttatttgttttatttgttgatttgctttatagattttcctccatccctttattttgagcctgtgcgtgtctctgcatgtgagatgggtttcctgaatacagcacactgatgggtcttaactctttatccaattggccagtctgtgtcttttacttggagcatttagcccatttacatttaaggttaatattgttatgtgtgaatttgatcctgtcattatgatgttagctggttattttgctcgttagttgatgcagtttctttttagccttgatggtctttacagtttggcatgtttttgcagcggctggtaccagttgttcctttccatgtttagtgcttccttcaggagctcttgtagggcaggcctggtggtgacaaaatctctcagcatttgcttgtctgtaaagtattttatttctccttcacttatgaagcttagtttggctggatatgaaattctgggttgaaaattctttcctttaagaatgttgaatattggcccccactctcttctggctggtagagtttctgcggagagatcagttgttagtcttctaggggttccctttgtcggtaacccgacctttctgtctggctgcccttaacattttttccttcatttcaactttggtgcatctgacaattatgtttcttggagttgctcttctcgaggagtatctttgtggcattctctgtatttccttaatttgaatgttggcctgcctttctggattggggaagttctcctggataatatcctgcagagttttttccaacttggttccattctccccgtcactttcaggtacaccagtcatacgtagatttggtttttttcacctagccccatatttcttggaggctttgttcatttctttttattctttttctctgaacttctgttctcacttaatttcattcatgtgatcttccatccctgataccctttcttccagttgatctaattggctcctgaagctt

SEQ ID NO: 283498 - DNA, 1000 bp, Homo Sapiens
gcgggtgtgcgtgcagtcacccctttacagaggaaacaagttttggcaaggccagatgcctgcctggatacccaggtttccaccctaggcggctgcgctccaggtctccactgctgagctgaatgccgctttcccacccacaggggccgagccaacccccagctgggagcatgtcctcttcaccgcctgccacaaccagcacctgcagctgcagcccccccgccgcaggctgcactcgtgggcggacgactggaaggccattctggacagcaagcggccctgctgagctggactgtgcttcgggctcctctgtggggctctgacctcagggctcccagctcggggcctgtggggccagtatgctggtctgggagtccctcctagactcctgggccccatgacctcctgctgcatgtcccttcccttccccagccctgccaggccttaacctgatcacggggcagggctgggccctctgggcgcttggacatagacacgtggtcccaggccgttcagcctgacctcaggcagcaggcaccaagctgccagaagcccaggggctcaggacagggaggagttgaggccactgttcagggggctggtggccgtctccactccctaggcaagttctctgaggcagaagggggttccctgttcccagagtctgcagccatcagcaaggaggaccaggaacccggcgactgaggtgcttccaggtggggacaagcccctcttggtctcagccacagcaccccttattccagctgccctgcccaacctgctcaccccacatgaccttctgtgtattcagcaaacactcactaggtgacagcggccaccaggctctgtgctgggggacgatactggccctggcctcgaccagcttagaggtttctcacacctctgttcccagggccccgctcagggcccagcagagagtccgtaggcttgaacatgtgttgagtgcatgaaaaataaatgctgttcatgtgtgtagctc

SEQ ID NO: 283499 - DNA, 302 bp, Homo Sapiens
  misc_feature (152)..(152): n is a, c, g, or t
  misc_feature (164)..(164): n is a, c, g, or t
  misc_feature (230)..(230): n is a, c, g, or t
  misc_feature (238)..(242): n is a, c, g, or t
  misc_feature (289)..(289): n is a, c, g, or t
tgtgcagccatcaccaccatccatctccagaactttttcatcttcccaaactgaaactctgtacccattaaacactaactccccactcccccctctccccagcccctggcaaccaccattctactttctgtctctatgaatttgactactcnaggtacctcatntaagtggaatcatacagtatttgtccttttgtgactggcttatttcacttagcataatgtcctcangcttcatnnnnnccatgttgtagcatgtgtcagaatttccttcctttttaaggctgaanaatattccatgtt

SEQ ID NO: 283500 - DNA, 1000 bp, Homo Sapiens
tgactatattcatgcactgtgcttctagtttgtaaggcatgttctcatacattttatgggcactgtactaatgaagagctttgaacaagttcatagactaagtacgtagatgattcagggttcaaacccagttttcagactccaagtccaatgctgttggcaccaatacacactggaaggttccatcctgatgctcacataagtaatacactcagacaatagatgagatctgctcttatctccttattaattaccttgtgaaggtcaaaacttaactactagcttctttgtgctgttatttagactccccggggactgccaccttgccttgagtctccaacatggctggcatccctggacggtagaaattacatcttgcacatcatttatttccaaaggatgtccagcaatgctctggaggcacagcaatgctcagaggccagcaacaatctcccttggccatgcaatattccccagctgttctcatccacatagaactggctcatcttcaaatcaggtatgcagtaggtgctcaaaaaacacatgatagttgagaaaatatggagcaaatgcaatcgtgggctgcaggatacctatacccacccccttgacaatatcattcctcctcttgaatttgggacgtgggtcagtcctgggaacaagagatggcttgagcatgtttggatccatgtcttccagcagccatgggaatcaactgcagaccctttgaacatgacatgccactcaatttttttggtgtgatggaaaatcccacacccccataatggccctgtctccaacccttccaccctcaggttgtctctcaatccttgatgtcaactgccaacctctcagaccaaggcttgggactttgccatatgggatgcctttgattacagtgggggtcactatgaacaaggattgcagagttgttcagaggagattaaaaacctgccccatcaggcagccagtgcatgcccaagccaagaagaaagctaag

SEQ ID NO: 283501 - DNA, 312 bp, Homo Sapiens
aaaatatatgttgtgttttgaggacttgggagttaaattcataacacataggttcttttaagtttttccacatacgtactacctttaattgtgagctttttgtctttcaacagaaatgacaccaaagaagatgtatttgtacatcaggtaagagggattataaatactacatttgctatgtgaggagagggtgtgtaatcttctgtcagccctttcccaaaagtaagtcctatggattattattttaatctaaactctttctgtgatttattttgcaacaggagttcagttccacattttaagattggcaaa

SEQ ID NO: 283502 - DNA, 1000 bp, Homo Sapiens
atgtgtctaaatgagcatgacaggaactaaacgaaactgattaaatgtatgagaaatagaaactgatttctggatgatctttatactaattgcagctttcaggctactaggtggcatagtgttaattaggactccccaagatatggggagttctactctcaatggtcttgtttctttgctttctacattagttaaccagttttataccaaaaaatgcatgtttgaggaattgtctgaaattgggacaaaacaccttcatgtaaaccagctttgcaaaattttccagcccagatactcttcatctattcaaatggattgtcttattctgagcaaagacctgttgttaatcttcaagctaggttttgcagttcccaaccacaacattcttctattttgccaggctggtgcaaagtaattaaagatgtcaatcagaaatgtcaatgagactaaagtggttttgtaaatctcagctatatttagcaacactccatgtagctaatattttttggtagcatctggtagaccttagaatgttacatagccagtaggttctttattcaaattttaagtatcttaagaatagtagggcagtaacagttacttttgagagttttctggtcaagcttttaccaggcattctctagccttggtacaaaaaaaaaaaaaacctgctggttgcgcagatacctaggcttgtccattttatgcatttcagcaaagtcattggagactattgcaacttgggaatactggtctgcatcaagtttaattcggtagtttgaccgctagtatgttggaagttatttggattgtttttggaattttgactggctgaattatggttggtataaagttatgtgtataactggcaggcttatttatctgttgcacttggttagctttaattgttctgtattatttaaagataagtttactcaacaataaatctgcagagattgaacaaataatcctgatacttaatttttggaagtgggagctc

SEQ ID NO: 283503 - DNA, 1000 bp, Homo Sapiens
ctctcgcctgacctccctctcaaggacaggaaaggagcagagacgcactctgagccttattaggaagacctcagggactcccactgaatccactgtggctacagcggctgcttccaccactgaagtcccctccaggcttccctgggcagccagggcggggtttaagaggacgacaggtgtctgtattgctctacctacctaacaaggctgtgcagggtgaagagtgctgctccgtgggaaggcgctgggaccaaggccgaagcactggacaaagagagctatgagcactacctgtaaacaaagggcacagaatgtcagcctcagggggagttcaaggtcatctggtcaaatccccatttgatgtttcaacccctttcctcccctccaccaggggtcacacaatcagtacttgcacacatccagcaacaccgcactcactacctgccaaggctgcaagacctgctgctggagggtttggctgcgtaaaagaattgtcctaaggatgcactaaaatctctctcttcttatgccttgtacctgctggtattagctctgcctccttttgggtcagccagaacaggtctgtccccctctttcctgatggctctttagagatttgaagacagtgatcctgggcccctcaagtcttctacaaattgtgcaccccctttcctccagctcttcctgagaccagggtttccggttcgctcaccctgttccctgatctgctccagatgaaacctgtccctactgacagcacaagacccagaattagacaatcagtcaagctctatccaggacagggcaagcaggactctcacctccttcattagagatatcatgcttctattaattgagcctaaaatcccatttgcatttaaggcagccctattgcatggctgaattcagtttacagtcaacttcagagctgtacgttagtactctgaagttatataaactgggccctcacttaactgtgtaacttgagcaagcaaaaaaa

SEQ ID NO: 283504 - DNA, 1000 bp, Homo Sapiens
ccccgcaagtctttctctgagtgactccagcaattagccaaggctcctgtacccaggcaggacctctgcgctctgagctccattctccttcaagacctccccaacttcccaggttgaactacagcagaagcctttagaaagggcaggaggccggctctcgaggtcctcacctgaagtgagcatgccagccactgcaggaacgccccgggacaggaatgcccatttgtgcaacgaaccctgactccttcctcaccctgacttctccccctccctacccgcgcgcaggccaagttgctgaatcaatggagccctccccaacccgggcgttccccagcgaggcttccttcccatcctcctgaccaccggggcttttcgtgagctcgtctctgatctcgcgcaagagtgacacacaggtgttcaaagacgcttctggggagtgagggaagcggtttacgagtgacttggctggagcctcaggggcgggcactggcacggaacacaccctgaggccagccctggctgcccaggcggagctgcctcttctcccgcgggttggtggacccgctcagtacggagttggggaagctctttcacttcggaggattgctcaacaaccatgctgggcatctggaccctcctacctctggtgagccctctcctgcccgggtggaggcttaccccgtcttagtcccggggataggcaaagtggggcgggcgcgggacgcgtgcgggattgcggcggcagcggcgcacgcgggcacctgggagcggcgggctgctgcgggaggcgttggagactggctcccgggggctgttaggaccttccctcaggcccgggtgctcagaacgctggaggacttgcttttcttgggccttgatgcgaagtgctgaccccgctgggcaggcggggcagctccggcgctcctcggagaccactgcgctccacgttgaggtgggcgtggggggcggacaggaattgaagcggaagtctgggaagctt

SEQ ID NO: 283505 - DNA, 285 bp, Homo Sapiens
atggacacgtccccccacactctttcaggacatgagtgcattggtggctgcccgcatgcggcacatccccttggccccagggtcagactggcgcgatctgcccaacatcgaggtgcggctctcagacggcaccatggccaggaagctgcggtatacccaccatgacaggaagaacggccgcagcagctctggggccctccgtggggtctgctcctgcgtggaaggtgggtcctgtaagttgtggttcccggtggctgaggggaaggaaggcagacctgggccttt

SEQ ID NO: 283506 - DNA, 1000 bp, Homo Sapiens
ggatgtttagcagtgtccctggtccttacccactggatgctggtaacaccccctcagttgtgacaaccaaaaatgtccttagatgttaccaaatctcccgtggtcgagaatcattgccctagcggctgagtgctgtggccacatcctccctatgacacttgtacctgccaagcaccaaacccattatccctcacgttcatgctctcggagcttttgtttcaggctatcctttatgttcatacttaccggacttcctcaaaacaaaaaaatgctggcaggagcaaaagaggatgaggcccccacgttccccgtatgccttaatctcccctctactctgaatgttatcagggagggcaacattgcagagagtttttgtgccacgccttggaatcggacaatactgggttttaaggctggatcagtcacatactagccttgtgtcctagggaaagtttcttaacctatgaaacctcagttttctcatcagggagaataataattactaatatatatttcatatggtggttgtaagggttaaatgacatactgtgtataaagcatagtgcttggatgtaataagtgtttaataaatacccattacgtcacatttgtttgttaaatggctggaacattccacttggggaatgctttgagttcctagggaaaaaaaaaatatgtttaggtgacattacatgtaattaccaagttggttaaaaaagtgagattcgtgaattttaagcagattatctcagcaaaaggccgtgaacttaagttgtgatctggatgttagtagttgccattgagaataaatatatgatgtccaccactgaatttgctcaatgtctctggttcgctaaaagaatgcagttacttcatcttagctgaagatcagccattaaccatgacacagggctatggatagaatagtgcaggtttatctctgtgagtgtgggaaggaaatggtaagaacggtatatgccagtggctagagggtgaattc

SEQ ID NO: 283507 - DNA, 1000 bp, Homo Sapiens
gtagttactaaaattatgttactgtatttttcagaaatcaaactgcttatgaaaagtactaatagaacttgttaacctttctaaccttcacgattaactgtgaaatgtacgtcatttgtgcaagaccgtttgtccacttcattttgtataatcacagttgtgttcctgacactcaataaacagtcattggaaagagtgccagtcagcagtcatgcacgctgattgggtgtgtacatctgtgttggtttggaggaggggggttattatcaagaaatacaagctgaacatcgtatctgaattaaataacaagggttatgtaagtgggttattaaatatgactaaacggtcacaatcttactcttacatgactgataccacctcttaaccagatactatcaacccaatttgcaggtgtttaaaggcagtttttcccccagataggtggtgcttccacaaaactttagtgattccaagattactttagtgaaacgaggaattataagaggatttacattaaaataggatttaattaatgaaaaaaaaactttactcagattttctacctcttacataaatgaagtcaggtcaacttgatgtatttttttgttaatgtaataacctttgatatgcctgatagtaaagaggtgagatgctaattgtttcagaccgatttctccggagtaaatcaaagtttacaagaaataacaggtattaagattttaggaagtaattgtttagtggtaaagcagttttaaaataggatatacaggatgagcctgtttatataacactttatatatgtacttatgcataactagatacacatctagaatatcaaaagatgactgggaggatattaaccaaaatgctgactgtagttcctactggataatggcaagtgctattttaattttgagaggacaaaacttagtagccattggacattaatgagactctatttttagaaatactataaaaaaataaagtccaggttggatcc

SEQ ID NO: 283508 - DNA, 1000 bp, Homo Sapiens
tctgcacttcttgcaaggtaacttgaatcatcacttatttctctgccacctggttttaggactggcactctataaatgacgctgactttgtatagaaggattttgctaagggggcaaaaagcccagataccattttaactggcccagctcattttctcctttcattttacaaaagaaatcatgcagaagcatcaattaaaactgatttatttatgttggtacatccaacaaaatagttggagccacaaggcccttgtctttttaaaaaaacaaaatattttgaagatggtgaaagtgactgattttaataatgagataggtcacttaaaataacagtgcctttgaccttaaaacatggcactggcccatgtgacctttgccatttcccagtacttccctttacagtctgcagcctataaacagtggtgtctcaaagcaaaggaaacctccacaagtgctgcaacagtgcattagtttttatgtagcaatttgtttataaaaattcccatcccataatgcatgaccttcctaaaaatacccacagcctccataggcaaggtgagctttctgtgctacccactggttagattccagccacctcagggattctgatccatgtcattaacgaccatcccagggtgtgagggcctgattaaagcttatcgaactagacatttgtttattagatgagctcggcattattattttctcaataactggtagaagggaaattttaaacataacactcaacccaaacaaaactacttcgtgaggctttcagcaaaaaggctgcttaaaagcatgaacccgggatgcagagcagcttttgtgcacggttccacttactgtaattgtttctggttctttcctctaacaccttccatgtatgtcaactttttatcaccgtcaggcatagactcgtggagattagtcattatagctcagacctaagctaattatttaaaataaatacatgtaaaggccactgccacattctcag

SEQ ID NO: 283509 - DNA, 256 bp, Homo Sapiens
kaactccctttaaactttattcttttttgtatgtagcttctggcaagtatgaggcaaggatttcacagaagaacttggagcaaaaattcccactgtcatagctataggctgtccagtcttgagggagctgcaggaacaggaaaaaggtgagatctccccagaaaatcattggcatttatggtgagaagcattcctgttgtatatctggtttgagagaaaatagctccaacaactgtatcatgatcatttgcatcga

SEQ ID NO: 283510 - DNA, 812 bp, Homo Sapiens
tctaccaggtgcaagtacaaggaatgactggaaatattcaatttgacacttatggacgtaggacaaattataccatcgatgtgtatgaaatgaaagtcagtggctctcgaaaagtaagtaaccaaaacagacatttaaagaaaaggactcttgaaagaggacagcatttggatgttagaaaataagtattattattttacaaaatatcagtaaggatgagtgggagatgggaacctccaggatgaaggaatagcacacctatgtgtcagtgttgggggtcctggtgggaattacaagacccggggagacaggatgtcaatccttatagagctcaagaaagttttgttccacaacagcacttcaatttcatgcagtacttttctgagggaaaaataggcatccaggtcaaatgtcttctctttctaggctggctactggaacgagtatgaaaggtttgtgcctttctcagatcagcaaatcagcaatgacagtgcatcctcagagaatcggaccatagtagtgactaccattctggtaagtgtgaacagaaggtaggtgggctttctgtccagcaagacttctgttttctgaaaagtatttttccaccagtagaaaagacctcaagttcaaacagtaaaaacttccaacagggaagctcaggaaactctcaaagtatcttgccatgatgatgaacagaatgtcatttaacaaaaagagagaaagaaaaagaataggaatttagaacagttttagattatcattttcctctttctccccgcctccatgcccgcccgcataggactgatgcttca

SEQ ID NO: 283511 - DNA, 1000 bp, Homo Sapiens
gagagatacattatgcttgtgtttgctcttttgttcccctgaacacatgatgtcttatttagtggttgaacactgtgttaaacatttggggatactaagaggcataaggaatgagaagcaaaactgtcaacagaaacataatctatcatcttgctggtcattgtgaaacatcagccagttgccagagctgagtgctaacacttacacaatgtttagttattttacaacttagaactgtcctatactgttgtgatgtgttatgatgccctactgcctttgttttcctcaagaactaatcgccttgttcatttttcttaggacaagaccagtgctctaagcctgagcaatgtggcaggcgtgttctatatacttgtcggaggtctgggtctggccatgatggtggctttgatagaattctgttacaaatctcgggcagagtccaaacgcatgaaactcacaaagaacacccaaaactttaagcctgctcctgccaccaacactcagaattacgctacatacagagaaggctacaacgtgtatggaacagaaagtgttaagatctaggggtacggttaaggtctagtaaactaatcagccttacgtttctgtgtgttaaccttttgttgttgttccttcgtgtgttttttttttcctttggtttgattttagcattgtctctttgctactatttaattatctgtaaacaatgattgtgtgctcttgtcagtgagcagtgctcttctaaaggcagaattagaattaagttatggtctgtgacacaaaaggagaaaaaaacaaaaattcttagagcagtactgtccaatacaaatgtatgtgagtagcattgtgagccacatgaataacatttaactgttctggtagttaaagttttaaaagtaaaataagtgaagttaatcccaatgactcatttcactgaggccaagatatcaaaataccatttcaatgttgtcaattaaacaagaatattaaaaatgaatga

SEQ ID NO: 283512 - DNA, 1000 bp, Homo Sapiens
cctggcctcgtttcccaacatttttattgtgaaacacattaaacatattgcgatgttgagaggagttcacagtgaacactcgtatacccgctccctaaattttaccgaaacattttactatatttccatctctccatcttgcttcaggagcacctcaaattaaactgcagacatcagtacttcctgggggctttttttttttttttttgagacggagtctcactctgtcaccaaggctggagtgcagtggtgtgatgtcagctcactgcaacttccacctcctgggttcaggcgattctcatacctcagcctcctgtgtagctgggattacaggcatgtgccaccacacctaatttttgtatttttagtagagacggggtttcactatgttggccaggctggtcttgaaattcaggtgatccacccgccttggcctcccgaagtgctgggattataggcgtgagccaccacacctggcccccggggggctatttttaaagcacttttctaaagtacatggctgatctaggcaggcatcttggaaactactctgcgttgacttgggcattgtctatttcttcctctgctgccctcgccagaccctgcgggagattgtgattggcgtcctgcaccaattgaaaaaccagctttactgaccggttcttggaaacctggagaacagccaacaagaggcccttgaatctctacgtggccactgaactgctgggcccgggagactggactacaacacctcacactggtcagctggtttctacttggtgtttggtttttcccagccccattttatcttcagcggagccgcggtgtttgttttgtgaaagcttctgattaatttattatattgacgataaaactcaaacctacccagccttccccccactccatggaagtccttgggatgggcgtctgctctggacaccccaaagagctcctgccctctcagccctttattcaagcctcagatttctgctcatgatcc

SEQ ID NO: 283513 - DNA, 162 bp, Homo Sapiens
aagggaaagattagggtcaagagtatgatttaggagactgtgcaccattcatatgcaagtggatgcacaattcctgaggcagtgccacagggagggatggagaggctggactcaagagtcagtgcaggagaatatctaaacttggtgcttgagcgatggcgg

SEQ ID NO: 283514 - DNA, 1000 bp, Homo Sapiens
tagctgtttttcttgaagtgacaggctcactttgttcgtttttgagaaaatttctgccagatagcccgagtctaaataaccatagttttgtctgtcagtcgtttttttttttcaagtaaaaatagtgttctatgaaaagtggctaatttagctcaaaactcagatacagaagtgctttttcccgagaccatcgtcatactttggcgtgcacagaagtacttgatgtgtacttcccattttcttgctcaacataataaagagatgtgtgctctaggggctgaattcaataaaattaataatttttactgcttcatcaagaacattccgatgtttcatttcctgtgttttatggttgatttgcttatttacttgtttgtttatttctcttccccagccccccactgagactggggagatacaataacctccagtaccattcggtgccaggggcttgatttctcctaaggcaccagcagtttttcccaccattgcttttgtaccattcgcgcacatgtcaacacagtgaaaaagacaaatgacgtctttgtattattatgaaagtagctttgacctcagtggagatccctgaaagggtctcgtggaccccccagggatctggagacagcactcagagagtcacaggtctaagctgttctctctggttgagcatttaggttctttctggtttcttccttcgatgaagtccttgtgtctgccctaggacagggccatgttgattgccagccttcgcgtaggaaagcctagcccgcctagagaacgggaagggctgtggcccaggtgtgtgctaggtgccctccgtgtggcagtggcgggtgctgtggcagctcctcctctcctctcctgacagagtagtgagtcagtcaccctggacctgctgacctacacagacctggagtccctgcggaaccgcaagatggggggccgcccaggctccttggcccccaggtcggcccagctcaactccaagcgctacctgatc

SEQ ID NO: 283515 - DNA, 1000 bp, Homo Sapiens
  misc_feature (632)..(632): n is a, c, g, or t
  misc_feature (847)..(847): n is a, c, g, or t
  misc_feature (849)..(849): n is a, c, g, or t
gtattgatacttaggatttttttattgccgaatactattccattgcatggaaaagacctattttatttctaggttcaccagttgagggacatttggattgttcccacttcttgggctgttaggaataatgttgctctgaacatgtaaataaagatctttgtgttcacatatgtttttcattttctgttggggagattccctaggctagaaattgctgggccatatgaaaaatcaatagttagctttgtaagaaacagtcaaactgttttcccaacgtgacattttatattcccaccaggaatgtttaaaactagtgtcttcaaatcctcaccaacatccaggattgtgtctttatgattatagccatttttgtaggtacaaagtggcatctcatggtggttttaatttgcatttccataatatctaattaggttgagctttttttatgtgcttattggccatttgtttgactttgtttggtgaaatgtatacaaatcatttgctcatttttaatttgggttgtctgtcttgtcttctcattttattgagttaaatgagttcttaataatctctggcttacaagtccttaatttatcaaatatatgatacgtggacatttcctcatagtctgnggtttcttttaattttgttattagtctttttagaacatatataataatttttaaaagatataatttaataccataaaatctgcatatttaaagtacaattcattggttttagtgtattcacagagttgtgtagacacctccactgtctaattttagaacatttataacaccccaaaagaaattctatactcattaacaatcactccccatgcctntnttccccaactcatagaaataaatattctgttgtctgtctctgtgaacttgcgcattctggacatttcatataaatggcatcatataacatgtggccttttgaaacatgattctttcactttgcctaacaattttaagttacattcaatttg

SEQ ID NO: 283516 - DNA, 1000 bp, Homo Sapiens
atctcatttaatttgcatttccctgatcactaatgggaaagagtactttttcaagtgtttttggcctttgaggtatcctcttttgtgaagtgccttatcaagcctgcctttttttttttatcaaatacattttaaaaataggctgggtttgcctggcatttcttttgagatggagtctcactctgtagaccaggctagagtgcaatggcatgatctcggctcactgcaatccccacttccgagggttcaagtgattctcctgcctcagcttcccaagtagttgggattacaggtatgtgccatcacacctggctaatttttgtatttttagtagagagggggtttcaccatgttggcctggctggtcttgaactcctgacctcagatgatccacctgcctcagcctcccaaagtgctgggattacaggcgtgagccaccgtgcctggcctacttgctgcttttttcttaaaaaaacccaaaaactttaagcgtttctttttctgtgggaaggcaagcatcaaattatcctacccaggataaatacaccatgttatgtcagaagcagtcaacattgttccttaaccttaggggaggggtcagaattgctgttatgatcactcttttattccagtaagaatagatgttagacttttgttaatcagaacacgctaacactccgcatattctaagagcagttatgaagggcctgggactttgcttaggatactttcttgtattatgtgccgatcttcaattacagaccctgcaggcatcccatgtgctcctggactttctaggtgctgggtgctgggtgctgggtgttttttttttttgttttgttttgtttttgagacggagtcttgctctgttgcccaggttggagtgcagtgatgcaatctcggcttactgcagcctctgtctcccaggttcaagtgatacttctacctcagcctcccaagtagctgggattacaggcacccaccaccatgcccagataag

SEQ ID NO: 283517 - DNA, 1000 bp, Homo Sapiens
caaggtcacaccactgcactccagcctgggcaacagagtgagactctgtcttaaaaaaagaaaaaaaagaaaaaaagaaaagaaaaaaaaaagaaaaaaaagtatatggaagtcagatgtccttcagtaatagagaagtagaagaatttttgtaagcccgtacattcaaagaaaaaatggttagaaaaattaaagacctggaaacagtcttctagggaacaattataaaatttagagatatttagtttagggaagagaaaactagtttggtaatggtagtgtggggcgaacagagaggttttatctggaggggaggatgtttagaactggcaggaatcatgtggaataaatatgtgatttacttttgtgagacctcacagatacgaatccccagagctctaagatgaaaggtcaatcaattagaaggtccaacaatagctcaggcatcagctgagatggaaacctggtggcgaaggcagaggcatcaggagcaaaagatgcaacaatagttttgagtttaatttcaggggttcactgtaacaccccacgagatctgtaaaaactgtaaggacagatatttttcctttctgttgtatccttagtgattcaacagtaatcaataaatatttgatgaattaatgactaagtgaatgtataaatgaatgaaagacagagaaaagattataaatctcaaacctctccaactttaaatgaagctgttatttttccccctgtttttctcccatagtcacttttcatcagtgaagtttaagctgatatattttttttaatctctactgcaggaaacgccagacttctatcctcattcaaaaatctgggccttgctgagaaccaaggttttgaaatcccatcaggtcaccgcgaggcctgactggccttattgttgaataaatgtatctgaatatcccctgttgtttccatttgctttttcctcaaaggtatgtttgattataccagggtcaggggactttggtaagac

SEQ ID NO: 283518 - DNA, 1000 bp, Homo Sapiens
agcattataaacttatgcataacaagcaataacaagtgaggtgaagacaggtactccacaaaaattctcactgtaatttcttggaaataagtgtatagcgtaggcaaaagaatacaaactggacatctttcgtattgcttcatgacaagacctgttagaaaaaaacaacagagctatgcaaatctcagatacctatagctcatttttccaaatcattgaaaattcatttggcttcatatgcctaaaggagtttacaagtctggtgtatcactgtgttttgttgctgtaagtaaaatccaagctacaatttcccaaaagccccaaaataaaccacacgagcaaactaaaaataaaaatatgcactttggcacgtcacgggagagttaattagaaaaaccatgctagcacgcatactggaaaatggcaagtcacgggactgaacgctgcccacagaagtgttcttgtttgctctacatggggcttttacattttgaatgtctgtaattggagtatcatgttccttgtttctcccgttaattacctgagtggctactggatgcatttgtgtttgagatctggagagagttataagtagctctctgcagaatatattggtcttattttctaatacaataaatagttgattccaaaggaggtagtgtcaacttcaagatctccagtaaattactttatcttttaatatttcttggaaaaaaaatatttcataatatctcatgaaatgaactatttctgtttaatgccaaatttgtaattctatgatgaacagtttcagaaaaagtttgacacatttcaaaatttaacagaaacagtttgcatgttactttcttatgtattaggtattgtgctgatttggacctgtttacaagaattgttattatcaattatcattaactttaattcagttcatgagagtttgggaaaaccaggccagatcttagacgtactaaattcaaaaacttgaaaatccactttttccccc

SEQ ID NO: 283519 - DNA, 1000 bp, Homo Sapiens
aggtgcccaccaccaggccaaactacttttttgtatttttagtagagatggggtttcaccatgttggccaggctggtcttgatcacctcaggtgatctgcccaccttggcctcccaaagtgctgggattataggcatgagccactgtgcccagcctttatttttttattatttattattatttttttgagatagggtctcactctgtcacccaggctggagtgcagtggtgcaggcttggctcactgcaacctctgcctcccaggctcaggtgatcctcctgcctcagcctcccaagtagctgggactacatgtgtatgccaccatgcctgcctaatttttgtagagacagggtttcaccatgttgctcaggctggtctcgaactcctgggctcaagtgattctcctgctccagcctcccaaagtgctgggattacaggcataagtcactgcacccggcctgccaggttcttttaaacaaccagcttttgcatgaatgaacagagcgtgaatgccttcattaccgcaaagatggcgccaaagcctcatgagggattgccccatgacccaaaaacctcccactaggcccacatccatcattggggatcacatttcaacatgagatttggaggggacaaacatccaaacgatatgacactgttactatgggccccattttccagatgaggatggaggcccagaggcagcaccgtatagtcgccgatgccatggattcagatttggctctgcaatttgcactgtgtgaacttcaacaagccatttaaactctcaaggcctcagtctcctcatctgcaaaatgggtagctctaacccctgcctcacagggttgttgggaggttcaatgaattgccatttgtaaagcacacagaacagttcccggcacacagcaaacgattaataagtgtttaagagaaaacaggccaggtatggtggctcgagcctgtaatcccagcactttgggaggctgaggtgggcagatc

SEQ ID NO: 283520 - DNA, 1000 bp, Homo Sapiens
actactatgaagagagctacttcaccaccaggacttatggggagcccgagtctgccggcccgtccagggctgtccgccagtcagtgacttcattcccagatgctgacgctttccatcaccaggtgagctggctggcaggcgtcctgtacttgggtacaacctaggggatcgcggctgtgtttggataaatccaggggggcactgggtacaaatggtggctcttgggcctccggggagactctgtgtgactagagcacctggtctgggatctaggctcagactcttcctgagagtcctgggggcaaaaggggatgctggggcatgagcacaagtggcaaggcccatggataaagggctgaacaccagagccattcaggagggtgtgggttcctggcctctaaccaaaggtcagaggggactggctggggaagtttggactgagggacatgacaggccatggtggccctgccagccagtcccctcgccctgactctcttctgcaggtgcatgatgacgatcttttgtcttcttctgaagaggagtgcaaggataggtgcgtagtgggggagcccagggacgggctggttctgggtccaggctcctggcccacttgctcccctcttttgcctcagggaacgccccatgtacggccgggacagtgcctaccagagcatcacgcactaccgccctgtttcagcctccaggagctccctggacctgtcctattatcctacttcctcctccacctcttttatgtcctcctcatcatcttcctcttcatggctcacccgccgtgccatccggcctgaaaaccgtgctcctggggctgggctgggccaggatcgccaggtcccgctctggggccagctgctgcttttcctggtctttgtgatcgtcctcttcttcatttaccacttcatgcaggctgaagaaggcaaccccttctagagggagccatgagggtctgggcttcagagctaggtctttggggaagtcctgg

SEQ ID NO: 283521 - DNA, 1000 bp, Homo Sapiens
agcatttaaagcagaggaagcattctgagggtcttgagtgatgctaaacctcctgggtactttgaagtcacggttttgtaagagctgacaactgactagctttttcttttcagctcttggagaaggcaaagacaactttgtacagtgccctgttgaagcactcaaatgggaagaaaggaaatgtctcatcctggaagaaatcctggcctaccagcctgatatattgtgcctccaagaggtggaccactattttgacaccttccagccactcctcagtagactaggctatcaaggcacgtttttccccaaaccctggtcaccttgtctagatgtagaacacaacaatggaccagatggttgtgccttattttttcttcaaaaccgattcaagctagtcaacagtgccaatattaggctgacagccatgacattgaaaaccaaccaggtgaccattgcacagaccctggagtgcaaggagtcaggccgacagttctgcatcgctgttacccatctaaaagcacgcactggctgggagcggtttcgatcagctcaaggctgtgacctccttcagaacctgcaaaacatcacccaaggagccaagattccccttattgtgtgtggggacttcaatgcagagccaacagaagaggtctacaaacactttgcttcctccagcctcaacctgaacagcgcctacaagctgctgagtgctgatgggcagtcagaacccccatacactacctggaagatccggacctcaggggagtgcaggcacaccctggattacatctggtattctaaacatgctctaaatgtaaggtcagctctcgatctgctcactgaagaacagattggacccaacaggttaccttccttcaattatccttcagaccacctgtctctagtgtgtgacttcagctttactgaggaatctgatggactttcataaatacttgcttttgtctttttctcgtgccgaattcttgcctcgagggggccc

SEQ ID NO: 283522 - DNA, 1000 bp, Homo Sapiens
actggcttttaagcggctcaaaagtttgctgcacctggatgctttgcgtgcaaaggaacctgaactcgcgaaagcgtggatatttgctaatctactcgccgcatttttaattgacgacataatccagccatcgctggatttcccccccagaagtgccggatccgaaaagaagaactaactcgttgtggagaataacaaaaatggtcatctggagcttacaggtggccattcgtgggacagtatccctgacagcctacaaaacgcaattgaagaacgcgaggcatcgtcttaacgaggcaccgaggcgtcgcattcttcagatggttcaacccttaagttagcgcttatggggtcagccccccgcctggccagccgccccgtccgggaggtgaggggcgcctctgcccggccgcccctactgggaagtgaggagcccctctgcccggccaccaccctgtctgggaggtgtaaccaacagctcattgagaacgggccatgatgacaatggcggttttgtggaatagaaagcggggaaaggtggggaaaagattgagaaatcggatggttgccgtgtctgtgtagaaagaggtagacatgggagacttttcattttgttctgtactaagaaaaattcttctgccttgggatcctgttgatctgtgaccttacccccaaccctgtgctctctgaaacatgtgctgtatccactcagggttgaatggattaagggcggtgcaagttgtgctttgttaaacagatgcttgaaggcagcatgctccttaagagtcatcaccactccctaatcgcaagtacccagggacacaaacactgcggaaggccgcagggtcctctgcctaggaaaaccagagacctttgttcacgtgtttatctgctgaccttccctccactattgtcctgtgaccctgccaaatccccctctgcgagaaacacccaagaatgatcaataaaaaaaaataaataaataaaaaaaaaaaaaaaa

SEQ ID NO: 283523 - DNA, 1000 bp, Homo Sapiens
gttccaaccttccctctccaaaacccagtactgctcctctacctttcaaacctggttgggccagaactgattacatggccaactcttggctcacactgggcttgcactgggccatttctttgctctggttcagagcctctgcagaagtgagctaactttggatcagtagctccaacacttggctccagtgctggcaggttacccctcaaccatagcagctgggatctttgtggcttgggggtgcttgtgtaagttcttggttatgtgccctcagccaccaggatatgaaccgtgtctgcagagcttcactttagtgagcttacaagtttttaaatttttacttctagttacatttacttgaatcagaacgttgtttcctcattcctactgcttaaacaccttgacaagtcctaggggttaacaaaggttagcatggctatggtccatccctgtgctctagttagagcgtgaagacacctgactttccagttgtctctctccatgaccagcaacaggaaccactgacgctgaactttggacagtggcctcagactctggctgccagcacacaacctgccatcatcgatgttaaacatgctgacatgtgcagaggagtttcctccctgaaatgctctgaaattcacttctctgcctggggattctgttataaaccttctgcctacattggctttcactgtggaagttgatttctaaaactctgatgagctcacaacgttgacatgtatatgcgttttttgtgagtgcttcctgctcaaagtgggagagattttactggaaatgcaataaagtttgcattttattgctaccgatgcccaccacaaaagcgttaacctcagaaagctataagaagcatcaaaagattgccatagccccctgtaagagcttctgaacattgtccaaatgaaaggaggctcagctgaattctaattttcctaaagacccatgtttttagcatctatgagctttctacaaatctccc

SEQ ID NO: 283524 - DNA, 1000 bp, Homo Sapiens
ctgtgtaaatctaactacaaggacaatgccttgggagagattttgtcgggacagagaggagttgccagggaagaaggtttgaaagatacggttgtctagaggtgagaccaaaggatccagagacttggggaccagaggtgacagtggatgacgtgaagccacaggagccccacccccatgcagcctcttccccacccccccccaccacgcgctcaatcatgagtacctcaaaggattgttgggcttgggggaaaagaggtggattcctgggcaagaacctaaagtagcaggactcggaattctcgggaaattattatgactcaataaaagaattcacaccttaggtgtgggagtaagaacagccacttctctgccttttctttcttggaattttcctttctcacttctatttcaggctttctatgtgtcagggcagggccagatccagccccacatgcctacacttcatctgccccctctcaccctgtttaattgcaggcaagtagctttatttttttagggttccagctcctgcttctgcaaaaggcagggttgaaccagacgaccgacttccaagcttaagactgtacatttttcgaattgataatggggacccaaaatgccactatctttttctacttcttggcagccttgcgtagctctgatgattgtcaggactgggttcaaacctcaccccattctaccttactaaccacctagccacagggaatccttgcaccttggtgtgctaccagagaagtgggaataacaatcgctgcttcacaggcttgttgtgagggttgacctaaaactccttggaaagcagacatgtggtgtgcacctgctacctgggaggcttaagcgagaggactgcttgagcccagagttcaggctgcagtgagccatgactgcacctgtgaataatgactgcactccagccttggcaacagagcataactccttctctgaaacaaaacaaacaaaaatcgttggcatacag

SEQ ID NO: 283525 - DNA, 1000 bp, Homo Sapiens
agacataggcttcccaccttccaggccaggaaacatccccagttatcactctggatcagggtgctgaggtctgaaggtgtgctactctttatcgtgttctgaggccatggaaactatattctaaggggtttggaaacttattagcttagactaataagcctggtgaatgtgctgctatctgaggaaatgcagctgctgggctgggagtcagaaatgaatagatatttttctttttcatgattattcaatagcttttttgtgtgtgtgtgtgacggagccttggtctgtcgcccaggctggagtgcagtggcatgatctcggctcactgcaatctccgcctcccgggttcaagcagttctcctgtctcggcctcccgagtagctgggactacagacacccgccaccatgcttggctaatttttgtatttttagtagagacggggtttcaccgtattggtcaggctgctctcaaactcctgacctcaggtgatccacccgcctcggcctctgaaagtgttgggattacaggcgtcagacaccgcgcccggcctcaatagcttttttttttttaaaagctccttttagtgagtttcttggatttatggtgaacaatacataaatggttaccatcctcacattgcttacagatgataaatatataatcaaaatggttatttctttttaagctttttttttttttttttttgagatggagtctcgcctgtggcccaggctggagtgcagtggtgcgatctcgcctcactgcaagctccgccgcctgggttcacgccattctcctgcctcagcctccctagtagctgggactacaggcgcctctcaccataccctgctagttttttgtattttttagtagagacggagtttcaccgtgttagccaggatggtcttgatctcctgacctcatgatccgcccgcctcggcctccaaaagtgctgggattataggcgtgagccaccatgcccggcctctttttaagctt

SEQ ID NO: 283526 - DNA, 1000 bp, Homo Sapiens
cacacacctgtggtcccagctacttgggaggctgaggtgggagggttgcttgaccccgggagtttgaggctgcaatgagctgtgattgtgccactgcactccagcctggataacagaatgagactctgtccaaataaaaaataaaatcaaagacacttaaaaagatggggaaaaggaaggacaggcacttaagcaagttataagctactttcctaactacacaagtggaatcttaagctgaggttcccaggagttgactggagccagagaagacagacctataggagcacccaattggagtcgccctccatagtagcccatatgtcttacatggatcagctttcgtggggcccttttactccgtctggggaagggcgtcagatctgtggctctcatgtactgctcagtacactgccattcccagttctttttttcaaaaaaaaaaaaaaaaaaatgtctacagaatcggccaggtgtcggtggctcatgcctgtaatactagcactttggaaggctgaggtgggtggatcacctgaggtcgggagttcgagaccagcctggccaacatggtgaaactccatctctactaaaaaaaaaaaaaaaaaaaaaaattagctggatgtggtggcaggcgcctatattctcagctacttgggaggctgaggcaggataatcgcttgaacctgggaggcagaggctgcagtgagccgagatcacgccattgtactccagcctgggcgatagagtgagactctgtctcaaaataaaataaaataaaataaaataaaataaaataaaataaaataaaataaaataaaataggctacagaattaagctggtccaggaatgacagggcttccatttatttgtctttcaattgtgggagaaaaaggatttctgttgagatactgtcgttttgacacacaatatttcgattaatcttgagattaaaaatcctgtgctccaaatcttttaacattaaattatgcatttaaacag

SEQ ID NO: 283527 - DNA, 720 bp, Homo Sapiens
aaaacagctttttttttttttgagacatagtctaactctgtagccaggctggagtgcagtggcgcgatctcggctctctgcagcctccacctcctgggttcaagtgattctcctgcctcagcttcccgagtagctgggactacagacatgtgccaccccaccacgcccagctaatttttgtatttttagtagagacggggtttccatgttggccaggctggtctcgaactcctgacctcaggtgatccacctgccttggcctcccaaagtgctgggattacaggcctgagccaccgcgcccgatgaaaccaagtcttataaactaagcttgcaataccagcacagttcttaacaagtgcttactaagtctttactaaggttatattacctcagaagaggaaagacttctgattgtatgggttaaggtatggcccaaatgaccctgtgaggacacaggacagaggtccagtgtctccagagcccattccttctgtgcctctgctgcctgcaactgataaacctcttatctggcccaggcaggggagcccagggccaggataggaggagagggcagagctgctatcaaccaccaggcctgggccatatcttggagaggaggaggggctgtctgcttgcctctttccacaacttgttcttggggatcctcaagcatatactgtcatcatcttggaaagaaaaggctgagaacgtaaaactgag

SEQ ID NO: 283528 - DNA, 1000 bp, Homo Sapiens
gaggccgagccgggcggatcacctgtggtcaggagtttgagaccagcctggccaacatggcaaaaccccgtctgtactcaaaatgcaaaaattagccaggcgtggtagcaggcacctgtaatcccagctacttgggaggctgaggcaggagaatcgcttgaacccaggaggtggaggttgcagtaagctgagatcgtgccgttgcactccagcctgggcgacaagagcaagactctgtctcagaaaaaaaaaaaaaaaagagagagagagagaaagagaacaatatttgggagagaaggatggggaagcattgcaaggaaattgtgctttatccaacaaaatgtaaggagccaataagggatccctatttgtctcttttggtgtctatttgtccctaacaactgtctttgacagtgagaaaaatattcagaataaccatatccctgtgccgttattacctagcaacccttgcaatgaagatgagcagatccacaggaaaacttgaatgcacaactgtcttattttaatcttattgtacataagtttgtaaaagagttaaaaattgttacttcatgtattcatttatattttatattattttgcgtctaatgattttttattaacatgatttccttttctgatatattgaaatggagtctcaaagcttcataaatttataactttagaaatgattctaataacaacgtatgtaattgtaacattgcagtaatggtgctacgaagccatttctcttgatttttagtaaacttttatgacagcaaatttgcttctggctcactttcaatcagttaaataaatgataaataattttggaagctgtgaagataaaataccaaataaaataatataaaagtgatttatatgaagttaaaataaaaaatcagtatgatggaataaacttgagagtccagaagttatcccatacatctgtaatcaactaatttctcacaagggtgtaaggaccattcaatggagaaaa

SEQ ID NO: 283529 - DNA, 1000 bp, Homo Sapiens
  misc_feature (425)..(425): n is a, c, g, or t
  misc_feature (432)..(432): n is a, c, g, or t
  misc_feature (453)..(453): n is a, c, g, or t
  misc_feature (484)..(484): n is a, c, g, or t
ttctttctcaattcatacgcttagattggttttcatatgtcatgtttagtgttttcatcctcctcatatacttcagcaggttcttttgctttcaagatttggaagcattgccaaagacagccatgaagaaggaagctgtagaggtgttttttgttgttgtttatttttgcttttgtggttgagggaaggacaagagataagaggttgttacctcagtaaaaaccttcaggccacaaagcaaaaagttgcatagccacaacgaagatctagttggatatagtttttgatttaagttgcagttatagccaatttaggctaatgcttgggtttttggagcttttaaacacaaacgtttttgttaggaatcacatttttgcaaacctccggctccaaaagaggaaaaatagaatgagttttctttcttnttttttntttttggagtcggagtctcgntctcttgtccaggctggagtgcaatagcgcnatctgggctcactgcaacctccgcctccctggttcaagcaattctcctgccttgcctcctgagtagctgggattacaggcgtgtgtcaccacgctcggctaatttttgtatttttagtagagacagggtttcaccatgtcaagctggtcttggactcctgacgtcgtgatccacccgccttggcctcccaaagtactgggattacaggcgtgagccactgtgcctggctgagttttcttaaagtgagcttaatttctgaactcttagtgattcatatatgtacataaatctgtgatcccatttcttattgcaccattcaggaacactttatataaatgagtggctttttatttcatattattagtagtatcatggttccattacaggcctattaacatcatacattgtcattagtctttgaagaaaaaatatgtaaatatatatgtgtaacatgagaatttctctctaaagcagggcttaaaattttttggaaaagtttgacaaagcataccacat

SEQ ID NO: 283530 - DNA, 1000 bp, Homo Sapiens; identical to SEQ ID NO: 115063

SEQ ID NO: 283531 - DNA, 1000 bp, Homo Sapiens
atccaggagaagctggcacggatggttatgctgcagtatgtaactgagtccatggcttacatggtgagtgctaacatggaccagggagccacggacttccagatagaggccgccatcagcaaaatctttggctcggaggcagcctggaaggtgacagatgaatgcatccaaatcatggggggtatgggcttcatgaaggaacctggagtagagcgtgtgctccgagatcttcgcatcttccggatctttgaggggacaaatgacattcttcggctgtttgtggctctgcagggctgtatggacaaaggaaaggagctctctgggcttggcagtgctctaaagaatccctttgggaatgctggcctcctgctaggagaggcaggcaaacagctgaggcggcgggcagggctgggcagcggcctgagtctcagcggacttgtccacccggagttgagtcggagtggcgagctggcagtacgggctctggagcagtttgccactgtggtggaggccaagctgataaaacacaagaaggggattgtcaatgaacagtttctgctgcagcggctggcagacggggccatcgacctctatgccatggtggtggttctctcgagggcctcaagatccctgagtgagggccaccccacggcccagcatgagaaaatgctctgtgacacctggtgtatcgaggctgcagctcggatccgagagggcatggccgccctgcagtctgacccctggcagcaagagctctaccgcaacttcaaaagcatctccaaggccttggtggagcggggtggtgtggtcaccagcaacccacttggcttctgaatactcccggccagggcctgtcccagttatgtgccttccctcaagccaaagccgaagcccctttccttaaggccctggtttgtcccgaaggggcctagtgttcccagcactgtgcctgctctcaagagcacttactgcctcgcaaataataaaaatttctagccag

SEQ ID NO: 283532 - DNA, 1000 bp, Homo Sapiens
ctgccataccaagccgagttcctggtgcgcagccacgatgcggaggaggtgctgccctcaacacctgccagccgcttcctctcagccttggggggactctgggagcccggagagcttcagctgctcaacgtcacctctgccttggaccgtgggggccgtgtcccccttcccattgagggccgaaaagaaggggtatacattaaggtgggttctgcctcacctttttctacttgcctgaagatggtggcatcccccgatagccacgcccgctgtgcccagggccagcctccacttctgtcttgctacgacaccttggcaccccacttccgcgttgactggtgcaatgtgaccctggtggataagtcagtgccggagcctgcagatgaggtgcccaccccaggtgatgggatcctggagcatgacccgttcttctgcccacccactgaggccccagaccgtgacttcttggtggatgctctggtcaccctcctggtgcccctgctggtggccctgcttctcaccttgctgctggcctatgtcatgtgctgccggcgggagggaaggctgaagagagacctggctacctccgacatccagatggtccaccactgcaccatccacgggaacacagaggagctgcggcagatggcggccagccgcgaggtgccccggccactctccaccctgcccatgttcaatgtgcacacaggtgagcggctgcctccccgcgtggacagcgcccaggtgcccctcattctggaccagcactgacagcccagccagtggttccaggtccagccctgacttcatcctcccttctctgtccacaccacgagtggcacatcccacctgctgattccagctcctggccctcctggaacccaggctctaaacaagcagggagagggggtggggtggggtgagagtgtgtggagtaaggacattcagaataaatatctgctgctctgctcaccaattgctgctggcagcctctcccgtc

SEQ ID NO: 283533 - DNA, 1000 bp, Homo Sapiens
tgaaggagcacaaagccctcaagacgttaggcatcatcatgggcactttcaccctctgctggctgcccttcttcatcgttaacattgtgcatgtgatccaggataacctcatccgtaaggaagtttacatcctcctaaattggataggctatgtcaattctggtttcaatccccttatctactgccggagcccagatttcaggattgccttccaggagcttctgtgcctgcgcaggtcttctttgaaggcctatgggaatggctactccagcaacggcaacacaggggagcagagtggatatcacgtggaacaggagaaagaaaataaactgctgtgtgaagacctcccaggcacggaagactttgtgggccatcaaggtactgtgcctagcgataacattgattcacaagggaggaattgtagtacaaatgactcactgctgtaaagcagtttttctacttttaaagacccccccccccccaacagaacactaaacagactatttaacttgagggtaataaacttagaataaaattgtaaaaattgtatagagatatgcagaaggaagggcatccttctgccttttttatttttttaagctgtaaaaagagagaaaacttatttgagtgattatttgttatttgtacagttcagttcctctttgcatggaatttgtaagtttatgtctaaagagctttagtcctagaggacctgagtctgctatattttcatgacttttccatgtatctacctcactattcaagtattaggggtaatatattgctgctggtaatttgtatctgaaggagattttccttcctacacccttggacttgaggattttgagtatctcggacctttcagctgtgaacatggactcttcccccactcctcttatttgctcacacggggtattttaggcagggatttgaggagcagcttcagttgttttcccgagcaaaggtctaaagtttacagtaaataaaatgtttgaccatg

SEQ ID NO: 283534 - DNA, 1000 bp, Homo Sapiens
ttcactcctccctcagtggtagtgtccaggtgccgtggagcagcaggctggctttggtaggggcacccatcacccggcttgcctgtgcagtcagtgagtgcttagggcaaagagagctcccctggttccattccttctgccacccaaaccctgatgagaccttagtgttctccaggctctgtggcccaggctgagagcagcagggtagaaaagaccaagatttggggttttatctctggttcccttattactgctctcaagcagtggcctctctcactttagccatggaatggctccgatctacctcacagcagtgtcagaaggacttcgccagggttttgggagctccagggttcataagaaggtgaaccattagaacagatcccttcttttccttttgcaatcagataaataaatatcactgaatgcagttcatcctcggcccactttccctccgtttgttttcttttcataatccacttactcccttcccttctactctgcgctggcttttgacagaggcagtaaattaggcctaatcctcactcttttcttcctaatcttcatcaaacaaaaaatgaaaagtctgtctggacgaaggggagtgagcttgagcctttgatatcttgctcccccacccttcctgaaactcttgaaatccagttgccattgagtagcaaagccacgctccccacaggacttggacagagggcccacagggggatgggctggctgtggccaggtttagggcagggggcatttgtcccctccatgctataatccagtggtgccttacatggtgtgtgtgtgtgtgtgtgcgtgtgtgtgtgtgtgtgtgtgtctggaggcacaggcacaaagcattgcttgggttggtcaaatgtcttgtgtcataaatatattctgatgtttcccagcctttccacaacctctaccttcccactcaccttccccagctacaaaaatctgtattatcctcttaaagtaaaactggagttac

SEQ ID NO: 283535 - DNA, 1000 bp, Homo Sapiens
gtttcatggtttataattccgaaaaaaatcagccaactgaggaaaaagtggactgcatctaatccatctttactgtcaacatctgtatttaaagaagaaagaaacaaaggctgaaaaggctgctcactctcatcatctagtgttcctcatgtgttctaaagtctttttgtaaaataaacacaaaaataaatttatgttgaattggcactttctatatctgaaattgtattatctatttttatttaacctttcttatattatctgaagatgaatatgtatgtggctgtattttgtatatatttaagttttaagtgacacttggatttctgatcagtgttgcaaaaaattgctactttgagatttatttccacagtgatatattaaacccaaaaggaatcatcatatttggatgcttaaaatagagtatacaagttttttagacccaaagaaaaaaacagcagagtctcagcatgatcagtcctgattgaatttcattatgtcacagtgatgcatgtcttagcactgattattggttttacttaatattccctaaaaacttgaggaaggaagatgatagaacatgagatactctttgttttgtacatactagaaaatacagctatcttctgatgagcaattgtgttgattttctttgcttttttcctcttatggagctctcagtgtgtgaaagttctaaagccacaagaatcaatgatgttttagctgctaatatttagtattgatcgtttcttttaaaaatgatttggggaacttgatctgtactgtaattttactaattccttgtgcagaggtgggtatggcaattagaagtcaagaaatgggttgtttagcttggtttgtttccctaacttctgattaactctctgtatgacaactctacagaagttgtgcgcgtgctttctcagcagcatttttccttcaaaatcatctttttaatcaacagtcattaataaatgtacatgtacgatattcaaacttt

SEQ ID NO: 283536 - DNA, 1000 bp, Homo Sapiens; identical to SEQ ID NO: 115169

SEQ ID NO: 283537 - DNA, 1000 bp, Homo Sapiens; identical to SEQ ID NO: 220471

SEQ ID NO: 283538 - DNA, 1000 bp, Homo Sapiens
ccggcgtgctgcagccccttgatggcttcggggaactctgccacaggtacaagtgcctgctcctggtggattcggtggcatccctgggcgggacccccctttacatggaccggcaaggcatcgacatcctgtactcgggctcccagaaggccctgaacgcccctccagggacctcgctcatctccttcagtgacaaggccaaaaagaagatgtactcccgcaagacgaagcccttctccttctacctggacatcaagtggctggccaacttctggggctgtgacgaccagcccaggatgtaccatcacacaatccccgtcatcagcctgtacagcctgagagagagcctggccctcattgcggaacagggcctggagaacagctggcgccagcaccgcgaggccgcggcgtatctgcatgggcgcctgcaggcactggggctgcagctcttcgtgaaggacccggcgctccggcttcccacagtcaccactgtggctgtacccgctggctatgactggagagacatcgtcagctacgtcatagaccacttcgacattgagatcatgggtggccttgggccctccacggggaaggtgctgcggatcggcctgctgggctgcaatgccacccgcgagaatgtggaccgcgtgacggaggccctgagggcggccctgcagcactgccccaagaagaagctgtgacctgcccactggcacacagctggcactggcacacacctgtcccatgcccaccctgagggatcaggagcaaacagaccctgcaaggtcctccaggcctggggacaggaaagccactgacccagcccgggaggcagaaccaggcagcctccctggccccaggcagcccttttccctccagtggcacctcctggaaacagtccacttgggcgcaaaacccagtgccttccaaatgagctgcagtccccaggccatgagcctcccgggaatgtttaataaagggcctggccacctctcctcac

SEQ ID NO: 283539 - DNA, 1000 bp, Homo Sapiens
ctgacatttgagcctagacctgaagggtgagccatcaagctaagacaattggggaagagcattccagggagagggaggagttgtgcaaaggccctggggctccttctagctggaggaatgcaaggctagcttgtctggagcactgagaggatggcctgaactgagtggagagagacagaccaggaccaaaccatgcagaggtcaagggccacattcaccttttcagagtgactcaatcaaatttgtagtttgtaaaagtattttaacagctctgcggcaaagtgcaaatgaaaagtcttgatggcatggactggagcggggacagtggggatggagaaaggggaatggattgtggatgtgtttagaaggtagattcgatgtgaaggatgaatctggcttgaccttctgggtggctgatgggccatttactgagatggggcagcctggaagaggaacagaagcagggtcggggtggagggagaatactaaacttagcttgagacattttgcaataaggaagctatatctagagtgcttatgtgactcacctaaggccactcaacaagtttgtggcagaactggattagaactgcacagaaaacagccaagctgggatttgaacccatgtagtccaactccaaggcctctgcccctaaccactgtgccataccacctcccaataatcaacagcaaaattataggtctaacaatgttttatagacacccctccatttatgtgatgggtttgcatcctgataaacccatcataagttgaaaatatgatcataagttgaaaatatgatcataagtcaaaaatgtatttaatatacctaacctaccaaacatcatagcttagcctagcctgccttaaacatgctcagaacacttacattagcctacagtgggcaaaactatccaacacaaaatctatattgtaataaagttgtaaagaattttgaataaaaattcaatatttgaagtacaaaaaaaaaaaaaaaaa

SEQ ID NO: 283540 - DNA, 1000 bp, Homo Sapiens; identical to SEQ ID NO: 220472

SEQ ID NO: 283541 - DNA, 1000 bp, Homo Sapiens; identical to SEQ ID NO: 115067

SEQ ID NO: 283542 - DNA, 1000 bp, Homo Sapiens
gactggtacctattgttgaaccagaggtaattcctgatggagaccatgacctggaacactgccagtatgttactgagaaggtcctggctgctgtctacaaggccctgaatgaccatcatgtttacctggagggcaccctgctaaagcccaacatggtgactgctggacatgcctgcaccaagaagtatactccagaacaagtagctatggccaccgtaacagctctccaccgtactgttcctgcagctgttcctggcatctgctttttgtctggtggcatgagtgaagaggatgccactctcaacctcaatgctatcaacctttgccctctaccaaagccctggaaactaagtttctcttatggacgggccctgcaggccagtgcactggctgcctggggtggcaaggctgcaaacaaggaggcaacccaggaggcttttatgaagcgggccatggctaactgccaggcggccaaaggacagtatgttcacacgggttcttctggggctgcttccacccagtcgctcttcacagcctgctatacctactagggtccaatgcccgccagcctagctccagtgcttctagtaggagggctgaaagggagcaacttttcctccaatcctggaaattcgacacaattagatttgaactgctggaaatacaacacatgttaaatcttaagtacaagggggaaaaaataaatcagttattgaaacataaaaatgaataccaaggacctgatcaaatttcacacagcagtttccttgcaacactttcagctccccatgctccagaatacccacccaagaaaataataggctttaaaacaatatcggctcctcatccaaagaacaactgctgattgaaacacctcattagctgagtgtagagaagtgcatcttatgaaacagtcttagcagtggtaggttgggaaggagatagctgcaaccaaaaaagaaataaatattctataaaccttcaaaaaaaaaaaaaaaaa

SEQ ID NO: 283543 - DNA, 1000 bp, Homo Sapiens; identical to SEQ ID NO: 115068

SEQ ID NO: 283544 - DNA, 1000 bp, Homo Sapiens; identical to SEQ ID NO: 115069

SEQ ID NO: 283545 - DNA, 1000 bp, Homo Sapiens
ctgcaagccgggctatgtgtcccgaggagggatgagaaagtttatctgccctctcacaggactgtggcccatcaacactctgaaatgtacacccagagtatgtccttttgctggaatcttagaaaatggagccgtacgctatacgacttttgaatatcccaacacgatcagtttttcttgtaacactgggttttatctgaatggcgctgattctgccaagtgcactgaggaaggaaaatggagcccggagcttcctgtctgtgctcccatcatctgccctccaccatccatacctacgtttgcaacacttcgtgtttataagccatcagctggaaacaattccctctatcgggacacagcagtttttgaatgtttgccacaacatgcgatgtttggaaatgatacaattacctgcacgacacatggaaattggactaaattaccagaatgcagggaagtaaaatgcccattcccatcaagaccagacaatggatttgtgaactatcctgcaaaaccaacactttattacaaggataaagccacatttggctgccatgatggatattctctggatggcccggaagaaatagaatgtaccaaactgggaaactggtctgccatgccaagttgtaaagcatcttgtaaattacctgtgaaaaaagccactgtggtgtaccaaggagagagagtaaagattcaggaaaaatttaagaatggaatgctacatggtgataaagtttctttcttctgcaaaaataaggaaaagaagtgtagctatacagaggatgctcagtgtatagatggcactatcgaagtccccaaatgcttcaaggaacacagttctctggctttttggaaaactgatgcatccgatgtaaagccatgctaaggtggttttcagattccacataaaatgtcacacttgtttcttgttcatccaaggaacctaattgaaatttaaaaataaagctactgaatttattgccgcaaaaaaaaaaaa

SEQ ID NO: 283546 - DNA, 1000 bp, Homo Sapiens
atatcagttactgaacaggcaggccactttgcctctaaattacctctgataattctagagattttaccatatttctaaactttgtttataactctgagaagatcatatttatgtaaagtatatgtatttgagtgcagaatttaaataaggctctacctcaaagacctttgcacagtttattggtgtcatattatacaatatttcaattgtgaattcacatagaaaacattaaattataatgtttgactattatatatgtgtatgcattttactggctcaaaactacctacttctttctcaggcatcaaaagcattttgagcaggagagtattactagagctttgccacctctccatttttgccttggtgctcatcttaatggcctaatgcacccccaaacatggaaatatcaccaaaaaatacttaatagtccaccaaaaggcaagactgcccttagaaattctagcctggtttggagatactaactgctctcagagaaagtagctttgtgacatgtcatgaacccatgtttgcaatcaaagatgataaaatagattcttatttttcccccacccccgaaaatgttcaataatgtcccatgtaaaacctgctacaaatggcagcttatacatagcaatggtaaaatcatcatctggatttaggaattgctcttgtcatacccccaagtttctaagatttaagattctccttactactatcctacgtttaaatatctttgaaagtttgtattaaatgtgaattttaagaaataatatttatatttctgtaaatgtaaactgtgaagatagttataaactgaagcagatacctggaaccacctaaagaacttccatttatggaggatttttttgccccttgtgtttggaattataaaatataggtaaaagtacgtaattaaataatgtttttggtaaaaaaaaaaaaaaaaaaaaaaaaaaaaaaaaaaaaaaaaaaaaaaaaaaaaaaaaaaaaaaaaaaa

SEQ ID NO: 283547 - DNA, 1000 bp, Homo Sapiens
cagatggctgtcattcagtactcctggatggggctcatggtgtttgccatgggctggcgatccttcaccaatgtcaactccaggatgctctacttcgcccctgatctggttttcaatgagtaccgcatgcacaagtcccggatgtacagccagtgtgtccgaatgaggcacctctctcaagagtttggatggctccaaatcaccccccaggaattcctgtgcatgaaagcactgctactcttcagcattattccagtggatgggctgaaaaatcaaaaattctttgatgaacttcgaatgaactacatcaaggaactcgatcgtatcattgcatgcaaaagaaaaaatcccacatcctgctcaagacgcttctaccagctcaccaagctcctggactccgtgcagcctattgcgagagagctgcatcagttcacttttgacctgctaatcaagtcacacatggtgagcgtggactttccggaaatgatggcagagatcatctctgtgcaagtgcccaagatcctttctgggaaagtcaagcccatctatttccacacccagtgaagcattggaaaccctatttccccaccccagctcatgccccctttcagatgtcttctgcctgttataactctgcactactcctctgcagtgccttggggaatttcctctattgatgtacagtctgtcatgaacatgttcctgaattctatttgctgggctttttttttctctttctctcctttctttttcttcttccctccctatctaaccctcccatggcaccttcagactttgcttcccattgtggctcctatctgtgttttgaatggtgttgtatgcctttaaatctgtgatgatcctcatatggcccagtgtcaagttgtgcttgtttacagcactactctgtgccagccacacaaacgtttacttatcttatgccacgggaagtttagagagctaagattatctggggaaatcaaaacaaaaacaagcaaac

SEQ ID NO: 283548 - DNA, 1000 bp, Homo Sapiens
cactccactgacaaccacaagtggaaacttgcatggacaacctgtatctttcctcctgaaggaactaaaaggaaagattcccgatgtgccaggattctcctgggtgactccctgtatatctgccaaggatattgtgtatattggcttgagagacgtggaccctggggaacactacattttgaaaactctaggcattaaatacttttcaatgactgaagtggacagactaggaattggcaaggtgatggaagaaacactcagctatctactaggaagaaagaaaaggccaattcatctaagttttgatgttgacggactggacccatctttcacaccagctactggcacaccagtcgtgggaggtctgacatacagagaaggtctctacatcacagaagaaatctacaaaacagggctactctcaggattagatataatggaagtgaacccatccctggggaagacaccagaagaagtaactcgaacagtgaacacagcagttgcaataaccttggcttgtttcggacttgctcgggagggtaatcacaagcctattgactaccttaacccacctaagtaaatgtggaaacatccgatataaatctcatagttaatggcataattagaaagctaatcattttcttaagcatagagttatccttctaaagacttgttctttcagaaaaatgtttttccaattagtataaactctacaaattccctcttggtgtaaaattcaagatgtggaaattctaacttttttgaaatttaaaagcttatattttctaacttggcaaaagacttatccttagaaagagaagtgtacattgatttccaattaaaaatttgctggcattaaaaataagcacacttacataagcccccatacatagagtgggactcttggaatcaggagacaaagctaccacatgtggaaaggtactatgtgtccatgtcattcaaaaaatgtgattttttataataaactctttataacaag

SEQ ID NO: 283549 - DNA, 1000 bp, Homo Sapiens
agatgttccttctgcatcctccgaatcccagggctgggtgtaggtagccgttggaggccatcgctacagggcacctatctgttatcgctgctgtcctcccaacagctgtctccagttctagttccttggttttcaggcacagtgggggatgttctgcacccagtggacttcaaaagagttttgaagacttaattttttgtaaaacaagtacttgagattttggtttatccataatagaatgtatttcattagattctctgattctatataagaatgtgaaaagattgatatattgttgttagaaataatgttatttctttccaattttttttttttttttttttgagatggagtctcgctctgtcacccaggctggagtgcagtggtgtgatctcggctcactgcagcctctaactcccaggttcaagctattctcctgcctcagcctcccaagtagctggattacaggcatacaccaccacgcctggctatgttttgtatttttcgtagagatagggtttcaccatgttggccaggctggtctcaaactcctgacctcaagtgatccacccacttcagcttcccaaagcactgggattacaggtgtgagccactgtgcccggcaaatttttttacctttacagaaggttttgcttatttaattgtgagctcatttttctttgttacttttgtccccccagatttgggggacaaaataaaattaatcttttaaaatgtgtcagccatatgtatggggcttccatttggggtgatgagaaagttctggaactagatagtggtcatggttatacaacatcataaatgcaattactgccactgaattgtatgttttaaagtggttaaaatgttaagttttatgttttattacaatttttaaatgtgtcaaccaactttatagtacataaattatatctcagtaaagctgttaaataaataaatatagtaaaaattttagaactaaaaaaaaaaaaaaaaaaaa

SEQ ID NO: 283550 - DNA, 1000 bp, Homo Sapiens
gcccatgtgcttccaaagaacgacaccccttattctgcaggaggttgcgtcctttctcaaaaggaataagcatgggcctttcctcctctttgtttcctttctacacgttcacatccctcttatcactatggagaacttcctcgggaagagtctccacgggctgtatggggacaacgtagaggagatggactggatggtaggacggatccttgacactttggacgtggagggtttgagcaacagcaccctcatttattttacgtcggatcacggcggttccctagagaatcaacttggaaacacccagtatggtggctggaatggaatttataaaggtgggaagggcatgggaggatgggaaggtgggatccgcgtgcccgggatcttccgctggcccggggtgctcccggccggccgagtgattggcgagcccacgagtctgatggacgtgttccccaccgtggtccggctggcgggcggcgaggtgccccaggacagagtgattgacggccaagaccttctgcccttgctcctggggacagcccaacactcagaccacgagttcctgatgcattattgtgagaggtttctgcacgcagccaggtggcatcaacgggacagaggaacaatgtggaaagtccactttgtgacgcctgtgttccagccagagggagccggtgcctgctatggaagaaaggtctgcccgtgctttggggaaaaagtagtccaccacgatccacctttgctctttgacctctcaagagacccttctgagacccacatcctcacaccagcctcagagcccgtgttctatcaggtgatggaacgagtccagcaggcggtgtgggaacaccagcggacactcagcccagttcctctgcagctggacaggctgggcaacatctggagaccgtggctgcagccctgctgtggcccgttccccctctgctggtgccttagggaagatgacccacaataaatgtctgcagtgaaaagctgg

SEQ ID NO: 283551 - DNA, 1000 bp, Homo Sapiens; identical to SEQ ID NO: 220474

SEQ ID NO: 283552 - DNA, 1000 bp, Homo Sapiens
ctcaagaaataaatcatttatttggtccaaaagacagtgaagattcctatgacattatttttgaccttcacaacaccacctctaacatggggtgcactcttattcttgaggattccaggaataactttttaattcagatgtttcattacattaagacttctctggctccactaccctgctacgtttatctgattgagcatccttccctcaaatatgcgaccactcgttccatagccaagtatcctgtgggtatagaagttggtcctcagcctcaaggggttctgagagctgatatcttggatcaaatgagaaaaatgattaaacatgctcttgattttatacatcatttcaatgaaggaaaagaatttcctccctgcgccattgaggtctataaaattatagagaaagttgattacccccgggatgaaaatggagaaattgctgctatcatccatcctaatctgcaggatcaagactggaaaccactgcatcctggggatcccatgtttttaactcttgatgggaagacgatcccactgggcggagactgtaccgtgtaccccgtgtttgtgaatgaggccgcatattacgaaaagaaagaagcttttgcaaagacaactaaactaacgctcaatgcaaaaagtattcgctgctgtttacattagaaatcacttccagcttacatcttacacggtgtcttacaaattctgctagtctgtaagctccttaagagtagggttgtgccttattcaactgcatacatagctcctagcacagtgccttattcggtaggcatctaagcaaatttcttaaattaattaatatatctttaaagatatcatattttatgtatgtagcttattcaaagaagtgtttcctatttctatatagtttattatacatgatacttgggtagctcaacattcttaataaacagcctttgtattcagaatataaaattgaaatagatatatataaagttaaaaaaaaaaaaaaaaaa

SEQ ID NO: 283553 - DNA, 1000 bp, Homo Sapiens
catattgtgggacagtgggaatagcagcttgtagtattgaaataatcaaagagataatttcagctcttacaacaagaacagaaaacatgctaattagaaaaagtcctgctttaagtaatatgtagccacatttgaatcctctaccacaagtcttttttgcaatcttgaactttcattagcttcaaagagaagctgtatttacaggagaaagaggtgattatggagggaatcaaaaatactgctttcagttagtagctagctttaagtcaggagttagtaatgagaaattttataaatgtgtatttctgtgtattcacatacatatatatatacacacatatatatgtacatacacatacatacatattaccatactgaagggaaatggatttatatttgaatttgatatttgaatatttgaagttctctatttatatttcatttatcactcttctgtattcactcagcaaccatgcccttagtctgaagataacaaggatactttaatatccagtgccggttcagactcacctatgtggcaccttaaacttaaatatccaaagatgccttttgaatttcaaagattaaaacacagctagagtagtagtattgtagtctcaagatgtatggtgtgtcatttgtgaaaatagaaacgttatttttcctagtttagtatcaacattttagaatgtcaaatttgatgccttgtgaacaagtaattttatattgtgctttaattttttaaaaagtattctttattcatatgtatagaatgcttaaaatagcactgtagacaagatgtttccaaaactttaagtgcgcatatcttttctgtatacagcttaaaatcaaaaatgtatgttaagagaattttttctattacttatggatcatgctttaaaatgatttttcttgatatttattttactccattttgtttttttctctgggtgaggcatctggttactggttattttaaaaagaataaagacattcctgg

SEQ ID NO: 283554 - DNA, 1000 bp, Homo Sapiens; identical to SEQ ID NO: 115298

SEQ ID NO: 283555 - DNA, 1000 bp, Homo Sapiens
gccttggagttcaccaagaagttctcagaatggggaaataatgcctttttctactattttgaacaccgatcctccaaacttccgtggccagaatggatgggagtgatgcatggctatgaaattgaatttgtctttggtttacctctggaaagaagagataattacacaaaagccgaggaaattttgagtagatccatagtgaaacggtgggcaaattttgcaaaatatgggaatccaaatgagactcagaacaatagcacaagctggcctgtcttcaaaagcactgaacaaaaatatctaaccttgaatacagagtcaacaagaataatgacgaaactacgtgctcaacaatgtcgattctggacatcattttttccaaaagtcttggaaatgacaggaaatattgatgaagcagaatgggagtggaaagcaggattccatcgctggaacaattacatgatggactggaaaaatcaatttaacgattacactagcaagaaagaaagttgtgtgggtctctaattaatagatttaccctttatagaacatattttcctttagatcaaggcaaaaatatcaggagcttttttacacacctactaaaaaagttattatgtagctgaaacaaaaatgccagaaggataatattgattcctcacatctttaacttagtattttacctagcatttcaaaacccaaatggctagaacatgtttaattaaatttcacaatataaagttctacagttaattatgtgcatattaaaacaatggcctggttcaatttctttctttccttaataaatttaagttttttccccccaaaattatcagtgctctgcttttagtcacgtgtattttcattaccactcgtaaaaaggtatcttttttaaatgaattaaatattgaaacactgtacaccatagtttacaatattatgtttcctaattaaaataagaattgaatgtcaatatgagatattaaaataagcacagaaaatc

SEQ ID NO: 283556 - DNA, 1000 bp, Homo Sapiens; identical to SEQ ID NO: 220476

SEQ ID NO: 283557 - DNA, 1000 bp, Homo Sapiens; identical to SEQ ID NO: 220477

SEQ ID NO: 283558 - DNA, 1000 bp, Homo Sapiens; identical to SEQ ID NO: 220478

SEQ ID NO: 283559 - DNA, 1000 bp, Homo Sapiens
atggccaatggctgcctcctgaactacctgagggagatgcgccaccgcttccagactcagcagctgctagagatgtgcaaggatgtctgtgaagccatggaatacctggagtcaaagcagttccttcaccgagacctggcagctcgaaactgtttggtaaacgatcaaggagttgttaaagtatctgatttcggcctgtccaggtatgtcctggatgatgaatacacaagctcagtaggctccaaatttccagtccggtggtccccaccggaagtcctgatgtatagcaagttcagcagcaaatctgacatttgggcttttggggttttgatgtgggaaatttactccctggggaagatgccatatgagagatttactaacagtgagactgctgaacacattgcccaaggcctacgtctctacaggcctcatctggcttcagagaaggtatataccatcatgtacagttgttggcatgagaaagcagatgagcgtcccactttcaaaattcttctgagcaatattctagatgtcatggatgaagaatcctgagctcgccaataagcttcttggttctacttctcttctccacaagccccaatttcactttctcagaggaaatcccaagcttaggagccctggagcctttgtgctcccactcaatacaaaaaggcccctctctacatctggggatgcacctcttctttgattccctgggatagtggcttctgagcaaaggccaaaaaattattgtgcctgaaatttcccgagagaattaagacagactgaatttgcgatgaaaatattttttaggagggaggatgtaaatagccgcacaaaggggtccaacagctctttgagtaggcatttggtagagcttgggggtgtgtgtgtgggggtggaccgaatttggcaagaatgaaatggtgtcataaagatgggaggggagggtgttttgataaaataaattctagaaagcttaaaaaaaaaaaaaaaaaaa

SEQ ID NO: 283560 - DNA, 1000 bp, Homo Sapiens; identical to SEQ ID NO: 115070

SEQ ID NO: 283561 - DNA, 1000 bp, Homo Sapiens
ctggattccattaaaacaaagggcaagagtgctgacttcactaacttcgatcctcgtggcctccttcctgaatccctggattactggacctacccaggctcactgaccacccctcctcttctggaatgtgtgacctggattgtgctcaaggaacccatcagcgtcagcagcgagcaggtgttgaaattccgtaaacttaacttcaatggggagggtgaacccgaagaactgatggtggacaactggcgcccagctcagccactgaagaacaggcaaatcaaagcttccttcaaataagatggtcccatagtctgtatccaaataatgaatcttcgggtgtttccctttagctaagcacagatctaccttggtgatttggaccctggttgctttgtgtctagttttctagacccttcatctcttacttgatagacttactaataaaatgtgaagactagaccaattgtcatgcttgacacaactgctgtggctggttggtgctttgtttatggtagtagtttttctgtaacacagaatataggataagaaataagaataaagtaccttgactttgttcacagcatgtagggtgatgagcactcacaattgttgactaaaatgctgcttttaaaacataggaaagtagaatggttgagtgcaaatccatagcacaagataaattgagctagttaaggcaaatcaggtaaaatagtcatgattctatgtaatgtaaaccagaaaaaataaatgttcatgatttcaagatgttatattaaagaaaaactttaaaaattattatatatttatagcaaagttatcttaaatatgaattctgttgtaatttaatgacttttgaattacagagatataaatgaagtattatctgtaaaaattgttataattagagttgtgatacagagtatatttccattcagacaatatatcataacttaataaatattgtattttagatatattctctaataaaattcagaattct

SEQ ID NO: 283562 - DNA, 1000 bp, Homo Sapiens
acaggcttggggacagacctgagcatgaccacccaatccggggacctgccgtcgaaggagcgggaccaggagcggggccggcccaaggatcggaagcatcgacagcaccaccaccaccaccaccaccaccaccatcccccgccccccgacaaggaccgctatgcccaggaacggccggaccacggccgggcacgggctcgggaccagcgctggtcccgctcgcccagcgagggccgagagcacatggcgcaccggcagtagttccgtaagtggaagcccagccccctcaacatctggtaccagcactccgcggcggggccgccgccagctcccccagaccccctccaccccccggccacacgtgtcctattcccctgtgatccgtaaggccggcggctcggggcccccgcagcagcagcagcagcagcagcagcagcagcaggcggtggccaggccgggccgggcggccaccagcggccctcggaggtacccaggccccacggccgagcctctggccggagatcggccgcccacggggggccacagcagcggccgctcgcccaggatggagaggcgggtcccaggcccggcccggagcgagtcccccagggcctgtcgacacggcggggcccggtggccggcatctggcccgcacgtgtccgaggggcccccgggtccccggcaccatggctactaccggggctccgactacgacgaggccgatggcccgggcagcgggggcggcgaggaggccatggccggggcctacgacgcgccaccccccgtacgacacgcgtcctcgggcgccaccgggcgctcgcccaggactccccgggcctcgggcccggcctgcgcctcgccttctcggcacggccggcgactccccaacggctactacccggcgcacggactggccaggccccgcgggccgggctccaggaagggcctgcacgaaccctacagcgagagtgacgatgattggtgctaagcccgggcgagg

SEQ ID NO: 283563 - DNA, 1000 bp, Homo Sapiens
gacttcccacaagatccacgcaccaaccccctggctcgtgccaataccaacaatgccaacgccaatgtcgcctatgcgaacagcaaccatagcaacagccatgtgttttccagtgtccactatgaaagggagttcccagaagagacagagacgcctgctaccagaggacgagcccttggccaaccctgcaggtccctgggaccccacagcaaaccctgtgtggagatgctgaagggactgctgacccagagggcaatgcccagaggccaggcacctcctgccccctgccagtgccccagggtggagtcctccatgcctgaggacagaaagagctccacaccagggtctcttcatgaggagacaccccacagcaggagcaccagggagaatacttccaggtgctcagcaccagctacagccctgctgatccaaaaggctctggttcgagggggcctgggcaccttggcagctgatgcaaacttcatcatggcaacaggccaggccctcggagatgcctgccaaatggaaccagaggaagtggagatcatggcaacagagctactgaaaggacgagaggccccagacggcatggccagctccctgggatgcctgaacctcgggtcctccctgggcagcctcgaccaacaccagggctcccaggagacccttattcctccaaggctgtgatgcccacacagcatcagcatgggcttagagctggcatgaccaatgggggtggggaagttgctggggtggagaagggctagcccaccgcagcagcctccctccctctcagcagctagatgcatgcctgaggcagggtggtcaggaaccacctcaaaaagtgcggaggaagtagctggacaggccctgcccctcaccagcaagaggcatgattggatggagcttctaatgtcattcaaaaaggcctggtcagtgcctgtccctagggccactcccacctgcaggacattaaaatctccaggcctgtgacactggc

SEQ ID NO: 283564 - DNA, 1000 bp, Homo Sapiens
tcctgggaatggtgacgcttgggaacatgctctcgtccctgcttgccgggaaggtgcagccgtcagaccaagttggcaaagtcatctacaagcagttcaaacagatccgcctcacggacacgctgggcaggctctcgcacatcctggagatggaccacttcgccctggtggtgcacgagcagatccagtaccacagcaccgggaagtccagtcagcggcagatggtgttcggggtggtcaccgccattgacttgctgaacttcgtggccgcccaggagcgggaccagaagtgaagtccggagcgctgggcggtgtggagcgggcccgccacccttgcccacttctccttcgctttcctgagccctaaacacacgcgtgattggtaactgcctggcctggcaccgttatccctgcacacggcacagagcatccgtctcccctcgttaacacatggcttcctaaatggccctgtttacggcctatgagatgaaatatgtgattttctctaatgtaacttcctcttaggatgtttcaccaaggaaatattgagagagaagtcggccaggtaggatgaacacaggcaatgactgcgcagagtggattaaaggcaaaagagagaagagtccaggaaggggcggggagaagcctgggtggctcagcatcctccacgggctgcgcgtctgctcggggctgagctggcgggacgagtttgcgtgtttgggttttttaattgagatgaaattcaaataacctaaaaatcaatcacttgaaagtgaacaatcagcggcatttagtacatccagaaagttgtgtaggcaccacctctgtcacgttctggaacattctgtcatcaccccgtgaagcaatcatttcccctcccgtcttcctcctcccctggcaactgctgatcgactttgtgtctctgttgtctaaaataggttttccctgttctggacatttcatataaatggaatcacacaaaaaaaaaaaaaaaaaaaaa

SEQ ID NO: 283565 - DNA, 822 bp, Homo Sapiens; identical to SEQ ID NO: 220480

SEQ ID NO: 283566 - DNA, 1000 bp, Homo Sapiens
agcatcctttcagatggagacattggggtggacatttccctgacaggtgatcccgtcatcacagcctcctacctggagtcccatcacaagggtcatttcatctacaagaatgtctcagaggacctccccctccccaccttctcgcccacactgctgggggactcccgcatgctgtacttctggttctctgagcgagtcttccactcgctggccaaggtagctttccaggatggccgcctcatgctcagcctgatgggagacgagttcaaggcagtgctggagacctggggcttcaacaccaaccaggaaatcttccaagaggttgtcggcggcttccccagccaggcccaagtcaccgtccactgcctcaagatgcccaagatctcctgccaaaacaagggagtcgtggtcaattcttcagtgatggtgaaattcctctttccacgcccagaccagcaacattctgtagcttacacatttgaagaggatatcgtgactaccgtccaggcctcctattctaagaaaaagctcttcttaagcctcttggatttccagattacaccaaagactgtttccaacttgactgagagcagctccgagtccatccagagcttcctgcagtcaatgatcaccgctgtgggcatccctgaggtcatgtctcggctcgaggtagtgtttacagccctcatgaacagcaaaggcgtgagcctcttcgacatcatcaaccctgagattatcactcgagatggcttcctgctgctgcagatggactttggcttccctgagcacctgctggtggatttcctccagagcttgagctagaagtctccaaggaggtcgggatggggcttgtagcagaaggcaagcaccaggctcacagctggaaccctggtgtctcctccagcgtggtggaagttgggttaggagtacggagatggagattggctcccaactcctccctatcctaaaggcccactggcattaaagtgctgtatccaag

SEQ ID NO: 283567 - DNA, 1000 bp, Homo Sapiens
ccgtgacctattcctgctgccccgacaccccctacctggacatcacctaccacttcgtcatgcagcgcctgcccctctacttcatcgtcaacgtcatcatcccctgcctgctcttctccttcttaactggcctggtattctacctgcccacagactcaggggagaagatgactctgagcatctctgtcttactgtctttgactgtgttccttctggtcatcgtggagctgatcccctccacgtccagtgctgtgcccttgattggaaaatacatgctgttcaccatggtgttcgtcattgcctccatcatcatcactgtcatcgtcatcaacacacaccaccgctcacccagcacccatgtcatgcccaactgggtgcggaaggtttttatcgacactatcccaaatatcatgtttttctccacaatgaaaagaccatccagagaaaagcaagacaaaaagatttttacagaagacattgatatctctgacatttctggaaagccagggcctccacccatgggcttccactctcccctgatcaaacaccccgaggtgaaaagtgccatcgagggcatcaagtacatcgcagagaccatgaagtcagaccaggagtctaacaatgcggcggcagagtggaagtacgttgcaatggtgatggaccacatactcctcggagtcttcatgcttgtttgcatcatcggaaccctagccgtgtttgcaggtcgactcattgaattaaatcagcaaggatgagcagaaaatgagctgagcttagctctgccctggaacctaccagagcagagaagggcaggagaggaagatttgtctacttgctccactcgcacttatcaaacgtgttatattccatacttattattgatgataagatttacctttatgtaagtttatggccttgaagtgttttcatattgcttctccctttagttctgctgtctccctgaagagtgaaccctctttagtaaatgaaactaatcact

SEQ ID NO: 283568 - DNA, 1000 bp, Homo Sapiens
agaattttcttccccaaaacagaattataaaagcttactttaaacaggaggcagaataattcttttaggaaaccatttcattctgtttctactaacctataccatctgagaattctaggaagaataataaaatctcgtgtattccacagcaaacttacataccataaagacagaattcctaaacatcttggagccgtctgtctctcccatatgatggctgtctgtatatttttacttggggtgctgctttattggctttgaaaacactgtcagataagctcagtaatatgttaccatgggataaaaatatgtatccctgcctaagaataacttgtgcatttgttatggaaatttaattcatatggtgtttacagtactacttttgtaacttccagactttctaaaacattctgcttaaaaaccatataaaatataattccaaagtctctgctgtcaagatagattcgagagaaagcacgtggccatgtatgctttaaccttaaactgcatacacatgtagtgatacctaggctgcatttagatcaccgtgtgctcaggccaggtgtgaatcctgaggtccatggaggtgcagagatgagattactcctattcacgttgaagtgatttgctttgttaacaaaaaattgcagctattgtctagctttcatttttttactgagaactttaaattagtcccctattagaatagggttgctactcatctttttttaaaaaccgaatttcatcatttatctaaagagaaaatatgcagaataactggtcttgttaagagtgcaatattatatttttatgtaaaaataaaaattaatttggggggattatttattcagcatgaaacctaatatgtatatgtttgaaatacttcataatgtgcatgttgtagcaaacatttctgtaaattatcacaagctctgttacctttatatacactgcctcttcaatttggaaataaatttcataaaaaaaaaaaaaaaaaaaa

SEQ ID NO: 283569 - DNA, 1000 bp, Homo Sapiens
tcctcagggactgggggagctgggctgctgggggccctgtcctacctgggcctcacccaggccggcctctcccctcagcagaccctgctgtccatgctgggtatccctgccctgctgctggccagctatttcttgttgctcacatctcctgaggcccaggaccctggaggggaagaagaagcagagagcgcagcccggcagcccctcataagaaccgaggccccggagtcgaagccaggctccagctccagcctctcccttcgggaaaggtggacagtattcaagggtctgctgtggtacattgttcccttggtcgtagtttactttgccgagtatttcattaaccagggactttttgaactcctctttttctggaacacttccctgagtcacgctcagcaataccgctggtaccagatgctgtaccaggctggcgtctttgcctcccgctcttctctccgctgctgtcgcatccgtttcacctgggccctggccctgctgcagtgcctcaacctggtgttcctgctggcagacgtgtggttcggctttctgccaagcatctacctcgtcttcctgatcattctgtatgaggggctcctgggaggcgcagcctacgtgaacaccttccacaacatcgccctggagaccagtgatgagcaccgggagtttgcaatggcggccacctgcatctctgacacactggggatctccctgtcggggctcctggctttgcctctgcatgacttcctctgccagctctcctgatactcgggatcctcaggacgcaggtcacattcacctgtgggcagagggacaggtcagacacccaggcccaccccagagaccctccatgaactgtgctcccagccttcccggcaggtctgggagtagggaagggctgaagccttgtttccttgcaggggggccagccattgtctcccacttggggagtttcttcctggcatcatgccttctgaataaatgccgattttgtccatgg

SEQ ID NO: 283570 - DNA, 1000 bp, Homo Sapiens
aaaggggatatcggacgagagatgtacattatcaaggaaggcaaactcgctgtggtggcagatgatggagtcactcagtttgtggtattgagcgatggcagctacttcggtgagatcagcattcttaacattaaagggagcaaagctggcaatcgaagaacggccaatattaaaagtattggctactcagacctgttctgtctctcaaaagatgacctcatggaagctctaactgagtacccagatgccaaaactatgctggaagagaaagggaagcagattttaatgaaagatggtctactggatctaaacattgcaaatgctggcagtgatcctaaagatcttgaagagaaggttactcgaatggaggggtcagtagacctcctgcaaaccaggtttgcccgaatcttggctgagtatgagtccatgcagcagaaactgaaacaaagattaaccaaggttgagaaatttctgaaaccgcttattgacacagaattttcaagtattgagggacctggagcggaaagtgggcccatcgactctacatagaaccgaaaagctggtcattaacagggacatgcctcatgatccttttgatcctatgactgacatcaactaaaatttaaaagaagaggaagactcagttgggaaatttttccatgaggaaaatgtgctttggtgcaaggtacaaggcccacaccctctctgagagatactatgattaaaaaagctttatatcttgggatttttcacaactgataatgtgcaaagatataaactgattaacttgtcagtgtctgtattttctgattttttcacatacgctcattttatgtaatattcttcataaaaatgaataagtagccctcactttcatgccatttccattgttgagtgaagcgtatttgaagtaactgagaattaccatgtacatcatatttgggataacatttttaaaaattagactgcaataaagtaaaattaattatgcaaaaaaaaa

SEQ ID NO: 283571 - DNA, 1000 bp, Homo Sapiens
aatctgtctccccagaagacacaggaaacaatgtattgtctgcccagcaatcaaaggcaatgctcaaacacccaagtggcccccaccctcagcccgctcctgcccgcccagcacccccaggccctggggacctggggttctcagactgccaaagaagccttgccatctggcgctcccatggctcttgcaacatctccccttcgtttttgagggggtcatgccgggggagccaccagcccctcactgggttcggaggagagtcaggaagggccacgacaaagcagaaacatcggatttggggaacgcgtgtcatcccttgtgccgcaggctgggcgggagagactgttctgttctgttccttgtgtaactgtgttgctgaaagactacctcgttcttgtcttgatgtgtcaccggggcaactgcctgggggcggggatgggggcagggtggaagcggctccccatttttataccaaaggtgctacatctatgtgatgggtggggtggggagggaatcactggtgctatagaaattgagatgcccccccaggccagcaaatgttcctttttgttcaaagtctatttttattccttgatattttttctttctttttttttttttttgtggatggggacttgtgaatttttctaaaggtgctatttaacatgggaggagagcgtgtgcgctccagcccagcccgctgctcactttccaccctctctccacctgcctctggcttctcaggcctctgctctccgacctctctcctctgaaaccctcctccacagctgcagcccatcctcccggctccctcctagtctgtcctgcgtcctctgtccccgggtttcagagacaacttcccaaagcacaaagcagtttttccctaggggtgggaggaagcaaaagactctgtacctattttgtatgtgtataataatttgagatgtttttaattattttgattgctggaataaagcatgtggaaatgacccaaacataa

SEQ ID NO: 283572 - DNA, 1000 bp, Homo Sapiens; identical to SEQ ID NO: 115072

SEQ ID NO: 283573 - DNA, 1000 bp, Homo Sapiens; identical to SEQ ID NO: 115073

SEQ ID NO: 283574 - DNA, 1000 bp, Homo Sapiens
attaaacttaggtaagaagattcatttaagtcagggttaccccatcaggaggacatggcactatctttaaacgaaacaaagacaatttataatttgaattttatgctcccgtggttggctgttacaggagcatcccattttgccaattttaaagacattcttatatttcatatcagtcttgtaccaaggcaacagtttgacatttggcattagtattttctaaaaaagtttagaatgtgtgtcaatttataatgattatttttttctgtaaagcaaaagatccctttttctgttttgctaggaatttggtgatctaatcctaaatttaaaagatttgttggaaaaaatttttaggaaactcaccttcctcatctaaaagaaaaaggcattttagagaaaactaaagaaatttctcatgagcgtgacactcattttagtgctttgtttccgtgcacttaaaaataattgagaagaaaaactcaattaaaattttgtttataagaaatgttttccttgccaaaccttgatttgtaatgagctcttatatgcagaacacatttcaaatgagttttgctatgggctgcccccagggtggcaatttattttaagagtattttctggtaaaaagaaaaatgtgtattttaagatgaaatattttcttgatgtagcagaatatttcctagttcatttgacccatttgatattttttaaaccatgctctggcatgttgaatatttttgtgcacctaaaacttaagccaatttcaatcttatttgtgattacctttctccttcccaaaaagctttatctattaccaaaagtcaaccctcctaaaagttcaacctgttcatcttgaacttggcctgagaacattttctgggaagaggtaagggtgacaaatggaacatcagaaacgtatcttgcttgctaattattttaaacactttaatgttggtattagaatattatcttcataagttaataaataagtaaaaaaaaa

SEQ ID NO: 283575 - DNA, 1000 bp, Homo Sapiens; identical to SEQ ID NO: 115074

SEQ ID NO: 283576 - DNA, 1000 bp, Homo Sapiens; identical to SEQ ID NO: 115075

SEQ ID NO: 283577 - DNA, 1000 bp, Homo Sapiens
cataggctcaaagtacaagaaagttgtgtatcggcagtatactgatagcacattccgtgttccagtggagagaaaagctgaagaagaacatctgggaattctaggtccacaacttcatgcagatgttggagacaaagtcaaaattatctttaaaaacatggccacaaggccctactcaatacatgcccatggggtacaaacagagagttctacagttactccaacattaccaggtgaaactctcacttacgtatggaaaatcccagaaagatctggagctggaacagaggattctgcttgtattccatgggcttattattcaactgtggatcaagttaaggacctctacagtggattaattggccccctgattgtttgtcgaagaccttacttgaaagtattcaatcccagaaggaagctggaatttgcccttctgtttctagtttttgatgagaatgaatcttggtacttagatgacaacatcaaaacatactctgatcaccccgagaaagtaaacaaagatgatgaggaattcatagaaagcaataaaatgcatgctattaatggaagaatgtttggaaacctacaaggcctcacaatgcacgtgggagatgaagtcaactggtatctgatgggaatgggcaatgaaatagacttacacactgtacattttcacggccatagcttccaatacaagcacaggggagtttatagttctgatgtctttgacattttccctggaacataccaaaccctagaaatgtttccaagaacacctggaatttggttactccactgccatgtgaccgaccacattcatgctggaatggaaaccacttacaccgttctacaaaatgaagacaccaaatctggctgaatgaaataaattggtgataagtggaaaaaagagaaaaaccaatgattcataacaatgtatgtgaaagtgtaaaatagaatgttactttggaatgactataaacattaaaagagactggagcat

SEQ ID NO: 283578 - DNA, 1000 bp, Homo Sapiens
gacattgagtttccaagtattgagataagggaatataaatagtattatatgtatcaggaaatctctcatcttgtttttgtttcatgtattttttaaagttttcatttgtgccacaaaaatctgtcgtggaatatattttattttcattaattcagtgaagttgagacttcatagtaattttagaatgcaacttgaaggtaaaaattttactttgtcaatactgaagtctctgctgtaatccttatatatctttctccagagaacataatattgtcaaatagatacacatttttctaataggtatttagaagcacttgaaataatctctgcatgtgttacaattcagttatttctgtagtttgtaaactctaaagtgacattactattattttagagatgtctaagttgtaattttgatttttgtggaaccattgtttgttaatgttgggattctctgcacttttgaatgtgaaagcttatatccctgaattctgatacttaagagttttctatttcagacatctctgtgtggaagttgagactaagaataatcctagggatgtcatgaatttaggcaatgtttctcatttggaaaatgaaatgagaaataatttccttctttaaagcaagtatatatagtatgagaaacttggaggcatttcatacacacgtttcttaggaaaatggacacattgaaaatgtcctcttttttatattagagattctgcagctctttgctcttaagagcaaatcacaacaggattcttaatgtatgatttctttgttcatatattatgaatgtattattttatttgcttcgtaataaagtttataaggaagagcatctcatacatatcattatcgtggaacacgttgaatgtttgtgattctgtgtggcctttttggggctggaaaatgtatgaattcttcaactgtcttacaagagatctgctaataaattttattattaaataagactaaaaaaaaaaaaaaaaaaaaa

SEQ ID NO: 283579 - DNA, 1000 bp, Homo Sapiens; identical to SEQ ID NO: 220483

SEQ ID NO: 283580 - DNA, 674 bp, Homo Sapiens; identical to SEQ ID NO: 115077

SEQ ID NO: 283581 - DNA, 1000 bp, Homo Sapiens
aaagagccatgttaaaatacgaaatgatctgctgaataaaatacttgaaaattacaaggagaaattccggagtgactctatcaccaacatgctggacacactgatgcaagccaagatgaactcagataatggcaatgctggcccagatcaagattcagagctgctttcagataaccacattctcaccaccataggggacatctttggggctggcgtggagaccaccacctctgtggttaaatggaccctggccttcctgctgcacaatcctcaggtgaagaagaagctctacgaggagattgaccagaatgtgggtttcagccgcacaccaactatcagtgaccgtaaccgtctcctcctgctggaggccaccatccgagaggtgcttcgcctcaggcccgtggcccctatgctcatcccccacaaggccaacgttgactccagcatcggtgagtttgctgtggacaagggcacagaagttatcatcaatctgtgggcgctgcatcacaatgagaaggagtggcaccagccggatcagttcatgcctgagcgtttcttgaatccagcggggacccagctcatctcaccgtcagtaagctatttgcccttcggagcaggacctcgctcctgtataggtgagatcctggcccgccaggagctcttcctcatcatggcctggctgctgcagaggttcgacctggaggtgccagatgatgggcagctgccctccctggaaggcatccccaaggtggtctttctgatcgactctttcaaagtgaagatcaaggtgcgccaggcctggagggaagcccaggctgagggtagcacctaaaggctgtaactcacagcccctgtccaccctatgtggccccacaacacagatttagagatacaaccccccacccttctccgccattcttccctactcccaacccactctgccttctttttcagcttgtggcaatgccagtgatgtgcataaacagttttttttttttcc

SEQ ID NO: 283582 - DNA, 1000 bp, Homo Sapiens; identical to SEQ ID NO: 115078

SEQ ID NO: 283583 - DNA, 1000 bp, Homo Sapiens
tcgagtacgacgaccctcgcttcctcaggctgctggacctagctcaggagggactgaaggaggagtcgggctttctgcgcgaggtgctgaatgctgtccccgtcctcctgcatatcccagcgctggctggcaaggtcctacgcttccaaaaggctttcctgacccagctggatgagctgctaactgagcacaggatgacctgggacccagcccagcccccccgagacctgactgaggccttcctggcagagatggagaaggccaaggggaaccctgagagcagcttcaatgatgagaacctgtgcatagtggtggctgacctgttctctgccgggatggtgaccacctcgaccacgctggcctggggcctcctgctcatgatcctacatccggatgtgcagcgccgtgtccaacaggagatcgacgacgtgatagggcaggtgcggcgaccagagatgggtgaccaggctcacatgccctacaccactgccgtgattcatgaggtgcagcgctttggggacatcgtccccctgggtgtgacccatatgacatcccgtgacatcgaagtacagggcttccgcatccctaagggaacgacactcatcaccaacctgtcatcggtgctgaaggatgaggccgtctgggagaagcccttccgcttccaccccgaacacttcctggatgcccagggccactttgtgaagccggaggccttcctgcctttctcagcaggccgccgtgcatgcctcggggagcccctggcccgcatggagctcttcctcttcttcacctccctgctgcagcacttcagcttctcggtgcccactggacagccccggcccagccaccatggtgtctttgctttcctggtgaccccatccccctatgagctttgtgctgtgccccgctagaatggggtacctagtccccagcctgctccctagccagaggctctaatgtacaataaagcaatgtggtagttccaaaaaaaaaaaaaaaa

SEQ ID NO: 283584 - DNA, 1000 bp, Homo Sapiens; identical to SEQ ID NO: 115079

SEQ ID NO: 283585 - DNA, 1000 bp, Homo Sapiens; identical to SEQ ID NO: 115080

SEQ ID NO: 283586 - DNA, 1000 bp, Homo Sapiens
aataactgtgtggcagttaattggatgttcactgccagttgtcttatgtgaaaaattaactttttgtgtggcaattagtgtgacagtttccaaattgccctatgctgtgctccatatttgatttctaattgtaagtgaaattaagcattttgaaacaaagtactctttaacatacaagaaaatgtatccaaggaaacattttatcaataaaaattacctttaattttaatgctgtttctaagaaaatgtagttagctccataaagtacaaatgaagaaagtcaaaaattatttgctatggcaggataagaaagcctaaaattgagtttgtggactttattaagtaaaatccccttcgctgaaattgcttatttttggtgttggatagaggatagggagaatatttactaactaaataccattcactactcatgcgtgagatgggtgtacaaactcatcctcttttaatggcatttctctttaaactatgttcctaaccaaatgagatgataggatagatcctggttaccactcttttactgtgcacatatgggccccggaattctttaatagtcaccttcatgattatagcaactaatgtttgaacaaagctcaaagtatgcaatgcttcattattcaagaatgaaaaatataatgttgataatatatattaagtgtgccaaatcagtttgactactctctgttttagtgtttatgtttaaaagaaatatattttttgttattattagataatatttttgtatttctctattttcataatcagtaaatagtgtcatataaactcatttatctcctcttcatggcatcttcaatatgaatctataagtagtaaatcagaaagtaacaatctatggcttatttctatgacaaattcaagagctagaaaaataaaatgtttcattatgcacttttagaaatgcatatttgccacaaaacctgtattactgaataatatcaaataaaatatcataaagcatttt

SEQ ID NO: 283587 - DNA, 1000 bp, Homo Sapiens
aattctacgcaagcgcaacaaagctttgaggaaaatccgaaaactgcagaagcaaggcttgctacaagtgacaccaaaaggatttatatgtactgttgacaccataaaagattctgacgaagagctggacaacaatcagatagaagtactggaccagccaatcaataccacagacctgcctttccacattgactggaatgatgatcttcctctcaacattgaggtccccaaaatcagcctccacagcctcattctcgacttttcagcagtgtcctttcttgatgtttcttcagtgaggggccttaaatcgattttgcaagaatttatcaggatcaaggtagatgtgtatatcgttggaactgatgatgacttcattgagaagcttaaccggtatgaattttttgatggtgaagtgaaaagctcaatatttttcttaacaatccatgatgctgttttgcatattttgatgaagaaagattacagtacttcaaagtttaatcccagtcaggaaaaagatggaaaaattgattttaccataaatacaaatggaggattacgtaatcgggtatatgaggtgccagttgaaacaaaattctaatcaacatataattcagaaggatcttcatctgactatgacataaaaacaactttatacccagaaagttattgataagttcatacattgtacgaagagtatttttgacagaatatgtttcaaactttggaacaagatggttctagcatggcatatttttcacatatctagtatgaaattatataagtattctaaattttatatcttgtagctttatcaaagggtgaaaattattttgttcatacatatttttgtagcactgacagatttccatcctagtcactaccttcatgcataggtttagcagtatagtggcgccactgttttgaatctcataatttatacaggtcatattaatatatttccattaaaaaatcagttgtacagtgaaaaaaaaaaagaaaa

SEQ ID NO: 283588 - DNA, 1000 bp, Homo Sapiens; identical to SEQ ID NO: 220484

SEQ ID NO: 283589 - DNA, 1000 bp, Homo Sapiens
agaatgtatctcgaaagaatgaaggaagaagaaaaaaggatccttgatgtttgtgacaagaaaatgagaaagttagtatctgcaatacagagcttgttcctgttcagtgactgaccctctgtattctgtatagacaccaggccgatacacagtggagttcccaggccttgtttgcaggaagccgactgtaaagacagccccagctcaaggctattaggttgaatatttgctttcatgagtaaatgtggatctttggggaatggcttcaaaataagtcacgaacacaaattctttgtaaattatgtaaattcctgtttatataaattggcaacaacttataccgtctgacagttcaaaatctctttcagctgcgctcttcccaccgagccgagcttactgtgagtgtggagatgttatcccaccatgtaaagtcgcctgcgcaggggagggctgcccatctccccaacccagtcacagagagataggaaacggcatttgagtgggtgtccagggccccgtagagagacatttaagatggtgtatgacagagcattggccttgaccaaatgttaaatcctctgtgtgtatttcataagttattacaggtataaaagtgatgacctatcatgaggaaatgaaagtggctgatttgctggtaggattttgtacagtttagagaagcgattatttattgtgaaactgttctccactccaactcctttatgtggatctgttcaaagtagtcactgtatatacgtatagagaggtagataggtaggtagattttaaattgcattctgaatacaaactcatactccttagagcttgaattacatttttaaaatgcatatgtgctgtttggcaccgtggcaagatggtatcagagagaaacccatcaattgctcaaatactcagaaagtactgtcaaaagcctaataaaaaacctaaagtttgctctgaaaaaaaaaaaaaaaaaaaaaaaaaaaaaaaaaaaaaaaaa

SEQ ID NO: 283590 - DNA, 1000 bp, Homo Sapiens
caacaatgtggccagaaagaaagagcaataataattaattcacacaccatatggattctatttataaatcacccacaaacttgttctttaatttcatcccaatcactttttcagaggcctgttatcatagaagtcattttagactctcaattttaaattaattttgaatcactaatattttcacagtttattaatatatttaatttctatttaaattttagattatttttattaccatgtactgaatttttacatcctgataccctttccttctccatgtcagtatcatgttctctaattatcttgccaaattttgaaactacacacaaaaagcatacttgcattatttataataaaattgcattcagtggctttttaaaaaaaatgtttgattcaaaactttaacatactgataagtaagaaacaattataatttctttacatactcaaaaccaagatagaaaaaggtgctatcgttcaacttcaaaacatgtttcctagtattaaggactttaatatagcaacagacaaaattattgttaacatggatgttacagctcaaaagatttataaaagattttaacctattttctcccttattatccactgctaatgtggatgtatgttcaaacaccttttagtattgatagcttacatatggccaaaggaatacagtttatagcaaaacatgggtatgctgtagctaactttataaaagtgtaatataacaatgtaaaaaattatatatctgggaggattttttggttgcctaaagtggctatagttactgattttttattatgtaagcaaaaccaataaaaatttaagtttttttaacaactaccttatttttcactgtacagacactaattcattaaatactaattgattgtttaaaagaaatataaatgtgacaagtggacattatttatgttaaatatacaattatcaagcaagtatgaagttattcaattaaaatgccacatttctggtctctggg

SEQ ID NO: 283591 - DNA, 1000 bp, Homo Sapiens; identical to SEQ ID NO: 115081

SEQ ID NO: 283592 - DNA, 1000 bp, Homo Sapiens
agacctttttgctgccataaatgcctcatgtgtggtctggaagtgctgtgaggatgggacactggagttgactgactccaacacaaagtatgttggcaacaacatcagcaccaagggtgtgggcagtgaccgctgcgaggacatcactcagaactacaagtatcctgaagggtctcttcaggaaaaagaggtgctggagagagtcgagaaagagaaaatggaacgtgagaaagacaacggcatccgtcctcccagtctcgagactgccagtcctctgtacctgctcttgaaagcacccagctccctacccctgagaggggatgcccagatctcagtgacgctggttaatcacagtgagcaggagaaggcagtgcagctggcaattggggtccaggctgtacactacaacggtgtccttgctgccaagctctggaggaagaagctgcacctcacgctcagtgccaacctggaaaagataataaccatcggcctgttcttctccaattttgagcgaaacccacccgagaacaccttccttagactcaccgccatggcaacacactctgaatccaaccttagctgctttgctcaggaagacattgccatttgtagaccacaccttgccatcaagatgccagagaaagcagagcagtatcaacccctcacagcctcagtcagcctccagaactccctagatgcccccatggaggactgtgtgatctccatcctgggaagggggctcattcacagagagaggagctacagattccgttcagtgtggcctgaaaacaccatgtgtgccaagttccagttcacgccaacacatgtggggctccagagactcactgtggaagtggactgcaacatgttccagaacctaaccaactataaaagcgtcaccgtggtagcccctgaactatcagcttaaacttccagctctatcaccactctcctgccaacccttgttctacaatctaaaccaaacatgtgctaggaagag

SEQ ID NO: 283593 - DNA, 1000 bp, Homo Sapiens; identical to SEQ ID NO: 115082

SEQ ID NO: 283594 - DNA, 1000 bp, Homo Sapiens; identical to SEQ ID NO: 115083

SEQ ID NO: 283595 - DNA, 1000 bp, Homo Sapiens; identical to SEQ ID NO: 115084

SEQ ID NO: 283596 - DNA, 1000 bp, Homo Sapiens
ttcattttgcacctgcagccaagcaaatgcctgccaaattttagatttaccttgttagaagaggtggccccatattaacaaattgcatttgtgggaaacttaaccacctacaaggagataagaaagcaggtgcaacactcaagtctattgaataatgtagttttgtgatgcattttatagaatgtgtcacactgtggcctgatcagcaggagccaatatcccttactttaaccctttctgggatgcaatactaggaagtaaagtgaagaatttatctctttagttagtgattatatttcacccatctctcaggaatcatctcctttgcagaatgatgcaggttcaggtcccctttcagagatataataagcccaacaagttgaagaagctggcggatctagtgaccagatatatagaaggactgcagccactgattctctcttgtccttcacatcaccattttgagacctcagcttggcactcaggtgctgaagggtaatatggactcagccttgcaaatagccagtgctagttctgacccaaccacagaggatgctgacatcatttgtattatgttccaaggctactacagagaaggctgcctgctatgtatttgcaaggctgatttatggtcagaatttccctctgatatgtctagggtgtgatttaggtcagtagactgtgattcttagcaaaaaatgaacagtgataagtatactgggggcaaaatcagaatggaatgctctggtctatataaccacatttctgagcctttgagactgttcctgagccttcagcactaacctatgagggtgagctggtcccctctatatatacatcatacttaactttactaagtaatctcacagcatttgccaagtctcccaatatccaattttaaaatgaaatgcattttgctagacagttaaactggcttaacttagtatattattattaattacaatgtaatagaagcttaaaataaagttaaactgattat

SEQ ID NO: 283597 - DNA, 1000 bp, Homo Sapiens; identical to SEQ ID NO: 115085

SEQ ID NO: 283598 - DNA, 1000 bp, Homo Sapiens; identical to SEQ ID NO: 220489

SEQ ID NO: 283599 - DNA, 1000 bp, Homo Sapiens
ctgtatacagtacaggatctttggtctactctatcacaaggccagtaccacactcatgaagaaagaacacaggagtagctgagaggctaaaactcatcaaaaacactactccttttcctctaccctattcctcaatcttttaccttttccaaatcccaatccccaaatcagtttttctctttcttactccctctctcccttttaccctccatggtcgttaaaggagagatggggagcatcattctgttatacttctgtacacagttatacatgtctatcaaacccagacttgcttccatagtggagacttgcttttcagaacatagggatgaagtaaggtgcctgaaaagtttgggggaaaagtttctttcagagagttaagttattttatatatataatatatatataaaatatataatatacaatataaatatatagtgtgtgtgtgtatgcgtgtgtgtagacacacacgcatacacacatataatggaagcaataagccattctaagagcttgtatggttatggaggtctgactaggcatgatttcacgaaggcaagattggcatatcattgtaactaaaaaagctgacattgacccagacatattgtactctttctaaaaataataataataatgctaacagaaagaagagaaccgttcgtttgcaatctacagctagtagagactttgaggaagaattcaacagtgtgtcttcagcagtgttcagagccaagcaagaagttgaagttgcctagaccagaggacataagtatcatgtctcctttaactagcataccccgaagtggagaagggtgcagcaggctcaaaggcataagtcattccaatcagccaactaagttgtccttttctggtttcgtgttcaccatggaacattttgattatagttaatccttctatcttgaatcttctagagagttgctgaccaactgacgtatgtttccctttgtgaattaataaactggtgttctggttcat

SEQ ID NO: 283600 - DNA, 1000 bp, Homo Sapiens
caagcataacatggagctcttgttgcactaaaaagtggattacaaatctcctcgactgctttagtggggaaaggaatcaattatttatgaactgtccggccccgagtcactcagcgtttgcgggaaaataaaccactggtcccagagcagaggaaggctacttgagccggacaccaagcccgcctccagcaccaagggcgggcagcaccctccgaccctcccatgcgggtgcacacgaagggtgaggctgacacagccactgcggagtccaggctgctagaggtgctcatcctcactgccgtcctcaggtgggttcgggcttcaccgcctggccctctgtggtcacagaggggctcggtggcccaggtggtggttccgcctccaggggcagggccttgtcctgggtctgtgtcagcgggtgcaccatggacatgtgtacattgaggttgtgggccttctcaaaccgccggccacactggtcacaggcaaagtccagctcagtctcagccttgtgtttggtcatgtggtacttgagggatgcccgctgcctgcactggaacccacagacctcacacctgggggacagaggcagataagaaggtgcgagggccacagccctgggagggggtcctgactcacacttactgcaaaggcttggctcccgaatgtcgcatttggtggacgagaaggtgcttccgctgcttgaaggtttgtccacattcgtcacagatatagttccgcacctctgagaggggagagtccagtgagtccaggcccctgatgctccaacctcccggggggacgacgatgacaatgtgaaaccatcacagctgggaagacatttctgcacatggttcaccatgcagtgggcccaagcaaggggcctatgagggcctcgtttattaagatctttaaactgctttatacactgtcacgtggcttcatcagctgtgtgcatttcaggatggtttttaaagaaacctcagaaagctatttcctt

SEQ ID NO: 283601 - DNA, 1000 bp, Homo Sapiens; identical to SEQ ID NO: 220490

SEQ ID NO: 283602 - DNA, 1000 bp, Homo Sapiens
ttcaccatccagagaccaaataattaaaagaaaaacaaatatagataggtagaactatattttcccccaatcagaatcatcatatcataggtacaatctttcaccaagtaaatttgtataaataagcactattctttgtattaccaaagcaaggtacaggtgactaccctagttcaaaacaaccactttctcaggcttctcatgtgtgtagctaagctaccttgtcatatgtgttgattcttgaaaactgggacgtgtatttccattgggggttggccatttatgctgacatgccatccttccagcaaacgtacgggaatgtgctttcaattgatggactactctattttttgcaaatttgtaaactttgcttctccaaatacaagtactaggttgtccatttatggtacctatttggtgctagtaaattttcaaactagatttataaatgcactgtaatatgtacacaacttagaaaccaaattacaagtattcagttccaatacttcattaatttcaatcaaccaaagttagttcagtagcttatctcagttatgagtataatacattacatgtaaattaagtgtgtgtatactgtaatcgtgctattttttatcattgaaacatttataaactagaataataatgcccttaatgtgagggtttgtaatggtgcttattaagaccaaagacttgttaaatgtatacaccaagtggtaatgaaatttcggtgactggcccacacgtgcatagaggtctgggaggaccaggaaacagcctcagtggccagaggatcaccagtgcatccttcatcacagcatgtgcaatatgccaagattaccctcggtcattcctgtcaacaaggggtcaatgtcataaatgtcacaataaaacaatctcttcttttttttagtttaccccttggctttgtgttcttgcatggatttggggttggaggggccattccggaggctaaataaagtctcctggatttaaatta

SEQ ID NO: 283603 - DNA, 1000 bp, Homo Sapiens; identical to SEQ ID NO: 220493

SEQ ID NO: 283604 - DNA, 1000 bp, Homo Sapiens
agctactttcgctggcgggagacgctgcggcctcgctccttcagctgggcactggatttctgcaaggcctgctggaaactgcagcaggaatccaggtaccagacggtgcgcagcatagcggcttggttcacctgagaggccggcatggtgcctgggctgccgggaacctcatctgcctggggcctcacctgctggagtcctttgtggccaaccctctctcttacctgggacctcacacgctgggcttcacggctgccaggagcctctcccctccagaagacttgcctgctagggacctcgcctgctggggacctcgcctgttggggacctcacctgctggggacctcacctgctggggaccttggctgctggaggctgcacctactgaggatgtcggcggtcggggactttacctgctgggacctgctcccagagaccttgccacactgaatctcacctgctggggacctcaccctggagggccctgggccctggggaactggcttacttggggccccacccgggagtgatggttctggctgatttgtttgtgatgttgttagccgcctgtgaggggtgcagagagatcatcacggcacggtttccagatgtaatactgcaaggaaaaatgatgacgtgtctcctcactctagaggggttggtcccatgggttaagagctcaccccaggttctcacctcaggggttaagagctcagagttcagacaggtccaagttcaagcccaggaccaccacttatagggtacaggtgggatcgactgtaaatgaggacttctggaacattccaaatattctggggttgagggaaattgctgctgtctacaaaatgccaagggtggacaggcgctgtggctcacgcctgtaattccagcactttgggaggctgaggtaggaggattgattgaggccaagagttaaagaccagcctggtcaatatagcaagaccacgtctctaaataaaaaataataggccggccagca

SEQ ID NO: 283605 - DNA, 1000 bp, Homo Sapiens
taagcccagctctgctttttccagattcttccactggctccacatccaccccactggatcttcagaaggctagagggcgactctggtggtgcttttgtatgtttcaattaggctctgaaatcttgggcaaaatgacaaggggagggccaggattcctctctcaggtcactccagtgttacttttaattcctagagggtaaatatgactcctttctctatcccaagccaaccaagagcacattcttaaaggaaaagtcaacatcttctctctttttttttttttttgagacagggtctcactatgttgcccaggctgctcttgaattcctgggctcaagcagtcctcccaccctaccacagcgtcccgcgtagctggcatacaggtgcaagccactatgtccagctagccaactcctccttgcctgcttttctttttttttctttttttgagacggcgcacctatcacccaggctggagtggagtggcacgatcttggctcactgcaacctcttcctcctggttcaagcgattctcatgtctcagcctcctcagtagctaggactaccggcgtgcaccaccatgccaggctaatttttatatttttagaattttagaagagatgggatttcatcatgttggccaggctggtctcgaactcctgacctcaagtgatccacctgccttggcctcccaaggtgctaggattacaggcatgagccaccgcaccgggccctccttgcctgtttttcaatctcatctgatatgcagagtatttctgccccacccacctaccccccaaaaaaagctgaagcctatttatttgaaagtccttgtttttgctactaattatatagtataccatacattatcattcaaaacaaccatcctgctcataacatctttgaaaagaaaaatatatatgtgcagtattttattaaagcaacattttatttaagaataaagtcttgttaattactatattttagatgcaatgtgatc

SEQ ID NO: 283606 - DNA, 1000 bp, Homo Sapiens; identical to SEQ ID NO: 115087

SEQ ID NO: 283607 - DNA, 1000 bp, Homo Sapiens; identical to SEQ ID NO: 115088

SEQ ID NO: 283608 - DNA, 1000 bp, Homo Sapiens
agcctgggactcctcggtgggccaactatgtcaagggagtgattcagtactacccagctgcccccctccctggcttcagtgcagtggtggtcagctcagtgcccctggggggtggcctgtccagctcagcatccttggaagtggccacgtacaccttcctccagcagctctgtccagactcgggcacaatagctgcccgcgcccaggtgtgtcagcaggccgagcacagcttcgcagggatgccctgtggcatcatggaccagttcatctcacttatgggacagaaaggccacgcgctgctcattgactgcaggtccttggagaccagcctggtgccactctcggaccccaagctggccgtgctcatcaccaactctaatgtccgccactccctggcctccagcgagtaccctgtgcggcggcgccaatgtgaagaagtggcccgggcgctgggcaaggaaagcctccgggaggtacaactggaagagctagaggctgccagggacctggtgagcaaagagggcttccggcgggcccggcacgtggtgggggagattcggcgcacggcccaggcagcggccgccctgagacgtggcgactacagagcctttggccgcctcatggtggagagccaccgctcactcagagacgactatgaggtgagctgcccagagctggaccagctggtggaggctgcgcttgctgtgcctggggtttatggcagccgcatgacgggcggtggcttcggtggctgcacggtgacactgctggaggcctccgctgctccccacgccatgcggcacatccaggagcactacggcgggactgccaccttctacctctctcaagcagccgatggagccaaggtgctgtgcttgtgaggcacccccaggacagcacacggtgagggtgcggggcctgcaggccagtcccacggctctgtgcccggtgccatcttccatatccgggtgctcaataaacttgtgcctccaatgtggta

SEQ ID NO: 283609 - DNA, 1000 bp, Homo Sapiens
gatcattgcttttgaaagagcaggtcttcttttcattttcaacttccatccaagcaagagctacactgactaccgagttggaacagcattgccagggaaattcaaaattgtgctagattcagatgcagcggaatatggagggcatcagagactggaccacagcactgactttttttctgaggcttttgaacataatgggcgtccctattctcttttggtgtacattccaagcagagtggccctcatccttcagaatgtggatctgccgaattgaagaggcctgatttcagctccaccagatgcagatttgtgttttgttttcttgttatcactgtcacacagcttataacatgtatgcttttcagaatacagttgtctagccaagccatcaagtgtctgaaattcaatattggtttatgcaaatacagcaaacttttatttaagtagataggagaatatgtttaaaatattaggaatcctagaccatattttcaagtcatcttagcagctaggattctcaaatggaagtgttatatataatatgttaaaaacattttgctttcctggctaattatttgatccttttaaatccaaatttgaatcatttgtcatgtatgattatttctgttaaatgtacacagtatttaagatggatatttggtggctctatttgttctgatatcttttggtctaaattatgaggtaccaagattgtttctttgtttctttttttcaaattgtgtttagaaatactgtaataaatatgcagtagtgatataaagaattatatccaaggtaatataaaagccattacgtatgaactcatccgtgtctcattttgtgttttattttgtgatctcttgtccactaagtatcttgttaaatgccagtatctcagtctttctgaagccctgaaatggtaattgtagcatttcagaaaatgtctttcatttcaatcaataaaaagcttttgtaaaaaaaaaaaaaaaaaaaaaaaaaa

SEQ ID NO: 283610 - DNA, 1000 bp, Homo Sapiens
tgggcctggccaccctccccgagaggagcttcttcagcctctacctgggcatcggctggggtgcccccatgctgttcgtcgtcccctgggcagtggtcaagtgtctgttcgagaacgtccagtgctggaccagcaatgacaacatgggcttctggtggatcctgcggttccccgtcttcctggccatcctgatcaacttcttcatcttcgtccgcatcgttcagctgctcgtggccaagctgcgggcacggcagatgcaccacacagactacaagttccggctggccaagtccacgctgaccctcatccctctgctgggcgtccacgaagtggtctttgccttcgtgacggacgagcacgcccagggcaccctgcgctccgccaagctcttcttcgacctcttcctcagctccttccagggcctgctggtggctgtcctctactgcttcctcaacaaggaggtgcagtcggagctgcggcggcgttggcaccgctggcgcctgggcaaagtgctatgggaggagcggaacaccagcaaccacagggcctcatcttcgcccggccacggccctcccagcaaggagctgcagtttgggaggggtggtggcagccaggattcatctgcggagacccccttggctggtggcctccctagattggctgagagccccttctgaaccctgctgggaccccagctagggctggactctggcacccagaggcgtcgctggacaacccagaactggacgcccagctgaggctgggggcgggggagccaacagcagcccccacctaccccccacccccagtgtggctgtctgcgagattgggcctcctctccctgcacctgccttgtccctggtgcagaggtgagcagaggagtccagggcgggagtgggggctgtgccgtgaactgcgtgccagtgtccccacgtatgtcggcacgtcccatgtgcatggaaatgtcctccaacaataaagagctcaagtggtcaccgtg

SEQ ID NO: 283611 - DNA, 1000 bp, Homo Sapiens; identical to SEQ ID NO: 115090

SEQ ID NO: 283612 - DNA, 1000 bp, Homo Sapiens
atttttaagacagttgggatgtcacttaacattttttttttttgagctaaagtcagggaatcaagccatgcttaatatttaacaatcacttatatgtgtgtcgaagagtttgttttgtttgtcatgtattggtacaagcagatacagtataaactcacaaacacagatttgaaaataatgcacatatggtgttcaaatttgaacctttctcatggatttttgtggtgtgggccaatatggtgtttacattatataattcctgctgtggcaagtaaagcacactttttttttctcctaaaatgtttttccctgtgtatcctattatggatactggttttgttaattatgattctttattttctctcctttttttaggatatagcagtaatgctattactgaaatgaatttcctttttctgaaatgtaatcattgatgcttgaatgatagaattttagtactgtaaacaggctttagtcattaatgtgagagacttagaaaaaatgcttagagtggactattaaatgtgcctaaatgaattttgcagtaactggtattcttgggttttcctacttaatacacagtaattcagaacttgtattctattatgagtttagcagtcttttggagtgaccagcaactttgatgtttgcactaagattttatttggaatgcaagagaggttgaaagaggattcagtagtacacatacaactaatttatttgaactatatgttgaagacatctaccagtttctccaaatgccttttttaaaactcatcacagaagattggtgaaaatgctgagtatgacacttttcttcttgcatgcatgtcagctacataaacagttttgtacaatgaaaattactaatttgtttgacattccatgttaaactacggtcatgttcagcttcattgcatgtaatgtagacctagtccatcagatcatgtgttctggagagtgttctttattcaataaagttttaatttagtataaacat

SEQ ID NO: 283613 - DNA, 1000 bp, Homo Sapiens; identical to SEQ ID NO: 115091

SEQ ID NO: 283614 - DNA, 1000 bp, Homo Sapiens
acccgggggcaggccgccccggtcagcagatgcttgggcagattagtgctacctcacacatcaacatctaccaagggccagagagctgcctgccaggggctcacggcatgggcagccagccgtcaagcttggcagttgtcaggggctaccagccatgtgccagctttgggggcagcaggcgccaggctatgccgagggacagccttgctctgcagtcaggacagctcagtgacacaagtcagacctgcagggtgaatggtatcaagatggagatgaaagggcagccccatccgctgtgctctaatctgcagaattactctggtcagttctatgaccaaaccgtgggcttcagtcagcaagacacgaaagctggttcattctctatttcagacgccagctgcctgctacaggggaccagcgccaaaaactctgagttactttccccaggtgctaatcaggtgacaagcacagtggacagcctcgacagccatgacctggaaggggtacagattgacttcgatgccatcatagacgatggggaccactccagcctgatgtcgggggccctgagcccaagtatcattcagaacctttcccatagctcctcccgcctcaccacgcctcgggcgtccctcccattcccagcgctgtccatgagcaccaccaacatggctatcggggacatgagttctttgctgacctccctagcggaagaaagcaaattccttgcagttatgcaataggctttaggaaaaaaagactgcaaccaacggaaatcaataggagttgaagagattaaactgactttgttttggctgtttttttagttctgtatgtattttagcaatctcatctcacctaactgagatgtgtttcaattatattccttttatggaaaaggactctgaaaaaccctaaagtattctagggagaaactgtcttccatttcagttttgaatcagtattgttacactcaaaccaccctctttttaaaaaaaaa

SEQ ID NO: 283615 - DNA, 1000 bp, Homo Sapiens; identical to SEQ ID NO: 220498

SEQ ID NO: 283616 - DNA, 1000 bp, Homo Sapiens
atttttaactaccacaaaacccgtatcactcttagaatccaccaaaaaaaccatccctgaacttgatcagccaccaaagctccgtggggtgctccaagggcatttggagagctccagaaatgacccttttctccaccccgacttttgctgcctcctccccctgggcttctatgtcttgggtctcttctggctgctctttgcctctgtggtcctcatcctgctgctgagctgggttgggcatgtgaaaccacaggccctggactctggccaaggtgctgctctgaccacagccacacaaaccacacacctggagctgcagaggggacggcaagtgacagtgccccgggcctggctgctcttccttcgaggttcgcttcccactttccgctccagcctcttcctgtgggtacggcctaatggccgtgtggggcctctagtggcaggaaggaggccctcagctctgagtcagggtcgtggtcaggacctgctgagcacagtgagcattaggtactctggccacagcctctgagggtgggaggtttggggaccttgagagaagagcctgtgggctctcctattggaatctagttgggggttggaggggtaaggaacacagggtgataggggaggggtcttagttcctttttctgtatcagaagccctgtcttcacaacacaggcacacaatttcagtcccagccaaagcagaaggggtaatgacatggacttggcggggggacaagacaaagctcccgatgctgcatggggcgctgccagatctcacggtgaaccattttggcagaatacagcatggttcccacatgcatctatgcacagaagaaaatctggaaagtgatttatcaggatgtgagcactcgttgtgtctggatgttacaaatatgggtggttttattttctttttccctgtttagcattttctagttttccactattattgtatattatctgtataataaaaaataattttagggttgggaaaa

SEQ ID NO: 283617 - DNA, 1000 bp, Homo Sapiens
gggaagcacgtctactgctggagaggtcacatgctgccaagtgcccagacattgccacccagctggctgggactaagaaggtgcagcaggagctaagcaggccgggcatgctggagatgttgctccctggccagcctgaggctgtggcccgcctccgcgccacctttgctggcctctactcactggatgtgggtgaagaaggggaccaggccatcgccgaggcccttgctgcccctagccggtttgtgctaaagccccagagagagggtggaggtaacaacctatatggggaggaaatggtacaggccctgaaacagctgaaggacagtgaggagagggcctcctacatcctcatggagaagatcgaacctgagccttttgagaattgcctgctacggcctggcagccctgcccgagtggtccagtgcatttcagagctgggcatctttggggtctatgtcaggcaggaaaagacactcgtgatgaacaagcacgtggggcatctacttcgaaccaaagccatcgagcatgcagatggtggtgtggcagcgggagtggcagtcctggacaacccataccctgtgtgagggcacaaccaggccacgggaccttctatcctctgtatttgtcattcctctcctagccctcctgaggggtatcctcctaaagacctccaaagtttttatggaagggtaaatactggtaccttcccccagctttccatctgaggaccagaaaagttgtgtctcccttagatgagatctagacgcccccaaatccttgagatgtgggtatagctcagggtaagctgctctgaggtaaaggtccatgaaccctgccccactcctgtcagcccctcatcagccttttcagcaggttccagtgcctgacttgggataggactgagtggtaggaggagggggagtggaggggcatagcctttccctaattctgccttaaataaaactgcattgctgattcaaaaaaaaaaaaaaaaaaa

SEQ ID NO: 283618 - DNA, 1000 bp, Homo Sapiens
ttactgtgcctggctaactatagtcgagggggtgatggtcctatgtgtcgcccagtaattctgttgccggaagataccccccccttcttagagcttaaaggatcacgccatccttgcattacgaagactttttttggagatgattttattcctaatgacattctaataggctgtgaggaagaggagcaggaaaatggcaaagcctattgtgtgcttgttactggaccaaatatggggggcaagtctacgcttatgagacaggctggcttattagctgtaatggcccagatgggttgttacgtccctgctgaagtgtgcaggctcacaccaattgatagagtgtttactagacttggtgcctcagacagaataatgtcaggtgaaagtacattttttgttgaattaagtgaaactgccagcatactcatgcatgcaacagcacattctctggtgcttgtggatgaattaggaagaggtactgcaacatttgatgggacggcaatagcaaatgcagttgttaaagaacttgctgagactataaaatgtcgtacattattttcaactcactaccattcattagtagaagattattctcaaaatgttgctgtgcgcctaggacatatggcatgcatggtagaaaatgaatgtgaagaccccagccaggagactattacgttcctctataaattcattaagggagcttgtcctaaaagctatggctttaatgcagcaaggcttgctaatctcccagaggaagttattcaaaagggacatagaaaagcaagagaatttgagaagatgaatcagtcactacgattatttcgggaagtttgcctggctagtgaaaggtcaactgtagatgctgaagctgtccataaattgctgactttgattaaggaattatagactgactacattggaagctttgagttgacttctgaccaaaggtggtaaattcagacaacattatgatctaataaactttattttttaaaaatga

SEQ ID NO: 283619 - DNA, 1000 bp, Homo Sapiens; identical to SEQ ID NO: 220499

SEQ ID NO: 283620 - DNA, 583 bp, Homo Sapiens
acactcgcttctggaacgtctgaggttatcaataagctcctagtccagacgccatgggtcatttcacagaggaggacaaggctactatcacaagcctgtggggcaaggtgaatgtggaagatgctggaggagaaaccctgggaaggctcctggttgtctacccatggacccagaggttctttgacagctttggcaacctgtcctctgcctctgccatcatgggcaaccccaaagtcaaggcacatggcaagaaggtgctgacttccttgggagatgccataaagcacctggatgatctcaagggcacctttgcccagctgagtgaactgcactgtgacaagctgcatgtggatcctgagaacttcaagctcctgggaaatgtgctggtgaccgttttggcaatccatttcggcaaagaattcacccctgaggtgcaggcttcctggcagaagatggtgactggagtggccagtgccctgtcctccagataccactgagctcactgcccatgatgcagagctttcaaggataggctttattctgcaagcaatcaaataataaatctattctgctaagagatcac

SEQ ID NO: 283621 - DNA, 1000 bp, Homo Sapiens; identical to SEQ ID NO: 115096

SEQ ID NO: 283622 - DNA, 1000 bp, Homo Sapiens
attttaaatgttttacaagaattgtccatgtgcttccctaggctgagctggcattggtctgctgacctgtttttgtgtttttcttttttttatacacaacatttatttcaaactattgggagggatgagagtggcttaaaaacttccatccctacttttcaagagtgcagttgattctgaatctgaaagcccgcctctgtcctaaaatacaaacaagcacagacattaaacctggatactatatgataaagagggatgtaactattgaattggatacaaggatcagaatggaaagaaactcacgatgaaattgaacctggtttttgtatatttatcaaacttgtgctgagaatagtgtctgattatacgacttttaagcaaagttgggtgtaattaggtgaaaacagcccaggtcctcccgggagcacagaggggctaggggctggtccttctcgtttgctctagtcttgctttgctgtctggtgtagctcctctgctgctcccatctgcactaattgacccaaaacgtgggtatttcctgctacacaaaagccaaaaggtttcatgtagattttagttcactaaagggtgcccacaaaatagagattaattttaacttaaattttaagcttgaagattaggtactatctgtgaagttacacttttttttttttttttaaaggtagagatgtgtgtgtgtgtaggtattaaagatgtgttgttggtttccaaaaaggaacactggaaaataaattttgaatgtttatgttctcagaatcaggttgacagtcccttgctgacatggctttgctttgtgtaaatacagtggatctcaatcttcggggtgtgatgaatagcgaatcatctcaaatccttgagcactcagtctagtgaagatgttgtcattatgtacaatacataactagtttaattaactatgtgatgttaactattattaataaattttaacattttccaaaataaaaaaaaaaaaaaaaaa

SEQ ID NO: 283623 - DNA, 1000 bp, Homo Sapiens
ttctactcaatgggctgctacgagatctccctgggggacaccattggtgtgggcaccccagggatcatgaaagacatgctatctgctgtcatgcaggaagtgcctctggctgccctggctgtccactgccatgacacctatggtcaagccctggccaacaccttgatggccctgcagatgggagtgagtgtcgtggactcttctgtggcaggacttggaggctgtccctacgcacagggggcatcaggaaacttggccacagaagacctggtctacatgctagagggcttgggcattcacacgggtgtgaatctccagaagcttctggaagctggaaactttatctgtcaagccctgaacagaaaaactagctccaaagtggctcaggctacctgtaaactctgagccccttgcccacctgaagccctggggatgatgtggaaataggggcacacacagatgattcatggatggggacatggaaatgagaataggttaaatggtgcaggtacctcatagccagctctacacagaggtctctcctggcagaaagcaggcgaagggcaggaggagctgcttggcagaaggacctcctgcccagacctgaggagtgagaggctttgagggctgaagtctccctttgttacggaccctggcccaggagttgaatgcctgaggacgtgtgggaaccccgttccctacttagcatgatccttgagtctcctctctggatggaatccgcgagctggccacctggccaccctctacacggctccaccctgccatggccgtggggcccttgctctctgacttctcaggacacaggtcatggaggttcttcccaagctggcagaggccatttgtggaaagtggagagctacgtggtggccgtctgccaactccagcatctctggaaaatctccacgctgaatgtgatttttgaaaacagcttatgtaattaaaggttgaatggcacatcataattccagcaaaaaaaaaa

SEQ ID NO: 283624 - DNA, 1000 bp, Homo Sapiens; identical to SEQ ID NO: 220502

SEQ ID NO: 283625 - DNA, 1000 bp, Homo Sapiens; identical to SEQ ID NO: 220503

SEQ ID NO: 283626 - DNA, 1000 bp, Homo Sapiens
gcactgccgtcatggcaggggacacagttgtccttgtgtctgaaccatgtcccagcacgggaattctagacatacgtggtctgcggacagggcagtgcccccagcccaggacaagggagtcttgttttctggcttggtttggggacctgcaaatgggaggcctgaggccctcttcaggctttggcagccacagatacttctgaacccttcacagagagcaggcaggggcttcggtgccgcgtgggcagtacgcaggtcccaccgacactcacctgggagcacggcgcctggctcttaccagcgtctggcctagaggaagcctttgagcgacctttgggcaggtttctgcttcttctgttttgccccatggtcaagtccctgttccccaggcaggtttcagctgattggcagcaggctccctgagtgatgagcttgaacctgtggtgtttctgggcagaagcttatcttttttgagagtgtccgaagatgaaggcatggcgatgcccgtcctctggcttgggttaattcttcggtgacactggcattgctgggtggtgatgcccgtcctctggcttgggttaattcttcggtgacactggcgttgctgggtggcaatgcccgtcctctggcttgggctaattcttcggtgacactggcgttgctgggtggcgatgcccgtcctctggcttgggttaattcttggatgacgtcggcgttgctgggagaatgtgccgttcctgccctgcctccacccacctcgggagcagaagcccggcctggacacccctcggcctggacacccctcgaaggagagggcgcttccttgagtaggtgggctccccttgcccttccctccctatcactccatactggggtgggctggaggaggccacaggccagctattgtaaaagctttttattttagtaaaatatacagaagttaaaaaaaaaaaaaaaaaaaaaaaaaaaaaaaaaaaaaaaaaaaaaaaaaaaaaaaaaa

SEQ ID NO: 283627 - DNA, 524 bp, Homo Sapiens
atctcttgagacttcacttcagcttcactgacttctggattctcctcttgagtaaaaggactcagccaactatgaagttttttgtttttgctttaatcttggctctcatgctttccatgactggagctgattcacatgcaaagagacatcatgggtataaaagaaaattccatgaaaagcatcattcacatcgaggctatagatcaaattatctgtatgacaattgatatcttcagtaatcatggggcatgattatggaggtttgactggcaaattcgctttggactcgtgtattctcatttgtcataccgcatcacactaccactgctttttgaagaattatcataaggcaatgcagaataaaagaaataccatgatttagtgaattctgtgtttcaggatacttcccttcctaattatcatttgattagatacttgcaatttaaatgttaagctgttttcactgctgtttctgagtaatagaaattcattcctctccaaaagcaataaaattcaagcacatt

SEQ ID NO: 283628 - DNA, 1000 bp, Homo Sapiens
ctgggaaatactgaaacttgctgcctattgggtatgctgaggcccacagacttacagaagaagtggccctccatagacatgtgtagcatcaaaacacaaaggcccacacttcctgacggatgccagcttgggcactgctgtctactgaccccaacccttgatgatatgtatttattcatttgttattttaccagctatttattgagtgtcttttatgtaggctaaatgaacataggtctctggcctcacggagctcccagtccatgtcacattcaaggtcaccaggtacagttgtacaggttgtacactgcaggagagtgcctggcaaaaagatcaaatggggctgggacttctcattggccaacctgcctttccccagaaggagtgatttttctatcggcacaaaagcactatatggactggtaatggttcacaggttcagagattacccagtgaggccttattcctcccttccccccaaaactgacacctttgttagccacctccccacccacatacatttctgccagtgttcacaatgacactcagcggtcatgtctggacatgagtgcccagggaatatgcccaagctatgccttgtcctcttgtcctgtttgcatttcactgggagcttgcactattgcagctccagtttcctgcagtgatcagggtcctgcaagcagtggggaagggggccaaggtattggaggactccctcccagctttggaagggtcatccgcgtgtgtgtgtgtgtgtatgtgtagacaagctctcgctctgtcacccaggctggagtgcagtggtgcaatcatggttcactgcagtcttgaccttttgggctcaagtgatcctcccacctcagcctcctgagtagctgggaccataggctcacaacaccacacctggcaaatttgattttttttttttttttcagagacggggtctcgcaacattgcccagacttcctttgtgttagttaataaagctttctcaactgcc
